(19) United States
(12) Patent Application Publication
(10) Pub. No.: US 2014/0255922 A1
(43) Pub. Date: Sep. 11, 2014

(54) Cotton polymorphisms and methods of genotyping

(71) Applicants: Kunsheng Wu, Ballwin, MO (US); John LeDeaux, Creve Coeur, MO (US); David Butruille, Des Moines, IA (US); Anju Gupta, Ankeny, IA (US); Richard Johnson, Urbana, IL (US); Sam Eathington, Ames, IA (US); Jason Bull, Wildwood, MO (US); Marlin Edwards, Davis, CA (US); Jinhua Xiao, Ballwin, MO (US); Shaolin Liu, Lubbock, TX (US); Paul McLaird, Lenexa, KS (US)

(72) Inventors: Kunsheng Wu, Ballwin, MO (US); John LeDeaux, Creve Coeur, MO (US); David Butruille, Des Moines, IA (US); Anju Gupta, Ankeny, IA (US); Richard Johnson, Urbana, IL (US); Sam Eathington, Ames, IA (US); Jason Bull, Wildwood, MO (US); Marlin Edwards, Davis, CA (US); Jinhua Xiao, Ballwin, MO (US); Shaolin Liu, Lubbock, TX (US); Paul McLaird, Lenexa, KS (US)

(73) Assignee: Monsanto Technology LLC, St. Louis, MO (US)

(21) Appl. No.: 12/157,970

(22) Filed: Jun. 13, 2008

Related U.S. Application Data
(60) Provisional application No. 60/934,619, filed on Jun. 14, 2007.

(51) Int. Cl. C12Q 1/68; C40B 40/06; C07H 21/00

(52) U.S. Cl. 435/6.11; 506/16; 536/24.3

(57) ABSTRACT

Polymorphic cotton DNA loci useful for genotyping between at least two varieties of cotton. Sequences of the loci are useful for providing the basis for designing primers and probe oligonucleotides for detecting polymorphisms in cotton DNA. Polymorphisms are useful for genotyping applications in cotton. The polymorphic markers are useful to establish marker/trait associations, e.g. in linkage disequilibrium mapping and association studies, positional cloning and transgenic applications, marker-aided breeding and marker-assisted selection, hybrid prediction and identity by descent studies. The polymorphic markers are also useful in mapping libraries of DNA clones, e.g. for cotton QTLs and genes linked to polymorphisms.

### CROSS-REFERENCE TO RELATED APPLICATIONS

[0001] This application claims priority to U.S. Provisional Patent Application No. 60/934,619, filed Jun. 14, 2007.

### STATEMENT REGARDING FEDERALLY SPONSORED RESEARCH OR DEVELOPMENT

[0002] Not Applicable.

### INCORPORATION OF SEQUENCE LISTING AND TABLES

[0003] The sequence listing and a computer readable form (CRF) of the sequence listing are provided herein on CD-ROMs, each containing the file named “46-21(54583). SEQLIST.txt”, which is 16497573 bytes (measured in MS-Windows), all of which were created on Jun. 7, 2007, are herein incorporated by reference. Two copies of Table 1 and Table 3 are also provided herein on CD-ROMs, containing the files named “Table 1” (Copy 1 and Copy 2), which is 32288573 bytes (measured in MS-Windows), created on Jun. 7, 2007 and “Table 3” (Copy 1 and Copy 2), which is 42038 bytes (measured in MS-Windows), created on May 15, 2008, are herein incorporated by reference.

### BACKGROUND OF THE INVENTION

[0004] 1. Field of the Invention

[0005] Disclosed herein are cotton polymorphisms, nucleic acid molecules related to such polymorphisms and methods of using such polymorphisms and molecules as molecular markers, e.g. in genotyping.

[0006] 2. Related Art

[0007] Polymorphisms are useful as molecular markers, also termed genetic markers, for genotyping-related applications in the agriculture field, e.g. in plant genetic studies and commercial breeding. Such uses of polymorphisms are described in U.S. Pat. Nos. 5,385,835; 5,437,697; 5,385,835; 5,492,547; 5,746,023; 5,962,764; 5,981,832 and 6,100,030.

[0008] In particular, the use of molecular markers in breeding programs has accelerated the genetic accumulation of valuable traits into a germplasm compared to that achieved based on phenotypic data only. Herein, “germplasm” includes breeding germplasm, breeding populations, collection of elite inbred lines, populations of random mating individuals, and biparental crosses. Molecular marker alleles (an “allele” is an alternative sequence at a locus) are used to identify plants that contain a desired genotype at multiple loci, and that are expected to transfer the desired genotype, along with a desired phenotype to their progeny. Molecular marker alleles can be used to identify plants that contain the desired genotype at one marker locus, several loci, or a haplotype, and that would be expected to transfer the desired genotype, along with a desired phenotype to their progeny.

[0009] The highly conserved nature of DNA, combined with the rare occurrences of stable polymorphisms, provide molecular markers which can be both predictable and discerning of different genotypes. Among the classes of existing molecular markers are a variety of polymorphisms indicating genetic variation including restriction-fragment-length polymorphisms (RFLPs), amplified fragment-length polymorphisms (AFLPs), simple sequence repeats (SSRs), single feature polymorphisms (SFPs), single nucleotide polymorphisms (SNPs) and insertion/deletion polymorphisms (Indels).

[0010] Molecular markers vary in their stability and genomic abundance. SNPs are particularly useful as molecular markers because they are more stable than other polymorphisms and are abundant in plant genomes (Bi et al. Crop Sci. 46:12-21 (2006), Kornberg, DNA Replication, W.H. Freeman & Co., San Francisco (1980)). Because the number of molecular markers for a plant species is limited, the discovery of additional molecular markers is critical for genotyping applications including marker-trait association studies, gene mapping, gene discovery, marker-assisted selection and marker-assisted breeding. The discovery and identification of polymorphisms for use as molecular markers requires a substantial sequencing and bioinformatics effort, requiring large scale sequencing from two or more evolutionarily diverged lines or populations.

[0011] Evolving technologies make certain molecular markers more amenable for rapid, large scale use. In particular, technologies such as high-throughput screening for SNP detection indicate that SNPs may be preferred molecular markers.

### SUMMARY OF THE INVENTION

[0012] It is in view of the above problems that the present invention was developed. This invention provides a series of molecular markers for cotton. These molecular markers comprise cotton DNA loci which have been discovered by direct sequence analysis of cotton genomic DNA. These molecular markers are useful for a variety of genotyping applications. A polymorphic cotton locus of this invention comprises at least 12 consecutive nucleotides which include or are adjacent to a polymorphism which is identified herein, e.g. in Table 1 or Table 3. As indicated in Table 1 the nucleic acid sequences of SEQ ID NO: 1 through SEQ ID NO: 14832 comprise one or more polymorphisms, e.g. single nucleotide polymorphisms (SNPs) and insertion/deletion polymorphisms (Indels). As indicated in Table 3, certain polymorphisms identified herein have also been mapped to certain cotton chromosomes.

[0013] The invention first provides for libraries of nucleic acid molecules that comprise at least two distinct sets of nucleic acid molecules wherein each of said distinct sets of nucleic acid molecules permits typing of a corresponding cotton genomic DNA polymorphism identified in Table 1 or Table 3. In certain embodiments of this aspect of the invention, the library comprises two or more distinct sets of nucleic acid molecules are arrayed on at least one solid support or on at least one microtiter plate. The distinct sets of nucleic acid molecules can be located in a separate and distinct well of a microtiter plate. The distinct sets of nucleic acids can also be located at a distinct interrogation position on the solid support.

[0014] Libraries where the nucleic acid molecules are combined in a single mixture are also contemplated. In still other embodiments of the invention, the libraries can comprise at least 8, at least 24, at least 96, or at least 384 distinct sets of nucleic acid molecules wherein each of the sets of nucleic acid molecules permit typing of a corresponding distinct cotton genomic DNA polymorphism identified in Table 1 or Table 3. Libraries comprising sets of nucleic acid molecules that permit typing of cotton genomic DNA polymorphisms identified in Table 3 that are selected from the group consisting of SEQ ID NO: 287, 562, 3134, 2996, 1146, 1906, 3858, 1477, 961, 4606, 1190, 1200, 28, 4742, 7368, 5199, 1762, and 6884 are contemplated. In another embodiment, libraries comprising sets of nucleic acid molecules that permit typing of cotton genomic DNA polymorphisms identified in Table 3 that are selected from the group consisting of SEQ ID NO: 14569, 10965, 11455, 12344, 2645, 10925, and 9279 are contemplated.

[0015] The distinct sets of nucleic acid molecules in the libraries can comprise a nucleic acid molecule of at least 12 consecutive nucleotides that include or are immediately adjacent to a corresponding polymorphism identified in Table 1 and wherein the sequence of at least 12 consecutive nucleotides is at least 90% identical to the sequence of the same number of nucleotides in either strand of a segment of cotton DNA which includes or is immediately adjacent to said polymorphism. In other embodiments, the nucleic acid molecule is of at least 15 consecutive nucleotides or of at least 18 consecutive nucleotides. The nucleic acid molecules can further comprise a detectable label or provide for incorporation of a detectable label. This detectable label can be selected from the group consisting of an isotope, a fluorophore, an oxidant, a reductant, a nucleotide and a hapten. Detectable labels can be added to the nucleic acid by a chemical reaction or incorporated by an enzymatic reaction.

[0016] The distinct sets of nucleic acid molecules can also comprise: (a) a pair of oligonucleotide primers wherein each of said oligonucleotide primers comprises at least 15 nucleotide bases and permit PCR amplification of a segment of DNA containing one of said corresponding polymorphisms identified in Table 1 or Table 3, and (b). at least one detector nucleic acid molecule that permits detection of a polymorphism in said amplified segment in (a). In such distinct sets of nucleic acids, the detector nucleic acid comprises at least 12 nucleotide bases or comprises at least 12 nucleotide bases and a detectable label, and wherein the sequence of said detector nucleic acid molecule is at least 95 percent identical to a sequence of the same number of consecutive nucleotides in either strand of a segment of cotton DNA in a locus of claim 1 comprising said polymorphism.

[0017] The invention also provides computer readable media having recorded thereon at least two cotton genomic DNA polymorphisms identified in Table 1 or Table 3. In other embodiments, at least 8 of the cotton genomic DNA polymorphisms identified in Table 1 or Table 3 are recorded on the computer readable media. Computer readable medium having recorded thereon at least two cotton genomic DNA polymorphisms identified in Table 3 and a corresponding genetic map position for each of said cotton genomic DNA polymorphisms are also provided. In other embodiments, at least 8 of the cotton genomic DNA polymorphisms and corresponding genetic map positions are recorded on the computer readable media.

The invention also provides a computer based system for reading, sorting or analyzing cotton genotypic data that comprises the following elements: (a) a data storage device comprising a computer readable medium wherein at least two cotton genomic DNA polymorphisms identified in Table 1 or Table 3 are recorded thereon; b) a search device for comparing a cotton genomic DNA sequence from at least one test cotton plant to said polymorphism sequences of the data storage device of step (a) to identify homologous or non-homologous sequences; and, (c) a retrieval device for identifying said homologous or non-homologous sequences(s) of said test cotton genomic sequences of step (b). In other embodiments, at least 96 cotton genomic DNA polymorphisms identified in Table 1 or Table 3 are recorded on the computer readable medium in the computer based system. In still other embodiments, the data storage device can further comprise computer readable medium wherein phenotypic trait data from at least one of said test cotton plants is recorded thereon. The data storage device can also further comprise computer readable medium wherein data associating an allelic state with a parent, progeny, or tester cotton plant is recorded thereon. Computer based systems wherein a plurality of mapped cotton genomic DNA polymorphisms identified in Table 3 are recorded on the computer readable medium and wherein the computer readable medium further comprises genetic map location data for each of said mapped polymorphisms are also contemplated.

[0018] Isolated nucleic acid molecules for detecting polymorphisms in cotton genomic DNA identified in Table 1 and Table 3 are also provided. Isolated nucleic acid molecules for detecting a molecular marker representing a polymorphism in cotton DNA identified in Table 1 or Table 3 that comprise at least 15 nucleotides that include or are immediately adjacent to the polymorphism and are at least 90 percent identical to a sequence of the same number of consecutive nucleotides in either strand of DNA that include or are immediately adjacent to said polymorphism are contemplated. Isolated nucleic acids of the invention can further comprise a detectable label or provides for incorporation of a detectable label. The detectable label can be selected from the group consisting of an isotope, a fluorophore, an oxidant, a reductant, a nucleotide and a hapten. The detectable label can be added to the nucleic acid by a chemical reaction or incorporated by an enzymatic reaction. The isolated nucleic acid can detect a polymorphism in Table 3 selected from the group consisting of SEQ ID NO: 287, 562, 3134, 2996, 1146, 1906, 3858, 1477, 961, 4606, 1190, 1200, 28, 4742, 7368, 5199, 1762, and 6884. In another embodiment, the isolated nucleic acid can detect a polymorphism in Table 3 selected from the group consisting of SEQ ID NO: 14569, 10965, 11455, 12344, 2645, 10925, and 9279.

[0019] Other isolated oligonucleotide compositions comprising more than one isolated nucleic acid that are useful for typing the cotton polymorphisms of Table 1 or Table 3. Such isolated oligonucleotide compositions can be used to type the SNP polymorphisms by either Taqman® assay or Flap Endonuclease-mediated (Invader®) assays. In one embodiment the isolated nucleic acid composition is a set of oligonucleotides comprising: (a) a pair of oligonucleotide primers wherein each of said primers comprises at least 12 contiguous nucleotides and wherein said pair of primers permit PCR amplification of a DNA segment comprising a cotton genomic DNA polymorphism locus identified in Table 1 or Table 3; and (b) at least one detector oligonucleotide that permits detection of a polymorphism in said amplified segment, wherein the sequence of said detector oligonucleotide is at least 95 percent identical to a sequence of the same number of consecutive nucleotides in either strand of a segment of cotton DNA that include or are immediately adjacent to said polymorphism of step (a). In the set of oligonucleotides, the detector oligonucleotide comprises at least 12 nucleotides and either provides for incorporation of a detectable label or further comprises a detectable label. The detectable label can be selected from the group consisting of an isotope, a fluorophore, an oxidant, a reductant, a nucleotide and a hapten. Isolated polynucleotide compositions for typing the disclosed polymorphisms with Flap Endonuclease-mediated (Invader®) assays are also provided. Such compositions for use in Flap Endonuclease-mediated assays comprise at least two isolated nucleic acid molecules for detecting a molecular marker representing a polymorphism in cotton DNA, wherein a first nucleic acid molecule of the composition comprises an oligonucleotide that includes the polymorphic nucleotide residue and at least 8 nucleotides that are immediately adjacent to a 3′ end of said polymorphic nucleotide residue, wherein a second nucleic acid molecule of the composition comprises an oligonucleotide that includes the polymorphic nucleotide residue and at least 8 nucleotides that are immediately adjacent to a 5′ end of said polymorphic nucleotide residue, and wherein the polymorphism is identified in Table 1 or Table 3.

[0020] Various methods for genotyping cotton plants to select a parent plant, a progeny plant or a tester plant for breeding are also provided. In one embodiment, the method of genotyping a cotton plant to select a parent plant, a progeny plant or a tester plant for breeding comprises the steps of: a. obtaining a DNA or RNA sample from a tissue of at least one cotton plant; b. determining an allelic state of at least one cotton genomic DNA polymorphism identified in Table 1 or Table 3 for said sample from step (a), and c. using said allelic state determination of step (b) to select a parent plant, a progeny plant or a tester plant for breeding. This method of genotyping can be performed to type a mapped polymorphism identified in Table 3. The allelic state of polymorphisms can be determined by an assay permitting identification of a single nucleotide polymorphism in this genotyping method. Single nucleotide polymorphism assays used in this method can be selected from the group consisting of single base extension (SBE), allele-specific primer extension sequencing (ASPE), DNA sequencing, RNA sequencing, microarray-based analyses, universal PCR, allele specific extension, hybridization, mass spectrometry, ligation, extension-ligation, and Flap Endonuclease-mediated assays. In certain embodiments of this method, an allelic state of at least 8, at least 48, at least 96, or at least 384 distinct polymorphisms identified in Table 1 or Table 3 are determined.

[0021] The methods of genotyping can also further comprise the step of storing resultant genotype data for said one or more allelic state determinations on a computer readable medium and/or further comprise the step of comparing genotype data from one cotton plant to another cotton plant. Genotype data can also be compared to phenotypic trait data or phenotypic trait index data for at least one of said cotton plants in certain embodiments of the methods that comprise those additional steps. Genotype data can also be compared to phenotypic trait data or phenotypic trait index data for at least two of said cotton plants and determining one or more associations between said genotype data and said phenotypic trait data in certain embodiments of the methods that comprise those additional steps. In still other embodiments of methods wherein associations are determined for said phenotype trait data or phenotypic trait index data to said genotypic trait data, the genotypic trait data comprises allelic state determinations for at least 10 mapped polymorphisms identified in Table 3. Methods of genotyping wherein the cotton genomic DNA polymorphism in step (b) is selected from the group consisting of SEQ ID NO: 287, 562, 3134, 2996, 1146, 1906, 3858, 1477, 961, 4606, 1190, 1200, 28, 4742, 7368, 5199, 1762, and 6884 are specifically contemplated. Methods of genotyping where the cotton genomic DNA polymorphism in step (b) is selected from the group consisting of SEQ ID NO: 14569, 10965, 11455, 12344, 2645, 10925, and 9279 are also specifically contemplated. These genotyping methods also include specific applications where: 1) the cotton genomic polymorphism is SEQ ID NO: 14569 and wherein an association with a yield trait or yield trait value is determined; 2) the cotton genomic polymorphism is SEQ ID NO: 14569 and an association with yield QTL G75Y is determined; 3) the cotton genomic polymorphism is SEQ ID NO: 10965 and an association with the MON88913 glyphosate tolerant transgene insertion site is determined; 4) the cotton genomic polymorphism is SEQ ID NO: 11455 and wherein an association with a yield trait or yield trait value is determined; 5) the cotton genomic polymorphism is SEQ ID NO: 11455 and an association with a yield QTL conditioning trait 669Yc is determined; 6) the cotton genomic polymorphism is SEQ ID NO: 12344 and an association with a yield trait or yield trait value is determined; 7) the cotton genomic polymorphism is SEQ ID NO: 12344 and an association with a yield QTL 669Y is determined; 8) the cotton genomic polymorphism is SEQ ID NO: 2645 and an association with the MON531 insect resistant transgene insertion site is determined; 9) the cotton genomic polymorphism is SEQ ID NO: 10925 and an association with the MON15985X insect resistant transgene insertion site is determined; and 10) the cotton genomic polymorphism is SEQ ID NO: 9279 and an association with root knot nematode resistance is determined.

[0022] Methods of breeding cotton plants are also contemplated. The methods of breeding cotton plants comprise the steps of: (a) identifying trait values for at least one trait associated with at least two haplotypes in at least two genomic windows of up to 10 centimorgans for a breeding population of at least two cotton plants; (b) breeding two cotton plants in said breeding population to produce a population of progeny seed; (c) identifying an allelic state of at least one polymorphism identified in Table 1 or Table 3 in each of said windows in said progeny seed to determine the presence of said haplotypes; and (d) selecting progeny seed having a higher trait value for at least one trait associated with the determined haplotypes in said progeny seed, thereby breeding a cotton plant. In certain embodiments of these breeding methods, trait values are identified for at least one trait associated with at least two haplotypes in each adjacent genomic window over essentially the entirety of each chromosome. The trait value can identify a trait selected from the group consisting of herbicide tolerance, disease resistance, insect or pest resistance, altered fatty acid, protein or carbohydrate metabolism, increased lint yield, boll distribution, fiber quality, increased oil, increased nutritional content, increased growth rates, enhanced stress tolerance, preferred maturity, enhanced organoleptic properties, altered morphological characteristics, other agronomic traits, traits for industrial uses, or traits for improved consumer appeal, or a combination of traits as a multiple trait index. In other embodiments of these breeding methods, progeny seed is selected for a higher trait value for yield for a haplotype in a genomic window of up to 10 centimorgans in each chromosome. In methods where the trait value is for the yield trait and trait values are ranked for haplotypes in each window; a progeny seed can be selected which has a trait value for yield in a window that is higher than the mean trait value for yield in said window. In still other embodiments of the method, the polymorphisms in the haplotypes are in a set of DNA sequences that comprises all of the DNA sequences of SEQ ID NO: 1 through SEQ ID NO: 14832.

[0023] Methods for selecting a parent, progeny, or tester plant for breeding are also provided. These methods for selecting a parent, progeny, or tester plant for plant breeding comprise the steps of: a) determining associations between a plurality of polymorphisms identified in Table 1 or Table 3 and a plurality of traits in at least a first and a second inbred line of cotton; b) determining an allelic state of one or a plurality of polymorphism in a parent, progeny or tester plant; c) selecting the parent, progeny or tester that has a more favorable combination of associated traits. In certain embodiments, the parent, progeny or tester plant is an inbred cotton line. A favorable combination of associated traits selected in the parent, progeny or tester can be a parent, progeny or tester that provides for improved heterosis.

[0024] Methods for improving heterosis are also provided. The methods for improving heterosis comprise the steps of: (a) determining associations between a plurality of polymorphisms identified in Table 1 or Table 3 and a plurality of traits in more than two inbred lines of cotton; (b) assigning two inbred lines selected from the inbred lines of step (a) to heterotic groups, (c) making at least one cross between at least two inbred lines from step (b), wherein each inbred line comes from a distinct and complementary heterotic group and wherein the complementary heterotic groups are optimized for genetic features that improve heterosis; and (d) obtaining a hybrid progeny plant from said cross in step (c), wherein said hybrid progeny plant displays increased heterosis relative to progeny derived from a cross with an unselected inbred line.

[0025] Methods of genotyping cotton to select a parent plant, a progeny plant or a tester plant for breeding wherein a plurality of distinct sets of nucleic acids are used to type a plurality of distinct polymorphisms that map to a plurality of genomic loci are also provided. These methods of genotyping a cotton plant to select a parent plant, a progeny plant or a tester plant for breeding comprise the steps of: (a) obtaining a DNA or RNA sample from a tissue of at least one cotton plant; (b) determining an allelic state of a set of cotton genomic DNA polymorphisms comprising at least two polymorphisms identified in Table 1 or Table 3 for said sample from step (a), wherein said allelic state is determined with a set of nucleic acid molecules that provide for typing of said cotton genomic DNA polymorphisms; and c. using said allelic state determination of step (b) to select a parent plant, a progeny plant or a tester plant for breeding. However, other embodiments of the method provide for determining the allelic state of at least 5, at least 10, or at least 20 polymorphisms identified in Table 1 or Table 3. The set of cotton genomic DNA polymorphisms can comprise at least 2 polymorphisms selected from the group consisting of SEQ ID NO: 287, 562, 3134, 2996, 1146, 1906, 3858, 1477, 961, 4606, 1190, 1200, 28, 4742, 7368, 5199, 1762, and 6884. The set of cotton genomic DNA polymorphisms can also comprise at least 2 polymorphisms selected from the group consisting of SEQ ID NO: 287, 562, 3134, 2996, 1146, 1906, 3858, 1477, 961, and 4606. Alternatively, the cotton genomic DNA polymorphisms can also comprise at least 2 polymorphisms selected from the group consisting of SEQ ID NO: 287, 562, 3134, 2996, and 1146. In one embodiment, the set of cotton genomic polymorphisms comprise the polymorphisms SEQ ID NO: 287 and 562. In this method, the set of cotton genomic DNA polymorphisms can be associated with trait values identified for at least one of yield, boll distribution, fiber quality, lodging, maturity, plant height, drought tolerance and cold germination. Genotyping methods where the set of cotton genomic DNA polymorphisms are associated with a high PIC value are particularly contemplated. In one embodiment, the polymorphisms associated with a high PIC value are selected from the group consisting of SEQ ID NO: 287, 562, 3134, 2996, 1146, 1906, 3858, 1477, 961, 4606, 1190, 1200, 28, 4742, 7368, 5199, 1762, and 6884. Polymorphisms selected from the group consisting of SEQ ID NO: 287, 562, 3134, 2996, 1146, 1906, 3858, 1477, 961, 4606, 1190, 1200, 28, 4742, 7368, 5199, 1762, and 6884 are associated with a high PIC value.

[0026] Additionally, the set of cotton genomic DNA polymorphisms can comprise at least 2 polymorphisms selected from the group consisting of SEQ ID NO: 14569, 10965, 11455, 12344, 2645, 10925, and 9279. In this method, the set of cotton genomic DNA polymorphisms can be associated with traits or trait values identified for at least one of lint yield, fiber quality, boll distribution, a transgene for insect resistance, a transgene for herbicide tolerance, disease resistance, nematode resistance, lodging, maturity, plant height, drought tolerance and cold germination. Genotyping methods where the set of cotton genomic DNA polymorphisms are associated with a linked trait of interest are particularly contemplated. Polymorphisms selected from the group consisting of SEQ ID NO: 14569, 10965, 11455, 12344, 2645, 10925, and 9279 are associated with a linked trait of interest selected from the group consisting of lint yield, fiber quality, boll distribution, a transgene for insect resistance, a transgene for herbicide tolerance, disease resistance, and nematode resistance.

[0027] Methods of genotyping cotton to select a parent plant, a progeny plant or a tester plant for breeding wherein a plurality of distinct sets of nucleic acids are used to type a plurality of distinct polymorphisms that map to a plurality of genomic loci distributed across the genome of cotton are also provided. In these methods, a set of at least 20 cotton genomic DNA polymorphisms identify polymorphisms that are distributed across the genome of cotton are typed. In certain embodiments of this method, the set of at least 20 cotton genomic DNA polymorphisms that are typed identify polymorphisms that are distributed across a single chromosome of cotton or are distributed across at least two chromosomes of cotton or at least five chromosomes of cotton. In still other embodiments of this method, the set of at least 20 cotton genomic DNA polymorphisms identify polymorphisms that are distributed across a plurality of chromosomes of cotton. When 26 cotton genomic DNA polymorphisms are distributed across a plurality chromosomes of cotton, they can be distributed such that at least 1 of the polymorphisms in the set maps to each chromosome such that at least 1 of said polymorphisms in said set maps to each chromosome. However, this method where at least polymorphisms in the set maps to each chromosome can also employ more polymorphisms, such that at least 10 of the cotton genomic DNA polymorphisms in the set map to each chromosome. In other embodiments, at least 20 or at least 50 of the cotton genomic DNA polymorphisms in the set map to each chromosome. In certain embodiments of the methods, at least one polymorphism maps to chromosome 1 and can be selected from the group consisting of SEQ ID NO: 4869, 4388, 12371, 12683, 13196, 1253, 1582, 6086, 7865, 13321, 14421, 13023, 9775, 7542, 14121, 2053, 262, 287, 13644, 4177, 7957, 11552, 12626, 7251, 4333, 3615, 1744, 7513, 11762, 6963, 12675, 2897, 3545, 14401, 1302, 14341, 14569, 2863, 12613, 12742, 1346, 2014, 2320, 11831, 7582, 12673, 9670, 1375, 6212, 9598, 5243, 1025, 3449, 8847, 13992, 6346, 12290, 2240, 5066, 12806, 748, 4037, 764, 2935, 5750, 3477, 1637, 9004, 1143, 2682, 5257, 7830, 13307, 8978, 5519, 5364, 9683, 1289, 4879, 13674, 6202, 5022, 1200, 6283, 7049, 8312, 2274, 8588, 9941, 4548, 773, 7419, 12478, and 2197.

[0028] In other embodiments of the method, at least one polymorphism maps to chromosome 2 is selected from the group consisting of SEQ ID NO: 5092, 10877, 543, 5612, 9199, 11957, 12466, 953, 9006, 6718, 4861, 3068, 11702, 11803, 13694, 8566, 4991, 8260, 2565, 14051, 11559, 5234, 1579, 8166, 3760, 3858, 10911, 11453, 13029, 13570, 3342, 1678, 12164, 11601, 11799, 13519, 943, 13747, 3511, 2601, 3184, 4734, 9256, 7585, 11614, 2388, 9431, 11497, 6022, 12904, 7009, 3989, 8477, 13598, 2498, 8374, 9944, 11455, 7142, and 9091.

[0029] In other embodiments of the method, at least one polymorphism maps to chromosome 3 is selected from the group consisting of SEQ ID NO: 6538, 7958, 1448, 4741, 5768, 2357, 7324, 7992, 562, 8447, 5438, 5492, 12800, 2775, 10263, 8739, 12762, 2932, 5154, 12348, 1202, 2103, 9652, 11791, 3917, 13374, 13173, 3771, 5799, 6186, 13172, 879, 12567, 9078, 6059, 6559, 163, 14417, 4702, 5199, 13101, 2996, 12631, 9279, 6864, 8563, 2635, 2681, 5908, 1227, and 5297.

[0030] In other embodiments of the method, at least one polymorphism maps to chromosome 4 is selected from the group consisting of SEQ ID NO: 10977, 9547, 2667, 1943, 2306, 2046, 5797, 747, 1645, 11230, 9869, 12264, 9422, 991, 5808, 2516, 681, 7532, 11544, 8740, 10010, 563, 13736, 45, 8888, 13004, 11422, 6, 12161, 11400, 14720, 1915, 4896, 3030, 13363, 4093, 7077, 7368, 7720, 7166, 8680, 9439, 4765, 8414, 9957, 14235, 7835, 4552, 14134, 13324, 5001, 13643, 1996, 12570, 11997, and 8670.

[0031] In other embodiments of the method, at least one polymorphism maps to chromosome 5 is selected from the group consisting of SEQ ID NO: 2162, 12660, 7345, 6435, 3802, 7864, 11909, 10450, 11008, 3832, 10671, 1063, 1556, 2474, 5677, 6999, 13167, 1790, 3400, 7400, 7052, 3176, 1454, 12265, 10187, 5972, 14358, 5721, 8449, 5746, 11176, 5009, 12150, 2526, 8965, 11683, and 10925.

[0032] In other embodiments of the method, at least one polymorphism maps to chromosome 6 is selected from the group consisting of SEQ ID NO: 14585, 4171, 13382, 1003, 4626, 13870, 213, 14102, 12101, 10321, 12929, 10965, 415, 11819, 14570, 4494, 7843, 7702, 6044, 1782, 3035, 4800, 3818, 8218, 9274, 9142, 929, 3206, 2588, 9158, 5595, 224, 9464, 2486, 5295, 1123, 13338, 11594, 13309, 4652, 7250, 1190, 11841, 14057, 12557, 5537, 4438, 8154, 12190, 9669, 12856, and 6214.

[0033] In other embodiments of the method, at least one polymorphism maps to chromosome 7 is selected from the group consisting of SEQ ID NO: 10828, 5376, 2216, 276, 8575, 13772, 5129, 12862, 11248, 1477, 2029, 153, 6702, 6473, 7885, 9829, 8262, 11505, 1780, 9028, 7237, 14540, 5886, 701, 4193, 12412, 2773, 9067, 12649, 10632, 6465, and 12490.

[0034] In other embodiments of the method, at least one polymorphism maps to chromosome 8 is selected from the group consisting of SEQ ID NO: 10463, 3671, 3717, 298, 3270, 14631, 5050, 1571, 1244, 8677, 13743, 13606, 254, 3789, 7313, 1827, 9766, 2923, 8273, 5463, 12889, 6397, 8462, 9460, 11193, 2352, 10358, 9131, 2733, 12008, 5488, 56, 9434, 945, 7034, 14560, 6065, 14167, 12948, 10301, 449, 11477, 13937, 12890, and 11379.

[0035] In other embodiments of the method, at least one polymorphism maps to chromosome 9 is selected from the group consisting of SEQ ID NO: 13185, 7411, 6772, 5559, 13461, 8201, 4742, 5618, 10019, 10304, 11480, 451, 13886, 13697, 11555, 4110, 11148, 11374, 9034, 2028, 7806, 11215, 3787, 12076, 7557, 1906, 891, 818, 5796, 3427, 13191, 11833, 2060, 1527, 3280, 1206, 10310, 7676, 5923, 12757, 8425, 851, 14372, 13950, 11078, 4459, 2629, 342, 8987, 2680, 2732, 10551, 8537, 11074, 14000, 12614, 6645, 3990, and 9959.

[0036] In other embodiments of the method, at least one polymorphism maps to chromosome 10 is selected from the group consisting of SEQ ID NO: 1111, 7030, 604, 4003, 2737, 9140, 11449, 12367, 13707, 10200, 8438, 7417, 8429, 1257, 2433, 7183, 6106, 10987, 638, 13708, 13840, 3898, 12344, 6631, 14665, 5038, 3940, 5502, 471, 1323, 2156, 12377, 14139, 14016, 7655, 927, 13819, 5260, 10351, 8925, 10271, 9052, 5555, 14042, 4134, 4606, 5804, 6990, 13452, 11099, 9964, 5086, 9859, 3173, 7637, 8404, 2121, and 13698.

[0037] In other embodiments of the method, at least one polymorphism maps to chromosome 11 is selected from the group consisting of SEQ ID NO: 10603, 6338, 6720, 9947, 5520, 11173, 2195, 10431, 13118, 3993, 949, 1306, 6884, 7556, 1786, 11950, 10561, 14353, and 7505.

[0038] In other embodiments of the method, at least one polymorphism maps to chromosome 12 is selected from the group consisting of SEQ ID NO: 11348, 12721, 4277, 13797, 1177, 13853, 4281, 13300, 9454, 13265, 154, 9328, 5310, 3574, 2537, 12401, 9128, 55, 299, 13822, 12978, 11502, 6771, 2921, 6301, 350, 13474, 442, 1978, 11130, 8053, 8284, 7489, 6480, 5329, 4298, 5306, 5008, 2213, 12851, 7905, 129, 12193, 11510, 14026, 3104, 2442, 2470, and 12478.

[0039] In other embodiments of the method, at least one polymorphism maps to chromosome 13 is selected from the group consisting of SEQ ID NO: 10871, 402, 5539, 12769, 472, 9363, 9788, 7577, 1229, 2574, 4084, 13617, 13207, 14410, 12447, 13171, 611, 12831, 10631, 3486, 3134, 10024, 1146, 8172, 3965, 4633, 12545, 11460, 5944, and 3474.

[0040] In other embodiments of the method, at least one polymorphism maps to chromosome 14 is selected from the group consisting of SEQ ID NO: 12693, 9430, 603, 2672, 2812, 3741, 13686, 5292, 12699, 11041, 255, 12474, 13856, 76, 1205, 11634, 107, 11349, 8682, 11787, 12839, 10128, 13584, 12569, 14133, 13901, 13631, 487, 1616, 4823, 2673, 11205, 11646, 12753, 3710, 5572, 12062, 9310, 4369, 12915, 11528, 14084, 674, 5368, 765, 3553, 5581, 13093, 456, 5105, 9545, 14068, 2664, 11539, 14157, 14713, 12558, 5467, 8782, 14330, 6009, 4560, 4446, 7800, 5118, 4483, 3652, 5328, 7276, 2391, 11029, 8549, 10859, 12999, 2234, 4830, 13510, 7764, 3454, 7550, 10705, 11456, 8035, 4289, 2721, 961, 14673, 10487, 6470, 8179, 3901, 2719, 9727, 2676, 8098, 6414, 1015, 7168, 13667, 8913, 1429, 5265, 7969, 4011, 10905, 599, 7689, 3217, and 8259.

[0041] In other embodiments of the method, at least one polymorphism maps to chromosome 15 is selected from the group consisting of SEQ ID NO: 9917, 13867, 11178, 2161, 7019, 11882, 712, 10599, 6837, 3326, 532, 11955, 9228, 9159, 4062, 13311, 12352, 4156, 5246, 2600, 12648, 12080, 4222, 4921, 947, 13042, 13072, 11479, 6813, 5223, 9707, 3537, 5608, 11323, 6425, 11133, 14067, 3147, 1095, 1068, 13264, 1762, 1580, 3481, 6396, and 10975.

[0042] In other embodiments of the method, at least one polymorphism maps to chromosome 16 is selected from the group consisting of SEQ ID NO: 1134, 9198, 12464, 12227, 848, 1239, 9360, 5703, 5085, 10727, 12834, 7759, 7102, 5383, 7101, 4987, 13560, 3097, 10249, 13138, 13577, 3610, 346, 10104, 348, 3227, 10179, 14178, 2232, 3911, 3721, 13329, 28, 1339, 8890, 2212, 9253, 7588, 2910, 496, 1029, 11334, and 5335.

[0043] In other embodiments of the method, at least one polymorphism maps to chromosome 17 is selected from the group consisting of SEQ ID NO: 14119, 11023, 9976, 7829, 1033, 13071, 11492, 5, 8915, 333, 7487, 7789, 5880, 11271, 10706, 10834, 540, 2463, 8004, 5375, and 12231.

[0044] In other embodiments of the method, at least one polymorphism maps to chromosome 18 is selected from the group consisting of SEQ ID NO: 2139, 8599, 10792, 1710, 12970, 7987, 11512, 12045, 738, 2642, 5122, 4245, 9204, 4024, 407, 2892, 11317, 11406, 1020, 4408, 3008, 3484, 1715, 12519, 8056, 7900, 10998, 7878, 1101, 5545, 8632, 10448, 8370, 102, 11637, 13859, 10089, 14712, 2180, 4955, 5163, 12992, 8770, 8877, 5161, 9305, 3932, and 13066.

[0045] In other embodiments of the method, at least one polymorphism maps to chromosome 19 is selected from the group consisting of SEQ ID NO: 11979, 10238, 10399, 7432, 3735, 6877, 9798, 2131, 2773, 4381, 12037, 11310, 13075, 9152, 9742, 12419, 10889, 14348, 5770, 8900, 1717, 14742, 5378, 149, 6042, 9479, 4638, 10584, 223, 11011, 2377, 5537, 11603, 7433, 6112, 4776, 4588, 1713, 714, 10350, and 11487.

[0046] In other embodiments of the method, at least one polymorphism maps to chromosome 20 is selected from the group consisting of SEQ ID NO: 12283, 12809, 12860, 6099, 3946, 183, 775, 4415, 2545, 7680, 6268, 4862, 12143, 9278, 13629, 8227, 4989, 1889, 3050, 7117, 2022, 3076, 13513, 2645, 627, 14455, 8738, 7430, 1250, 1406, 13636, 9243, 3405, 5893, 8478, and 3723.

[0047] In other embodiments of the method, at least one polymorphism maps to chromosome 21 is selected from the group consisting of SEQ ID NO: 5537, 10287, 4325, 12287, 11755, 4799, 3297, 11607, 12513, 11934, 244, 7266, 6238, 13108, 5749, 5574, 12784, 11530, 14246, 10594, 11061, 13635, 13039, 12755, 14736, 12923, 6945, 2030, 10749, 11470, 11067, 9404, 8679, 11533, 9495, 592, and 14245.

[0048] In other embodiments of the method, at least one polymorphism maps to chromosome 22 is selected from the group consisting of SEQ ID NO: 6467, 14036, 11519, 11866, 5433, 8923, 5589, 9368, 13245, 209, 161, 5929, 725, 13096, 11311, 10582, 3234, 4052, 9444, 1124, 6357, 4279, 14333, 436, 9124, 3702, 7512, 542, 3934, 5674, 5784, 5857, 11488, 1880, 5755, 5278, 11760, 8703, 3594, 4798, 12154, 12934, 3432, 6549, 1846, 8783, 12196, 14155, 434, 2004, 3718, and 13873.

[0049] In other embodiments of the method, at least one polymorphism maps to chromosome 23 is selected from the group consisting of SEQ ID NO: 9637, 13035, 10853, 660, 5582, 2019, 698, 25, 14156, 5100, 728, 5507, 14738, 11961, 3133, 6817, 3531, 5708, 1999, 11000, 10648, 4133, 7710, 4139, 7333, 11352, 10693, 819, 12984, 14457, 1312, 2104, 10756, 8114, 4910, 706, 2964, 12900, 2073, 1664, 77, 5635, 7112, 7665, 4999, 3693, 14478, 618, 13987, 12625, 11146, 12388, 5730, 1764, 2720, 13713, 12656, 7209, 7690, 6314, 5979, 14727, 3662, 5441, 9965, 6439, 7805, and 3341.

[0050] In other embodiments of the method, at least one polymorphism maps to chromosome 24 is selected from the group consisting of SEQ ID NO: 11706, 1525, 14399, 10891, 9288, 8504, 5053, 2628, 4244, 11905, 2095, 13973, 1366, 5478, 13915, 3707, 5339, 8594, and 11857.

[0051] In other embodiments of the method, at least one polymorphism maps to chromosome 25 is selected from the group consisting of SEQ ID NO: 14290, 5112, 11986, 10972, 13092, 3626, 5347, 11633, 1961, 1192, 9830, 12459, 4362, 913, 2536, 4598, 7334, 12206, 11048, 11697, 11579, 9527, 13561, 11135, 4557, 7201, 13392, 13224, 6851, 3927, 10286, 11606, 8255, 6239, 12095, 10032, 13774, 14491, 6298, 3047, 2887, 12240, 2551, 3124, 5392, 8363, 14015, 307, 7384, 3723, 13232, 7454, 8460, 795, and 8444.

[0052] In other embodiments of the method, at least one polymorphism maps to chromosome 26 is selected from the group consisting of SEQ ID NO: 8660, 2101, 8106, 9301, 11157, 1270, 7638, 12657, 8822, 2379, 11207, 14663, 5133, 12113, 1360, 6167, 4792, 8523, 3384, 4104, 1324, 800, 3931, 12927, 3116, 12584, 5571, 9639, 11273, 7964, and 2054.

[0053] Further features and advantages of the present invention, as well as the structure and operation of various embodiments of the present invention, are described in detail below with reference to the accompanying drawings.

### BRIEF DESCRIPTION OF THE DRAWINGS

[0054] The accompanying drawings, which are incorporated in and form a part of the specification, illustrate the embodiments of the present invention and together with the description, serve to explain the principles of the invention. In the drawings:

[0055] FIG. 1 is a genetic map of cotton linkage groups 1-9 showing the density of mapped polymorphisms of this invention.

[0056] FIG. 2 is a genetic map of cotton linkage groups 10-18 showing the density of mapped polymorphisms of this invention.

[0057] FIG. 3 is a genetic map of cotton linkage groups 19-26 showing the density of mapped polymorphisms of this invention.

[0058] FIG. 4 is an allelogram illustrating results of a genotyping assay.

### DEFINITIONS

[0059] As used herein certain terms and phrases are defined as follows.

[0060] An “allele” refers to an alternative sequence at a particular locus; the length of an allele can be as small as 1 nucleotide base, but is typically larger. Allelic sequence can be amino acid sequence or nucleic acid sequence. A “locus” is a short sequence that is usually unique and usually found at one particular location in the genome by a point of reference; e.g., a short DNA sequence that is a gene, or part of a gene or intergenic region. A locus of this invention can be a unique PCR product at a particular location in the genome. The loci of this invention comprise one or more polymorphisms; i.e., alternative alleles present in some individuals.

[0061] An “allelic state” refers to the nucleic acid sequence that is present in a nucleic acid molecule that contains a genomic polymorphism. For example, the nucleic acid sequence of a DNA molecule that contains a single nucleotide polymorphism may comprise an A, C, G, or T residue at the polymorphic position such that the allelic state is defined by which residue is present at the polymorphic position. For example, the nucleic acid sequence of an RNA molecule that contains a single nucleotide polymorphism may comprise an A, C, G, or U residue at the polymorphic position such that the allelic state is defined by which residue is present at the polymorphic position. Similarly, the nucleic acid sequence of a nucleic acid molecule that contains an Indel may comprise an insertion or deletion of nucleic acid sequences at the polymorphic position such that the allelic state is defined by the presence or absence of the insertion or deletion at the polymorphic position.

[0062] An “association”, when used in reference to a polymorphism and a phenotypic trait or trait index, refers to any statistically significant correlation between the presence of a given allele of a polymorphic locus and the phenotypic trait or trait index value, wherein the value may be qualitative or quantitative.

[0063] A “distinct set of nucleic acid molecules” refers to one or more nucleic acid molecules that hybridize to DNA sequences that are include, are immediately adjacent to, or are within about 1000 base pairs of either the 5′ or 3′ end of a given cotton genomic polymorphism. In certain embodiments, the distinct set of nucleic acid molecules will comprise a single nucleic acid sequence that includes or is immediately adjacent to a given polymorphism. In other embodiments, the distinct set of nucleic acid molecules will comprise one or more nucleic acid sequences that include or are immediately adjacent to the polymorphism as well as other nucleic acid sequences that are within about 1000 base pairs of either the 5′ or 3′ end of the polymorphism.

[0064] “Genotype” refers to the specification of an allelic composition at one or more loci within an individual organism. In the case of diploid organisms, there are two alleles at each locus; a diploid genotype is said to be homozygous when the alleles are the same, and heterozygous when the alleles are different.

[0065] “Haplotype” refers to an allelic segment of genomic DNA that tends to be inherited as a unit; such haplotypes can be characterized by one or more polymorphic molecular markers and can be defined by a size of not greater than 10 centimorgans. With higher precision provided by a higher density of polymorphisms, haplotypes can be characterized by genomic windows, for example, in the range of 1-5 centimorgans.

[0066] The phrase “immediately adjacent”, when used to describe a nucleic acid molecule that hybridizes to DNA containing a polymorphism, refers to a nucleic acid that hybridizes to DNA sequences that directly abut the polymorphic nucleotide base position. For example, a nucleic acid molecule that can be used in a single base extension assay is “immediately adjacent” to the polymorphism.

[0067] “Interrogation position” refers to a physical position on a solid support that can be queried to obtain genotyping data for one or more predetermined genomic polymorphisms.

[0068] “Consensus sequence” refers to a constructed DNA sequence which identifies SNP and Indel polymorphisms in alleles at a locus. Consensus sequence can be based on either strand of DNA at the locus and states the nucleotide base of either one of each SNP in the locus and the nucleotide bases of all Indels in the locus. Thus, although a consensus sequence may not be a copy of an actual DNA sequence, a consensus sequence is useful for precisely designing primers and probes for actual polymorphisms in the locus.

[0069] “Phenotype” refers to the detectable characteristics of a cell or organism which are a manifestation of gene expression.

[0070] “Phenotypic trait index” refers to a composite value for at least two phenotypic traits, wherein each phenotypic trait may be assigned a weight to reflect relative importance for selection.

[0071] A “marker” or “molecular marker” as used herein is a DNA sequence (e.g. a gene or part of a gene) exhibiting polymorphism between two or more plants of the same species, which can be identified or typed by a simple assay. Useful polymorphisms include a single nucleotide polymorphisms (SNPs), insertions or deletions in DNA sequence (Indels), single feature polymorphisms (SFPs), and simple sequence repeats of DNA sequence (SSRs).

[0072] “Marker Assay” refers to a method for detecting a polymorphism at a particular locus using a particular method. Methods for detecting polymorphisms include, but are not limited to, restriction fragment length polymorphism (RFLP), single base extension, electrophoresis, sequence alignment, allelic specific oligonucleotide hybridization (ASO), RAPD, allele-specific primer extension sequencing (ASPE), DNA sequencing, RNA sequencing, microarray-based analyses, universal PCR, allele specific extension, hybridization, mass spectrometry, ligation, extension-ligation, endonuclease-mediated dye release assays and Flap Endonuclease-mediated assays. Exemplary single base extension assays are disclosed in U.S. Pat. No. 6,013,431. Exemplary endonuclease-mediated dye release assays for allelic state determination of SNPs where an endonuclease activity releases a reporter dye from a hybridization probe are disclosed in U.S. Pat. No. 5,538,848.

[0073] “Linkage” refers to relative frequency at which types of gametes are produced in a cross. For example, if locus A has genes “A” or “a” and locus B has genes “B” or “b” and a cross between parent I with AABB and parent B with aabb will produce four possible gametes where the genes are segregated into AB, Ab, aB and ab. The null expectation is that there will be independent equal segregation into each of the four possible genotypes, i.e. with no linkage ¼ of the gametes will of each genotype. Segregation of gametes into a genotypes differing from ¼ are attributed to linkage.

[0074] “Linkage disequilibrium” is defined in the context of the relative frequency of gamete types in a population of many individuals in a single generation. If the frequency of allele A is p, a is p′, B is q and b is q′, then the expected frequency (with no linkage disequilibrium) of genotype AB is pq, Ab is pq′, aB is p′q and ab is p′q′. Any deviation from the expected frequency is called linkage disequilibrium. Two loci are said to be “genetically linked” when they are in linkage disequilibrium.

[0075] “Quantitative Trait Locus (QTL)” refers to a locus that controls to some degree traits that are usually continuously distributed and which can be represented quantitatively.

[0076] “Polymorphism Index Content (PIC)” is defined herein as a statistical measure of informativeness of a marker, i.e., for use in linkage analysis (Botstein et al., Am. J. Hum. Genet. 32:314-331, 1980). Variability for each locus is measured according to the formula:

$$P I C = 1 - {\sum }_{1}^{n} {p}_{i}^{2}$$

where pᵢ is the frequency of the ith allele (Anderson et al., Genome 36:181-186, 1993). Markers with high PIC values are more useful than marker with lower PIC values as they are more likely to permit discrimination of genotypically distinct plants.

[0077] As used herein “sequence identity” refers to the extent to which two optimally aligned polynucleotide or peptide sequences are invariant throughout a window of alignment of components, e.g. nucleotides or amino acids. An “identity fraction” for aligned segments of a test sequence and a reference sequence is the number of identical components which are shared by the two aligned sequences divided by the total number of components in reference sequence segment, i.e. the entire reference sequence or a smaller defined part of the reference sequence. “Percent identity” is the identity fraction times 100.

[0078] As used herein, “typing” refers to any method whereby the specific allelic form of a given cotton genomic polymorphism is determined. For example, a single nucleotide polymorphism (SNP) is typed by determining which nucleotide is present (i.e. an A, G, T, or C). Insertion/deletions (Indels) are determined by determining if the Indel is present. Indels can be typed by a variety of assays including, but not limited to, marker assays.

[0079] As used herein, the term “yield” when used in reference to cotton plants refers to lint yield.

[0080] To the extent to which any of the preceding definitions is inconsistent with definitions provided in any patent or non-patent reference incorporated herein or in any reference found elsewhere, it is understood that the preceding definition will be used herein.

### DETAILED DESCRIPTION

[0081] The following detailed description relates to the isolated nucleic acid compositions and related methods for genotyping cotton plants. In general, these compositions and methods can be used to genotype cotton plants from the genus Gossypium. More specifically, cotton plants from the species Gossypium hirsutum and the subspecies Gossypium hirsutum L. can be genotyped using these compositions and methods In an additional aspect, the cotton plant is from the group Gossypium arboreum L., otherwise known as tree cotton. In another aspect, the cotton plant is from the group Gossypium barbadense L., otherwise known as American pima or Egyptian cotton. In another aspect, the cotton plant is from the group Gossypium herbaceum L., otherwise known as levant cotton. Gossypium or cotton plants that can be genotyped with the compositions and methods described herein include hybrids, inbreds, partial inbreds, or members of defined or undefined populations.

[0082] Isolated Nucleic Acid Molecules—Loci, Primers and Probes

[0083] The cotton loci of this invention comprise a series of molecular markers which comprises at least 20 consecutive nucleotides and includes or is adjacent to one or more polymorphisms identified in Table 1 or Table 3. Such cotton loci have a nucleic acid sequence having at least 90% sequence identity, more preferably at least 95% or even more preferably for some alleles at least 98% and in many cases at least 99% sequence identity, to the sequence of the same number of nucleotides in either strand of a segment of cotton DNA which includes or is adjacent to the polymorphism. The nucleotide sequence of one strand of such a segment of cotton DNA may be found in a sequence in the group consisting of SEQ ID NO: 1 through SEQ ID NO: 14832. It is understood by the very nature of polymorphisms that for at least some alleles there will be no identity to the disclosed polymorphism, per se. Thus, sequence identity can be determined for sequence that is exclusive of the disclosed polymorphism sequence. In other words, it is anticipated that additional alleles for the polymorphisms disclosed herein may exist, can be easily characterized by sequencing methods, and can be used for genotyping. For example, one skilled in the art will appreciate that for a single nucleotide polymorphism where just two polymorphic residues are disclosed (e.g. an “A” or a “G”) can also comprise other polymorphic residues (e.g. a “T” and/or a “G”).

[0084] The polymorphisms in each locus are identified more particularly in Table 1 or Table 3. SNPs are particularly useful as genetic markers because they are more stable than other classes of polymorphisms and are abundant in the cotton genome. SNPs can result from insertions, deletions, and point mutations. In the present invention a SNP can represent a single indel event, which may consist of one or more base pairs, or a single nucleotide polymorphism. Polymorphisms shared by two or more individuals can result from the individuals descending from a common ancestor. This “Identity by descent” (IBD) characterizes two loci/segments of DNA that are carried by two or more individuals and were all derived from the same ancestor. “Identity by state” (IBS) characterizes two loci/segments of DNA that are carried by two or more individuals and have the same observable alleles at those loci. When a large set of crop lines is considered, and multiple lines have the same allele at a marker locus, it is necessary to ascertain whether IBS at the marker locus is a reliable predictor of IBD at the chromosomal region surrounding the marker locus. A good indication that a number of marker loci in a segment are enough to characterize IBD for the segment is that they can predict the allele present at other marker loci within the segment. The stability and abundance of SNPs in addition to the fact that they rarely arise independently makes them useful in determining IBD.

[0085] For many genotyping applications it is useful to employ as markers polymorphisms from more than one locus. Thus, one aspect of the invention provides a collection of nucleic acid molecules that permit typing of polymorphisms of different loci. The number of loci in such a collection can vary but will be a finite number, e.g. as few as 2 or 5 or 10 or 25 loci or more, for instance up to 40 or 75 or 100 or more loci.

[0086] Another aspect of the invention provides isolated nucleic acid molecules which are capable of hybridizing to the polymorphic cotton loci of this invention. In certain embodiments of the invention, e.g. which provide PCR primers, such molecules comprise at least 15 nucleotide bases. Molecules useful as primers can hybridize under high stringency conditions to a one of the strands of a segment of DNA in a polymorphic locus of this invention. Primers for amplifying DNA are provided in pairs, i.e. a forward primer and a reverse primer. One primer will be complementary to one strand of DNA in the locus and the other primer will be complementary to the other strand of DNA in the locus, i.e. the sequence of a primer is preferably at least 90%, more preferably at least 95%, identical to a sequence of the same number of nucleotides in one of the strands. It is understood that such primers can hybridize to sequence in the locus which is distant from the polymorphism, e.g. at least 5, 10, 20, 50, 100, 200, 500 or up to about 1000 nucleotide bases away from the polymorphism. Design of a primer of this invention will depend on factors well known in the art, e.g. avoidance or repetitive sequence.

[0087] Another aspect of the isolated nucleic acid molecules of this invention are hybridization probes for polymorphism assays. In one aspect of the invention such probes are oligonucleotides comprising at least 12 nucleotide bases and a detectable label. The purpose of such a molecule is to hybridize, e.g. under high stringency conditions, to one strand of DNA in a segment of nucleotide bases which includes or is adjacent to the polymorphism of interest in an amplified part of a polymorphic locus. Such oligonucleotides are preferably at least 90%, more preferably at least 95%, identical to the sequence of a segment of the same number of nucleotides in one strand of cotton DNA in a polymorphic locus. The detectable label can be a radioactive element or a dye. In preferred aspects of the invention, the hybridization probe further comprises a fluorescent label and a quencher, e.g. for use hybridization probe assays of the type known as Taqman® assays, available from AB Biosystems.

[0088] Isolated nucleic acid molecules of the present invention are capable of hybridizing to other nucleic acid molecules including, but not limited, to cotton genomic DNA, cloned cotton genomic DNA, and amplified cotton genomic DNA under certain conditions. As used herein, two nucleic acid molecules are said to be capable of hybridizing to one another if the two molecules are capable of forming an anti-parallel, double-stranded nucleic acid structure. A nucleic acid molecule is said to be the “complement” of another nucleic acid molecule if they exhibit “complete complementarity” i.e. each nucleotide in one sequence is complementary to its base pairing partner nucleotide in another sequence. Two molecules are said to be “minimally complementary” if they can hybridize to one another with sufficient stability to permit them to remain annealed to one another under at least conventional “low-stringency” conditions. Similarly, the molecules are said to be “complementary” if they can hybridize to one another with sufficient stability to permit them to remain annealed to one another under conventional “high-stringency” conditions. Nucleic acid molecules which hybridize to other nucleic acid molecules, e.g. at least under low stringency conditions are said to be “hybridizable cognates” of the other nucleic acid molecules. Conventional stringency conditions are described by Sambrook et al., Molecular Cloning, A Laboratory Manual, 2nd Ed., Cold Spring Harbor Press, Cold Spring Harbor, N.Y. (1989) and by Haymes et al., Nucleic Acid Hybridization, A Practical Approach, IRL Press, Washington, D.C. (1985), each of which is incorporated herein by reference. Departures from complete complementarity are therefore permissible, as long as such departures do not completely preclude the capacity of the molecules to form a double-stranded structure. Thus, in order for a nucleic acid molecule to serve as a primer or probe it need only be sufficiently complementary in sequence to be able to form a stable double-stranded structure under the particular solvent and salt concentrations employed.

[0089] Appropriate stringency conditions which promote DNA hybridization, for example, 6.0× sodium chloride/sodium citrate (SSC) at about 45° C., followed by a wash of 2.0×SSC at 50° C., are known to those skilled in the art or can be found in Current Protocols in Molecular Biology, John Wiley & Sons, N.Y. (1989), 6.3.1-6.3.6, incorporated herein by reference. For example, the salt concentration in the wash step can be selected from a low stringency of about 2.0×SSC at 50° C. to a high stringency of about 0.2×SSC at 50° C. In addition, the temperature in the wash step can be increased from low stringency conditions at room temperature, about 22° C., to high stringency conditions at about 65° C. Both temperature and salt may be varied, or either the temperature or the salt concentration may be held constant while the other variable is changed.

[0090] In a preferred embodiment, a nucleic acid molecule of the present invention will specifically hybridize to one strand of a segment of cotton DNA having a nucleic acid sequence as set forth in SEQ ID NO: 1 through SEQ ID NO: 14832 under moderately stringent conditions, for example at about 2.0×SSC and about 65° C., more preferably under high stringency conditions such as 0.2×SSC and about 65° C.

[0091] For assays where the molecule is designed to hybridize adjacent to a polymorphism which is detected by single base extension, e.g. of a labeled dideoxynucleotide, such molecules can comprise at least 15, more preferably at least 16 or 17, nucleotide bases in a sequence which is at least 90 percent, preferably at least 95%, identical to a sequence of the same number of consecutive nucleotides in either strand of a segment of polymorphic cotton DNA. Oligonucleotides for single base extension assays are available from Orchid Biosystems.

[0092] Isolated nucleic acid molecules useful as hybridization probes for detecting a polymorphism in cotton DNA can be designed for a variety of assays. For assays, where the probe is intended to hybridize to a segment including the polymorphism, such molecules can comprise at least 12 nucleotide bases and a detectable label. The sequence of the nucleotide bases is preferably at least 90 percent, more preferably at least 95%, identical to a sequence of the same number of consecutive nucleotides in either strand of a segment of cotton DNA in a polymorphic locus of this invention. The detectable label is a dye at one end of the molecule. In preferred aspects the isolated nucleic acid molecule comprises a dye and dye quencher at the ends thereof. For SNP detection assays it is useful to provide such dye and dye quencher molecules in pairs, e.g. where each molecule has a distinct fluorescent dye at the 5′ end and has identical nucleotide sequence except for a single nucleotide polymorphism. It is well known in the art how to design oligonucleotide PCR probe pairs for annealing to a target segment of DNA for the purpose of reporting, wherein the sequence of the target is known such as the polymorphic marker sequences provided in the present invention.

[0093] For assays where the isolated nucleic molecule is designed to hybridize adjacent to a polymorphism which is detected by single base extension, such molecules can comprise at least 15, more preferably at least 16 or 17, nucleotide bases in a sequence which is at least 90 percent, preferably at least 95%, identical to a sequence of the same number of consecutive nucleotides in either strand of a segment of polymorphic cotton DNA. In this case, the isolated nucleotide provides for incorporation of a detectable label. This detectable label can be an isotope, a fluorophore, an oxidant, a reductant, a nucleotide or a hapten.

[0094] For assays involving use of Flap endonucleases (i.e. Invader® assays). In certain embodiments, the compositions would comprise at least two isolated nucleic acid molecules for detecting a molecular marker representing a polymorphism in cotton DNA, wherein a first nucleic acid molecule of the composition comprises an oligonucleotide that includes the polymorphic nucleotide residue and at least 8 nucleotides that are immediately adjacent to a 3′ end of said polymorphic nucleotide residue, wherein a second nucleic acid molecule of the composition comprises an oligonucleotide that includes the polymorphic nucleotide residue and at least 8 nucleotides that are immediately adjacent to a 5′ end of said polymorphic nucleotide residue, and wherein the polymorphism is identified in Table 1 or Table 3. In certain embodiments, isolated nucleic acid molecule compositions suitable for typing the polymorphisms of Table 1 or Table 3 with the Flap endonuclease would comprise at least one primary probe with a “universal” 5′ Flap sequence, at least one secondary or “Invader®” probe, and at least one “FRET” cassettes containing the labelled base and quencher base that contains sequences complementary to the “universal Flap sequence” that is released from the primary probe upon cleavage.

[0095] Identifying Polymorphisms

[0096] SNPs are the result of sequence variation and new polymorphisms can be detected by sequencing random genomic or cDNA molecules. In one aspect, polymorphisms in a genome can be determined by comparing cDNA sequence from different lines. While the detection of polymorphisms by comparing cDNA sequence is relatively convenient, evaluation of cDNA sequence allows no information about the position of introns in the corresponding genomic DNA. Moreover, polymorphisms in non-coding sequence cannot be identified from cDNA. This can be a disadvantage, e.g. when using cDNA-derived polymorphisms as markers for genotyping of genomic DNA. More efficient genotyping assays can be designed if the scope of polymorphisms includes those present in non-coding unique sequence.

[0097] Genomic DNA sequence is more useful than cDNA for identifying and detecting polymorphisms. Polymorphisms in a genome can be determined by comparing genomic DNA sequence from different lines. However, the genomic DNA of higher eukaryotes typically contain a large fraction of repetitive sequence and transposons. Genomic DNA can be more efficiently sequenced if the coding/unique fraction is enriched by subtracting or eliminating the repetitive sequence.

[0098] There are a number of strategies well known in the art that can be employed to enrich for coding/unique sequence. Examples of these include the use of enzymes which are sensitive to cytosine methylation, the use of the McrBC endonuclease to cleave repetitive sequence, and the printing of microarrays of genomic libraries which are then hybridized with repetitive sequence probes.

[0099] In a preferred embodiment, coding DNA is enriched by exploiting differences in methylation pattern; the DNA of higher eukaryotes tends to be very heavily methylated, however it is not uniformly methylated. In fact, repetitive sequence is much more highly methylated than coding sequence. See U.S. Pat. No. 6,017,704 for methods of mapping and assessment of DNA methylation patterns in CG islands. Briefly, some restriction endonucleases are sensitive to the presence of methylated cytosine residues in their recognition site. Such methylation sensitive restriction endonucleases may not cleave at their recognition site if the cytosine residue in either an overlapping 5′-CG-3′ or an overlapping 5′-CNG-3′ is methylated. In order to enrich for coding/unique sequence cotton libraries can be constructed from genomic DNA digested with Pst I (or other methylation sensitive enzymes), and size fractionated by agarose gel electrophoresis.

[0100] One method for reducing repetitive DNA comprises the construction of reduced representation libraries by separating repetitive sequence from fragments of genomic DNA of at least two varieties of a species, fractionating the separated genomic DNA fragments based on size of nucleotide sequence and comparing the sequence of fragments in a fraction to determine polymorphisms. More particularly, these methods of identifying polymorphisms in genomic DNA comprises digesting total genomic DNA from at least two variants of a eukaryotic species with a methylation sensitive endonuclease to provide a pool of digested DNA fragments. The average nucleotide length of fragments is smaller for DNA regions characterized by a lower percent of 5-methylated cytosine. Such fragments are separable, e.g. by gel electrophoresis, based on nucleotide length. A fraction of DNA with less than average nucleotide length is separated from the pool of digested DNA. Sequences of the DNA in a fraction are compared to identify polymorphisms. As compared to coding sequence, repetitive sequence is more likely to comprise 5-methylated cytosine, e.g. in -CG- and -CNG-sequence segments. In one embodiment of the method, genomic DNA from at least two different inbred varieties of a crop plant is digested with a with a methylation sensitive endonuclease selected from the group consisting of Aci I, Apa I, Age I, Bsr F I, BssH II, Eag I, Eae I, Hha I, HinP1 I, Hpa II, Msp I, MspM II, Nar I, Not I, Pst I, Pvu I, Sac II, Sma I, Stu I and Xho I to provide a pool of digested DNA which is physically separated, e.g. by gel electrophoresis. Comparable size fractions of DNA are obtained from digested DNA of each of said varieties. DNA molecules from the comparable fractions are inserted into vectors to construct reduced representation libraries of genomic DNA clones which are sequenced and compared to identify polymorphisms.

[0101] An alternative method for enriching coding region DNA sequence enrichment uses McrBC endonuclease restriction, which cleaves methylated cytosine-containing DNA. Reduced representation libraries can be constructed using genomic DNA fragments which are cleaved by physical shearing or digestion with any restriction enzyme.

[0102] A further method to enrich for coding/unique sequence consists of construction of reduced representation libraries (using methylation sensitive or non-methylation sensitive enzymes), printing microarrays of the library on nylon membrane, followed by hybridization with probes made from repetitive elements known to be present in the library. The repetitive sequence elements are identified, and the library is re-arrayed by picking only the negative clones. Such methods provide segments of reduced representation genomic DNA from a plant which has genomic DNA comprising regions of DNA with relatively higher levels of methylated cytosine and regions of DNA with relatively lower levels of methylated cytosine. The reduced representation segments of this invention comprise genomic DNA from a region of DNA with relatively lower levels of methylated cytosine and are provided in fractions characterized by nucleotide size of said segments, e.g. in the range of 500 to 3000 bp.

[0103] Typing Polymorphisms in Cotton Genomic DNA Samples

[0104] Polymorphisms in DNA sequences can be detected or typed by a variety of effective methods well known in the art including, but not limited to, those disclosed in U.S. Pat. Nos. 5,468,613 and 5,217,863; 5,210,015; 5,876,930; 6,030,787; 6,004,744; 6,013,431; 5,595,890; 5,762,876; 5,945,283; 5,468,613; 6,090,558; 5,800,944; and 5,616,464, all of which are incorporated herein by reference in their entireties. However, the compositions and methods of this invention can be used in conjunction with any polymorphism typing method to type polymorphisms in cotton genomic DNA samples. These cotton genomic DNA samples used include but are not limited to cotton genomic DNA isolated directly from a cotton plant, cloned cotton genomic DNA, or amplified cotton genomic DNA. Cotton genomic DNA can be isolated according to the methods of E. Richards described in Current Protocols in Molecular Biology, (Eds. Ausubel, F. M. et al.) Wiley, (1987) pp. 2.3.1-2.3.3, with the following modification: the frozen plant material is homogenized in extraction buffer containing 1% polyvinyl pyrrolidone. Alternatively, cotton genomic DNA can be prepared as described in U.S. Pat. No. 6,893,826.

[0105] For instance, polymorphisms in DNA sequences can be detected by hybridization to allele-specific oligonucleotide (ASO) probes as disclosed in U.S. Pat. Nos. 5,468,613 and 5,217,863. U.S. Pat. No. 5,468,613 discloses allele specific oligonucleotide hybridizations where single or multiple nucleotide variations in nucleic acid sequence can be detected in nucleic acids by a process in which the sequence containing the nucleotide variation is amplified, spotted on a membrane and treated with a labeled sequence-specific oligonucleotide probe.

[0106] Target nucleic acid sequence can also be detected by probe ligation methods as disclosed in U.S. Pat. No. 5,800,944 where sequence of interest is amplified and hybridized to probes followed by ligation to detect a labeled part of the probe.

[0107] Microarrays can also be used for polymorphism detection, wherein oligonucleotide probe sets are assembled in an overlapping fashion to represent a single sequence such that a difference in the target sequence at one point would result in partial probe hybridization (Borevitz et al., Genome Res. 13:513-523 (2003); Cui et al., Bioinformatics 21:3852-3858 (2005). On any one microarray, it is expected there will be a plurality of target sequences, which may represent genes and/or noncoding regions wherein each target sequence is represented by a series of overlapping oligonucleotides, rather than by a single probe. This platform provides for high throughput screening a plurality of polymorphisms. A single-feature polymorphism (SFP) is a polymorphism detected by a single probe in an oligonucleotide array, wherein a feature is a probe in the array. Typing of target sequences by microarray-based methods is disclosed in European Patent EP1343911B1 and U.S. Pat. Nos. 6,799,122; 6,913,879; and 6,996,476.

[0108] Target nucleic acid sequence can also be detected by probe linking methods as disclosed in U.S. Pat. No. 5,616,464 employing at least one pair of probes having sequences homologous to adjacent portions of the target nucleic acid sequence and having side chains which non-covalently bind to form a stem upon base pairing of said probes to said target nucleic acid sequence. At least one of the side chains has a photoactivatable group which can form a covalent cross-link with the other side chain member of the stem.

[0109] Other methods for detecting SNPs and Indels include single base extension (SBE) methods. Examples of SBE methods include, but are not limited, to those disclosed in U.S. Pat. Nos. 6,004,744; 6,013,431; 5,595,890; 5,762,876; and 5,945,283. SBE methods are based on extension of a nucleotide primer that is immediately adjacent to a polymorphism to incorporate a detectable nucleotide residue upon extension of the primer. In certain embodiments, the SBE method uses three synthetic oligonucleotides. Two of the oligonucleotides serve as PCR primers and are complementary to sequence of the locus of cotton genomic DNA which flanks a region containing the polymorphism to be assayed. Following amplification of the region of the cotton genome containing the polymorphism, the PCR product is mixed with the third oligonucleotide (called an extension primer) which is designed to hybridize to the amplified DNA immediately adjacent to the polymorphism in the presence of DNA polymerase and two differentially labeled dideoxynucleosidetriphosphates. If the polymorphism is present on the template, one of the labeled dideoxynucleosidetriphosphates can be added to the primer in a single base chain extension. The allele present is then inferred by determining which of the two differential labels was added to the extension primer. Homozygous samples will result in only one of the two labeled bases being incorporated and thus only one of the two labels will be detected. Heterozygous samples have both alleles present, and will thus direct incorporation of both labels (into different molecules of the extension primer) and thus both labels will be detected.

[0110] In a preferred method for detecting polymorphisms, SNPs and Indels can be detected by methods disclosed in U.S. Pat. Nos. 5,210,015; 5,876,930; and 6,030,787 in which an oligonucleotide probe having a 5′fluorescent reporter dye and a 3′quencher dye covalently linked to the 5′ and 3′ ends of the probe. When the probe is intact, the proximity of the reporter dye to the quencher dye results in the suppression of the reporter dye fluorescence, e.g. by Forster-type energy transfer. During PCR forward and reverse primers hybridize to a specific sequence of the target DNA flanking a polymorphism while the hybridization probe hybridizes to polymorphism-containing sequence within the amplified PCR product. In the subsequent PCR cycle DNA polymerase with 5′→3′ exonuclease activity cleaves the probe and separates the reporter dye from the quencher dye resulting in increased fluorescence of the reporter.

[0111] A useful assay is available from AB Biosystems as the Taqman® assay which employs four synthetic oligonucleotides in a single reaction that concurrently amplifies the cotton genomic DNA, discriminates between the alleles present, and directly provides a signal for discrimination and detection. Two of the four oligonucleotides serve as PCR primers and generate a PCR product encompassing the polymorphism to be detected. Two others are allele-specific fluorescence-resonance-energy-transfer (FRET) probes. In the assay, two FRET probes bearing different fluorescent reporter dyes are used, where a unique dye is incorporated into an oligonucleotide that can anneal with high specificity to only one of the two alleles. Useful reporter dyes include, but are not limited to, 6-carboxy-4,7,2′,7′-tetrachlorofluorecein (TET), 2′-chloro-7′-phenyl-1,4-dichloro-6-carboxyfluorescein (VIC) and 6-carboxyfluorescein phosphoramidite (FAM). A useful quencher is 6-carboxy-N,N,N′,N′-tetramethylrhodamine (TAMRA). Additionally, the 3′ end of each FRET probe is chemically blocked so that it can not act as a PCR primer. Also present is a third fluorophore used as a passive reference, e.g., rhodamine X (ROX) to aid in later normalization of the relevant fluorescence values (correcting for volumetric errors in reaction assembly). Amplification of the genomic DNA is initiated. During each cycle of the PCR, the FRET probes anneal in an allele-specific manner to the template DNA molecules. Annealed (but not non-annealed) FRET probes are degraded by TAQ DNA polymerase as the enzyme encounters the 5′ end of the annealed probe, thus releasing the fluorophore from proximity to its quencher. Following the PCR, the fluorescence of each of the two fluorescers, as well as that of the passive reference, is determined fluorometrically. The normalized intensity of fluorescence for each of the two dyes will be proportional to the amounts of each allele initially present in the sample, and thus the genotype of the sample can be inferred.

[0112] To design primers and probes for the assay the locus sequence is first masked to prevent design of any of the three primers to sites that match known cotton repetitive elements (e.g., transposons) or are of very low sequence complexity (di- or tri-nucleotide repeat sequences). Design of primers to such repetitive elements will result in assays of low specificity, through amplification of multiple loci or annealing of the FRET probes to multiple sites.

[0113] PCR primers are designed (a) to have a length in the size range of 15 to 25 bases and matching sequences in the polymorphic locus, (b) to have a calculated melting temperature in the range of 57 to 60° C., e.g. corresponding to an optimal PCR annealing temperature of 52 to 55° C., (c) to produce a product which includes the polymorphic site and typically has a length in the size range of 75 to 250 base pairs. However, PCR techniques that permit amplification of fragments of up to 1000 base pairs or more in length have also been disclosed in U.S. Pat. No. 6,410,277. The PCR primers are preferably located on the locus so that the polymorphic site is at least one base away from the 3′ end of each PCR primer. However, it is understood that the PCR primers can be up to 1000 base pairs or more away from the polymorphism and still provide for amplification of a corresponding DNA fragment of 1000 base pairs or more that contains the polymorphism and can be used in typing assays. The PCR primers must not contain regions that are extensively self- or inter-complementary.

[0114] FRET probes are designed to span the sequence of the polymorphic site, preferably with the polymorphism located in the 3′ most 2/3 of the oligonucleotide. In the preferred embodiment, the FRET probes will have incorporated at their 3′ end a chemical moiety which, when the probe is annealed to the template DNA, binds to the minor groove of the DNA, thus enhancing the stability of the probe-template complex. The probes should have a length in the range of 12 to 17 bases, and with the 3′MGB, have a calculated melting temperature of 5 to 7° C. above that of the PCR primers. Probe design is disclosed in U.S. Pat. Nos. 5,538,848, 6,084,102, and 6,127,121.

[0115] Oligonucleotide probes for typing single nucleotide polymorphisms through use of Flap Endonuclease-mediated (Invader®, Third Wave Technologies, Madison Wis.) assays are also contemplated. In these assays, a flap endonuclease (cleavase) cuts a triple-helix created by hybridization of two overlapping oligonucleotides to the sequence that is typed (Lyamichev et al., Nat. Biotechnol., 17: 292-296, 1999). The sequence that is typed can be either cotton genomic DNA, cloned cotton genomic DNA or amplified cotton genomic DNA. Cleavage of one of the oligonucleotides that hybridizes to the sequence to be typed releases a flap that in turn forms a triple helix with a “FRET Cassette” oligonucleotide, resulting in a secondary cleavage reaction that releases a fluorescence resonance energy transfer (FRET) label. Embodiments where a single allele of a polymorphism is typed using a single FRET label have been described (Mein C. A., et al. Genome Res., 10: 330-343, 2000). In other embodiments of this method, two alleles of a polymorphism can be simultaneously typed by using different FRET labels. (Lyamichev et al., Ibid). High-throughput Flap Endonuclease-mediated assays have also been described that are suitable for creating sets of nucleotides for typing multiple polymorphisms (Olivier, et al., Nucleic Acids Res. 30(12): e53, 2002).

[0116] Isolated nucleic acid molecule compositions suitable for typing the polymorphisms of Table 1 or Table 3 with the cleavase can comprise at least one primary probe with a “universal” 5′ flap sequence, at least one secondary or “Invader®” probe, and at least one “FRET” cassettes containing the labelled base and quencher base that contains sequences complementary to the “universal flap sequence” that is released from the primary probe upon cleavage. When the typed sequence is amplified cotton genomic DNA, flanking PCR primers similar to those described in the preceding paragraphs can also be used. The design of such probes requires only the provision of about 40 to 50 nucleotides on either side of the polymorphic base noted in Table 1 or Table 3. General aspects of designing probes for Flap endonuclease assays are described in “Single Nucleotide Polymorphisms” (Methods and Protocols) Volume 212, Chapter 16, V. Lyamichev and B. Neri pp. 229-240 Humana Press. 2002).

[0117] Use of Polymorphisms to Establish Marker/Trait Associations

[0118] The polymorphisms in the loci of this invention can be used in the identification of marker/trait associations which are inferred from statistical analysis of genotypes and phenotypes of the members of a population. These members may be individual organisms, e.g. cotton, families of closely related individuals, inbred lines, doubled haploids or other groups of closely related individuals. Such cotton groups are referred to as “lines”, indicating line of descent. The population may be descended from a single cross between two individuals or two lines (e.g. a mapping population) or it may consist of individuals with many lines of descent. Each individual or line is characterized by a single or average trait phenotype and by the genotypes at one or more marker loci.

[0119] Several types of statistical analysis can be used to infer marker/trait association from the phenotype/genotype data, but a basic idea is to detect molecular markers, i.e. polymorphisms, for which alternative genotypes have significantly different average phenotypes. For example, if a given marker locus A has three alternative genotypes (AA, Aa and aa), and if those three classes of individuals have significantly different phenotypes, then one infers that locus A is associated with the trait. The significance of differences in phenotype may be tested by several types of standard statistical tests such as linear regression of molecular marker genotypes on phenotype or analysis of variance (ANOVA). Commercially available, statistical software packages commonly used to do this type of analysis include SAS Enterprise Miner (SAS Institute Inc., Cary, N.C.) and Splus (Insightful Corporation. Cambridge, Mass.). When many molecular markers are tested simultaneously, an adjustment such as Bonferonni correction is made in the level of significance required to declare an association.

[0120] For the purpose of QTL mapping, the markers included should be diagnostic of origin in order for inferences to be made about subsequent populations. Molecular markers based on SNPs are ideal for mapping because the likelihood that a particular SNP allele is derived from independent origins in the extant populations of a particular species is very low. As such, SNP molecular markers are useful for tracking and assisting introgression of QTLs, particularly in the case of haplotypes.

[0121] Often the goal of an association study is not simply to detect marker/trait associations, but to estimate the location of genes affecting the trait directly (i.e. QTLs) relative to the marker locations. In a simple approach to this goal, one makes a comparison among marker loci of the magnitude of difference among alternative genotypes or the level of significance of that difference. Trait genes are inferred to be located nearest the marker(s) that have the greatest associated genotypic difference. The genetic linkage of additional marker molecules can be established by a gene mapping model such as, without limitation, the flanking marker model reported by Lander et al. (Lander et al. 1989 Genetics, 121:185-199), and the interval mapping, based on maximum likelihood methods described therein, and implemented in the software package MAPMAKER/QTL (Lincoln and Lander, Mapping Genes Controlling Quantitative Traits Using MAPMAKER/QTL, Whitehead Institute for Biomedical Research, Massachusetts, (1990). Additional software includes Qgene, Version 2.23 (1996), Department of Plant Breeding and Biometry, 266 Emerson Hall, Cornell University, Ithaca, N.Y.). Use of Qgene software is a particularly preferred approach.

[0122] A maximum likelihood estimate (MLE) for the presence of a marker is calculated, together with an MLE assuming no QTL effect, to avoid false positives. A log₁₀ of an odds ratio (LOD) is then calculated as: LOD=log₁₀(MLE for the presence of a QTL/MLE given no linked QTL). The LOD score essentially indicates how much more likely the data are to have arisen assuming the presence of a QTL versus in its absence. The LOD threshold value for avoiding a false positive with a given confidence, say 95%, depends on the number of markers and the length of the genome. Graphs indicating LOD thresholds are set forth in Lander et al. (1989), and further described by Arús and Moreno-González, Plant Breeding, Hayward, Bosemark, Romagosa (eds.) Chapman & Hall, London, pp. 314-331 (1993).

[0123] Additional models can be used. Many modifications and alternative approaches to interval mapping have been reported, including the use of non-parametric methods (Kruglyak et al. 1995 Genetics, 139:1421-1428). Multiple regression methods or models can be also be used, in which the trait is regressed on a large number of markers (Jansen, Biometrics in Plant Breed, van Oijen, Jansen (eds.) Proceedings of the Ninth Meeting of the Eucarpia Section Biometrics in Plant Breeding, The Netherlands, pp. 116-124 (1994); Weber and Wricke, Advances in Plant Breeding, Blackwell, Berlin, 16 (1994)). Procedures combining interval mapping with regression analysis, whereby the phenotype is regressed onto a single putative QTL at a given marker interval, and at the same time onto a number of markers that serve as ‘cofactors,’ have been reported by Jansen et al. (Jansen et al. 1994 Genetics, 136:1447-1455) and Zeng (Zeng 1994 Genetics 136:1457-1468). Generally, the use of cofactors reduces the bias and sampling error of the estimated QTL positions (Utz and Melchinger, Biometrics in Plant Breeding, van Oijen, Jansen (eds.) Proceedings of the Ninth Meeting of the Eucarpia Section Biometrics in Plant Breeding, The Netherlands, pp. 195-204 (1994), thereby improving the precision and efficiency of QTL mapping (Zeng 1994). These models can be extended to multi-environment experiments to analyze genotype-environment interactions (Jansen et al. 1995 Theor. Appl. Genet. 91:33-3).

[0124] An alternative to traditional QTL mapping involves achieving higher resolution by mapping haplotypes, versus individual markers (Fan et al. 2006 Genetics 172:663-686) as one of the limitations of traditional QTL mapping research has been the fact that inferences are restricted to the particular parents of the mapping population and the genes or gene combinations of these parental varieties. This approach tracks blocks of DNA known as haplotypes, as defined by polymorphic markers, which are assumed to be identical by descent in the mapping population. It has long been recognized that genes and genomic sequences may be identical by state (i.e., identical by independent origins) or identical by descent (i.e., through historical inheritance from a common progenitor) which has tremendous bearing on studies of linkage disequilibrium and, ultimately, mapping studies (Nordberg et al. 2002 Trends Gen.). Historically, genetic markers were not appropriate for distinguishing identical in state or by descent. However, newer classes of markers, such as SNPs (single nucleotide polymorphisms), are more diagnostic of origin. The likelihood that a particular SNP allele is derived from independent origins in the extant populations of a particular species is very low. Polymorphisms occurring in linked genes are randomly assorted at a slow, but predictable rate, described by the decay of linkage disequilibrium or, alternatively, the approach of linkage equilibrium. Consequences of this well-established scientific discovery are that long stretches of coding DNA, defined by a specific combination of polymorphisms, are very unique and extremely improbable of existing in duplication except through linkage disequilibrium, which is indicative of recent co-ancestry from a common progenitor. The probability that a particular genomic region, as defined by some combination of alleles, indicates absolute identity of the entire intervening genetic sequence is dependent on the number of linked polymorphisms in this genomic region, barring the occurrence of recent mutations in the interval. Herein, such genomic regions are referred to as haplotype windows. Each haplotype within that window is defined by specific combinations of alleles; the greater the number of alleles, the greater the number of potential haplotypes, and the greater the certainty that identity by state is a result of identity by descent at that region. During the development of new lines, ancestral haplotypes are maintained through the process and are typically thought of as ‘linkage blocks’ that are inherited as a unit through a pedigree. Further, if a specific haplotype has a known effect, or phenotype, it is possible to extrapolate its effect in other lines with the same haplotype, as determined using one or more diagnostic markers for that haplotype window.

[0125] This assumption results in a larger effective sample size, offering greater resolution of QTL. Methods for determining the statistical significance of a correlation between a phenotype and a genotype, in this case a haplotype, may be determined by any statistical test known in the art and with any accepted threshold of statistical significance being required. The application of particular methods and thresholds of significance are well with in the skill of the ordinary practitioner of the art.

[0126] Construction of Genetic Maps

[0127] In another aspect of the invention the polymorphism in the loci of the invention are mapped onto the cotton genome, e.g. as a genetic map of the cotton genome comprising map positions of two or more polymorphisms, as indicated in Table 1, more preferably as indicated in Table 3. Such a genetic map is illustrated in FIG. 1. The genetic map data can also be recorded on computer readable medium. Preferred embodiments of the invention provide genetic maps of polymorphisms at high densities, e.g. at least 150 or more, say at least 500 or 1000, polymorphisms across a map of the cotton genome. Especially useful genetic maps comprise polymorphisms at an average distance of not more than 10 centiMorgans (cM) on a linkage group.

[0128] Linkage Disequilibrium Mapping and Association Studies

[0129] Another approach to determining trait gene location is to analyze marker/trait associations in a population within which individuals differ at both trait and marker loci. Certain marker alleles may be associated with certain trait locus alleles in this population due to population genetic process such as the unique origin of mutations, founder events, random drift and population structure. This association is referred to as linkage disequilibrium.

[0130] In plant breeding populations, linkage disequilibrium (LD) is the level of departure from random association between two or more loci in a population and LD often persists over large chromosomal segments. Although it is possible for one to be concerned with the individual effect of each gene in the segment, for a practical plant breeding purpose the emphasis is typically on the average impact the region has for the trait(s) of interest when present in a line, hybrid or variety. In linkage disequilibrium mapping, one compares the trait values of individuals with different genotypes at a marker locus. Typically, a significant trait difference indicates close proximity between marker locus and one or more trait loci. If the marker density is appropriately high and the linkage disequilibrium occurs only between very closely linked sites on a chromosome, the location of trait loci can be very precise.

[0131] Marker-Assisted Breeding and Marker-Assisted Selection

[0132] When a quantitative trait locus (QTL) has been localized in the vicinity of molecular markers, those markers can be used to select for improved values of the trait without the need for phenotypic analysis at each cycle of selection. In marker-assisted breeding and marker-assisted selection, associations between QTL and markers are established initially through genetic mapping analysis (as in A.1 or A.2). In the same process, one determines which molecular marker alleles are linked to favorable QTL alleles. Subsequently, marker alleles associated with favorable QTL alleles are selected in the population. This procedure will improve the value of the trait provided that there is sufficiently close linkage between markers and QTLs. The degree of linkage required depends upon the number of generations of selection because, at each generation, there is opportunity for breakdown of the association through recombination.

[0133] The associations between specific marker alleles and favorable QTL alleles also can be used to predict what types of progeny may segregate from a given cross. This prediction may allow selection of appropriate parents to generation populations from which new combinations of favorable QTL alleles are assembled to produce a new inbred line. For example, if line A has marker alleles previously known to be associated with favorable QTL alleles at loci 1, 20 and 31, while line B has marker alleles associated with favorable effects at loci 15, 27 and 29, then a new line could be developed by crossing A×B and selecting progeny that have favorable alleles at all 6 QTL.

[0134] Molecular markers are used to accelerate introgression of transgenes into new genetic backgrounds (i.e. into a diverse range of germplasm). Simple introgression involves crossing a transgenic line to an elite inbred line and then backcrossing the hybrid repeatedly to the elite (recurrent) parent, while selecting for maintenance of the transgene. Over multiple backcross generations, the genetic background of the original transgenic line is replaced gradually by the genetic background of the elite inbred through recombination and segregation. This process can be accelerated by selection on molecular marker alleles that derive from the recurrent parent.

[0135] Further, a fingerprint of an inbred line is the combination of alleles at a set of two or more marker loci. High density fingerprints can be used to establish and trace the identity of germplasm, which has utility in establishing a database of marker-trait associations to benefit an overall crop breeding program, as well as germplasm ownership protection.

[0136] Methods for Selecting Parent, Progeny, or Tester Plants for Plant Breeding

[0137] It is also contemplated that the polymorphism provided herein can be used to select a parent, progeny, or tester plants for plant breeding. The ability to select such plants from populations of plants that are otherwise phenotypically indistinguishable can accelerate plant breeding and reduce costs incurred by performing phenotypic trait analyses. The methods of selecting plants for breeding comprise the steps of a) determining associations between a plurality of polymorphisms identified in Table 1 or Table 3 and a plurality of traits in at least a first and a second inbred line of cotton; b) determining an allelic state of one or a plurality of polymorphism in a parent, progeny or tester plant; and c) selecting the parent, progeny or tester that has a more favorable combination of associated traits. In certain applications, the parent, progeny or tester plant selected by this method is an inbred cotton line. In other embodiments, the favorable combination of associated traits provides for improved heterosis.

[0138] In one embodiment, determining the genotype of at least two polymorphisms will assist in the selection of parents for use in breeding crosses. This determination confers an advantage to the breeder for the creation of crosses wherein at least two preferred genomic regions are targeted in order to generate progeny with the at least two preferred genomic regions. In another aspect, the determination of the genotype for at least two polymorphisms can provide the basis for selection decisions among progeny wherein those progeny comprising preferred genomic regions are advanced in a breeding program. In yet another aspect, tester lines, which are used to evaluate the combining ability of inbreds in hybrid combinations, can be chosen for inclusion in an inbred testing scheme based on the presence, or absence, of at least two genomic regions in order to ensure crosses are made between distinct germplasm pools, i.e., different heterotic groups.

[0139] Hybrid Prediction

[0140] Commercial cotton seed is produced by making hybrids between two elite inbred lines that belong to different “heterotic groups”. These groups are sufficiently distinct genetically that hybrids between them show high levels of heterosis or hybrid vigor (i.e. increased performance relative to the parental lines). By analyzing the marker constitution of good hybrids, one can identify sets of alleles at different loci in both male and female lines that combine well to produce heterosis. Understanding these patterns, and knowing the marker constitution of different inbred lines, can allow prediction of the level of heterosis between different pairs of lines. These predictions can narrow down the possibilities of which line(s) of opposite heterotic group should be used to test the performance of a new inbred line.

[0141] This invention provides methods for improving heterosis in hybrid cotton. In such methods associations are developed between a plurality of polymorphisms which are linked to polymorphic loci of the invention and traits in more than two inbred lines of cotton. Two of such inbred lines having complementary heterotic groups which are predicted to improve heterosis are selected for breeding. The methods for improving heterosis comprise the steps of: (a) determining associations between a plurality of polymorphisms identified in Table 1 or Table 3 and a plurality of traits in more than two inbred lines of cotton; (b) assigning two inbred lines selected from the inbred lines of step (a) to heterotic groups, (c) making at least one cross between at least two inbred lines from step (b), wherein each inbred line comes from a distinct and complementary heterotic group and wherein the complementary heterotic groups are optimized for genetic features that improve heterosis; and (d) obtaining a hybrid progeny plant from said cross in step (c), wherein said hybrid progeny plant displays increased heterosis relative to progeny derived from a cross with an unselected inbred line. These methods can also comprise traditional single crosses (i.e., between a two inbred lines, ideally from different heterotic groups), three-way crosses (a single cross is followed by a cross to a third inbred line), and double crosses (also known as a four-way cross, this is crossing the progeny of two single crosses) in step (c). Crosses can be effected by making manual crosses between selected male-fertile parents or by using male sterility systems. Development and selection of elite inbred lines, the crossing of these lines and selection of superior hybrid crosses to identify new elite cotton hybrids is described in Bernardo, Breeding for Quantitative Traits in Plants, Stemma Press, Woodbury, Minn., 2002.

[0142] Identity by Descent

[0143] One theory of heterosis predicts that regions of identity by descent (IBD) between the male and female lines used to produce a hybrid will reduce hybrid performance. Identity by descent can be inferred from patterns of marker alleles in different lines. An identical string of markers at a series of adjacent loci may be considered identical by descent if it is unlikely to occur independently by chance. Analysis of marker fingerprints in male and female lines can identify regions of IBD. Knowledge of these regions can inform the choice of hybrid parents, since avoiding IBD in hybrids is likely to improve performance. This knowledge may also inform breeding programs in that crosses could be designed to produce pairs of inbred lines (one male and one female) that show little or no IBD.

[0144] Libraries of Nucleic Acid Molecules for Use in Genotyping

[0145] Libraries of nucleic acids provided by this invention can be used in activities related to cotton germplasm improvement, including but not limited to using the plant for making breeding crosses, further genetic or phenotypic testing of the plant, advancement of the plant through self fertilization, use of the plant or parts thereof for transformation, and use of the plant or parts thereof for mutagenesis. The distinct sets of nucleic acids in the libraries can be sampled, accessed, or individually queried for any set or subset or combination thereof to type any of the cotton genomic DNA provided herein in Tables 1 or 3. In general, the libraries comprising at least two distinct sets of nucleic acid molecules wherein each of said distinct sets of nucleic acid molecules permits typing of a corresponding cotton genomic DNA polymorphism identified in Table 1 or Table 3.

[0146] In one embodiment, the distinct sets of nucleic acid molecules that permits typing of a corresponding cotton genomic DNA polymorphism identified in Table 1 or Table 3 are distributed in individual wells of a microtiter plate. In certain embodiments, each well of the microtiter plate will contain one or more nucleic acid molecules that permit typing of just one cotton polymorphism identified in Table 1 or Table 3. However, other embodiments where each well of the microtiter plate contains one or more nucleic acid molecules that permit typing of more than one cotton polymorphism identified in Table 1 or Table 3 are also contemplated. The microtiter plates can have as few as 8 wells, or as many as 24, 96, 384, 1536 or 3456 wells. The microtiter plates can be constructed from materials including, but not limited, to polystyrene, polypropylene, or cyclo-olefin plastics. The nucleic acid molecules in each well can be either in solution or in a dry (i.e. lyophilized form). In general, the nucleic acids will be distributed to the wells of the microtiter plate such that the nucleic acids in each well of the microtiter plate are known. However, in other embodiments where the nucleic acid molecules are associated with a unique identifier (such as a unique dye or other unique identifying label), the nucleic acids can be randomly distributed into the wells of the microtiter plate. As is clear from this description, libraries comprising nucleic acids immobilized on solid supports (such as beads) that are distributed in wells of microtiter plates are also contemplated.

[0147] In other embodiments, the nucleic acids that permit typing of a cotton genomic polymorphism identified in Table 1 or Table 3 are immobilized (i.e. covalently linked) to a solid support. Solid supports include, but are not limited to, beads, chips, arrays, or filters.

[0148] The beads used as a solid support can be magnetic beads to facilitate purification of hybridization complexes. Alternatively, the beads can contain a unique identifying label. In particular, beads dyed with fluorochromes that can be distinguished by their spectrophotometric or fluorometric properties can be coupled to the nucleic acid molecules for typing polymorphisms. Such bead based systems for typing polymorphisms have been described (U.S. Pat. No. 5,736,330). Dye labelled beads, analysis reagents and apparati for typing polymorphisms have also been described (U.S. Pat. Nos. 6,649,414, 6,599,331, and 6,592,822) and are available from Luminex Corporation (Austin, Tex., USA).

[0149] The chips, arrays, or filters can also be used to immobilize the nucleic acid molecules for typing of the polymorphisms of Tables 1 or Table 3. In certain embodiments, the nucleic acid markers for typing a given polymorphism will be immobilized at a defined physical location on the array such that typing data from that location that corresponds to a given polymorphism can be generated and recorded for subsequent analysis. Methods of making and using arrays for typing of polymorphisms include, but are not limited to, those described in U.S. Pat. No. 5,858,659 (for hybridization based methods) and U.S. Pat. No. 6,294,336 (for single base extension methods).

[0150] Use of Polymorphism Assays for Mapping a Library of DNA Clones

[0151] The polymorphisms and loci represented by the molecular markers of this invention are useful for identifying and mapping DNA sequence of QTLs and genes linked to the molecular markers. For instance, BAC or YAC clone libraries can be queried using molecular markers linked to a trait to find a clone containing specific QTLs and genes associated with the trait. For instance, QTLs and genes in a plurality, e.g. hundreds or thousands, of large, multi-gene sequences can be identified by hybridization with an oligonucleotide probe which hybridizes to a mapped and/or linked molecular marker, wherein one or more molecular markers can be assayed. Such hybridization screening can be improved by providing clone sequence in a high density array. The screening method is more preferably enhanced by employing a pooling strategy to significantly reduce the number of hybridizations required to identify a clone containing the molecular marker. When the molecular markers are mapped, the screening effectively maps the clones.

[0152] For instance, in a case where thousands of clones are arranged in a defined array, e.g. in 96 well plates, the plates can be arbitrarily arranged in three-dimensionally, arrayed stacks of wells each comprising a unique DNA clone. The wells in each stack can be represented as discrete elements in a three dimensional array of rows, columns and plates. In one aspect of the invention the number of stacks and plates in a stack are about equal to minimize the number of assays. The stacks of plates allow the construction of pools of cloned DNA.

[0153] For a three-dimensionally arrayed stack pools of cloned DNA can be created for (a) all of the elements in each row, (b) all of the elements of each column, and (c) all of the elements of each plate. Hybridization screening of the pools with an oligonucleotide probe which hybridizes to a molecular marker unique to one of the clones will provide a positive indication for one column pool, one row pool and one plate pool, thereby indicating the well element containing the target clone.

[0154] In the case of multiple stacks, additional pools of all of the clone DNA in each stack allows indication of the stack having the row-column-plate coordinates of the target clone. For instance, a 4608 clone set can be disposed in 48 96-well plates. The 48 plates can be arranged in 8 sets of 6 plate stacks providing 6×12×8 three-dimensional arrays of elements, i.e. each stack comprises 6 stacks of 8 rows and 12 columns. For the entire clone set there are 36 pools, i.e. 6 stack pools, 8 row pools, 12 column pools and 8 stack pools. Thus, a maximum of 36 hybridization reactions is required to find the clone harboring QTLs or genes associated or linked to each mapped molecular marker.

[0155] Once a clone is identified, oligonucleotide primers designed from the locus of the molecular marker can be used for positional cloning of the linked QTL and/or genes.

[0156] Computer Readable Media and Databases

[0157] The sequences of nucleic acid molecules of this invention can be “provided” in a variety of mediums to facilitate use, e.g. a database or computer readable medium, which can also contain descriptive annotations in a form that allows a skilled artisan to examine or query the sequences and obtain useful information. In one embodiment of the invention computer readable media may be prepared that comprise nucleic acid sequences where at least 10% or more, e.g. at least 25%, or even at least 50% or more of the sequences of the loci and nucleic acid molecules representing the molecular markers of this invention. For instance, such database or computer readable medium may comprise sets of the loci of this invention or sets of primers and probes useful for assaying the molecular markers of this invention. In addition such database or computer readable medium may comprise a figure or table of the mapped or unmapped molecular markers or this invention and genetic maps.

[0158] As used herein “database” refers to any representation of retrievable collected data including computer files such as text files, database files, spreadsheet files and image files, printed tabulations and graphical representations and combinations of digital and image data collections. In a preferred aspect of the invention, “database” refers to a memory system that can store computer searchable information. Currently, preferred database applications include those provided by DB2, Sybase and Oracle.

[0159] As used herein, “computer readable media” refers to any medium that can be read and accessed directly by a computer. Such media include, but are not limited to: magnetic storage media, such as floppy discs, hard disc, storage medium and magnetic tape; optical storage media such as CD-ROM; electrical storage media such as RAM, DRAM, SRAM, SDRAM, ROM; and PROMs (EPROM, EEPROM, Flash EPROM), and hybrids of these categories such as magnetic/optical storage media. A skilled artisan can readily appreciate how any of the presently known computer readable mediums can be used to create a manufacture comprising computer readable medium having recorded thereon a nucleotide sequence of the present invention.

[0160] As used herein, “recorded” refers to the result of a process for storing information in a retrievable database or computer readable medium. For instance, a skilled artisan can readily adopt any of the presently known methods for recording information on computer readable medium to generate media comprising the mapped polymorphisms and other nucleotide sequence information of the present invention. A variety of data storage structures are available to a skilled artisan for creating a computer readable medium where the choice of the data storage structure will generally be based on the means chosen to access the stored information. In addition, a variety of data processor programs and formats can be used to store the polymorphisms and nucleotide sequence information of the present invention on computer readable medium.

[0161] Computer software is publicly available which allows a skilled artisan to access sequence information provided in a computer readable medium. The examples which follow demonstrate how software which implements a search algorithm such as the BLAST algorithm (Altschul et al., J. Mol. Biol. 215:403-410 (1990), incorporated herein by reference) and the BLAZE algorithm (Brutlag et al., Comp. Chem. 17:203-207 (1993), incorporated herein by reference) on a Sybase system can be used to identify DNA sequence which is homologous to the sequence of loci of this invention with a high level of identity. Sequence of high identity can be compared to find polymorphic markers useful with cotton varieties.

[0162] The present invention further provides systems, particularly computer-based systems, which contain the sequence information described herein. Such systems are designed to identify commercially important sequence segments of the nucleic acid molecules of this invention. As used herein, “a computer-based system” refers to the hardware, software and memory used to analyze the nucleotide sequence information. A skilled artisan can readily appreciate that any one of the currently available computer-based system are suitable for use in the present invention.

[0163] As indicated above, the computer-based systems of the present invention comprise a database having stored therein polymorphic markers, genetic maps, and/or the sequence of nucleic acid molecules of the present invention and the necessary hardware and software for supporting and implementing genotyping applications. Such computer-based systems can be used to read, sort or analyze cotton genotypic data. Key components of the computer-based system include: a) a data storage device comprising a computer readable medium wherein at least two cotton genomic DNA polymorphisms identified in Table 1 or Table 3 are recorded thereon; b) a search device for comparing a cotton genomic DNA sequence from at least one test cotton plant to the polymorphism sequences of the data storage device of step (a) to identify homologous or non-homologous sequences; and, c) a retrieval device for identifying the homologous or non-homologous sequences(s) of the test cotton genomic sequences of step (b). Computer based methods and systems (e.g. apparati) for conducting DNA database queries are described in U.S. Pat. No. 6,691,109.

[0164] In a useful aspect of the invention a data set of polymorphic cotton loci from Table 1 or Table 3 is recorded on a computer readable medium. In one aspect of the invention the cotton genomic polymorphisms are provided in one or more data sets of DNA sequences, i.e. data sets comprising up to a finite number of distinct sequences of polymorphic loci that are recorded on the computer readable media. The finite number of polymorphic loci in a recorded data set can be as few as 2 or up to 1000 or more, e.g. 5, 8, 10, 25, 40, 75, 96, 100, 384 or 500 of the cotton genomic polymorphisms of Table 1 or Table 3. Such data sets are useful for genotyping applications where 1) multiple polymorphisms that identify polymorphisms that are distributed across the genome of cotton are queried; 2) multiple polymorphisms that cluster within an interval are queried; and/or when multiple polymorphisms are queried in large numbers of plants. The data sets recorded on the computer readable media can also comprise corresponding genetic map positions for each of the cotton genomic DNA polymorphisms recorded thereon. In other embodiments, phenotypic trait or phenotypic trait index data is recorded on the computer readable media. In still other embodiments, data associating an allelic state with a parent, progeny, or tester cotton plant is recorded on the computer readable media.

[0165] Methods of Breeding

[0166] Methods of breeding cotton plants are also contemplated. The methods of breeding cotton plants comprise the steps of: (a) identifying trait values for at least two haplotypes in at least two genomic windows of up to 10 centimorgans for a breeding population of at least two cotton plants; (b) breeding two cotton plants in said breeding population to produce a population of progeny seed; (c) identifying an allelic state of at least one polymorphism identified in Table 1 or Table 3 in each of said windows in said progeny seed to determine the presence of said haplotypes; and (d) selecting progeny seed having a higher trait values identified for determined haplotypes in said progeny seed, thereby breeding a cotton plant. In certain embodiments of these breeding methods, trait values are identified for at least two haplotypes in each adjacent genomic window over essentially the entirety of each chromosome. It is understood that haplotype regions are chromosome segments that persist over multiple generations of breeding and are carried by one or more breeding lines. These segments can be identified with multiple linked marker loci contained in the segments, and the common haplotype identity at these loci in two lines gives a high degree of confidence of the identity by descent of the entire subjacent chromosome segment carried by these lines. Such breeding methods require the use of multiple cotton genomic polymorphisms that are distributed across the cotton genome.

[0167] In aspects of this breeding method, trait values are identified for at least two haplotypes in each adjacent genomic window over essentially the entirety of each chromosome. In another useful aspect of the method progeny seed is selected for a higher trait value for yield for a haplotype in a genomic window of up to 10 centimorgans in each chromosome. In another aspect of the invention, the breeding method is directed to increased yield, where the trait value is for the yield trait, where trait values are ranked for haplotypes in each window, and where a progeny seed is selected which has a trait value for yield in a window that is higher than the mean trait value for yield in said window. In certain aspects of the breeding methods the haplotypes are defined using the polymorphisms identified in Table 1 or are defined as being in the set of molecular markers that comprises all of the DNA sequences of SEQ ID NO: 1 through SEQ ID NO: 14832, or as being in linkage disequilibrium with one of those polymorphisms.

[0168] To facilitate breeding by this method it is useful to compute a value for each trait or a value for a combination of traits, e.g. a multiple trait index. The weight allocated to various traits in a multiple trait index can vary depending on the objectives of breeding. For instance, if yield is a key objective, the yield value may be weighted at 50 to 80%, maturity, lodging, plant height or disease resistance may be weighted at lower percentages in a multiple trait index.

[0169] Selected, non-limiting approaches for breeding the plants of the present invention are set forth below. A breeding program can be enhanced using marker assisted selection (MAS) on the progeny of any cross. It is understood that nucleic acid markers of the present invention can be used in a MAS (breeding) program. It is further understood that any commercial and non-commercial cultivars can be utilized in a breeding program. Factors such as, for example, emergence vigor, vegetative vigor, stress tolerance, disease resistance, branching, flowering, seed set, seed size, seed density, standability, and threshability etc. will generally dictate the choice.

[0170] For highly heritable traits, a choice of superior individual plants evaluated at a single location will be effective, whereas for traits with low heritability, selection should be based on mean values obtained from replicated evaluations of families of related plants. Popular selection methods commonly include pedigree selection, modified pedigree selection, mass selection, and recurrent selection. In a preferred aspect, a backcross or recurrent breeding program is undertaken.

[0171] The complexity of inheritance influences choice of the breeding method. Backcross breeding can be used to transfer one or a few favorable genes for a highly heritable trait into a desirable cultivar. This approach has been used extensively for breeding disease-resistant cultivars. Various recurrent selection techniques are used to improve quantitatively inherited traits controlled by numerous genes.

[0172] Breeding lines can be tested and compared to appropriate standards in environments representative of the commercial target area(s) for two or more generations. The best lines are candidates for new commercial cultivars; those still deficient in traits may be used as parents to produce new populations for further selection.

[0173] For hybrid crops, the development of new elite hybrids requires the development and selection of elite inbred lines, the crossing of these lines and selection of superior hybrid crosses. The hybrid seed can be produced by manual crosses between selected male-fertile parents or by using male sterility systems. Additional data on parental lines, as well as the phenotype of the hybrid, influence the breeder's decision whether to continue with the specific hybrid cross.

[0174] Pedigree breeding and recurrent selection breeding methods can be used to develop cultivars from breeding populations. Breeding programs combine desirable traits from two or more cultivars or various broad-based sources into breeding pools from which cultivars are developed by selfing and selection of desired phenotypes. New cultivars can be evaluated to determine which have commercial potential.

[0175] Backcross breeding has been used to transfer genes for a simply inherited, highly heritable trait into a desirable homozygous cultivar or inbred line, which is the recurrent parent. The source of the trait to be transferred is called the donor parent. After the initial cross, individuals possessing the phenotype of the donor parent are selected and repeatedly crossed (backcrossed) to the recurrent parent. The resulting plant is expected to have most attributes of the recurrent parent (e.g., cultivar) and, in addition, the desirable trait transferred from the donor parent.

[0176] The single-seed descent procedure in the strict sense refers to planting a segregating population, harvesting a sample of one seed per plant, and using the one-seed sample to plant the next generation. When the population has been advanced from the F₂ to the desired level of inbreeding, the plants from which lines are derived will each trace to different F₂ individuals. The number of plants in a population declines each generation due to failure of some seeds to germinate or some plants to produce at least one seed. As a result, not all of the F₂ plants originally sampled in the population will be represented by a progeny when generation advance is completed.

[0177] The doubled haploid (DH) approach achieves isogenic plants in a shorter time frame. DH plants provide an invaluable tool to plant breeders, particularly for generating inbred lines and quantitative genetics studies. For breeders, DH populations have been particularly useful in QTL mapping, cytoplasmic conversions, and trait introgression. Moreover, there is value in testing and evaluating homozygous lines for plant breeding programs. All of the genetic variance is among progeny in a breeding cross, which improves selection gain.

[0178] Most research and breeding applications rely on artificial methods of DH production. The initial step involves the haploidization of the plant which results in the production of a population comprising haploid seed. Non-homozygous lines are crossed with an inducer parent, resulting in the production of haploid seed. Seed that has a haploid embryo, but normal triploid endosperm, advances to the second stage. That is, haploid seed and plants are any plant with a haploid embryo, independent of the ploidy level of the endosperm.

[0179] After selecting haploid seeds from the population, the selected seeds undergo chromosome doubling to produce doubled haploid seeds. A spontaneous chromosome doubling in a cell lineage will lead to normal gamete production or the production of unreduced gametes from haploid cell lineages. Application of a chemical compound, such as colchicine, can be used to increase the rate of diploidization. Colchicine binds to tubulin and prevents its polymerization into microtubules, thus arresting mitosis at metaphase, can be used to increase the rate of diploidization, i.e. doubling of the chromosome number. These chimeric plants are self-pollinated to produce diploid (doubled haploid) seed. This DH seed is cultivated and subsequently evaluated and used in hybrid testcross production. DH systems for cotton are possible. DH broad use and application in cotton is limited by inefficiencies, including low frequency of haploids produced in SeSe×sese chimeric hybrids and low frequency of chromosome doubling of haploid cotton plants with colchicine. The doubled haploid approach in cotton is described in Stelly, D., et al., “Proposed schemes for mass-extraction of doubled haploids of cotton.” Crop Science 28: 885-890 (1988); Zhang, J. F. and J. M. Stewart, “Semigamy gene is associated with chlorophyll reduction in cotton.” Crop Science 44(6): 2054-2062 (2004); Turcotte, E. L. and C. V. Feaster, “Doubled haploids of American Pima cotton.” USDA-ARS, Agric. Reviews and Manuals 32: 1-22 (1982); and Barrow, J. R. “Meiosis and pollen development in haploid cotton plants.” Journal of Heredity 62: 138-141 (1971). Descriptions of other breeding methods that are commonly used for different traits and crops can be found in one of several reference books (Allard, “Principles of Plant Breeding,” John Wiley & Sons, NY, U. of CA, Davis, Calif., 50-98, 1960; Simmonds, “Principles of crop improvement,” Longman, Inc., NY, 369-399, 1979; Sneep and Hendriksen, “Plant breeding perspectives,” Wageningen (ed), Center for Agricultural Publishing and Documentation, 1979; Fehr, In: Soybeans: Improvement, Production and Uses, 2nd Edition, Monograph., 16:249, 1987; Fehr, “Principles of variety development,” Theory and Technique, (Vol. 1) and Crop Species Soybean (Vol. 2), Iowa State Univ., Macmillan Pub. Co., NY, 360-376, 1987).

[0180] Methods of Genotyping with a Single Molecular Marker

[0181] Methods of genotyping with single molecular markers (e.g. cotton genomic polymorphism) can also be used to associate a phenotypic trait to a genotype in cotton plants. DNA or mRNA in tissue from at least two cotton plants having allelic DNA is assayed to identify the presence or absence of the polymorphisms provided as a molecular markers by the present invention. Associations between the molecular markers and the phenotypic traits are identified where the marker is identified in Table 1 or Table 3. In another aspect traits are associated to genotypes in a segregating population of cotton plants having allelic DNA in a specific locus of a chromosome which confers a phenotypic effect on a trait of interest and where the molecular marker is located either within or near this locus.

[0182] The methods of genotyping with single molecular markers (e.g. cotton genomic polymorphism) can also be used to select a parent plant, a progeny plant or a tester plant for breeding. In this case, the polymorphism is genetically linked to a chromosomal region that confers one or more desirable phenotypic trait(s). Selection of parent, progeny or tester cotton plants that contain the particular allelic state associated with the phenotypic trait(s) provides for accelerated and less costly breeding.

[0183] It is contemplated that certain cotton genomic polymorphisms disclosed herein in Table 1 or Table 3 can be directly linked to a given phenotypic trait in that they include certain allelic states that alter a regulatory or coding sequence of a gene that confers the trait or contributes to expression of the trait. Such traits include lint yield, boll distribution, seed cotton yield, lint percent, boll weight, boll size, boll length, boll width, bolls/plant, seeds/boll, fibers/seed, seed weight, trash content, lodging, flowering and maturity, plant height, disease resistance, e.g. resistance to Anthracnose (Glomerella gossypii, Colletotrichum gossypii), Areolate mildew (Ramularia gossypii, Cercosporella gossypii, Mycosphaerella areola), Ascochyta blight (Ascochyta gossypii), Black root rot (Thielaviopsis basicola, Chalara elegans), Boll rot (Ascochyta gossypii, Colletotrichum gossypii, Glomerella gossypii, Fusarium spp., Lasiodiplodia theobromae, Diplodia gossypina, Botryosphaeria rhodina, Physalospora rhodina, Phytophthora spp., Rhizoctonia solani), Charcoal rot (Macrophomina phaseolina), Escobilla (Colletotrichum gossypii, Glomerella gossypii), Fusarium wilt (Fusarium oxysporum f. sp. vasinfectum), Leaf spot (Alternaria macrospore, A. alternata, Cercospora gossypina, Mycosphaerella gossypina, Cochliobolus spicifer, Bipolaris spicifera, Myrothecium roridum, Rhizoctonia solani, Stemphylium solani), Lint contamination (Aspergillus flavus, Nematospora spp., Nigrospora oryzae), cotton root rot (Phymatotrichopsis omnivore, Phymatotrichum omnivorum), Powdery mildew (Leveillula taurica, Oidiopsis sicula, Scalia, Oidiopsis gossypii, Salmonia malachrae), Stigmatomycosis (Ashbya gossypii, Eremothecium coryli, Nematospora coryli, Aureobasidium pullulans), Cotton rust (Puccinia schedonnardi), Southwestern cotton rust (Puccinia cacabata), Tropical cotton rust (Phakopsora gossypii), Sclerotium stem and root rot or southern blight (Sclerotium rolfsii, Athelia rolfsii), Seedling disease complex (Colletotrichum gossypii, Fusarium spp., Pythium spp., Rhizoctonia solani, Thanatephorus cucumeris, Thielaviopsis basicola, Chalara elegans), Stem canker (Phoma exigua), Verticillium wilt (Verticillium dahliae), and other boll and root rots, blights, rusts, blue disease, bronze wilt, seedling diseases, bacterial diseases, e.g., resistance to bacterial blight (Xanthomonas axonopodis pv. Malvacearum), viral diseases, e.g., resistance to leaf curl virus (Bigeminivirus), insect diseases, e.g. resistance to boll weevil (Anthonomus grandis), parasitic diseases, e.g. resistance to root knot nematodes (Meloidogyne spp.), Lance nematodes (Hoplolaimus spp.), Reniform nematodes (Rotylenchulus spp.), Sting nematodes (Belonolaimus spp.), and the like, abiotic stress tolerance, e.g., drought tolerance, salt tolerance, cold tolerance, heat tolerance, storm tolerance, nutrient deficiency, and the like, male sterility, female sterility, fertility restoration, morphological traits, e.g., plant type, leaf size, leaf color, leaf thickness, leaf shape, leaf hairiness, stem hairiness, petal color, petal spot, pollen color, glands, fiber color, root length, root thickness, and the like, physiological traits, e.g., seed dormancy, seedling, vigor, stand count, cold germination, plant mass (dry weight), chlorophyll content, leaf senescence, and the like, fiber quality traits, e.g., fiber length, fiber strength, fiber fineness, short fiber content, fiber elongation, fiber color grade, fiber uniformity, and the like, and seed quality traits, e.g., seed protein content, seed oil content, seed gossypol content, and the like. When the cotton genomic polymorphism is directly linked to the trait in this manner, it is extremely useful in cotton breeding programs aimed at introducing that trait into many distinct cotton genetic backgrounds.

[0184] The use of molecular markers that are specifically associated with high PIC values and have nearly 50% polymorphic rates in elite germplasm is specifically contemplated herein. Markers with high PIC values possess a high level of polymorphism in distinct germplasms and are subsequently useful in introgressing genomic regions associated with a given germplasm into different germplasms. Markers with high PIC values are also useful in identifying elite germplasm. The cotton genomic DNA polymorphisms associated with high PIC values that can be used are from the group consisting of SEQ ID NO: 287, 562, 3134, 2996, 1146, 1906, 3858, 1477, 961, 4606, 1190, 1200, 28, 4742, 7368, 5199, 1762, and 6884. The cotton genomic DNA polymorphisms more closely associated with high PIC values are selected from the group consisting of SEQ ID NO: 287, 562, 3134, 2996, 1146, 1906, 3858, 1477, 961, and 4606. Cotton genomic DNA polymorphisms with even greater degrees of association with high PIC values are selected from the group consisting of SEQ ID NO: 287, 562, 3134, 2996, 1146, 1906, 3858, 1477, 961, and 4606. The cotton genomic polymorphisms that are most closely associated with a high PIC values comprise the polymorphisms of SEQ ID NO: 287 and 562.

[0185] Additionally, the use of molecular markers that are specifically associated with linked traits of interest is specifically contemplated herein. Exemplary cotton genomic DNA polymorphisms associated with linked traits of interest can be selected from a group consisting of SEQ ID NO: 14569, 10965, 11455, 12344, 2645, 10925, and 9279. Cotton genomic DNA polymorphisms disclosed in SEQ ID NO: 14569, 10965, 11455, 12344, 2645, 10925, and 9279 are respectively associated or linked to lint yield (i.e., an exotic yield QTL G75Y; SEQ ID NO: 14569), the RoundUp Ready Flex™ (i.e., MON88913 described in Petition Number 04-CT-112U to the U.S. Department of Agriculture, March 2004) transgene insertion site (SEQ ID NO: 10965), a locus that conditions a lint yield QTL (i.e. 669Yc; SEQ ID NO: 11455), a lint yield QTL (i.e., 669Y; SEQ ID NO: 12344), the BollGard™ (i.e., MON531 described in described in U.S. Pat. No. 7,223,907) transgene insertion site (SEQ ID NO: 2645), the BollGard II™ Cry2Ab transgene insertion site (i.e., MON15985X described in U.S. Pat. No. 7,223,907; SEQ ID NO: 10925), and a locus that confers root knot nematode resistance (SEQ ID NO: 9279). The cotton genomic DNA polymorphisms disclosed in SEQ ID NO: 14569, 10965, 11455, 12344, 2645, 10925, and 9279 can be used to introgress the linked traits or genes into distinct germplasms.

[0186] Introgression of the genomic region associated with this single marker can be accelerated by using multiple markers to minimize linkage drag associated with genomic regions that may not confer agronomically elite properties. Introgression of the genomic region that is closely associated with this single marker can be accelerated by using multiple markers that immediately flank the single marker to minimize any linkage drag that is potentially associated with the closely associated genomic regions. Thus the use of a clustered set of 2, 5, 10 or 20 markers located with 10, 5, 2, or 1 cm of both the proximal and distal ends of a single marker can provide for introgression of the desired genomic region associated with the single marker while minimizing introgression of undesired immediate flanking regions. Introgression of the genomic region that is closely associated with this single marker can also be accelerated by using multiple markers that are distributed across the genome to minimize any linkage drag that is potentially associated with genomic regions located on distant regions of the same chromosome and on other chromosomes. This set of multiple markers may comprise 26 additional markers with at least one marker per chromosome. However, in preferred embodiments, the marker density is at least about 10 markers per chromosome, preferably about 20 markers per chromosome and more preferably at least about 100 markers per chromosome in order to efficiently discriminate between genomic regions from the donor and recipient parents. Use of multiple flanking markers that are either immediately linked to the single marker or are distributed across the genome can thus provide for maximum recovery of the recipient parent in selected progeny of a cross.

[0187] Methods of Genotyping with Sets of Cotton Genomic DNA Polymorphisms

[0188] Genotyping methods that employ sets of nucleic acid molecules that can type multiple distinct polymorphisms are specifically contemplated herein. In such methods, a finite number of at least two cotton genomic polymorphisms are typed. This finite number of cotton genomic polymorphisms queried can comprise at least 2, 5, 10 or 20 distinct polymorphisms that are represented as 2, 5, 10, or 20 distinct SEQ ID NO in Tables 1 or 3. Such methods of genotyping necessarily require the use of sets of nucleic acid molecules that can type sets of cotton genomic polymorphisms.

[0189] In certain applications, these methods of genotyping use a concentration of multiple molecular markers (i.e. cotton genomic polymorphisms) in a given chromosomal interval. High density fingerprints used to establish and trace the identity of germplasm can be obtained by performing the genotyping methods that use multiple molecular markers that are concentrated or clustered in certain chromosomal intervals and/or around certain genetic loci that confer certain traits. High density fingerprint information is useful for assessing germplasm diversity, performing genetic quality assurance functions, mining rare alleles, assessing exotic germplasm pools, and evaluating genetic purity. These high density finger prints can be used to establish a database of marker-trait associations to benefit an overall crop breeding program. High density fingerprints can also be used to establish and protect germplasm ownership. Sets of markers that are clustered around a desired chromosome interval or genetic trait can be selected from the mapped cotton polymorphisms provided in Table 3.

[0190] These methods of genotyping with multiple molecular markers can also be used to associate a phenotypic trait to a genotype in cotton plants. DNA or mRNA in tissue from at least two cotton plants having allelic DNA is assayed to identify the presence or absence of a set of finite series of polymorphisms provided as molecular markers by the present invention. Associations between the set of molecular markers and set of phenotypic traits are identified where the set of molecular markers comprises at least 2, at least 5, or at least 10, molecular markers linked to a polymorphic locus of the invention, e.g. at least 10 molecular markers linked to mapped polymorphisms, e.g. as identified in Table 3. In a more preferred aspect traits are associated to genotypes in a segregating population of cotton plants having allelic DNA in loci of a chromosome which confers a phenotypic effect on a trait of interest and where a molecular marker is located in such loci and where the degree of association among the molecular markers and between the polymorphisms and the traits permits determination of a linear order of the polymorphism and the trait loci. In such methods at least 5 molecular markers are linked to loci permitting disequilibrium mapping of the loci.

[0191] In still other applications, these methods of genotyping use molecular markers that are distributed across the genome of cotton. In these methods, the molecular marker can either be spread across a single chromosome, located on multiple chromosomes, located on all chromosomes or be located on each arm of each chromosome. In one specific embodiment, at least 1 of the molecular markers that is used in the genotyping method using a plurality of markers maps to each chromosome of all of the 26 cotton chromosomes, thus necessitating the typing of at least 52 cotton genomic DNA polymorphisms. However, other embodiments of this method where at least 10 cotton genomic DNA polymorphisms map to each chromosome, thus necessitating the typing of at least 260 cotton genomic DNA polymorphisms, are also contemplated. Similarly, still other embodiments that entail typing of at least 20 cotton genomic DNA polymorphisms on each chromosome (necessitating the typing of at least 520 polymorphisms) or typing of at least 50 cotton genomic DNA polymorphisms on each chromosome (necessitating the typing of at least 1,300 polymorphisms) are also contemplated. Embodiments that entail typing of at least 100 cotton genomic DNA polymorphisms on each chromosome (necessitating the typing of at least 2,600 polymorphisms) are also contemplated. Sets of markers that are distributed across the genome of cotton can be selected from the mapped cotton polymorphisms provided in Table 3 for use in these methods.

[0192] Methods of genotyping that use molecular markers that are distributed across the genome of cotton can be used in a variety of applications. In one application, the methods of genotyping are used to select a parent plant, a progeny plant or a tester plant for breeding. A variety of applications of these genotyping methods to cotton breeding programs are contemplated. These genotyping methods can be used to facilitate introgression of one or more traits, genomic loci, and/or transgene insertions from one genetic background to a distinct genetic background. In general, the set of selected markers in progeny plants from out-crossed populations is queried to identify and select individual progeny that contain the desired traits, genomic loci, and/or transgene insertions yet comprises as many alleles from the distinct genetic background from the outcross as possible. Such methods can accelerate introgression of the desired traits, genomic loci, and/or transgene insertions into a new genetic background by several generations.

[0193] These methods also provide for screening of traits by interrogating a collection of molecular markers, such as SNPs, at an average density of less than about 10 cM on a genetic map of cotton. The presence or absence of a molecular marker linked to a polymorphic locus of Table 1 or Table 3 can be analyzed in the context of one or more phenotypic traits in order to identify one or more specific molecular marker alleles at one or more genomic regions that are associated with one or more of said traits. In another aspect of the invention the molecular markers are used to identify haplotypes which are allelic segments of genomic DNA characterized by at least two polymorphisms in linkage disequilibrium and wherein said polymorphisms are in a genomic windows of not more than 10 centimorgans in length, e.g. not more than about 8 centimorgans or smaller windows, e.g. in the range of say 1 to 5 centimorgans. In certain embodiments of these methods, set of such molecular markers to identify a plurality of haplotypes in a series of adjacent genomic windows in each cotton chromosome, e.g. providing essentially full genome coverage with such windows. With a sufficiently large and diverse breeding population of cotton, it is possible to identify a high quantity of haplotypes in each window, thus providing allelic DNA that can be associated with one or more traits to allow focused marker assisted breeding. Thus, an aspect of the cotton analysis of this invention further comprises the steps of characterizing one or more traits for said population of cotton plants and associating said traits with said allelic SNP or Indel polymorphisms, preferably organized to define haplotypes. Such traits include lint yield, boll distribution, seed cotton yield, lint percent, boll weight, boll size, boll length, boll width, bolls/plant, seeds/boll, fibers/seed, seed weight, trash content, lodging, flowering and maturity, plant height, disease resistance, e.g. resistance to Anthracnose (Glomerella gossypii, Colletotrichum gossypii), Areolate mildew (Ramularia gossypii, Cercosporella gossypii, Mycosphaerella areola), Ascochyta blight (Ascochyta gossypii), Black root rot (Thielaviopsis basicola, Chalara elegans), Boll rot (Ascochyta gossypii, Colletotrichum gossypii, Glomerella gossypii, Fusarium spp., Lasiodiplodia theobromae, Diplodia gossypina, Botryosphaeria rhodina, Physalospora rhodina, Phytophthora spp., Rhizoctonia solani), Charcoal rot (Macrophomina phaseolina), Escobilla (Colletotrichum gossypii, Glomerella gossypii), Fusarium wilt (Fusarium oxysporum f. sp. vasinfectum), Leaf spot (Alternaria macrospore, A. alternata, Cercospora gossypina, Mycosphaerella gossypina, Cochliobolus spicifer, Bipolaris spicifera, Myrothecium roridum, Rhizoctonia solani, Stemphylium solani), Lint contamination (Aspergillus flavus, Nematospora spp., Nigrospora oryzae), cotton root rot (Phymatotrichopsis omnivore, Phymatotrichum omnivorum), Powdery mildew (Leveillula taurica, Oidiopsis sicula, Scalia, Oidiopsis gossypii, Salmonia malachrae), Stigmatomycosis (Ashbya gossypii, Eremothecium coryli, Nematospora coryli, Aureobasidium pullulans), Cotton rust (Puccinia schedonnardi), Southwestern cotton rust (Puccinia cacabata), Tropical cotton rust (Phakopsora gossypii), Sclerotium stem and root rot or southern blight (Sclerotium rolfsii, Athelia rolftsii), Seedling disease complex (Colletotrichum gossypii, Fusarium spp., Pythium spp., Rhizoctonia solani, Thanatephorus cucumeris, Thielaviopsis basicola, Chalara elegans), Stem canker (Phoma exigua), Verticillium wilt (Verticillium dahliae) and other boll and root rots, blights, rusts, blue disease, bronze wilt, seedling diseases, bacterial diseases, e.g., resistance to bacterial blight (Xanthomonas axonopodis pv. Malvacearum), viral diseases, e.g., resistance to leaf curl virus (Bigeminivirus), insect diseases, e.g. resistance to boll weevil (Anthonomus grandis), parasitic diseases, e.g. resistance to root knot nematodes (Meloidogyne spp.), Lance nematodes (Hoplolaimus spp.), Reniform nematodes (Rotylenchulus spp.), Sting nematodes (Belonolaimus spp.), and the like, abiotic stress tolerance, e.g., drought tolerance, salt tolerance, cold tolerance, heat tolerance, storm tolerance, nutrient deficiency, and the like, male sterility, female sterility, fertility restoration, morphological traits, e.g., plant type, leaf size, leaf color, leaf thickness, leaf shape, leaf hairiness, stem hairiness, petal color, petal spot, pollen color, glands, fiber color, root length, root thickness, and the like, physiological traits, e.g., seed dormancy, seedling, vigor, stand count, cold germination, plant mass (dry weight), chlorophyll content, leaf senescence, and the like, fiber quality traits, e.g., fiber length, fiber strength, fiber fineness, short fiber content, fiber elongation, fiber color grade, fiber uniformity, and the like, and seed quality traits, e.g., seed protein content, seed oil content, seed gossypol content, and the like.

### EXAMPLES

[0194] The following examples are included to demonstrate preferred embodiments of the invention. It should be appreciated by those of skill in the art that the techniques disclosed in the examples which follow represent techniques discovered by the inventor to function well in the practice of the invention, and thus can be considered to constitute preferred modes for its practice. However, those of skill in the art should, in light of the present disclosure, appreciate that many changes can be made in the specific embodiments which are disclosed and still obtain a like or similar result without departing from the concept, spirit and scope of the invention. More specifically, it will be apparent that certain agents which are both chemically and physiologically related may be substituted for the agents described herein while the same or similar results would be achieved. All such similar substitutes and modifications apparent to those skilled in the art are deemed to be within the spirit, scope and concept of the invention as defined by the appended claims.

### Example 1

[0195] This example illustrates the preparation of reduced representation libraries using enzymes which are sensitive to methylated cytosine residues in order to enrich for unique/coding-sequence genomic DNA.

[0196] Genomic DNA extraction methods are well known in the art. A method which maximizes both yield and convenience is to extract DNA using “Plant DNAzol Reagent” from Life Technologies (Grand Island, N.Y.). Briefly, frozen leaf tissue is ground in liquid nitrogen in a mortar and pestle. The ground tissue is then extracted with DNAzol reagent. This removes cellular proteins, cell wall material and other debris. Following extraction with this reagent, the DNA is precipitated, washed, resuspended, and treated with RNAse to remove RNA. The DNA is precipitated again, and resuspended in a suitable volume of TE (so that concentration is 1 μg/μl). The genomic DNA is ready to use in library construction.

[0197] Genomic DNA from two cotton lines which are to be compared for polymorphism detection are digested separately with Pst I restriction endonuclease which provides the ends of the DNA fragments with sticky ends which can ligate into a plasmid with the same restriction site. For instance, 100 units of Pst I is added to 20 μg of DNA and incubated at 37° C. for 8 hours. The digested DNA product is separated by electrophoresis on a 1% low-melting-temperature-agarose gel to separate the DNA fragments by size. The digested DNA from the two cotton lines is loaded side by side on the gel (with one lane in between as a spacer). Both a 1-KB DNA ladder marker and a 100-bp DNA ladder marker are loaded on each side of the two cotton DNA lanes. These markers act as a guide for size fractionation of the digested cotton DNA. Fragments in the range of 500 to 3000 bp are excised incrementally from the gel in size fractions of 500-600 bp, 600-700 bp, 700-800 bp, 800-900 bp, 900-1100 bp, 1100-1500 bp, 1500-2000 bp, 2000-2500 bp and 2500-3000 bp. DNA in each fraction is purified using β-agarase and ligated into the Pst I cloning site of pUC18. The plasmid ligation products are transformed by electroporation into DH10B E. coli bacterial hosts to produce reduced representation libraries. For instance, about 500 ng of the size-selected DNA is ligated to 50 ng dephosphorylated pUC18 vector.

[0198] Transformation is carried out by electroporation and the transformation efficiency for reduced representation Pst I libraries is approximately 50,000-300,000 transformants from one microliter of ligation product or 1000 to 6000 transformants/ng DNA.

[0199] Basic tests to evaluate the quality include the average insert size, chloroplast/mitochondrial DNA content, and the fraction of repetitive sequence.

[0200] The determination of the average insert size of the library is assessed during library construction. Every ligation is tested to determine the average insert size by assaying 10-20 clones per ligation. DNA is isolated from recombinant clones using a standard mini preparation protocol, digested with Pst I to free the insert from the vector and then sized using 1% agarose gel electrophoresis (Maule, Molecular Biotechnology 9:107-126 (1998), the entirety of which is herein incorporated by reference).

[0201] The chloroplast/mitochondrial DNA content, and the percentage of repetitive sequence in the library is estimated by sequencing a small sample of clones (400), and cross checking the sequence obtained against various sequence databases. Some repetitive elements are not present in the databases, but can nevertheless often be identified by the large number of copies of the same sequence. For instance, after sequencing a set of 400 clones any sequence that is not filtered by the repetitive element database, but yet is present more than 10 times in the sample is considered a repetitive element.

[0202] Cotton reduced representation libraries of the present invention are constructed by inserting coding region enriched DNA obtained from the following cotton lines: Delta_Pearl, Nucotn33B, DP20B, DP5690, Explorer, FM989BGRR, Ji_Mian12, NG3969R, PKCIM473, PM2200RR, PMHS26, SG105, Sicala40, Sicot189, Sphinx, ST4892BR, ST5599BR, Zhong_Mian35, Acala_NemX, SG747, PKFH901, TM-1, and Pima_{—}3-79.

### Example 2

[0203] This example illustrates the determination of cotton genomic DNA sequence from clones in reduced representation libraries prepared in Example 1. Two basic methods can be used for DNA sequencing, the chain termination method of Sanger et al., Proc. Natl. Acad. Sci. USA 74:5463-5467 (1977) and the chemical degradation method of Maxam and Gilbert, Proc. Natl. Acad. Sci. USA 74:560-564 (1977). Automation and advances in technology such as the replacement of radioisotopes with fluorescence-based sequencing have reduced the effort required to sequence DNA (Craxton, Methods, 2:20-26 (1991), Ju et al., Proc. Natl. Acad. Sci. USA 92:4347-4351 (1995) and Tabor and Richardson, Proc. Natl. Acad. Sci. USA 92:6339-6343 (1995). Automated sequencers are available from, for example, Applied Biosystems, Foster City, Calif. (ABI Prism® systems); Pharmacia Biotech, Inc., Piscataway, N.J. (Pharmacia ALF), LI-COR, Inc., Lincoln, Nebr. (LI-COR 4,000) and Millipore, Bedford, Mass. (Millipore BaseStation).

[0204] Sequence base calling from trace files and quality scores are assigned by PHRED which is available from CodonCode Corporation, Dedham, Mass. and is described by Brent Ewing, et al. “Base-calling of automated sequencer traces using phred”, 1998, Genome Research, Vol. 8, pages 175-185 and 186-194, incorporated herein by reference.

[0205] After the base calling is completed, sequence quality is improved by cutting poor quality end sequence. If the resulting sequence is less than 50 bp, it is deleted. Sequence with an overall quality of less than 12.5 is deleted. And, contaminating sequence, e.g. E. Coli BAC and vector sequences and sub-cloning vector, are removed. Contigs are assembled using Pangea Clustering and Alignment Tools which is available from DoubleTwist Inc., Oakland, Calif. by comparing pairs of sequences for overlapping bases. The overlap is determined using the following high stringency parameters: word size=8; window size=60; and identity is 93%. The clusters are reassembled using PHRAP fragment assembly program which is available from CodonCode Corporation using a “repeat stringency” parameter of 0.5 or lower. The final assembly output contains a collection of sequences including contig sequences which represent the consensus sequence of overlapping clustered sequences (contigs) and singleton sequences which are not present in any cluster of related sequences (singletons). Collectively, the contigs and singletons resulting from a DNA assembly are referred to as islands.

### Example 3

[0206] This example illustrates identification of SNP and Indel polymorphisms by comparing alignments of the sequences of contigs and singletons from at least two separate cotton lines as prepared as in example 2. Sequence from multiple cotton lines is assembled into loci having one or more polymorphisms, i.e. SNPs and/or Indels. Candidate polymorphisms are qualified by the following parameters:

[0207] The minimum length of a contig or singleton for a consensus alignment is 200 bases.

[0208] The percentage identity of observed bases in a region of 15 bases on each side of a candidate SNP, is 75%.

[0209] The minimum BLAST quality in each contig at a polymorphism site is 35.

[0210] The minimum BLAST quality in a region of 15 bases on each side of the polymorphism site is 20.

[0211] A plurality of loci having qualified polymorphisms are identified as having consensus sequence as reported as SEQ ID NO: 1 through SEQ ID NO: 14832. The qualified SNP and Indel polymorphisms in each locus are identified in Table 1. More particularly, Table 1 identifies the type and location of the polymorphisms as follows:

[0212] SEQ_NUM refers to the SEQ ID NO. (sequence ID number) of the polymorphic cotton DNA locus.

[0213] CONSSEQ_ID refers to an arbitrary identifying name for the polymorphic cotton DNA locus.

[0214] MUTATION_ID refers to an arbitrary identifying name for each polymorphism.

[0215] START_POS refers to the position in the nucleotide sequence of the polymorphic cotton DNA locus where the polymorphism begins.

[0216] END_POS refers to the position in the nucleotide sequence of the polymorphic cotton DNA locus where the polymorphism ends; for SNPs the START_POS and END_POS are common.

[0217] TYPE refers to the identification of the polymorphism as an SNP or IND (Indel).

[0218] ALLELE and STRAIN refers to the nucleotide sequence of a polymorphism in a specific allelic cotton variety.

### Example 4

[0219] This example illustrates the use of primer base extension for detecting a SNP polymorphism.

[0220] A small quantity of cotton genomic DNA (e.g. about 10 ng) is amplified using the forward and reverse PCR primers which are designed to have an annealing temperature of 55° C. to the template, i.e., around a polymorphism of a particular molecular marker. The PCR product is added to a new plate in which the extension primer is covalently bound to the surface of the reaction wells in a GBA plate. Extension mix containing DNA polymerase, the two differentially labeled ddNTPs, and extension buffer is added. The GBA plate is incubated at 42° C. for 15 min to allow extension. The reaction mix is removed from the wells by washing with a suitable buffer. The two labels are detected by sequential incubation with primary and secondary detection reagents for each of the labels. Incorporation of a specific ddNTP-FITC is measured by incubation with HRP-anti-FITC, followed by washing the wells, followed by incubation in a buffer containing a chromogenic substrate for HRP. The extent of the reaction is determined spectrophotometrically for each well at the wavelength appropriate for the product of the HRP reaction. The wells are washed again, and the procedure is repeated with AP-streptavidin, followed by a chromogenic substrate for AP, and spectrophotometry at the wavelength appropriate for the AP reaction product.

[0221] Analysis of Results.

[0222] The extent of incorporation of each labeled ddNTP is inferred from the absorbance measured for the reaction products of the detection steps specific label, and the genotype of the sample is inferred from the ratios of these absorbances as compared to a standard of known genotype and a no-template control reactions. In the most common practice, the absorbances observed for each data point are plotted against each other in a scatter plot, producing an “allelogram”. A successful genotyping assay using the single base extension assay of this example provides an allelogram as illustrated in FIG. 2 where the data points are grouped into four clusters: Homozygote 1 (e.g., the A allele), homozygote 2 (e.g., the G allele), heterozygotes (each sample containing both alleles), and a “no signal” cluster resulting from no-template controls, or failed amplification or detection.

### Example 5

[0223] This example illustrates the use of a labeled probe degradation assay for detecting a SNP polymorphism. A quantity of cotton genomic template DNA (e.g. about 2-20 ng) is mixed in 5 μl total volume with four oligonucleotides, as described in Table 2, i.e. forward primer, reverse primer, hybridization probe having a VIC reporter attached to the 5′ end and hybridization probe having a FAM reporter attached to the 5′ end as well as PCR reaction buffer containing the passive reference dye ROX. The PCR reaction is conducted for 35 cycles using a 60° C. annealing-extension temperature. Following the reaction, the fluorescence of each fluorophore as well as that of the passive reference is determined in a fluorimeter. The fluorescence value for each fluorophore is normalized to the fluorescence value of the passive reference. The normalized values are plotted against each other for each sample to produce an allelogram. A successful genotyping assay using the primers and hybridization probes of this example provides an allelogram with data points in clearly separable clusters as illustrated in FIG. 2.

[0224] Table 2. Examples of molecular marker assays using labeled probe degradation detection of SNP polymorphisms. Each assay provides two oligonucleotides primers, to amplify the region spanning the polymorphism, and two oligonucleotides probes, which have fluorogenic reporter molecules attached for SNP allele detection. Useful reporter dyes include, but are not limited to, 6-carboxy-4,7,2′,7′-tetrachlorofluorecein (TET), 2′-chloro-7′-phenyl-1,4-dichloro-6-carboxyfluorescein (VIC) and 6-carboxyfluorescein phosphoramidite (FAM). A useful quencher is 6-carboxy-N,N,N′,N′-tetramethylrhodamine (TAMRA).

| | | PRIMER | | | |
|---|---|---|---|---|---|
| Marker | CONSEQ_{—} | SEQ ID | Sequence | | |
| SEQ ID | ID | NO: | type | Sequence | Allele |
| 76 | 20071754- | SEQ ID | Forward | CACCTGCTATCGATCACAACTTGAG | |
| | CON.1 | NO: 14833 | Primer | | |
| 76 | 20071754- | SEQ ID | Probe 1 | CCAATTAGTCGAAGAAC | A |
| | CON.1 | NO: 14834 | | | |
| 76 | 20071754- | SEQ ID | Probe 2 | AATTCGTCGAAGAAC | C |
| | CON.1 | NO: 14835 | | | |
| 76 | 20071754- | SEQ ID | Reverse | GTTTAGGTGAGGATTGTGTGATGGT | |
| | CON.1 | NO: 14836 | Primer | | |
| 77 | 20071756- | SEQ ID | Forward | GTTCATTCATTAAATTGGACATTGG | |
| | CON.1 | NO: 14845 | Primer | TTGGT | |
| 77 | 20071756- | SEQ ID | Probe 1 | CAACGCAGAGAAAT | G |
| | CON.1 | NO: 14846 | | | |
| 77 | 20071756- | SEQ ID | Probe 2 | AACAACGAAGAGAAAT | T |
| | CON.1 | NO: 14847 | | | |
| 77 | 20071756- | SEQ ID | Reverse | GTTTTGGGTTTTCATTACACACCTT | |
| | CON.1 | NO: 14848 | Primer | ATGT | |
| 55 | 20071717- | SEQ ID | Forward | CAAAATTCTTCGAGCCCACACTTTC | |
| | CON.1 | NO: 14869 | Primer | | |
| 55 | 20071717- | SEQ ID | Probe 1 | AAACTTTATCAATAAAATGTC | A |
| | CON.1 | NO: 14870 | | | |
| 55 | 20071717- | SEQ ID | Probe 2 | AAACTTTATCAATAGAATGTC | G |
| | CON.1 | NO: 14871 | | | |
| 55 | 20071717- | SEQ ID | Reverse | TCGTCCTCAAAGCCCAAATCTG | |
| | CON.1 | NO: 14872 | Primer | | |

[0225] To confirm that an assay produces accurate results, each new assay is performed on a number of replicates of samples of known genotypic identity representing each of the three possible genotypes, i.e. two homozygous alleles and a heterozygous sample. To be a valid and useful assay, it must produce clearly separable clusters of data points, such that one of the three genotypes can be assigned for at least 90% of the data points, and the assignment is observed to be correct for at least 98% of the data points. Subsequent to this validation step, the assay is applied to progeny of a cross between two highly inbred individuals to obtain segregation data, which are then used to calculate a genetic map position for the polymorphic locus.

### Example 6

[0226] This example illustrates the genetic mapping of molecular markers in loci of this invention based on the genotypes of over 1101 SNPs for 180 F₂ plants originating from the cross of cotton lines TM-1 and Pima. The genotypes are combined with genotypes for 1320 public core SSR and RFLP markers scored on the IRIs. Before mapping, any loci showing distorted segregation (P<1e-5 for a Chi-square test of a 1:1 segregation ratio) are removed. A low alpha-level is used to account for the multiple-testing problem.

[0227] In one aspect, a map can be constructed using the JoinMap version 2.0 software which is described by Stam, P. “Construction of integrated genetic linkage maps by means of a new computer package: JoinMap, The Plant Journal, 3: 739-744 (1993); Stam, P. and van Ooijen, J. W. “JoinMap version 2.0: Software for the calculation of genetic linkage maps (1995) CPRO-DLO, Wageningen. JoinMap implements a weighted-least squares approach to multipoint mapping in which information from all pairs of linked loci (adjacent or not) is incorporated. Linkage groups are formed using a LOD threshold of 5.0. The SSR and RFLP public markers are used to assign linkage groups to chromosomes. Linkage groups are merged within chromosomes before map construction.

[0228] Other approaches to mapping high density markers are known in the art; see, for example, Winkler et al. (Genetics 164:741-745 (2003)), for the utility of IRIs for higher resolution mapping. See also, Jansen et al. (Theor Appl Genet 102:1113-1122 (2001)). In many conditions, the approach of Jansen et al. yields a close approximation to a maximum-likelihood map. Further, a map estimated by this approach agrees quite closely with the map obtained using JoinMap 2.0. In addition, combinations of methods described above and incorporated herein by reference may be used to best leverage marker data under a range of population structure as well as computational constraints.

[0229] In another aspect of the present invention, Kosambi's mapping function is used to convert recombination fractions to map distances. Mapped SNP molecular markers are identified in Table 3 where “Chromosome” and “Position” identify the distance measured in cM from the 5′ end of a cotton chromosome for the SNP identified by “Consseq_ID”. For certain of the mapped polymorphic markers listed in Table 3, the Mutation ID is listed more than once which indicates that the mapping was conducted based on multiple genotyping assays. The map locations for multiple genotyping assays generally serve to confirm map location except in the case where map locations are divergent, e.g. due to error in the design or practice of an assay. The density and distribution of the mapped molecular markers is shown in FIG. 1.

### Example 7

[0230] This example illustrates methods of the invention using molecular markers disclosed in Table 1 and in the DNA sequences of SEQ ID NO: 1-14832.

[0231] A breeding population of cotton with diverse heritage is analyzed using primer pairs and probe pairs prepared as indicated in Example 5 for each of the molecular markers identified in Table 1 based on sequences of SEQ ID NO:1-14832. Closely linked molecular markers are identified as characterizing haplotypes within adjacent genomic windows of about 10 centimorgans across the cotton genome. Haplotypes representing at least 4% of the population are associated with trait values identified for each member of the cotton population including the trait values for lint yield, maturity, lodging, plant height, rust resistance, drought tolerance and cold germination. The trait values for each haplotype are ranked in each 10 centimorgan window. Progeny seed from randomly-mated members of the population are analyzed for the identity of haplotypes in each window. Progeny seed are selected for planting based on high trait values for haplotypes identified in said seeds.

### Example 8

[0232] This example illustrates the identification of polymorphisms that are useful for obtaining a parent plant, a progeny plant or a tester plant for breeding with preferred germplasm. In this particular example, polymorphisms have been selected for usefulness as markers for breeding programs based on high PIC values. Markers with high PIC values possess a high level of polymorphism in distinct germplasms and are subsequently useful in introgressing genomic regions associated with a given germplasm into different germplasms. However, it is also anticipated that other markers useful for identifying other preferred genomic regions can be identified in a similar manner (i.e. by determining the PIC value). It is further anticipated that the specific markers disclosed in this Example may also find other uses in addition to serving as informative markers for breeding.

[0233] The specific markers that can be used to identify plants for breeding with the preferred germplasm can be selected from the group consisting of SEQ ID NO: 287, 1200, 1762, 562, 2996, 5199, 1477, 1906, 4742, 7368, 1146, 3134, 6884, 961, 1190, 3858, 4606, and 28.

TABLE 4
Description of top 25 cotton SNP markers.

| SEQ | Marker | | | |
|---|---|---|---|---|
| ID | Name | CONSSEQ_ID | Comments | PIC |
| 287 | NC0203353 | 20072460 | High PIC value, nearly 50% polymorphic rate in | 0.4375 |
| | | | elite germplasm | |
| 1200 | NC0203518 | 20080300 | High PIC value, nearly 50% polymorphic rate in | 0.4091 |
| | | | elite germplasm | |
| 14569 | NC0207917 | 20129278 | Linked an exotic yield QTL G75Y | 0.4224 |
| 1762 | NC0203545 | 20081808 | High PIC value, nearly 50% polymorphic rate in | 0.3665 |
| | | | elite germplasm | |
| 10925 | NC0206634 | 20113844 | Linked to Bollgard II Cry2Ab transgene insertion | 0.1719 |
| | | | (MON15985X) | |
| 562 | NC0203365 | 20073432 | High PIC value, nearly 50% polymorphic rate in | 0.4375 |
| | | | elite germplasm | |
| 2996 | NC0203802 | 20084739 | High PIC value, nearly 50% polymorphic rate in | 0.4337 |
| | | | elite germplasm | |
| 5199 | NC0204129 | 20095159 | High PIC value, nearly 50% polymorphic rate in | 0.3854 |
| | | | elite germplasm | |
| 9279 | NC0206578 | 20109013 | Linked to RKN resistance | 0.2217 |
| 1477 | NC0203564 | 20081020 | High PIC value, nearly 50% polymorphic rate in | 0.4188 |
| | | | elite germplasm | |
| 1906 | NC0203515 | 20082179 | High PIC value, nearly 50% polymorphic rate in | 0.4224 |
| | | | elite germplasm | |
| 4742 | NC0204416 | 20094217 | High PIC value, nearly 50% polymorphic rate in | 0.3951 |
| | | | elite germplasm | |
| 7368 | NC0204389 | 20104464 | High PIC value, nearly 50% polymorphic rate in | 0.3951 |
| | | | elite germplasm | |
| 1146 | NC0203602 | 20080131 | High PIC value, nearly 50% polymorphic rate in | 0.4298 |
| | | | elite germplasm | |
| 3134 | NC0203808 | 20084998 | High PIC value, nearly 50% polymorphic rate in | 0.4366 |
| | | | elite germplasm | |
| 6884 | NC0204463 | 20103500 | High PIC value, nearly 50% polymorphic rate in | 0.3158 |
| | | | elite germplasm | |
| 961 | NC0204347 | 20079657 | High PIC value, nearly 50% polymorphic rate in | 0.4188 |
| | | | elite germplasm | |
| 1190 | NC0203638 | 20080277 | High PIC value, nearly 50% polymorphic rate in | 0.4093 |
| | | | elite germplasm | |
| 10965 | NC0207787 | 20113949 | Linked Roundup Ready Flex (MON88913 | 0.4093 |
| | | | insertion) | |
| 3858 | NC0204209 | 20086632 | High PIC value, nearly 50% polymorphic rate in | 0.4224 |
| | | | elite germplasm | |
| 11455 | NC0207865 | 20115423 | Linked to 669Yc conditioning 669Y | 0.1795 |
| 4606 | NC0204175 | 20093922 | High PIC value, nearly 50% polymorphic rate in | 0.4160 |
| | | | elite germplasm | |
| 12344 | NC0207257 | 20117808 | Linked to an exotic yield QTL 669Y | 0.3299 |
| 28 | NC0203310 | 20071668 | High PIC value, nearly 50% polymorphic rate in | 0.4046 |
| | | | elite germplasm | |
| 2645 | NC0203965 | 20083990 | Linked to Bollgard (MON531) | 0.1878 |

### Example 9

[0234] Cotton genomic DNA polymorphisms disclosed in SEQ ID NO: 14569, 10965, 11455, 12344, 2645, 10925, and 9279 are respectively associated or linked to lint yield (i.e. an exotic yield QTL G75Y; SEQ ID NO: 14569), the RoundUp Ready Flex™ (i.e., MON88913) transgene insertion site (SEQ ID NO: 10965), a locus that conditions a lint yield QTL (i.e. 669Yc; SEQ ID NO: 11455), a lint yield QTL (i.e. 669Y; SEQ ID NO: 12344), the BollGard™ (i.e., MON531) transgene insertion site (SEQ ID NO: 2645), the BollGard II™ (i.e., MON15985X) Cry2Ab transgene insertion site (SEQ ID NO: 10925), and a locus that confers root knot nematode resistance (SEQ ID NO: 9279). The cotton genomic DNA polymorphisms disclosed in SEQ ID NO: 14569, 10965, 11455, 12344, 2645, 10925, and 9279 are useful for association studies as well as subsequence selection and trait introgression activities for any detected QTL because of their high PIC values. Upon identification of a QTL of interest, whether detected in a de novo mapping population or based on historical genotype and phenotype data, it is desirable to leverage that QTL, or QTLs, within one or more germplasm pools. One or more genetic markers can be used to screen one or more germplasm pools for the present of the one or more QTLs of interest. Following identification of a genotype associated with the one or more genetic markers, that germplasm entry can be advanced for line development breeding activities and it can also be used as a source for introgression of the one or more QTL. For example, the selected line can be crossed with a line lacking the QTL and segregating progeny are screened using a plurality of genetic markers, wherein the set of genetic markers comprises the one or more genetic markers associated with the QTL and two or more flanking genetic markers that are peripheral to the QTL but will be critical for successful introgression and minimization of linkage drag. It is particularly useful if the genetic markers have high PIC values (i.e., greater than 30%) in order to have greater power to make decisions on the progress of the introgression in diverse germplasm entries based on genotype data.

[0235] In view of the foregoing, it will be seen that the several advantages of the invention are achieved and attained.

[0236] The embodiments were chosen and described in order to best explain the principles of the invention and its practical application to thereby enable others skilled in the art to best utilize the invention in various embodiments and with various modifications as are suited to the particular use contemplated.

[0237] Various patent and non-patent publications are cited herein, the disclosures of each of which are, to the extent necessary, incorporated herein by reference in their entireties.

[0238] As various modifications could be made in the constructions and methods herein described and illustrated without departing from the scope of the invention, it is intended that all matter contained in the foregoing description or shown in the accompanying drawings shall be interpreted as illustrative rather than limiting. The breadth and scope of the present invention should not be limited by any of the above-described exemplary embodiments, but should be defined only in accordance with the following claims appended hereto and their equivalents.

1-8. (canceled)

9. A method of genotyping a cotton plant to select a parent plant, a progeny plant or a tester plant for breeding, said method comprising the steps of:
a. obtaining a DNA or RNA sample from a tissue of at least one cotton plant;
b. determining an allelic state of at least one cotton genomic DNA polymorphism of SEQ ID NO: 10965 for said sample from step (a); and
c. using said allelic state determination of step (b) to select a parent plant, a progeny plant or a tester plant for breeding.

10. The method according to claim 9, wherein an allelic state of at least 8 distinct polymorphisms identified in Table 1 or Table 3 is determined.

11. The method according to claim 10, wherein an allelic state of at least 48 distinct polymorphisms identified in Table 1 or Table 3 is determined.

12. The method according to claim 11, wherein an allelic state of at least 96 distinct polymorphisms identified in Table 1 or Table 3 is determined.

13. The method according to claim 12, wherein an allelic state of at least 384 distinct polymorphisms identified in Table 1 or Table 3 is determined.

14. The method of claim 9, wherein said cotton genomic DNA polymorphism in step (b) is selected from the group consisting of SEQ ID NO: 287, 562, 3134, 2996, 1146, 1906, 3858, 1477, 961, 4606, 1190, 1200, 28, 4742, 7368, 5199, 1762, and 6884.

15. The method of claim 9, wherein said at least one cotton genomic DNA polymorphism in step (b) is selected from the group consisting of a SNP located at positions 24, 280, 2899, 298, 365, 429, and 494 located within SEQ ID NO: 10965.

16. The method of claim 15, wherein said cotton genomic polymorphism is SEQ ID NO: 14569 and wherein an association with a yield trait or yield trait value is determined.

17. The method of claim 16, wherein an association with yield QTL G75Y is determined.

18. The method of claim 9, wherein an association with the MON88913 glyphosate tolerant transgene insertion site is determined.

19. The method of claim 15, wherein said cotton genomic polymorphism is SEQ ID NO: 11455 and wherein an association with a yield trait or yield trait value is determined.

20. The method of claim 19, wherein an association with a yield QTL conditioning trait 669Yc is determined.

21. The method of claim 15, wherein said cotton genomic polymorphism is SEQ ID NO: 12344 and wherein an association with a yield trait or yield trait value is determined.

22. The method of claim 21, wherein an association with a yield QTL 669Y is determined.

23. The method of claim 9, wherein said cotton genomic polymorphism is SEQ ID NO: 2645 and wherein an association with the MON531 insect resistant transgene insertion site is determined.

24. The method of claim 15, wherein said cotton genomic polymorphism is SEQ ID NO: 10925 and wherein an association with the MON15985X insect resistant transgene insertion site is determined.

25. The method of claim 15, wherein said cotton genomic polymorphism is SEQ ID NO: 9279 and wherein an association with root knot nematode resistance is determined.

26. A method of genotyping a cotton plant to select a parent plant, a progeny plant or a tester plant for breeding, said method comprising the steps of:
a. obtaining a DNA or RNA sample from a tissue of at least one cotton plant;
b. determining an allelic state of a set of cotton genomic DNA polymorphisms comprising SEQ ID NO: 10965 and 2645 for said sample from step (a), wherein said allelic state is determined with a set of nucleic acid molecules that provide for typing of said cotton genomic DNA polymorphisms; and
c. using said allelic state determination of step (b) to select a parent plant, a progeny plant or a tester plant for breeding.

27. The method of genotyping a cotton plant of claim 26, wherein said set of cotton genomic DNA polymorphisms comprise at least 5 polymorphisms identified in Table 1 or Table 3.

28. The method of genotyping a cotton plant of claim 26, wherein said set of cotton genomic DNA polymorphisms comprise at least 10 polymorphisms identified in Table 1 or Table 3.

29. The method of genotyping a cotton plant of claim 26, wherein said set of cotton genomic DNA polymorphisms comprise at least 20 polymorphisms identified in Table 1 or Table 3.

30. The method of genotyping a cotton plant of claim 26, wherein said set of cotton genomic DNA polymorphisms comprise at least 2 polymorphisms selected from the group consisting of SEQ ID NO: 287, 562, 3134, 2996, 1146, 1906, 3858, 1477, 961, 4606, 1190, 1200, 28, 4742, 7368, 5199, 1762, and 6884.

31. The method of genotyping a cotton plant of claim 30, wherein said set of cotton genomic DNA polymorphisms comprise at least 2 polymorphisms selected from the group consisting of SEQ ID NO: 287, 562, 3134, 2996, 1146, 1906, 3858, 1477, 961, and 4606.

32. The method of genotyping a cotton plant of claim 31, wherein said set of cotton genomic DNA polymorphisms comprise at least 2 polymorphisms selected from the group consisting of SEQ ID NO: 287, 562, 3134, 2996, and 1146.

33. The method of genotyping a cotton plant of claim 32, wherein said set of cotton genomic DNA polymorphisms comprise the polymorphisms of SEQ ID NO: 287 and 562.

34. The method of genotyping a cotton plant of claim 26, wherein said set of cotton genomic DNA polymorphisms are associated with a trait or trait values identified for at least one of lint yield, fiber quality, boll distribution, a transgene for insect resistance, a transgene for herbicide tolerance, disease resistance, nematode resistance, lodging, maturity, plant height, drought tolerance and cold germination.

35. The method of genotyping a cotton plant of claim 34, wherein said set of cotton genomic DNA polymorphisms are associated with a trait value for lint yield.

36. The method of genotyping a cotton plant of claim 30, wherein said set of cotton genomic DNA polymorphisms are associated with a high polymorphism index content (PIC) value.

37. The method of genotyping a cotton plant of claim 26, wherein said set of cotton genomic DNA polymorphisms comprise at least 2 polymorphisms selected from the group consisting of SEQ ID NO: 14569, 10965, 11455, 12344, 2645, 10925, and 9279.

38. The method of genotyping a cotton plant of claim 26, wherein said set of cotton genomic DNA polymorphisms are associated with a linked trait of interest selected from the group consisting of a transgene for insect resistance and a transgene for herbicide tolerance.

The application's sequence listing, which the Patent Office published only in electronic form, follows.

SEQUENCE LISTING (27292 sequences)

SEQ ID NO: 1 - DNA, 550 bp, Gossypium hirsutum
ttatttcacttactaaacagacggaaacgaaggttgccacaaatgaatcgttgcggggaggaattgaggaatgaaaacggtagagatgggaaaagaaatctttaggaagatggagagaaaactgactctctttttttcaaaaagaaaagaaatgatcagattttggatattttccccataacctctaatttcctcaaacttacccctaaattcgctcccacacttccctagacccctcaaacactccttaaccatccactacttccccacacacctcaaacacttagcattttaccacacctaaaactcctacactacacaagcagcagaaataaatcccatttgcacaagcaggggttgaaacttcagacctcttgctctttagctctccacttaaccaccggaccagcagacccattctgacatattttaccaacatttaattataagcctactgactggtgatagggcttttttcagaagaatacaaaaaatttcccaagataaggcttgaacataagacccctcacacacacccagagcacttaac

SEQ ID NO: 2 - DNA, 551 bp, Gossypium hirsutum
acttaccaaacgcaccaaaaacacctaatatcaagatcatgacagtagacaaaaagacgagaagcagaatcacagaaaaagaaaataaagggagaagaaagtgacagcgattaggcagaaaattaacgttagagctcttttgggaatttcaaaagagagagaaaatttagaaaaagaaaaagaaagaaatcaaatcaaataaaaatcagataattattaggaatccctcaaattcctccctagtattcaactagcaaccacctctcagaatcccaactccacagaaactatattagatagcagagtaaaaatataacaccttcgctaaagcagggattcgaacacaggacctccaccacaccaacactcttcccactcgaaccaacaggctcagtctgatatgaattattagacaacttaataaaagcccactcaacaagggtagagttaggattagaaagataacaaaatttggcaaaagtgaaacttgaacccaagacctcacacacaaacccaaaacacttaaccactgaaacaaacgcacacttgtg

SEQ ID NO: 3 - DNA, 589 bp, Gossypium hirsutum
tcatagccattaagtgacagatcataacaattaccaaaattaacgtgcaacacgattgttgaaacgtttcgacatgaaaccccaactcaacataacaattacctccacaccaaaccgaatttcacaaatctagaacattagaaggaccgttgtcctcgagacctcctcctaaagacattaatcgaacacataaacaaaaaattcaataatttaagcaaaaactaatttcttgataaaaatatcaacaaccaacgattttagaaattgaacagtcaaactcacgaagttaacagaaatgaacttacccgacaacagtaacagacaaagagcacgaatctaagcaaatgataaaagaaaacaaaaggaacaactagtaaacaaaaaaacgaagaaaaataaaagaaaagagaaaaggaaagaaataaaaaaaaagaagaagacgttaaattaaatgcttaaaccaccagtcagaaattcaaaaattagcaaaaatatttcttaacgcatgtatctagacttaaacacaggaccagataagatatagaagcttaaccatcaaaccagcaggctcattcttaaccaggtttaa

SEQ ID NO: 4 - DNA, 301 bp, Gossypium hirsutum
gaacaataaggttgccgggtcttgtttccggtgggaatttataagattcaggcaaaggtttgtttttggaccagcttgaaacaagcttctacatctcttgaatgtgtgctgctttttctttttcgtttttgagaattataagtcaatgcaacgaaatattttatattttaatcacccctgctataagatacaagaaacattcatggcggaaattatagatatagtcgttttcaaataacctaaaaaatatgaagaaattgcattctgactctgcaaggacaagaccttgatggtttttttt

SEQ ID NO: 5 - DNA, 592 bp, Gossypium hirsutum
ctttgtgaggtaaaatctatttctcctcttgttctaccatccttaacaaatcaggggataagttacagtctttgtcatcttcaaagtcctgagatctgtctaaacacatatgtcactcaaaaggagattctgagttagtagcagcgtcactcatatcgttgatatctggagacctattgtaggtgcgaaggaagatacaaagaacaaaagaatctaagaataatgatctgtatggtatgattatgaatgagagaataaaagaatatttgctcggaataagacaaaaagatgcatttcattgaaataacgattttgaacataagcctatttcacaaaggactcttattactcctaggcttaaagcaataagtgtgttttgaaaattactctgtgctagttctaaagattacaggaatctcttcagcagtccaattattcagaacacttcctgactcataagggagaatgcccgacaaattctctactccagttccttcttcgtatgtggcgttgatgtccaaattttccaacattccttccatgatttcctttcttggcattcccctttcaggatgaatgatccccttcagac

SEQ ID NO: 6 - DNA, 591 bp, Gossypium hirsutum
gatgtgtctatattgtagtaaacatgtcattgttttctatttatttgaataatgaaaaaataaataaagttaatttcacatttcacaattatgttttttatatttctgtctttcatattttgtatgcataacgaaattatgacaagcaaatattagctcattgactgtcttagttcaaactgatgataagtggcattgtaagaatgtttacattctgagaaagacaacttacttcagtagataatctaaacgagtctgtaatctagtaaaacaatcaaagtgagcatttgattcaaatattgagaaggattattatgtcgtctacaattccaattgaggagattactagtcttggttatcggagtagctgactccataggtaaagacataaatgtattcatttacagaatgatacattagactaaacccaagatgaattaaatgcgaaaatacatttgttgtattgttccattcacctctttagttcattcgattgccgtgagaagtgttgtaatgagaagatgaatgtttaggattggctcaggcaaggaaatacttggtatttaagtcatcaattaaggctcacctcct

SEQ ID NO: 7 - DNA, 575 bp, Gossypium hirsutum
ttcttttgtctccttctctaccttccaatctctccccatctagattctcccatgcaaaaaacccaaaccacaacttccaatctatgccctcatagtcgtcattattgttttacttcaattccagaaaccttgtgtcgccaaaatcataaacaaatattacaacccaactgtttgtgaaaatgtcacaatgagctaccctgacagattttatatccaaagcatatgatacaaatactctatgatctgaactattgaccgtggctaattaacagtaaaagaagaagaagaagagaataagaagaagaagagatgtcaaacaaaagctatggcatttttaaggtcactgacccctgccactgccatagacgatgcctctactctgcttgccgcctttgttttctcttattattcttcttcctcctcttctcgcagttcttctcatttcccccaacacaaaaagaataagccaacactatacgagttttcaagcagagatgagatggtgcatttggccggatatggcgaagaaaaactctcgaccattctcgtcaccggaactgttctttatgaagagt

SEQ ID NO: 8 - DNA, 385 bp, Gossypium hirsutum
  misc_feature (17)..(17): n is a, c, g, or t
cgactgattgatgtccnaaaagagcctatggctcagtggtagtggtgtgtggaatggtgttcaaggtctgtggttcgaacatggagtagcataattggggtatttattttgcagttggtttcggccagtggttgtgttacagtgaaattctaatggaggagttgtggagagtgatgaggagtgattcaaggagtaaatcaagaagggataaagggagagactttaggagaaagtcaaggaattcagattagggagaattgtagccgattgggggatttggagtatgcaaatttggctagaggtcccttggtgtgcattttcgataattggtgagtgaatgggtgccaaattttctttctgtcatttcggggttttgttatttttt

SEQ ID NO: 9 - DNA, 596 bp, Gossypium hirsutum
tggaatgtttctctttttcactaaacaacatcaaaagattgagcagagagcatggtgtggcgggattgcattggcgggaaaatgccctcatcagatagagagaagaggaagaggtaactctctgccttcttcggttaaagcttgagagggagttgttgcatcttcagcttctgacaacctcgtcaatctaaagcttctgggtctgttacagaaaacaaagaaagaaaggagaagaatttggggcttctgggttaaaacttctgggtctgttacagaaaacaaagaaagaaaaacagaagcagctctcttcttgcctttctctatggcatgctcgacaagaaattggggctactggccgaaggcgaagcaagcaatgaaggagataaagagagacagacccaggaaacagagggcaaattagggcgtgaaaaataaaacggatgtaaactgaggagaagccagggattagaaaacagagaatttcgaggattaagggcgtaacgtattaggggtgtattaggcaatacattgaaccaaacacctgcttaagaggggcttaagtggggcccacggattaggggtgtattggctacacc

SEQ ID NO: 10 - DNA, 592 bp, Gossypium hirsutum
acttttacattttacgcgattagatcctttttgtaaattaagcacacaaacagttaaattttcacacaagactttcagacatgtcaattcacttataataggcacggaaaataatagtaaaatatttttctaattcgaatttgtggtcccgaaaccattattctgactagggttaaaactggattgttacaccttagctcgtaaaaaaaatgcaaattcacgcaattagacccttaactatactactcgaaattctcttatacacatagcaacccataactttcatttattcacacatttaaccacacattttcactaataaatcccaattttgcatttttgctcaaaatcacttaacaaatcatgtaaaactatcatcaagctttcatatttcaacattaaacatcaaagaacacatagattcaacaataggaactctcaaaatctttaacagatttgaaattaaagagacaagctaactagattgagctgtgacaattacaaaaacatagaaatcatcaaaaaccgagcaaaaatggacttacatgcttaagcattaatggccgaaccttcaagcttctcctatggcttt

SEQ ID NO: 11 - DNA, 548 bp, Gossypium hirsutum
agctaactcagagaagattagtcatgatagtaaatcaaatgaacttagactgtgatattaaatcagcgagccgtttggagcaacaatattaaataaactaactcagagaagattgttcatgatagtaaatcaaatgaacttaggctgcgatcttaaatgagtgagccgtttggagtagcgatattaaatcagttaactcaaagaagattgttcatgatagtaaatcaaatgaactcaagctatgatcttaaattagtgagccgtttggagcaacgatattaaatcagttaactcagagaagattgttcatgatagtaaattaaatgaactttggttgtgatcttaaattagcgaaccgtttggagcagcaatattaaatcagctaacttagagatgattgtttataatagtaaatcaaataaacttaagctgtgatcttaaattagcgagctgcttggagcagcgatattaaataagctaacttagaggagattgttcatgatagtaaatcaaatgaacttaacttgcgatcttaaagtagcgagctg

SEQ ID NO: 12 - DNA, 566 bp, Gossypium hirsutum
agtgagggacagagtaatatatagtagcaaaacggattgagagagcaaaacacttacactagaatcgatcaaagtagaaagagtagtggtggcatagaggatattcggctcttgagacttgtgtggtaaaagaggttattcgacacaaagagaagtagaaatcgtttaaaaacaccagaggtgaatcaaaaatagaatttgagtagggaagaatggaaaattggcacaaagaaaaaaaagaagaataaaggattctagcttttagattattggagaaaaatggtgttttttggcaacaaggtgagggagaatttgacattagcctggcaacctcacattcggcacctatatatagcctctagctgaatttcctatcccctaatccccaattcatctccacctctttacacttctcatctcctaatttttctccctgataaccccttaatcccctcctcaaatttctcctcttatcacaccctacaaagttcatatccaacgccaccactttccattccttaagcaaaactaaatcctttttttgagaaaggaaggattcaaactcc

SEQ ID NO: 13 - DNA, 268 bp, Gossypium hirsutum
gagaagaaataaaatggaaaagagaggattgatgggaaaaaaagttgtaaaaacttctgatttgctctctgcccaagttattgtttaggtagatgttcagttaagtgttcaaatagtaattgttcaaacatatgtttgaacatgagttcgaacagaacacaagcagcaagcaaaaagagaaaaggagagagattaagttatctcttgtgaagatgcattgattaaagaagtgccgtgctaatttgattaagtcatctttgtttttttt

SEQ ID NO: 14 - DNA, 584 bp, Gossypium hirsutum
tgatatccgcctaatccgaccctcccctcgctaaagaaatcttcgatgttgccaccacccaacccgatttttgtcattcttactcttccttcctcatcctcattctcaaactcggtggttccaagcacttctatcttgtcaacaaccttctcattcgtctcaaatccgatcaaaatgtatgtcgactctcttttcttacctcatcaaaatctatgctgaagctgatttatcccagaaagctctcaatgtgttctacaaaatgcttgaattcaatgttttctacaaaatgcttgaattcaatgttaagtctttacccagacacttaaatcatatcctcgagctgcttgtttctcatcgtgacttcatcatgcctattttcagccttttcaagattgcctataaatactgtgttttccccaataccaaatcttacaacattttgataggtgcattttgtttgaatggggacttaagtattgcatacaaactgttcaaaaaattgtttgagagaggtgttatgcctaatgtcgagtcttataggatattaatgcaaggggtatgcaagaagagtcaagtgatagagc

SEQ ID NO: 15 - DNA, 579 bp, Gossypium hirsutum
attttagctatgctacttttctgatggagcaattgttttgttccattttctgtagaacccaagttagtaatgaattatcttcaaactctgaaatcctctgaggagacactgaaggaacaagtaagaacttgatattgcttactttctcactatatattttctgctttaactgttcttatctgttaatcagaatttcatgcatgctttgttcttattttcagctagaaaaagccaagaaaaaagaagctgcctttattgtaacatttgcaaagcgtgagcaggagattgctgagttgaaggtgacatcttttaattttgttttccctcttgactaccatctatgattgtttagcatgctgtttgctgtctaactgttggaatatggcaatgtgcgaggatgagataaatttttggatatttctggtaaagataagcaaaaagtatatcaatgtgcagtaatgattgttctaaaaaacattttaattccagtatagattgctattgaagagactcatcttttagggtgtgcttggttgagtgataatgtagaaagatggaaagagaacagtggaacagttg

SEQ ID NO: 16 - DNA, 595 bp, Gossypium hirsutum
atgctactaagagcttctcagacatagtaatatcgggagagatgatagagaacgcgataagatgcgagaagatcaaaacagaggaaaatgccaagaaatcagctccgagaaggaaagaaaataaggtgaacaatgcggacgtatacaataagagttattccaagccagtcactgtgagtcaaccaaagacagtgaataccaaccatcagggctccgcaagataagattcaaacccgaagcctaacacggaaagaattcaggttacgcctatcccaatgacatacaaggaattgtatcaaagtttattcgatgcccatgcggtgtaaccttactacttgaaacccctttaaccttcatttcttaagtggtatgacgcaaatgctcaatgcgaataccatgcagaaatctcgggacatacgattgagaactgcactactttcaaaaaagtagtcgaaaggctcataggcatggggcgttgtgaagttcgatgagcccacgggacttgatgtggcagggaatccgttacctagtcattcagattaaggggtaacgcaataattgaaaatggaaggaggagaaccaagatggatgtata

SEQ ID NO: 17 - DNA, 587 bp, Gossypium hirsutum
tctcctgatttgttgagaatggtagaacaagatgagaaatagatcctaccttacaaaggggcaatggacgtcgcgaacctgagagaagagaaagagataaagattggagtgtataacaccacagatacaaagtgagatgtcaagaatactaagatattttcacatgatcgtatcaagatatgcttgggctactaaggactgtgaatgctaaaaaaggtccatatgagtgtcaggagaacacatgctaatggttagctaggctaatcatgaggttcgagtgctgctgatccaacatggaaggggattgtatcagtcaagctgcgaatgccaaacgaaagaagataagacttttatgcctcctcgatttcttcacagattttctatatgaggggcatggatattatggggctgatctcgttaaaagtttctaaccgataccgattcatctttgaagttgtcgattacttcacggaaagggtaaaagtcatttcatatgccaatgttactaagtcgatagtcatcaaaccctaagagagagagagagagagagagagaattaagtgtcgataaagaacgccagaaagata

SEQ ID NO: 18 - DNA, 574 bp, Gossypium hirsutum
aacaaattagaaattcgataacgaaaaaagagagtttctgacacaccccttagacgcgatagcaaacactagaatcgttcgattcgctcctccaaactgattcaaaaacatcaattaacatacaaattaacgaaaacttcaattcaataacaaaatagaaaacgaaagagacattatcaaaacccccaaaaggaaaacctaccttcttctcttttgatttaccaaacatccgagaacaaaactcccttgacaaccgacaacaacgataaaacggaagaagaaaagaaccaaaagaaactaaatattttccttttaggaagaaagaaaattaaaatgtcacagaacaaaatggagaagaagggaagaaagtgcaactctgttttttcctttttgggatttttttctattctcaaaataaaaataaattaaaatagctaaaactaataaatattttagcaactaaaaaaaacaaatcttaaacaaaattactcccataaacacacgcgaagattcgaacctagaacccaaagataaattaacacacaacaaacaaccaaaccaacatgcctattct

SEQ ID NO: 19 - DNA, 596 bp, Gossypium hirsutum
aattttctaactttatcgaagaattattatcctcattgaatatcatagataacaatatacttgtcatagtctggtagttacttggcatttttatgtaatggaaaaatgaatgacaaaatgcatgaatattaaaacaaatatctactgcatactatatttacaacacaacacacccccaaacctaagggatgcattgtcctcaatgcatggacaatgaaacatttcaaaatgaaaaaacaacaagttacaaatataaaaatgcaatgacaaccaaatatgaatccgtgaacatatgttataaaatgaaaaagatgaaaatgaaaataaaaacaaaagcttagaaggaatttgagttactttaattgggttgggttgattttctagtggcgtgttcgtaacgttacttcctttccacttcaccagcataatctcgaaatgatttcccagccacttacttgtagcactttctttttagctggttaattggcacctcttcttcatcatcagtatttaattttatgcgatcatcaatcagttgatgaatcgcacgctcttgctcagtcatagatgtagtggatttcagtgtagtggcagtt

SEQ ID NO: 20 - DNA, 575 bp, Gossypium hirsutum
atctgagttgtatggtaaatttgaattgattgttagtagagaaaaaaagtgaagaaggaagaactgcatttcaaagaaaatgtgaaggatatggagccaaaccatgaataaatgaagaccaaattagtggagaaggaaaaatcgaaaaataataaggataagggggagaaacatcaaaagaaggataaggaaaaacatgaaggtggtgaccttggagaaatgaaaaataaagaggagaaaaaaaaagatgcacaaagatgaaaaagatgatgaaagcacaaagaaaagaaaaaagaaaaaaaagaaaaggaggtggagatgaaaaaagaaggaaaacatgatgctaaataagtggtaaaagaagatgaagagaaagaagagaacaaaaagaaaaaaaaagcataaggagaaagatgttgatggagaaaaagatgaagagaaagataagaagaaaagaaggagaaggaaaaggtaaatacccaatcgatcctttttctttttaccctaaaccaatcatctgttgttttcttttctctaaacctgtttagattttagaccctttggttcctcgtcta

SEQ ID NO: 21 - DNA, 607 bp, Gossypium hirsutum
ctttaatatttacatattaaatacttttctcatcccaattttactctagtaaaatttttacgattttagccccgataaaattttgagaaaattcattcaatatgtcacaacctaatatgatcactatgaccgaatgatttatattcattttcaggcttcaaaacagcacaaaaacataaactcattcatccatcatatataaaattgcaaatttccatttccattttcatttccatttccatatttggaaacctacattcatttctaaatgatttcatttctccatttcagagaaaaccataatcattcccgaatctttcccatttttctttttctatccattccgttcatttttatttgaacatgcaattcatttctagtttcaacgagctagtggatggactgtttggacatatgaagtttaggataaaatgattataattaatttttgggttttcgcctattaattataaactcatttagtcatgaagtcattccaatatagtatcgtgactgaatctcctcaatgacataccattacaagagcaactactcagtgcttatttaatgaccttgttataagtgtgttaccctcatgggatatcca

SEQ ID NO: 22 - DNA, 591 bp, Gossypium hirsutum
ggtatcaacctagagtcagttgcttttactctcaaaagagattttagcataatttagggacttctacgaattaagataccaagtgaataaatcgtttaattcaaattcataataatagatgaagtgtaggtggattctttcttgggtattgcctctctcattggttattattcgcttattctccttaattaagaaataattgatgctaattgcttaattctcaaattcactcctacgcacctaaaagtaattccaataatttgaaaaggaaaaaaaaaatctttgatcccaagtttctttggaaatcaacggagcaacatctttgatccattcgccatcaacatataggacccttccaataatttggaatcacttttccaaggaaattcagccttggtcaacactcacatcgactagaaaaagaagttgaatgcccatgtgttcaaagtcaatctttctggacttaagaaagaggaaatcgaagataaaagggtgcttcaaattagtagcgaaagaatgtggagaaggaagaaaagaacgagatgcggcatcgtgtggagcgaagcagtggcaagttatcgagatggttta

SEQ ID NO: 23 - DNA, 558 bp, Gossypium hirsutum
gtcaaccttgaagctattttaatagcttccttctagctaatttcggttgaaactaaagaagacaagatgaatgttttatttttcttactttaattttagtttatttggttatttactaaattaaccttaagtaaataatactaatgatgttcataaatgtctattaccactattaatggtttaatttcagcataaggacctccattttaataatccatagctattagacacctttaacttatagaacgcaacttttacactttacgcgatttagtcctttttacctaattgaccactcaaacaataaaatttcttaacgaaattttcacacaatcatattatcatgctgtaattaaaatagtaataaaataattattttgaattcaaatttgtggtcccaaaaccactgttccaatttgactaaaaacgggttgttacattggtatagaagactcgatgatgctatgtgggtgtattggacaagtttcaaaacacctttaaggatgactccaaatcggttggtcttcaggaaagcttgtcatctatcgttggaattgg

SEQ ID NO: 24 - DNA, 562 bp, Gossypium hirsutum
tcacaagttaaggctgagtatcagttgccttcaggtttgctacaaaccgttaagattcccttgacacccactaagaaggactctgtttgggtcagcgtggatcaattgaccaagtctgctcacttcattccaattcagatgggctattctctacagaactagcaaagcttacattttcgagatagttagactatatgggtttcctgtgtcgatcatttttgatagagatcctcgctttacatctcagttttggaaaaagttacatgaggatttgggtttgagattggacttcagtattgcatttcatcctcagataggtggtcaattggagaggatgatttagatactggaggatatgcttcggagttgcttgattgattttcaaagtagttgggaggattatctatcgctagttgggtttgcctacaataacagtttccagtcgagtatccagatggcaccttacgaggctttgtatggatgtaagtgtcgtacaccattatgttgttctaagttgggtgaatatcaggttttgggtcctgagttggtgtctgagacggag

SEQ ID NO: 25 - DNA, 363 bp, Gossypium hirsutum
agctagtttttggtagtgagaaagaagaggcttgaattgtgttttccttgatgtttggttgtgttcaaggctatttttaatgagtttggaaagtgtttgttgtgtgtgcaaagtgtcagatcaattgggagccactgcaagcaagtcaaaaggtaaggaaaagtttgtttgagctttcagttagtaagtgaaagcatgattggtgagtgtctgaagtcactagtggtatgcgcaattcgtattgttaatcgggagcttaggattagcctaaacccttatcctatgttctgagagtaagctttcttctattctttttgccttgttgtgaaattatgcctaataaggagaagttgtgatatgtgg

SEQ ID NO: 26 - DNA, 511 bp, Gossypium hirsutum
gtcatgattagtggaatttgacataaatgggcatatattaggtgatttcataatgttttcattaagggtaaaattggtatttgattattaagttaacattagttaaaacaaaacaaaatgttcattaattcatgcattcatcaaccgaaaatatcaaagaaaaagaagaacatttagggcttgtatatttggcacctttaatccttgattaaggtatgttctttgctcgatttttgacgatttttacgtttttgtgatggttactttgtgttctagctagcccatgtctcaatttttgaaagtgttgatgattttggaagtttccattgatgaattcatgtgttttatgatgtttaatgatgaattataaaagcttagtgcttgatatacatgtttagtaaagtgattttgagtaaaaaatgcatattagggattaaatttagaaaagtgtaaattgaggggttaaattgtgaaataaatgaaatttttgggctgccagggacttacatga

SEQ ID NO: 27 - DNA, 593 bp, Gossypium hirsutum
caagttagattggattatttagtggatacaagaatcgagagcactttttcaagacttttctaggaaaaataacattcgagtcctcaattatacaccagatatgttcggtctaacgaatatggaacaagaagaagaagtgctaaaaagtgaagaggaaagagaaaaagaagaggatgacgaggatgaggagatggacgatgaggaggatgattgaactatttttaattttataaaaacttgtattaatttttgggataattttaatttagactttgtaggagtaggattaataagtaaattttagtatgttgcaatctgtttaagttttctatgtaggaacctaacacgaaggacacacaaacaaaattcgaactttatacgagtaagggaggaagcacccatcaatagaagttggagaactcacgggtaacttcttttctcatctatttattggctacacattgaggacagtatgttaactaaagtgtgggggataacatagaaaacttgtttagttgtttctacaattttctatatttttctttgatttttttatgtgcttgagcttatagaaatgccactggggttggtta

SEQ ID NO: 28 - DNA, 571 bp, Gossypium hirsutum
aaccaaaatttcatatttttcagtttttttcaacttaaaacatgaaaccaggaagaaaaaaaagtctcacctgccaaggacagtagcaagagtgttgagataagtctcaatcatttgttctcttgtaggagctgggtctttagggaactccataacaatgagccaatggttataatcacaaccaggtaacgttatcgtttccctggtctcattgctgctgcgtctcttagatgaatagtcactgtccagtgctgcagctttgataacacgacgacgactagtcgacgatgaagggagatgatgaatcagtgagttcactcggataacagggtgtgcagtgagcaggaaacgagttggaagaaagggttttgaaggtagaagaagagaagaagggtttaacaaagtcgccattggaagtatcagaaggagaagaagagattagattgtgatatttctgaggatgtttcgatattttaagcatttgttattgggcttagaaatgaaaactttgagttctgagttgggctaaaagtccaaaattgattctagaaatattcaacatgagaaacaa

SEQ ID NO: 29 - DNA, 607 bp, Gossypium hirsutum
cttgaagaataaaagagttagttattgccggttagtgtcttaagttaaacggtgagttttgtttaattgtaaaacggggcgtagtgtttagttaaatgcgtttggctataaccgaattgccacgttgttctcttgtcatttgttttcttttaagcacagggtgtatggggaaaaatagttatggaaatattgaagtaaaattttccagaattttttctctttaaattcttctcttctctctctctctctctcgtaattcttcccttttctatttcaatttctaagatcatatcacagcgatgcaacattagggaaacaactatttgatttggggaaaataatttgagggaataaagttggaggatcagctatcaaaatggtgtcgttttaataaaaatattcttagtgtttatgggaaaaatgtcgctattgctttacttttaatagcgtttatgggaaaaataccgctatcattttagccttttgtggtgtttatgcaaaaatgccgccattggtttaaccttttgcgacgtttatgcaaaaatgctgctattgttttaccttttgcggcatttatgaaaaaaaggccactaacaccaactaatag

SEQ ID NO: 30 - DNA, 573 bp, Gossypium hirsutum
atagttgcaatgggacttcacacaaaaaagaaaagagagggtaaaatatggatttaattataagaattagtttgaattgcttgctccctcttgccgtggagtttatgagaccgacttaagatcaatagacattttgtgcatacgatcaagcatgaaaaagcactcccaaatctttttctttataaactcgaaaagtcatgagagctgcaaatcttgtctcttggaatatgatttcttcctactcatgtctgaatatatgcaagacatagagcacttcaagagtatcgtttaacaatcgaaattctgtccaaaaaccaacccccatggatcagtaataaatagcattacaaaaataggaagccctaagttgcccattgcttgaataaaaatagcatttcaaaaatgagaaaaccacctaggcatctaaatcttgagtgcaaggggaaacaacaaacaaggctgcatggaataaattatgaagtcacagacatatatatatgtgcgtgtgtgtctgtgtttatatattcttccatcctcaactctttgcatactaaggtcaggctatgttcagaa

SEQ ID NO: 31 - DNA, 507 bp, Gossypium hirsutum
caaacattattcatagatgaataattagatgaacggaatcaattttaggcttgaattttaagtttgctatgtcgaaggtttcgattacatgataatttagcttaggcttgggctttgattatttgaagtgagtctttggttgattttttcttgtatatattgtgtgattattatgtgtgaagcatcaaaacattgaagccttcaacaagtaaagataaagggaaggaaaagctagtttaagctttcagcaattaggcgaaagcgtgatcagtgagtgtttagaatcgctacttgtagacatgattcataatgttaattgggagcttaggaatagcctaaacccctatcctaagtttcaagtgaaagctttctatttccctttctttattttggcaattatgtgattatgtgaataattgtgaattgattattacgatacgatattgtgatatgagacatgtgtgatgactattgtgaattgtgttgtgggcatgatatacatgtgaa

SEQ ID NO: 32 - DNA, 558 bp, Gossypium hirsutum
  misc_feature (104)..(104): n is a, c, g, or t
aattagcaatatcaagggaggaatggagttttggaagggaaaagcaaagaaagaggaggaaaaggctgcgcgcgctgtgatagagttaagaaggaagaacgccnagtatgaaatagtgactgcaaaattggcgaatagtcagtctgaacatcaagaattaaaaaggaaaacacgagatctagaaaatatgctgcaatctcgtcaacaacaattagataacctcttgaaggctctagaagaaaagagtgagcagtacgatagggacattcacgcgtatgaaggaactctcaaagaaaaagaaatgcaacttgacttcttgatcaatgaaattcgtaaagcggctatgcaagttgttcaattatcagatgaagccgaagttctcagttgccaattccctccgagccaaagatcgagcatatcagagtttttagagcaagtgaagaaacaaggcaatgtggctaggaaatttgtgtaactgttggaaaaatgagaactttgtgtaatagactatgttgataaatgaaatgcctaaatatgggactatcttgaaatcaacac

SEQ ID NO: 33 - DNA, 590 bp, Gossypium hirsutum
tgaagagttacaaaaatcgttctctaagcttaaccccatggttgaagagtttttacctcactcccttgttaacaatggactcaatggtgggtttcacactaacaatattattttacaaaacaacaataaaatctaaaggaatggtaatgctaactgcaatggtagtggtaacaaaatgaaaaaaataatagataggaagagagaaagagaaaagaagaaaaaagatggaaacaaaatgaaaagaaaaaaaattgttaaatagatgatgtcatctatgacattgtgcttatgtggcatgccacataggctgctttattgacccgcagtttgattaactgtcaattaacgtcgatcgttaaaattgggttgatttctgaaaaaattgtaatgttgagggtgtcaataaaaaaagattaaaggctcaaccgaaaaacccctaaatgttgagggtattttttgcaattatgcctatgtgtgtgtgtgtgtgtgtgtgtgtgtgtgttataagttcatgatatttatttgaactaacccatttgatatattttctgaaatgtttatgaaagtgtaaggtttccaagatgccacac

SEQ ID NO: 34 - DNA, 560 bp, Gossypium hirsutum
  misc_feature (61)..(63): n is a, c, g, or t
aaattatgagaaaatgactaaattgcactaactaatttaagcttagaaaaattaagctctnnnattcaattcaattctcttctaattataatttattaaatatttacaagtccaatttatagcattggggttcaggaactatatttttcgacactacagactttcgggttattacacttctcttgactcccacacaactttcacgccgacaacactacaactttcactgccttccaccattacactaaccacacaaacctctaagcaccactccattcccataaccaccactgtagttccctgacctattatctgactctatcttcaagctccaatattggtaaagcctcacctaaaaccaatactgagaacacaatcaaaattcaaccaataaattcagtaacaacaaccaatcttcaaaaagaaagaggggggggactccaaatctagtgattttagacttgcaaaattgggaagaaaaaattaaaaagaaaaaagaaaagaaagaaagagaaataaaaaaataagtggagaagttttatccttataaggcgagacct

SEQ ID NO: 35 - DNA, 581 bp, Gossypium hirsutum
  misc_feature (18)..(18): n is a, c, g, or t
ttatttctgaatcaatcnaaacactcattaaccaataccccatgactaaattgaaaccaaaacaaaacaccacctaccgaccgcaaagtcacagaataaattagcacccaaaaaccacagagcagtatagaaagagtttacgcagagagggtaaaagaagaagaaacaacctaataacaatggaggagaaagtttgcattaagaaaggtcaaaaccaaaatggaagaacagaagatcaaggaataaaaaatcaacaccagaatcaataggcgcgagataatcaactaaagtttgagaacccaatagctcaaagccgaaattgatgaaaggtttggctagagaacaagaacacaactaacacacactcgacacaagagaagggtttaaggaagaagaaaacaaatagcaaagtgcagaggggagagcaaaatgaaaaacggcagaggaaaacacaattatcgaaaaatttagagagaagaatagaaaaacaaggtaaagccgagttgccaaaagaacatatttcgtctaaggggaaaggttttctttgccgtcagacctttgggaatatggaaagagagtcc

SEQ ID NO: 36 - DNA, 588 bp, Gossypium hirsutum
tgaaacctttagatattccaaacttaatgaaacttcagcaacaatcacagagattgtcttgttgctattccttgttgttaatagccctacctgctaagtaaatacgcactcgtttagaaaagattcttgaaactcataaaaatcccccgttccaaataatttacaaagcaaaagaaaattcgcagagatgctctcattggcggttacttatcgacagccttctgaccagtgactaacaacagaacttctattaatcccgtatccccttaccacttccggttaacaacaaaaatataaaaacaaaaagaagaagaacaaaaaaaaagggaaagaagacgaagaaactatcgttaaaattaattccttaactttcaagtagatttttgacatataacaaaaatattttcctaacacatacaatggtattcgaactcagaacttgacagaatacaaacaaatgcttaactagtgaaccagcaggctcattcttgtcacaatttcacattgaatcaaacttaagtgagtaacgcgtgcttatgggttgatttcaaaactaacaaaacttttaatgatgcggctcgaactcta

SEQ ID NO: 37 - DNA, 606 bp, Gossypium hirsutum
tgggttcaatgtgccagtccgaattcaaccgattggtggcacgttggttggagggtccgaagtgtgccccgttgtcgactgcatcaaggatatgggagatgtgtgccctccatccttggtggctataaacaaaaatcgagcctatgtgggatgcaatagtccatgtgatgcgttgaaagatcccaaatattgttgcaccggaagcttacagggcaggcttgccagcctaatgacttctcaaaaagatttaaggaactttgtcagttggcacatacatatccgggagacaacgatcctccaatatacaaatgcagtggggcaagtgcttacaatgttacattctgtcctttataactctaccaattcaggcattgtaataattcttatttgcagcgctaaactataactaaataaatgcaaagtcctgttgttaaataatcctgaatgaatcaaattaagttgaatccagaaaaaaaaactgttattttggttgacagcagagtattgaatacagcaacagagttggaaaaagctaagtaaaataaaagacacgaaacgtggaccatttcagcccaatttctcacgttgtaactggtaagcacctga

SEQ ID NO: 38 - DNA, 606 bp, Gossypium hirsutum
tgctcgagaaacctcacatgtcgtagtttcagcttttgattgatactgaagagggtgtggttacacacctgtttacgaaaccgcccaagttcctcaactatccgaccttgtctcaagatatgcgatctataacacttagaccaccgattgaaaatgatcgaagaactcctatcgatttactgcattaatagcatattttattagcaataggtataaaatccaaggcttgacacttatagtccaaataaatcccaaactaaagttagaaagatttgatatccgaccgcaactgacaaattggtcttcttaccccagtgattagattgaatgccaaagacgaatttgaacacctttgagccctaaaggatccctttgtctcttcaacagttagaatccagagatcctaaacatacaaaatgagtagcaaattagcatccatcactgaacattccacttgaaaatgaattaaagaataataggcacaataaagaacagttaccccaaaaccaaatgataggcaagacaagatgctggagcgacggatgcttgtcagaacttgatgctcaaaagaagcgagtgcacaggaacaagaggcataatagtcgg

SEQ ID NO: 39 - DNA, 509 bp, Gossypium hirsutum
ttacgcaataaatacttggatattgttctcaattatgtgtgcttaattcttggcttgatttttctaaattattgatccatgtttgatgtgcttaaatcagacgagtaatagaccctgtttaagagcagatcttgcctaattgagtgaagttgcatacaatcttaaaaataggacgacataaatttactgaattagagtcaaatataataggggaatccataaatcgaattaatacaataataagagttttaattagaaagaaatttcaattaatcagcctaaagtcagtaacagacaactacactatctcccataccatttctggtgatcagtaattgtaatacttaagaatagattcaagtttttaagatttatgatgaacttttttgttctacttaatatgatgaatctatttatgttctattacaagaatttacttttacaaaggattggtttagatgaattgctatgtcaatgccttattccacattaggtcatcgctcaatggt

SEQ ID NO: 40 - DNA, 565 bp, Gossypium hirsutum
ccctgcctcaaacgctgattagggattccttccctattctttttttctattccattctctaccctcatcaatttctgtttcttccatcaatttttgcctcaaacgctgattaggtaatttccctttcccttccattgatttctgcttcttcttctcgttttatggagttggtttagatgagggtgcaatacgtctgaagcatcttcttctttttttcattcttcttcccatttccttccaaccttctccttcttttttcatgcctaggtctctccttcactggaagtgctattgctcacattgatattggtttcttagggtttttgtttgtttttgaaggataaaccagtgaagttaatctcatgttgaagatcttcaagaagaaaacatctcccaaaggtattttagatttgattccatcgttgctttcttgctctcttttttctttttcctgcattttgcggtcattctctaattgctcacttcctctgttatgtggtcattggtttgtggcacaacaccatgtatgatatgtggttcaggagaaattgaaggagccttattg

SEQ ID NO: 41 - DNA, 598 bp, Gossypium hirsutum
gtgctgggtattgtgttaaaggcatagacatatatttttttaggcaaggcaaattgtggtcttgctctcgaaagaagtagaccattttagatctcttctaagcagtagaataagattgatgttgccgaggcatatttggttaacaagggtagattctcagtgatcccaaccttccaagtcaacattgttgattctttaacctttgccatagcatcactattttcacatccttagttgttacttgtttacatattattcatgcaattgttctcgtaattgccatagcatacttactcttgtcttgccataacattttcatttatttgttacaactcacaaattacagacatcaatattccttaattatctttgtattcttattattttttttcaatagcattaatctcactcctttataataacttaaccaatttatacttaatcgatccctgtcttaaccaatttatacctaatcgatccctgtagagatgatctcacttatcactttattacttgatttgacatgtatacttacacaatttgcatagtatattcacacacaacaagtttttggcattgttgtcgggaatcagcaatt

SEQ ID NO: 42 - DNA, 571 bp, Gossypium hirsutum
tgtcgtgtatctagaacaaaaatttccctcttttcaagctcaagttctttgtttctcctcctctttttaataacttttaattcaatatttttaatatcttcaagcctgttcttaaccaaagcatctctatagtagaggtttcaatggctgtaaatccggataattgctcttcaagcaaaattatctgcccctttatctggctaccattgctatttttcctctgcaattcctctatcaactgctttatttccatgttatcctgtctcataatttcttgaagatcctttatctcagccttaagtgcagaaattgtgaaattgagcttgccaatttttgcagttttgccagttaaatccttctgcaaataagcaatgcatgacaacttctcttttagactatgcaactcaagcagtttccttccaaaggttaatctcctgctttccaactccttaatgggactctgtgaatgctctatttctatatttgggttcaaattctttgtgttaaccactttagtcccctcctcattttgcatgtcctcttccctgcagaacttatcccagcagaactt

SEQ ID NO: 43 - DNA, 618 bp, Gossypium hirsutum
catatatcatcacatagatcattccagactagttcaaaacatcatgcatcaattgtctcataaaataaacaccaaaatgtttcaaataacagtctcaaacatcatatttgaattccacaaagtttttaagaacaataggcatgcaaacaactaaaaatcatagcgaaaccaatgcaaagcctaccacattgccttttattgccaaaactcaaataaataagataacacctactaatagcaactaaaattatggcttggatcacctctcgagaccacaccattcacatcgacattacttatttgcaatggttaataaggagttggtgagcttaagaagctcagtgaatgttcagaataaccaatgtgtaaacaagacgttatgcaacagtgaaccaggcatatatcatatccataatatctctaactctaatatcatatttcacacatttaagcatctttcgtaaattattttacacaataatcagatgaatgtttaatcatataacacaacatatataaatcacatttaatcacatttaatcacattcagtcacattttatgatagtttggctcttgagattatgaaacataatgtgaactctgtcaccacacgttag

SEQ ID NO: 44 - DNA, 608 bp, Gossypium hirsutum
caaaatatgtagaatttcacgcagttcaatagcaatataatacttcaattaatcaatctcaaaaacacacaagaaattgtcgaattccacaaaatccaacagcaatgcgataacaaaattaaacagtttcataacacacaccttaaatagaaaccttgatgccaagactgatcgattcgctcccactaaaccattcgaaaacccgatttagaaagcaattagacggaacacacgaagatgactaacccttaaccaatcgataagtaacatatatgtaaaaactaaaaagaataagaaaagaattgaagaacagaaggaaccccaacaaaattctaaaaatttgggaaacaaaaggaaacagtaagagaagaacgtaaagagaaagtaatggaaaaaaacgtgatatttgttttatgagaacaacttctttttgtaaaaaataaaataacaaatacttaaatagtttaacacaaaatcaaaacataacttaaaccaaaattcgaataaaaccaattattctttaacacacatgaggattcaaacctgagacccgaaggtaaactaacacacatccaaccaccgaaccaacaatctcattccgacattag

SEQ ID NO: 45 - DNA, 595 bp, Gossypium hirsutum
ttataatggtctgcttctttcgagagaaagacttaaagatacctcacttaaggaaatatatgtttatagacctcagatgtaattcccaatactgattactcttcactctgtaggaaggttgctttatgtttagagattgctatgggaattctgtcaaacacccactcgtatcaatcaattatggtccaactaacctaaccttttcagaattagattatgtttataaagataacatgcattcatctatgtctagagactgcatgcaagcaattcgaaagaataaattgaatgaaatagtaaaatagatcagatccaaacttcaagattaatggaaattaaagtatcatccaacaatcccaacctaatgagatttaactcatggattggttaatcacatcagaattcaaaatatcattcaacatcttcaacaattaattttgaaaaggagcaatttaagaaaataaaggaagaacttcaagaagctttcgcagatctaacctaaactctagtgaagcaatgtcttgcaaagaccaggttgactgccttcttcttctccctcgtgttctactctgctgctcaacctctactgctacaa

SEQ ID NO: 46 - DNA, 614 bp, Gossypium hirsutum
attttagggtcgaaatttctgttatacaaaagatacttttggttgtcaaccttaaaagatgaaccttcatctttatatctttttagctaagtagttattctctacaccatttttaggttttagttctttactttcttaagctaagtagtttttcttttctttgcactgaaatacacaaactttactttgtattttgatttctctttgaaccctttaatatatttcgactttgttaaccttcaaaagtgtaaaaatctctgctttagatgtgttttcttcttcattattactgttgtcatcttctccaaagaactcattaggagtccctaagatttctctaacattcctttttatacttctttcgtgaatcatttgacatgtatttgactgatgttgttgtgttgatgatggatagtagctaaacttcatgttgttggttgatggaaatgttacatgattagtttttggatcagggactaaatcgtaaaaactagactaaattgaataaacttcaaaacctagaatttacgcttttaggtgaacaattaaataggtgaaactaagaggagaacctattgggaaccaatttgattgtcccgatttaggttagtgag

SEQ ID NO: 47 - DNA, 410 bp, Gossypium hirsutum
gtcacctaggtttcatttcagccacttaacttttgaaaagctacaaaacagtcctttttgccattttccgtcacagatgtcatggcaaaatgacatggcaggtgatggcgtccttggtgttaaacaacaatccaactggtcggttactttcactttaatagccctaccagcaccattttagggttagaaaaaaagaaaaagaagaagaagaagaggagtagaagaagaagaagaaggagaagaggaaaaatagagatgcctgaagtgattctagtgtgctattgtgaaaacccagccaaattaaacacgtcttggtccaatgacaactcaagtagaaggttttctgggtgtaagaaattcggcagtggatttcgaaaaccatgttggtttttcagctggtttggtccacc

SEQ ID NO: 48 - DNA, 607 bp, Gossypium hirsutum
caacaaaactgagcttacgagctcagtgtgtaacttatttcaattaataaatcaaacatacatgattcataagataaaatactagatatgcgttcagataccaatcagatttaattcataaccagatacagaaatagatgcataacaaatataaactcagatcctaccaccatccgctacacatcatcttcgaccatccctacacacctattagggtattaagtacccttccatccccacacatcgctaagtgatcgtgtgtcacttttcagaatatttgcaatctagctgttagaacaaacgcgataatctgtcagaaacaaatatacgtggctgagccaccaaataaggaagataaattaaactttcaacacttcctccataatcataatctcaccctaatgcacatgcaaaactaaacagatatcgaatgtgtgtatgacatacatgctatacatatcagattcagatcatattagcataaaacacatcatgctattacatataacatacaactcatgtattcataagttacatttaataaaaacaaagcatcagaaatcatgatttatagacaaatttataccatacaaaccctacagaaggg

SEQ ID NO: 49 - DNA, 552 bp, Gossypium hirsutum
  misc_feature (49)..(49): n is a, c, g, or t
aatcaatccaaataaccaaacagtctagagagtctattaattacaaaanctctcaaaaataatcattaattaaataaaaaccattatttctagtcagttcgcaaacttgtggtcaccgtgagactccgctgcaatgatcctcctaagtctgtggattacctgaacaaaacatattaacgaatgtgatttttcataaactcagtgtgtaacccaacaaaaatagacttgctatacatacaagaatcacatatatacagttagattcaaatttcagacttaagtccttacagatacaaataacaaaatcagatatgcagaataaatatacagattcctacctccatcctctgcacaccaactctgacaattccatcacactatgtggggttaaaaataccctcctaaccctacacaccatatagtgtcgatacgacacataacaaataatatgcagtctagctgccagaatataggcaaaagatcgtcatacggatcacttccttcacatatacaattcccaccctaaacatatatgcagaataccgatacaaa

SEQ ID NO: 50 - DNA, 564 bp, Gossypium hirsutum
  misc_feature (19)..(19): n is a, c, g, or t
  misc_feature (65)..(66): n is a, c, g, or t
tcatcactcactatcactncatttgctaagacaccaccaccataaccatcaaatcccaacacctnnacattcgagacccgtgaaatcccaaccaaaaataaaaatactaaatagcaagaatccaaaatcaaaccagcaaaaaaagagcaagaatcctaaacatcaaaagagaaaagtaaaaaaaaaactaaaaaaggaaaagaatgaaaagagaagaacttgagcaaccaattcaatgatccgagtggtcaagattcatggttggaaagaagagctgtggtcggaatatgatggtgatccatggtggtcgatgaagatccattgaagccttgttcaaagttttgatgtcttaatctcaatattctgaaggcttaataggaaatcttaattgatatttgagaagaggaaaagaggagccatttggtgatgacgattggtcggagaaggccatgaacagtggcgagtagagttaagaaaaaaaaagaaaataggagaataaaaggaaaaaaagggacagagattcaatagagtcgctgggggcagaaagattcaaagggacaaaca

SEQ ID NO: 51 - DNA, 595 bp, Gossypium hirsutum
agagaaagaaaaagattttaatcaaaactattaagaaagatacagctagacatcaaaggttttttttcttcttttttttaaggaaaattattgattgcctaaattcatctaacaattcgttccattagcttagcaactcgtatgaaacgaattctaacataaacttaaaacccatttactttagaagccaagtttagatggtgaataagctcgttttccttcaaaaaccctttttttccatccttccagacaagagagagaaggaaaattatttaaccaattatgataaaacgtttcacacccaatcacaaatgaaacaatattaaaccctatattctcgttcattaagaaaacatatagtaacgtcttttatcttcccctttcatttttttttctcatacacaaaccgtttcttcccatattccctacaatctaaccttcgaattcaacaatttgttccattacatacttttctttcttcattcaagtttgaacacacaaaaaaaggggaaaaaaactaaaaatacaaaacaaaaatcaagaaaactagggttaccttggattaacgcggcgagaaggcaagggatgttattag

SEQ ID NO: 52 - DNA, 593 bp, Gossypium hirsutum
aatctaccgagtcaaaaactggatagtgtggactctgagttgatccaattgatgcgttccgaaaaataaaactacaagccaagaaacgtaattgagtaagcattttgaatgctcagtaagtaaatagaagctaaaacagtaaactcaccttaattcacaattaacaaaacgaattagctaactatgtcactttcctgttttcatatttaacatcaataaggtgagattatcaaatataggtcttatagcatttcaatctataagatacaattaaactcaactcaattacattcaatcagtatcatcaaatatatatacacttcaattacattattcaatcattatataacatatcagttcagaatatatatatcatcatttcaatcatttagtcttatatctccatttctatcacattacatattaccattcattcaattacattgtttccataatcgtttagcccaatgaactataataaacagatacagatacgcgggtaaccaccaaaacacaccatattgcttgtttgagcgataactccaatacacacctgagcaccgaagtgctaagcccgtaggcattatatgtca

SEQ ID NO: 53 - DNA, 265 bp, Gossypium hirsutum
cttttgtaaggcatgacttgatactagcccctaaatcagccaaagcattattaacatctaagctaccaattaaacagggaatcgtaaaactccctggatcttttaatttgttggccagcttattctgtagaatggctgagcaaactgcatttagctccacatgcgacgcctcatccaacttccgcttatttgctaaaagctcctttaaaaatttcattgcgtttggcatctgcgaaagagcttcaataaacggtaagttaatatg

SEQ ID NO: 54 - DNA, 424 bp, Gossypium hirsutum
gagtttaacttagaacaaatttaatcaaactcattcaatcctaattgcaaaagttgataatcgaatttaataaagttcgaatagttgtattatatcccaagctgatcttaagcttaaaaatagaagttaaattcaaattagaccaagtccggtttgaagtattcacctttgattgttttgagatgcaccgcatttccagtttccacttaccccatccaattgagtttgttttgcttaaaactttattatttacagaaatgtagacttttttcttttcctttttttacattttacaaaaacaattcaataaattgaaactactcactcataattataatgcagttcttttaacaattcaactaaattgtccgacaattatggggttcaaaattttgtgcgcaagctcaaaattacaaaaaaaaaa

SEQ ID NO: 55 - DNA, 569 bp, Gossypium hirsutum
cttcatcttctgagcccgattgaataaaactaaaaaattcatgcaattctattacactcgctaacattttgatctcatcattcactctgttttcaaaacgaatgcacatctcttcctcagtcaacataatctcataaccatatttattaagctaaataaactcatgctcatatgaagaaactgatctagttccttgcttcaactcaaggaattctttcttcttcttatctaagtaacatttactaacgtatttcttttgaaattctgttcgaaaaaagtctcagttaatctaatctttcgataaccacaattgttaaagtcgaccaccagtgaaaaatttcttttaatagtggcactgcatatctcaaataatcttcgagaggacataacgtttcatccaaaacttagctttagccggatcatcactcactttactgcaaaattcttcgagcccacactttcaaactttatcaatagaatgtctatgaatattttgcagatttgggctttgaggacgagagggtgtcggggtaggcataggttggggtagagattggtgagctgtcgga

SEQ ID NO: 56 - DNA, 582 bp, Gossypium hirsutum
aaatattataagaagttgaagaatggaagaagaagaagaagaagacttacctggatgaagaacgagagatggaaaatgtcttacagaaatgaaatcggtaagacattttccccaaattgaaggttattttacccgtgtttgtaaaacattttacatttgtaaaatgttttcatgcttccaaacaccataaaagcaggaagacattttccttgcttccaaacggacccttaacagactaaataaatcaacttaatcatcaaataaataacttcaaatatataatgtttaagatgagattattgatcatttctccttctactctttccaatttcgaccaacacctttcaagatataataaaacatgacttaaacgattatttgaagtaaaatatgttatctttatgaaattcaaaaataggaaaactaaagccaaacttgtcttaaaaaataatattcaattttattgaatgccaaatatgatattataatgtgggaaagaattttacgaaggaaagcaaagttacttgtaagtcatatgacccagagggaacaaaaaaaacaaaataaaaaaggcacgaggat

SEQ ID NO: 57 - DNA, 532 bp, Gossypium hirsutum
tttgatttggtgactcggatagcagggggtcaaccaggatgtagacgtgaattttggtcctaataattatttccggtttaatgaaaatgacaacaacaaaaaatcataatttatttaagcttcttcaaaaataaaaagctgattgagttttagtttgtttgacatgagtattgttgtcaatacaggataacgtgggttcaaatgcgctgaagtgcattatcctcttatttatgggttagggatgattataggtagttctaggcattgttccaaaaatatatgatatgattaaaacctataatatcgaaaattacaatacctaaagtgactaaaacccaacacccaaaatgatttgaatccataataacccgacatgaaaatctaaacctcaaacccgaataaccctaactcgagctatccaaacttgaaacaatcatactcaaaatgatcagaattctaaaagagtattatttaattaaaaatgaactgaacttaaagccaccaaaacaaaaaaataaaaaaataaattgaa

SEQ ID NO: 58 - DNA, 575 bp, Gossypium hirsutum
aatttattattagaaaccttttatgacctttaatgcataatgatgtgatgtaatacaaatgcatgaatgcaaatgaggcatcaattttgattcaattccctttagaaaacttcactagaaaataaaacccttttacataaagctgagttacaaataaaactttgctctaatactcaaagtcttaagtttcctaagcaacgaggctagctcctgctcgtgatctgactccaactcgtacttcaagctcagtgcatccgcttgtactgctaaagcttgcaagtaatcggctgcctcccgaatctgggttatggcttccccgataatgtaatccctgtttctgacttggtcttgcgcatggtgaagctgctccttccaacgctcctcgcttgcctcaaaaaactgaatctacatctcacagttttgtagtgacgcttctaattcttctactcttcccttcatttcttccaccttactcaagcttgccctcaactccattacaatattatggtttcgatacttatgaagagacttttcgagttctgtcactctagcctttagttcacctcgtttatttc

SEQ ID NO: 59 - DNA, 365 bp, Gossypium hirsutum
tttctgctgaatgagtaatttctgttggttatactcttatttcgaaattgacagtgaaattgtggacaaccaaaactaagacaccataaatggataccagacagaggaccaactcacttaaattcagagcatccttcctcttgactcaacagaagcttgctgtcaaattccagtagtaggcttagtatgaaaaaagtaacggaaatcatactaggtaagaataaagaattctaaggtccagatattgcaccattcttcatcaatattctccttggagacatgaggatttgtgcaataatgtttccttgaagcctgagaaattttcaaaaaaatcaaattttgaccaattttccgtatctgaattt

SEQ ID NO: 60 - DNA, 562 bp, Gossypium hirsutum
gtaaatgcaaatgtaacatgaatgtcttggtgatatttatgcaaatgatgttttatgttggattgcatgattatgttacttgctatttacatgtgaacttactaagcatttatgcttactccctcctttccattctttgtagttttgacaagccagctcggaaattgggaacggttagaggcttgctcacactatctgtggaccattttggtatagtggcttgtatattttgagtatggcatgtatagcattatattcattttgtgtatatgatcttatgatatggctattgggtggtaaggaaatgtttggtaatgattagccatttgaatgactaatcaagattatatttggtgttatgtatgcttaatgtgctatctaatccatggaaattcataaaaagttgaaatttactataaaacagtatcatacagcagcaatgatgtgagtttgaaaaatcactaaaaatagtagaggcagaattagatggtgactaaaatatgaaatttaatatttttgagtctatttccatacagaagaaaccaaaccggtaaatgagttc

SEQ ID NO: 61 - DNA, 545 bp, Gossypium hirsutum
ttcgcagaactcaagcagcaattcaataaggaatcgaagagtttctgaacatacaccatagacgcgatagcaaacaccagaatcattcgattcgttctgatagcaaacaccagaatcattcgattcgctcctctaaaccaattcaaaaacctcaattaacataacgaaaacttcaatttaataacaaaatagaaaacgaaagagacattttcaaaatcctcataagcaaaacctaccttcttctcttctaatttaccaaacaccggacaataaaactcccttgacaaccaacaacaacgataaaatggaagaagcaaagaatccaaagaaactgaatattttctttttaggaagaaagaaaattgaaaagtcacaaagaacaaaatagagaagaggggaagagtgtgcaacactctttttttcttttggggattttttttctattctcaaaataaaaataaattaaaatagctaaaactaataaatattttagcaactaaaaaaacaaatcgaaaataaaattactcccataaacacacacgagg

SEQ ID NO: 62 - DNA, 558 bp, Gossypium hirsutum
tcgaagaaataattgatagcaagggatctttttaagataaaagcagcaaaattctagcaaagatttatcaaaaataaaaagatagagattaagttggaagtggtaagttattaagaagagaatagaaaaaataggaaaaatggtggtcacagcgatggtctggcagcgatgaggtggtggagcagaggtggtgtggttaactaatggtgctagaagctggaatagaagtggagaaaaggaggtgcaatggtggctcaaagaagaagaaaatggaagagaaaagaggatcaagggaagagcaatagaggaatcagttaagagagaaggatgagacactaaaatgagagaaaaagtgaaaggtggctaacttaggtgggatggacggttaaagcttggtaaatgggagaaaatggaagctttggaggacaatggcatgaaaagtggatcaagggggaacatgtggagtgaaaagagggggtttatgggggaaagttgactagctaaaggaggaaagaatctttctttgcatggtaactaggagtggacgattatggaagc

SEQ ID NO: 63 - DNA, 563 bp, Gossypium hirsutum
tcagcagcatggagggtggcttcctgtatcagccatgaatgcagtatgtggcatgaatgctattaacttgaattcatttgatgacatgcatttatattcctgaactggtaattttcaaatgcttagagatctagtgatatatagtttatatgaagagacctatagttttgttagatatggaaactaaccaaatttggaggcaaattcaagtgacattaaatgttttccttgctatttggtttctggtttcagtaaaatgctgtttttaatccaaattgcatcaccaactcgtattttgtgatgtatgttgcattttggtttgtaggacatggctgacatgcaactaatatctaaaaagggattattagagcgttcaccacgccagcaagttccttatgtttgtcccacaatgttaccttatgcttggctactcttatcattgtttcagacaaattccatgctagggactctatgaaatgtatcacactgtagttgatttacatataggacttacaaaagataggaaaagccttagcaactaaaggactggaagccggatatta

SEQ ID NO: 64 - DNA, 599 bp, Gossypium hirsutum
gctcgaaaaaaattttacatcgtcaccagcccttttgtcgatggaattggcatagttgctcccaaaaacctgcaaatcagacatgccttgagtaggacacaatttatgtttataccctccctctttaggagggaaccactttgaagtgtcacctacacaaaaattaaatagattagtgacaccatggtttataagttcaaaaggtcttcttaagatcttatgcaaaaattgaacaaatgaaccaatgccgggatcaaaagtgaaagttgattttacctttccgcaatgagttaagaatttcttcgttggagatataccaaaaacaagaagcattcgggaattataattttggacaacaaaaatccaggacttaaaaactttgaacaatgatgtagagccaaagcttcgatttagcgtttgcaacttgtcatagttcaacaacttcgttgatacgacccgcccctgggaacggctattgtttcagcctacaagcgaggctcgtcgtttttacaagctggacgtagctcaattttatttttgtggagcttcatttagctcatttccatctccttcaagttcaatgagctcgaaccagctat

SEQ ID NO: 65 - DNA, 564 bp, Gossypium hirsutum
cggctgaaacttataggggtattcatcagtttgactcgattgatgcttttagtgtttggaagttgatctagaaagccaaggttccttaaagggttaggatgttcatttgaattctatggaagaatacactattgactaatggatagtgagcaatgagacatatgaggaatgaaagccattgtctgagatgcagcaatgtcaacgaatcggggatccatgcaattcgtgatggcacattttcaaaggcggtgtggtgttcaattgtaccgatctataattaggtttttttttctctataccacttgatgaattgattttatgaaatatgcagaacataaggtattgtggtagtcatgagatagaaaggagaactttttttccaatagtgtgctggttgttatggaaaagtaggaacatgtatgtgttttctagtagccatagttgtgctcaagaaattgtagatatgtgtacaagttagacaagcagttatgtcaggatgaatgcatccatgtctatgttaatcctatggttactactaggaagttgtcagccctgaatagagga

SEQ ID NO: 66 - DNA, 568 bp, Gossypium hirsutum
  misc_feature (337)..(337): n is a, c, g, or t
agtgtaaccatagtaggtctaatttcacctatccccaactttctaaatattgacatggacatcaagttgatatttgcacccaaatcacatagtgccttaccacaatatgttgctccaatgttgcaaggtatggtaaaatatccaagatctttcaactttgggggtattttttcttaaagatatgcactgcattcctttgtcagggctaccgtcttaaattctccaagtctttatttttttgataggatatccttcatgaatttgacatagttcagcatttgttcttcaacaaacggaatgttgatatgaagttacttgagtatgcctaggaacttcntgaattaaacctgctgcttcttcttctaaagtcattaagggtagggtggtggaggcttctttattataaccggttgattcgtcttctgtgacaattctgcatctaactaagttgttagtttatcaaaattagttggtttagaagttaccttttcagattttatagattcaggttccagtgaaactagaatctcaacactcgattgaacttcctctgagtcttgagcatcag

SEQ ID NO: 67 - DNA, 566 bp, Gossypium hirsutum
attactgtcacactcggattctattaagtccaaaatttgggagttaatcgaataaagtagtagtaagttggagggctctactcgaaatcttgaaaaaaatttgaggttggttaataattagttaaaatgtaattttaattcaattgggctagaatcgacttgttccttagtggggaacataatgattagcatctaatggttttgaatttggggtccttgatagtcatgcgtgagagatatatatgtgagaaattttgcttagcagaggagttcttctcatttctgtttcatcttcttcatctttttttttagtttgctccgaataagagagagtttaagggaaagctctatatggagagctgaaatcaaagtttgatgtctaacaatatagaaccatggaaactagtaagattcttaaccttcccgccttcaaagatttgaggaagagaagaaagttaagaatttctaagaaaactctgaaaggtttctatatgttattgaatattggtttctaaagtatggatgtttgagtttaatttgtattatggttgtcatgtttagctgcc

SEQ ID NO: 68 - DNA, 583 bp, Gossypium hirsutum
gtaagaccttattgagttaccttaagggttcaaagatgtcttcgcatggtcataccaggatatgcccgggttaagcactgatattgtaatctgagcaatagctcgatgtcaaaaatttacagtatgttcaagattaacgtcatgaacgatgcagttagaattctttgccagggcaacgccttcttctttggcttatcatagtttttcccgttgaagtcaagttgtcatttctccacattcttgttggatttcatcctaattgaagaggaatatctaaagttttttggtcatagttaaatttcaccccaaaagggtctatgagagaaacctgataccaaagaagatctttcgtatacaaaatgaaagtggaagatcttatgtggaagaccttatctagaataacattgattctgatcgtaagggatgagaaagacttgcctaatcctattagtgcagattcaaaaagaagaagaagaagaagaacaacaaaaaaaagaaacaaaaacctctaccggggcaatgcctttctctttagctcatcacggtttttccattgaagttgaaattctttctctccgggtaa

SEQ ID NO: 69 - DNA, 592 bp, Gossypium hirsutum
ggggggcgcgtggacttttgcaccagaaatatacataaatatgtgttttaggatacttacaccagaaatattttttatttattttattttccaaattggaaaaaaaataagaaacctttgggcaacgtaataaataaatatcctctgtttctcagattggaatacttcaattttcgacccacccccgattcccttctaccttcaaattcttccttttcttccctcaattttttttttgtattttatttgaccacaacaaaaaatgtatgatttgggggatgaagtaacgattgaaagctacagaatcccttggctgatatggatccaaataatcatccttctacttctcatgcttcttctttatggcttcactctcttcgctttcgatctccccgaaacctcttcttcttcttcttcttcatcttcccctgactcccagttgggcaagctacctggtttcaagcaaactacaaccttttcttcccaggtatctgttgttccaatagggtcggaagcgtgtaaattattgtactaaaaaatcacacaaagttcaattcccaggaaagagaggtggatcacatggaatctctaa

SEQ ID NO: 70 - DNA, 393 bp, Gossypium hirsutum
tgcatgaacattaaaacatatatctactgcatactatatttacaacacaacacaccccaaacctaagggaagcattgtcctcaatgcatgaacaatgaaacatttcaaaatgcaaaagcaacaacttacaaatataaaactgaaatgacaaccaaatatgaatgcatgaaacatatgttatgaaatgaaaaaggtgcaaatgaaaataaaaacaaaagcttggaaggaacttgggttactctaattgggttgggttgattttctggtagcgcgtttgtagtgctgcttcctttccacttcaccaccatcatctcgaactgatttccaagcaacttgcttgtagtgcttcctttttagctggttaattggcacgtcttcatcatcatcaaaaaa

SEQ ID NO: 71 - DNA, 606 bp, Gossypium hirsutum
gatgttgctcgttcctccaccgaaactaagtatcgctctgttgcaactatgtcaccgaattacaatggatttgttctcttctaactgaacttggaattcacattctcaatccgcctgtggtctactgtgataatgttgaagcgacaaatctgtgtgctaatcctgtctttcactctcgcatgaagcacgttgccttggactattatttcattcaggaactggtgcaaaatggtcttcttcgtgtttcccatgtctcatcgtctgatcaacttgccaatgttctcacaaaactgctacctcgtcaccaattcaccacggttacttccaagattggactaactccacctccgtccatcttgcaggggcatgataagaatccataaagctgcaatctcaagtgtttatgtttctttaggattctatcgtttacgttcctgatctttagcgatttgttttccttaagaataagttcacatctgttatttctagtaaatttcttagcatgtcttttgtatataaacttatatcaatcaatgaaaagtgtgacaagggaaaaacattccaaaacccaattgtttcttcagctacaaacgtgaggaaagaaaa

SEQ ID NO: 72 - DNA, 611 bp, Gossypium hirsutum
catcttgtttaatctcaaagagctctttaccttgcttacctttcgaaacttgtggaataattttcttcaacaatttaccttttttgatcaattgaaatcgtttttggctgggaagtaatgaagttggaccttattcatttgacctttagagacctaaaatgaagaacagtcacaaggtaaactcatatgtgggttagtcaaaacactcctcacttgttattgaacaatttcttgctcactttctttttcaacgtcactcgtatcactcacactttcatcactatcactgtttttttcttcacactttctttttatttcaacttctcctctcacaacctctttttctttttcgattttttttctcttttctctcacgctctttttctttttcaagttcaatttcttttctatcacgctcttctttttagatttcttttcttctgctttcaaactcttttaattttctcccattttctctcatcaacaactcttctttctcttttttctcaatttttttcagcattcagactcttttattttcaaaatctcactttcttttatcctcagttgattcttacatatggatttggagtttgacggatccatattga

SEQ ID NO: 73 - DNA, 570 bp, Gossypium hirsutum
ttctttctcggagacaggggtaaacccgaaacaaagtccattgtcactcgatcccatttccactccagaaccataatcggttgtaacaaaccagatggcacctgatgtccagctttaacttgctgacaaatcaaacatttagaaacaaattcagagatatctcttttcattccgaaccaccaataatgttgttttagatcattatatattttcgcactacccgaatgcatagataaccgactattgtgagcttcactcaaaatcatctgaattaactctgaatttctcggaacataaattcgatctaggaatctcaaacaatcatctttatcaactctaaattctgaatcagactctacatcacactgagctcttttagctaaaatctcattatcaatattctgagctttgataatctgctgtaagaacaaaggtcttgctttcaattcagctaaaactgaaccatcattggatagaaccaaataagcattcatcgtacgaaaagcaaacaacaattttcgactcaagggatcagcaacaacatttgctttccctggatgataatcaatc

SEQ ID NO: 74 - DNA, 598 bp, Gossypium hirsutum
acttactgtccatcctcatcattatgaagtttgtgtgacttgttataaattttgacaggaagcaattccacaactttattagaagcgggaacagatcaaattgaagatacagaaggtcgagaagataaaaccacagactgctgggggatttcatccagaacctagttaaaatgcatagaaattaactccaacagataggggcaaagagaaagaagaactacccagactaataacataagaaataaaaattacctcaaataaagcttcagctaacataacgattctggatagactagccctagcacttgtctcatcatttgaattggaatctcgattatttacacgacatgtgaaacaaataatggcaaaacagttaaacacaccacactccaaaacagataatggcaaagattcaaatgatcgacccgtaattccaaaccaaaagttgtgtaaaaacgataatggcaaagattcaaatgagaagaatctttaggagaagagaaataaggattcgaactgcgaaacaaaggcacaaattcttagccgggagtcgatctgagccaaaacccaactgacgaagatagaaagaatgccggag

SEQ ID NO: 75 - DNA, 589 bp, Gossypium hirsutum
  misc_feature (10)..(10): n is a, c, g, or t
tttcatttcnaaacatcctcttgtccgggtaagctatccctcctgacacaaaagtcagggatatgtaagggaacgtcgttaattcctattcaacttctttttcactcagccgtgaccctcttctctctctctttttctttctctttttaataactttaactaattagggtatttttataattttgaatgcaaatgatgtaatgaaatgttataaggtgcagatgaatgcaaaaggtatcgatctcgattcaatctcatttagaaaactttatttagaaaaagaatatctttacatataaatggattacaaatacgctttcgccttaatgcccaaagttttaactctatctaataaaagggctaactctcgtcctatatccgatgacgatccatacattagactcaatacatcagctcgtattgccaaatcttgcacatattctgcaacctctcgaatctgggctacggcttcaccaatgacgtgatccctttctctgacctgtcctctagactgatgaagctctccttttagataatcttctcgcgcctcgagctgctcaatccgaagttcaccatcatgcaatgcgta

SEQ ID NO: 76 - DNA, 565 bp, Gossypium hirsutum
  misc_feature (4)..(4): n is a, c, g, or t
actncaaaaagaaatattctaatacctaaattgacgaaataatacaaattaacaacataatttctccaacttaaacgattaatttaacaaatcctacatgaacgaatctagaaatcgatacgaactaaccccataatagcagaacactcacctcctatcgatcacaacttgagcgaatccaattagtcgaagaacccaccatcacacaatcctcacctaaacataactcacataaaatcaaatttccaaactaaaccttcacaacaaacatcaaaagaaccaagcccccaaaaattataaatccaagaatagcattaaaacttacccaacgtcactaaatcataccagggagaaataatagaaaaagaaatgaaaaaaacagagattataagcaacctcagcttggcaatcaataaaataaaaagaagaatcaaaatcaaagacgaaatatttgggtaaaagaaaatcagcaagaacgtcaaaaacatagtagcttgaaagaaaaaggaagaaaagaaaaatgtatgaaacaaaattggggagaaagataggtaacgtgagtaaa

SEQ ID NO: 77 - DNA, 572 bp, Gossypium hirsutum
ctccaattcttattgtttctttttctttttcttttttcttacttttaattgctaccgtaagattgctaccaagtttaattgggcgttctgtgtggttctttgcttcgattgtaaggtttttatgtaagttttgtcgttattttctttttgttttcactagatttcatatggtttgtcgagttcgaatgttactgttagtaatgctcaactctttgttaattgtttgatttgcttttgtttacgcgaagatcttgagaggtatgttcctccagtgagttagttccacttagtggttgtttgatcgttggtaagtgaataattcgtgtttaagggttttgcgtcaaagttttcgatgtaattcaattctattgttaagttagcgaatttagtttggttcattcattaaattggacattggttggttatttttaggttcgagatttctcttcgttgttccgacatcaaaactacataaggtgtgtaatgaaaacccaaaactctgtgaaaaatatggctatcaatgccacacagctatgtggtagaccgtgtggtaagccgtgtaactcaatgtt

SEQ ID NO: 78 - DNA, 562 bp, Gossypium hirsutum
aagcatgcaatgtatttactggatctctttctaaactctcccctctcccctctcccctatttccttttcttctatctcgagttagctgtcgaatttttttcctttttatggtccatcgcagttcttaggttgatagcttggtctaggtatgttagaaagcagttttttgtcttctttttaatgcatgaattgcctctttctggtagtttgccttttgtgacattctctaatctctgtagtttgctctctgttgtataaagtttgaacaattcttcctacagtgctttatcttcattaagttacttaaatactcaatcatgacatccagacatatagtaaaacaaacaaaactgtcatatgtagttccctcaagtgagtcataagcaaattttcttgagaaacaacaaactgaaacatggatatcattaaactccagaaacaaacagaatccaccaaatctgatgtttagaacctcatttcccctttttgaatcacaaagaacacaaaaggaagcccataactgaatgccactaagcctgccattcctgttcaagaattaagc

SEQ ID NO: 79 - DNA, 341 bp, Gossypium hirsutum
cacagatcaaaagctattcagacacataacccacgtgtccatttgtgatctcgagatacggggggagcttcattcttgtctcgaaggtcaacgaaaaccccgcgaatatctcgtcgctgacgtgtcactcagtttgtgagccaatctttccgcttatttaccatccatgccatcgcccgactaaaaaggcagaccgcaatatatttacatgtccacctcgacaacgagtatcaccttctcaaagctcgtattttgccacgtggcactcaatccgctaacctcggacaaacccgaataaatataccgcttacttaactgcaaatttctgtaaaaaaaaaaaa

SEQ ID NO: 80 - DNA, 504 bp, Gossypium hirsutum
aaatccataaactgacacttaaaacttgatcgattattaaagaaaataaatagtctagacgactaatgtccatgcacgaaaacactaaactaactcaaaaccagaaacccataccacggttcacttaaaatttatttacaattccaattgaacataaatgcttatatattaggaagaactttattaaagtcaaaatgagatgagaaactgtgagacatccgatttgctgagtccaagacctaaccacgcaaattacccgaaaaggttaaattaagggtgtgagctacaaaactcggtgtgagtcaaaaataaaagaaaacaatgcagtaacaaacactcaattaaacatacaatagccaaattctaattataatcagaagtcacattagaattgagcatcacaatacgttaacactaatcaattatgcaattgatgctcaaatataatttagcacaaaatcccacctatccaaccgttacacaccatctccaaccatcccacac

SEQ ID NO: 81 - DNA, 466 bp, Gossypium hirsutum
tttattctcattcatacttgcacaaattcatggattttccacaaagcgttaattggtgcacaaaattgtcacaaatgaagaatttaatcgcctttcgtgaaaaaccgtcatcacgcaaaattaaacctttggtttgttgattggaacaaaaatcaaccacattcagggagtagcaattaatcagaccaaaataaggagagcgtttagaaattaagtcactaaaaagtatttcaacaattttcaaacctgggggtcgtgactcgatcgttaacatttcctcacctctcttacctttgaactcttgaggcacgttttcatcttcaaccttacctatactgaccatatgaaaatgtctttcatcggaaaggtagtgaagttgaaaattatcgtttgatatctcgggcacctggaaagaagaaacagaacaagaacaagtttcatatggattagtcgaaatgctcctcaa

SEQ ID NO: 82 - DNA, 558 bp, Gossypium hirsutum
atcgcaatagaaattcatacttaaatgattcaaaaacttaccctcgaaaatactaccgtcaaaacttcactatgcaactgaagggtctcggattctctaagaagcacctatcaaaacggtataacaaatcagcccgaaacacccacaaaaactaaagcattacataacaactcctttaacccacagtgaaatcttacctatgaagcatgcgaaaagaccaaaaatcaaaggaaagaaataaaactgaaattaaaaaaagaaaagaaaagaatttgatagaggaatagagaagaaaattagagagagtgagaggaaaaaatttgagaaattaaaataaaaattcaaattaatccctacaatatctcaacccctacattatcccactactaaccgacccaccaactcttaactacctcagaattccacttccactgaacttctttcacacaatcgtcgtaaaaattaacatccacacttgtataaggattcgaaccaacaaactcattctaatatgagtttacaaacaatatattataagtccacccaacagatataagg

SEQ ID NO: 83 - DNA, 593 bp, Gossypium hirsutum
ttgatttgatgactcctttgattacattcaaggatcttatgaatagggttttccaaccatattttgatcagtttgtcgtggttttcatcgttataagaaaaaagatctactaagtttggaaaatgtgagttttggttaagagaggttagttttcttagacatgtggtttctgtgaagggaatccaagtcgacctgaaaaatgttaaggttgtgcttaagtggaaataatctaggaatgtgtctgagatctgtagcttccttgatttaacaggatattatcatagatttgttgagggtttctcgattattgtagctcctctaactcaattgttgcataacaatgcaacatttgtgtggactgatgagcagcaagcgagctttgggaagctcatgtttgtcttaactcaatcacccattctgatacagcttgaatttggtaaaaggttgatggtttatattgatgcttctcatgccagactgggttgtgttctgatgcaagatggtatggtagtagcttatacatcccgatagcttaagtcacacgaaagtaataatcccatacatgatcttaagttggctacagttgtcttcgc

SEQ ID NO: 84 - DNA, 766 bp, Gossypium hirsutum
  misc_feature (457)..(457): n is a, c, g, or t
ttactcgttatgggcactactatttcttagtcattacctttgatttgatgactcctttgattacattcaaggatcttatgaatagggttttccaaccatattttgatcagtttgtcgtggttttcatcgttataagaaaaaagatctactaagtttggaaaatgtgagttttggttaagagaggttagttttcttagacatgtggtttctgtgaagggaatccaagtcgacctgaaaaatgttaaggttgtgcttaagtggaaataatctaggaatgtgtctgagatctgtagcttccttgatttaacaggatattatcatagatttgttgagggtttctcgattattgtagctcctctaactcaattgttgcataacaatgcaacatttgtgtggactgatgagcagcaagcgagctttgggaagctcatgtttgtcttaactcaatcacccattntgatacagcttgaatttggtaaaaggttgatggtttatattgatgcttctcatgccagactgggttgtgttctgatgcaagatggtatggtagtagcttatacatcccgatagcttaagtcacacgaaagtaataatcccacacatgatcttaagttggctacagttgtcttcgctttgaaaatctggaggcactatctgtatgggtgagaggtgtatcatttacaccggtcacaagagccttaagtatctccttactcagaaggagttgaaccttaagcattgcagaatgcatttgagttgcttaagg

SEQ ID NO: 85 - DNA, 579 bp, Gossypium hirsutum
aatgaacgtcgactatatattagagttaaaggttcctaaactcaaactttttattgttccattaaatcatttatttagtaaattattaggattgaaacatcatgcctcctaagaaagttaggcgaacaatggaaacgaagtcatcgatggttcaaaatccctttacttttctaagtctaaatattgaaaagtattttaatgaacttcaaggaaaaacattcatccaagagagaggatttggtccatcgatgattttgtgtaaagaaatttggtctctagttagatatcatcgatgggaacgtttttggattatcctaaaggataatgccatggtccccattatccaaaatttttatgcatctctaattgaccacgagtccagaaatacagaaggtcatatatgggatacaatacttttgctggggaaacaagtgcaagtaacccctagaataatttgcgactttaataatgttccatagtatgagaatgatttcattgaggaaactgacttagaatattttagagacatagatatgggtaatattataaactttttaactaaaggaagtggcgaatgta

SEQ ID NO: 86 - DNA, 407 bp, Gossypium hirsutum
cgtcatatatccaaaactcaaaacttacataccatgtaacaaacatatcaaaataatcttctaccatgttcgaacctaaccaaatattatttaattcaaattcacataataacaccttaattaacttaacaaccaatttcacacacacacacacatatatatatgtataagactgaatcaccaaaataataaccaagcataaccatcatcaaacgaagcattaaatccgagcacaacaaattattaagccattttcgcatggcttagattactcataaccaaaaatcaaacatttcaaaacataatccagcctatacatgccatagttccaaaaattcagcttataaaatacaaaagactgtcgatagtgtgataagctttgctgacgatactcgagctcgtaaaaa

SEQ ID NO: 87 - DNA, 958 bp, Gossypium hirsutum
caatggtgctaatggacaaccatcgcctgatgataatctggtcaattcctcaagcttgatgttgactggaccaaagaaaagaaatctggaagctgaaggagaaggcatcaagaaacagagccggccccggctaacggttgaatcatcaaatttggtagaagagaatactgaagagcgtattcaggtgaaacctcaaaccttggtatgttgaattatttttctaaatttttcatatatttcaagaaatgtcaaagggtcatattctaaaccaatgttcgaacatgtatcgaacactgatacttcaagcaaaatgaaatgttcaagtgacatagatttcagtatgattagaccataaaacctaatgtcttggtattctctcccatggtcgtttgcattgaaaatgatattgtgttactttctaagctttgaaaatattatatatggctgaagctataaacttggaaagaaaaatattgcatgtctttcttgattaatttgttctgtatttgattttgttttttttgtttttacatcttaataatttgtttatgtttttcttaaattttagagatacaatgaggggactccaaaaaacaaggtatggtatatgtgtatatatgatatttgtttatatttctgttaaatttcaggaatacactgcatagagactctaggaaaagaggtatggtatatatatgtatatacctatattggtaggggatgaactgtaacagttctccagcatttgaaaacttgaattttgaaatagtgaaaatataaatgtaatcatttctcaaatccataatatgaatttatcaaatggttgtctagtaatgactttaaaattttatatttttataattttcaaggacaaaactgcactttcggaagctagagtacaaggtattgccattaatgatgttattcctacttgatcaagacaatggaaatttgctgg

SEQ ID NO: 88 - DNA, 555 bp, Gossypium hirsutum
  misc_feature (404)..(406): n is a, c, g, or t
  misc_feature (498)..(500): n is a, c, g, or t
  misc_feature (504)..(506): n is a, c, g, or t
  misc_feature (508)..(509): n is a, c, g, or t
aacccagaacccgactcggattccgacacccccggaccctacaagcagatgctggaccagttcttttgggaatgcgagaacctccctgattacaggcacactccggaggtcgaaaagattttggatgaggaccccgttttcgagaagaaagagaacccgacggaagaggaaattaaagagaatgaaaaatggtggcgtgatttcagggcaagtcccgtggttcagtttttggctagagctgaggaaattgctgacgagatcaatagaatggagcttaaagaaaatgaagagccgttcaggaaagaagataagaaactgtggcaagcgcttccacatgtgattgggttggatgggaggcctatgcctagaaaagctatcaagaccagagaagagagcgatgatannntatttccttgagtgcgttagaattttcccatttactggtgacagctgaataatgttcttttgcattttaaggttaaccttctggttatcaannncccnnncnncatttcagtttgtgtatttcccaatttatccttttgtttttgcatg

SEQ ID NO: 89 - DNA, 760 bp, Gossypium hirsutum
ctatctataatttctatcccaccggtaagaagtcaattaactcttggtggtctctttgtcttgtgagattcctcccctcttgtaaagttcactgagatttctttgtgcggcagattttgagattgacatgcatggaaaacgctttgcatggcaggtgtattcttatctagaaagttaactcattttttttattttcctcatgcatttcaacaaaaaaattgtggactcttaccctttttctttccaccagggtgttgtcaaattgccattcattgatgagaagaagttgctttctgcaacaagaaagcttgaagctactttaacggtctgaatggttgttttagattagcaagcttaatttctaaatgatgcatgcgaaatatcctggagtcttctttcatgcatcgcttgttcttacaatgtttttggttgattcattattctaacccttaatatctacaggctgaagagcagattcggaacagtgtgatgcttgatctgctatatgtccatccccttcatcctttggcttctcaagtgatttcgtattatcaaatgtaccatcatgttcgcccccatgaaagattcttatggccaatcgacacaaatgctaggttggttaatctaactgttaattattgagtgttcacatttgaaataatttttacggaacatctgttggtttcacagtggtggaatgaatggatttctttggttatctgaaaggaatggttggcaacatgtagtctcttcccctgtc

SEQ ID NO: 90 - DNA, 1108 bp, Gossypium hirsutum
  misc_feature (720)..(720): n is a, c, g, or t
  misc_feature (722)..(724): n is a, c, g, or t
  misc_feature (740)..(740): n is a, c, g, or t
  misc_feature (743)..(743): n is a, c, g, or t
  misc_feature (749)..(749): n is a, c, g, or t
  misc_feature (751)..(751): n is a, c, g, or t
  misc_feature (760)..(760): n is a, c, g, or t
  misc_feature (767)..(770): n is a, c, g, or t
  misc_feature (788)..(788): n is a, c, g, or t
  misc_feature (791)..(792): n is a, c, g, or t
  misc_feature (794)..(798): n is a, c, g, or t
  misc_feature (801)..(805): n is a, c, g, or t
  misc_feature (808)..(809): n is a, c, g, or t
  misc_feature (811)..(818): n is a, c, g, or t
  misc_feature (820)..(824): n is a, c, g, or t
  misc_feature (832)..(837): n is a, c, g, or t
  misc_feature (842)..(843): n is a, c, g, or t
  misc_feature (847)..(847): n is a, c, g, or t
  misc_feature (849)..(851): n is a, c, g, or t
  misc_feature (857)..(859): n is a, c, g, or t
  misc_feature (865)..(868): n is a, c, g, or t
  misc_feature (876)..(882): n is a, c, g, or t
  misc_feature (884)..(887): n is a, c, g, or t
  misc_feature (889)..(889): n is a, c, g, or t
  misc_feature (895)..(897): n is a, c, g, or t
  misc_feature (899)..(907): n is a, c, g, or t
  misc_feature (917)..(919): n is a, c, g, or t
  misc_feature (923)..(929): n is a, c, g, or t
  misc_feature (931)..(932): n is a, c, g, or t
  misc_feature (935)..(936): n is a, c, g, or t
  misc_feature (938)..(943): n is a, c, g, or t
  misc_feature (952)..(954): n is a, c, g, or t
  misc_feature (958)..(966): n is a, c, g, or t
  misc_feature (972)..(972): n is a, c, g, or t
  misc_feature (974)..(977): n is a, c, g, or t
  misc_feature (983)..(988): n is a, c, g, or t
  misc_feature (991)..(995): n is a, c, g, or t
  misc_feature (1000)..(1009): n is a, c, g, or t
  misc_feature (1023)..(1031): n is a, c, g, or t
  misc_feature (1036)..(1036): n is a, c, g, or t
  misc_feature (1040)..(1040): n is a, c, g, or t
  misc_feature (1042)..(1047): n is a, c, g, or t
  misc_feature (1049)..(1056): n is a, c, g, or t
  misc_feature (1060)..(1061): n is a, c, g, or t
  misc_feature (1063)..(1063): n is a, c, g, or t
  misc_feature (1076)..(1094): n is a, c, g, or t
gacgttcttactttcttccgcagcacttgagcatcttcaacactgttctcagcaacaggattggcttcggtgttttcttcagcaacagcaggaggaacctcagtactttccacaagaggagcaggagtctcgacttcctcggtcaccacttccttggaagaagtactcgctgaattttcgacctcttctgcgtcagctgcttttgtagccacatctgatttctccgctttctccttcagtgaatattgctgcatgtccaaagattcaagaaaaaacatactctggtcaaataacctcttttgctctgatttttatttttcttgaagtacccgaatctgacactcatgttcaccacattgaaatggggatatgacctccaggattctccaaatacatggaaaaaacttaaaaaagaaaaaaaaatcttaccatactgtttcaagcacaaatacatatcaaatactaacacccaaaatccagtaacatagcaaataactatgaattacaaagcttagtatcagcccaaatacacaaagcgttttacaagaacgagaagcagggatttcattgatgttatcagtgccaaaatttagcaaccaagtttgcatcttagctaattttaagcaagaatgggatgtccaagaagtaaaaacaagcttgaaagaagataaagaaaacccaatttatcattctagagtatagatgaacattattgttcanannnaataatcatgagtagnttngctttnanttcaagaantgcaatnnnnatgcaatactaatatctnagnngnnnnnttnnnnncannannnnnnnnannnnnccttcccnnnnnncaaannctcngnnntaaacnnnaaactnnnnctcaaaannnnnnncnnnncntgcccnnntnnnnnnnnnttttttgttnnnaacnnnnnnnannccnncnnnnnnaaaaaaaannnaaannnnnnnnngaaagntnnnntttttnnnnnnttnnnnnaaaannnnnnnnnntgaaaaaaaaaaannnnnnnnnacaanaaanannnnnngnnnnnnnnccanngngaataaaaaaagnnnnnnnnnnnnnnnnnnnaaaaaaaaaaaaaa

SEQ ID NO: 91 - DNA, 393 bp, Gossypium hirsutum
tgggcagtgaatcagttgatcagggagttggtataaacggcgagactgctggagaaggaatatttggttctgagatggatgttgacccacccaccagtatttgtcaacctgaattaccatcccttagtgaggaaattgtagctggtaatgcctttccagggcatggagacagtgcttttattaacaaggtccctaatatggatggttattcacttcccaaagatgatgctttaagagataacgaatgtgaagaaatatttaacataaattgtcacgaaagtgcaatggctgttgagccacaaccagatgaggttccccaaacagaacagctttcaaagccatgcacagtgacaaatcaagatcatttgggcagcaagtgtactgaaccttcag

SEQ ID NO: 92 - DNA, 700 bp, Gossypium hirsutum
aagaagttcactttataacctcttttaattctacatgaatgtttcggttgtgaaaacttgtaggttcctcagcggtcggacgcttcatggggtgtctatgtattttctgatatgaatccatatgttggtcatcaaaatcctttaaaagaatgtcaagagctattcaggaaaggacttttgagtgaagcagtgcttgccctagaggctgaagttatgaaaaatcctgagaatgctgaagattggagattgctaggaataacccatgctgaaaatgatgatgaccagcaggtaatcctctttgccctagtttgtcagagttggatagttcatgtgtattcttacaccaaaagacattgtttttgtgttctttaatactacaagaatttctattaagagatgtgactgcttgtctagttcagccatctgttcagcatctttggttatgattctttgcctggcaaggttgaccatttacctttctattccacctaaatctaaatcatttttcatcttgtctaatgccctgtgaataccatcatattttaggaaacagaacaacctattgattaagcaagcaagaaaaccttttgaacacaaaggatctattttcttgtactgctacattttgtgttttatttgctggcttgatatagccatgttgatgtaccatgcaatgttcatttcttgtatatgaaaactt

SEQ ID NO: 93 - DNA, 379 bp, Gossypium hirsutum
acttgtgcatcaagtaactataagcaagagaaagaaaagaaaataaagagagtgcaaagaataggcatttagttaggttaggttagtgccacagcttctcaaatggagggctttggctaaagctgttgtccattgttgtagttgtttaagtggggttattgacccctgtaaattagtgacactataagatggttaaaggtttcgaaattcttggggtcgggttcggatcggtagggtgaaatttctagcctgtgccgccgggcttttaaccggatatgggcaccgaagaaaatgatctttgttggtgtgattgattgattgatttctgtttgaatgagtgggggaaagttgaacttcctatacaaggttcaagtatggc

SEQ ID NO: 94 - DNA, 399 bp, Gossypium hirsutum
tcaaaaagctgcctgcttggggttcttgatattgcctcaaccgaccattctcaaagttttctttttatataaatttccaagtttttgtttttctaacatcttcatgctcaatcttctgttattgatgtttgagattcatgtctcaaattctcagtgaaatcttcttttctgggtttatgatcaattctacattcattcgaaggacccaactcgttcaatctttctcagttgttttcctttactggttgtactacgtttcatgattttctagccctttttttctttcaagttttctatatctctatatataatatttaataaataaataaattcaactaccataatattctactaatctgcatattattcatcttttatctacaactttccatggcttcc

SEQ ID NO: 95 - DNA, 365 bp, Gossypium hirsutum
gcagtccacttgtttcttcagtgaagtcacggcactctgaaccaaagtcgaaaacaaaagtatctggagttcctgaaagcaaaaaaatatcagcaattatgaaccatgataaaagtaagattgcttctctgcccgagctcaaaattaaaacaactaaagatcccaatgttacggacaacaaatcgggaggaaatggaatgactcagaaggtcagtggaagtacttcttcgaccattgatgttgctgaaccaagtaggaacacggacaaaggttcacttaatattgatggggacgacggtacagtaattgagaaaaccgttgtgatgcttgaatccattcccacggtaaattcatcagaagcaaca

SEQ ID NO: 96 - DNA, 150 bp, Gossypium hirsutum
ctgcccgatctgtacgacgtaagagttgtgtgatcgagaggaaccctgcgccgcacggcgggcgtggagctttgccttctgaaggcggtagtccttccgatctcctcttccttgctggcggcggtgttgtcttttagagtttcagtagtt

SEQ ID NO: 97 - DNA, 388 bp, Gossypium hirsutum
ctcaactcatcattgctgtcactcggggatgccattaggttttagtggtttgcagggtcatggtttaaatattaagccaaagcagcgttatggtgatgcagtagcagcaaggtgtgctacttgggattcagggcttttggctgagttagaaagagaactggaggctaaagacgaagaagaatgggtgaaagtgggaaggctgagagagaaatgcaaggaaaggaagggaatggtggagttgttggagtgtttggaaagggaagcaatacaaggggaagaccatggaagagaagctagtgattacaatagaagagcccagatctttgataagagttccaaggttttccaggctctcaaagcacgcacccaacctactcactctcaaaac

SEQ ID NO: 98 - DNA, 401 bp, Gossypium hirsutum
  misc_feature (11)..(11): n is a, c, g, or t
  misc_feature (14)..(14): n is a, c, g, or t
gggttttcctntcnactgacggcaacctcttcatttttgccaataatcgttcggttcttttgaacactcagacccacacgattatccacgagttcccaatgctacctggcggtgctcgtaattatccgtcatcgggatgcgcttctctccttccaatcatgcttaaacctaatgaagataggaaatcaatccccgccgaggttttggtgtgcggtggaacgccgcatgatgcatatacaaaggccgatttgcaacgccctaaggtgtttttgccagggaacaccgattgtgctcgcattgacatcaccaaaaggaatggcaagtggaagatccaaaacatgccctcagctcgtttattgggagacatggtggtgcttccgacgggagatgtgttacttgtc

SEQ ID NO: 99 - DNA, 396 bp, Gossypium hirsutum
tgaggagatgcagaggcctggtactccactttacaacatcaaggcctaccttccagttattgagtcttttggattctccagcactctgagggctgcaacctccggacaggctttcccacaatgtgtgtttgatcactgggatatgatgtcatcagatccattggaacctggttcccaagcagcagcccatgttgctgagatccgtaagaggaagggattgaaggagcagatgaccccactttctgagtacgaggacaaactgtaaggttgagaataactcagcttctgccgctatattttctgctgcaattttttgttttcggtgtctgtctcttaatgttcttgttagtagttttggggtgccttcacccatactgtcttatcatgcaaggagga

SEQ ID NO: 100 - DNA, 265 bp, Gossypium hirsutum
  misc_feature (56)..(56): n is a, c, g, or t
  misc_feature (59)..(60): n is a, c, g, or t
tatgtctttctctacgcccttcccaaccctcttcctgttctcgcccatgccgtcantgnntactccaatcataacagtgtcgacggtaatttcactccctctctctgaatttttttctatttattgttatttttaagcttagggttctcatctttatttttcttagttggaagtcaaagataataaacttttcatgcatttaacagaaatagtttcatattcgaataattaaagcaacgaagattaacattttgtgaagaaaaaa

SEQ ID NO: 101 - DNA, 390 bp, Gossypium hirsutum
agaaagactctgaaagagcaaactgttatgcaaaattctggatcttgttcagttaaaaatagggtcgttgctgacaatggcaatggattcaactcgccaatgtcaaaaccagatagtgcttctcctagctctgcccgtttctcatggattaagcgctgcagagaattgatattcaaaaatgcctctgacatggcccaaatgaagccagaagaaagatctttgatctctgaccgtgaagacgtgtgtttgacgtcagctggaaagttggttttaagccatgagtgtgatgggcaaaaatacaagcagtatggaagaaagcccttgggatttgatggggaaccaaaagtgacagtggaagtgccctcagaagatgaggtgatcaaaggaaaa

SEQ ID NO: 102 - DNA, 480 bp, Gossypium hirsutum
aatgctgctgggtgtattgttgtgactggtatggaccaatttcactccatcattggctttctttcaaagtgctaaggattagctggctgacattgatttattattcttcctttttacctgtttgcaactcatgatttgcagaagctgggggtgtggtcacagatgctgcagggcagcccttggatttttccaagggaaagcatcttgatgtggacacaggcatcattgtcactaaccagaagttaatgccattactgttgaatgcagttaaagaatccctgaaagagaaagctccatcctcatgatctgttttagaggcaggcttcatcctttcctcttaattattttgcccgtaagtgctttctccctgcgtgtacaagcatttacatttacatttagcatgcatgaacgttaatgggatcaataaatcttgtctccacaattatgatgatgtaaccgtagactagaacttgaaagcat

SEQ ID NO: 103 - DNA, 1078 bp, Gossypium hirsutum
  misc_feature (62)..(62): n is a, c, g, or t
  misc_feature (1030)..(1037): n is a, c, g, or t
tatgatgacaaaggaggtggctgtggtggcggtgggaagggcggaactaaaggaagaggagnatggctcaagagctgtgaggaggaagaagaacggcagaaccagatttctgtcgtggcctttcttttggctgctttgaggaaatccatggtgtcttgtcgtgttgatagacgagacgaagtaatgtcttcttccaccgttcaccatatggaaatcggatggccgaccaacgtcaaacacatcacccatgttacatttgatcggttcaatgggttcttgggtcttcccgttgagttccaagtcgagatccccggtcgggttccaagtgctaggtaattttcttttgttggtctctttaaagattgatttcttttagttgttttcaggttgaaatgttaagtgttttctgtagtttagatctgaaatttattttcaaagttttgatttcaagctctttttcattttgaaaatttgaaaataaacaatttattaaactgggtttgtcgctttctataaaagctatatgaaattgacaaatgattattataatatgtagaccttatttattttgtcctactcctttttccagaagcagtaaaataattggactttgagttccttgtggaattgcagtgaatttcatcgagtgatagaggctatgttagtattattttagggtattaggatttgtggttatattaggtttatttcttgcagcacctgaagtgtgcaataaatgtagctactgaccctgccttgtataggtgaagcaaataaatgatgccatgttctggactgtttttagttgcaaaatatttattgcaacctaatcttgtctatgaagaaatttgggttttcaaagaaacttcttttgatgtacctctgcggtttacaagccaagtccggtcttttctccaatcagggttttatctccctattcaattacagcaccatggttgctgtaaagtgagcttatggcaaggctcgaactaggaccttttgcatatagacgttttatctgttctattannnnnnnncttaattgcaactgactgtattcattacagtgctagtgtgt

SEQ ID NO: 104 - DNA, 411 bp, Gossypium hirsutum
ccagctgaaacaaaccctagaaactttcaactccaccccattccatccttagattggatcaagaacctcttttatttgttcgaaattctcgtttcatactgaaggaaagaaccgcatcttgtgactttgagcagcaaagcaaagctcaatcggttcttttacattcttccaccactctgttttaccctgctcttaaccgaagaggaacaagcaaagaatcccctcgaatccagcaaccttacaatgcctaaccgaaatcccacttctttctcctcctatgttgccctatgcttcatgattttctccaatgtagctttggtaacttcaaaatcaaccatcgaaccctgttcaaactccgattcctgcaacgccttgctgggatacaatctctacactgatttgaaagtggcg

SEQ ID NO: 105 - DNA, 722 bp, Gossypium hirsutum
  misc_feature (479)..(479): n is a, c, g, or t
ttgttgattcgaaatcaacatcaaccattgatgttataaaccctgtgagtgtctcatcctaatcttttttatagataagaatattcagctcttggagttaattgtaatatatgttagtttggaaaattaaataggcgacacaagaagttgtttcacaaattcctttaactacaaatgaagagttcaaagctgcagtggctgcagcaaagcaagctttcccgtcatggcgaaataccccaattacaactcgtcagcgtattatgttcaaactccaagagcttattcgtagggatatggtaaagcatgagctcagttcaggtttttctttgtgtagtaagttttttgtatagatgcttttttagctaatgaatctattcaatctttattttgtttttaggataaactggccaagaatattacaactgaacagggcaagacattgaaggatgctcatggagatgtctttcggggacttggtnggtatctatatccttcaatgtactgtttgagttggtagcagaaattgtcaaccttaacagtgttaaagattaatatttttttccttctccttttttgttttattttctggacttttttcatatagaggtggtggaacatagttgtggaatggcaaccctgaaaatgggagagtatgtccccaatgtagctagtggaatcgatacatatagtgttagagaaccactaggtgtttgtgcttggat

SEQ ID NO: 106 - DNA, 495 bp, Gossypium hirsutum
tatataggttcaatctcccaattttatagtccttcattcattgataatacacttactgtttttcttttttttggaatccttatgcagatcacttgatcttcactcccaattctatagtccttcacttgttaataatgtacttactgttttttcttttttttggaattcttatgcaaatcacttgatcttcacaaaaggctcataattgccatgggtgcagcttttggcatgaaatacttgcacgccaaaaacattgtccattttgatctgaaatgtgacaatttgcttgttaatctaagggacccacaacgacccatatgcaaggtaatcaaaacaaattcctcactaaaaaacattttgatttcaaggtgccttaagtgacattaaaaccataaatggtcaaaaaaaggaattcttaattctggttaagtccaaaatcatttttggtccacaagatgaatgctgatcatatgtatacaataaaatagccttaaa

SEQ ID NO: 107 - DNA, 448 bp, Gossypium hirsutum
gaaaagaagacattgacagctgttactcctcttgaaaacccaggttagccactcccacatagattgactcgtattattcataatccatgagaaatttaacagataccatacttcagttgtcatagggcaatctcgaaagacgtggaggcttccttcaacttcagatctgcattggggacatctgtcatttgtaacaactctcctgattctgaaattagcaaagtttggaataaaatcccaagagatccaccagattgtaaatgcaatttttgatggtatctataggctccaaagtttcttgtaaaattcttttgtttcggtctgtaataaatagtttctaggatctagattagcatcttgtaatagtttataagctctgcagaccgaaaactcaccagataattctcctttccaaacctggaaatccttatgctcaatctctgtgaag

SEQ ID NO: 108 - DNA, 770 bp, Gossypium hirsutum
tccccatgctgtatctactggcttacggctatcatatgatgatgatgagcggaactcatctatgacttctgctagcggaagcatgacacatggaccgttaatgatcttggctctcggtgacaatgttacaaccgaacttgatcgtcagaaagaagaatttgatcaatatatcaaaatgcaggtactattgtggtattgctctccaagtaaaataaaatgtcacctttctgtatgatctctcaatatagggggtttcttagtgacgggattaaaacagcttttactagtcaatcttaataactcgtatttatgttgatgcgtttgcttttggctgggcataggtgcttagtaattttctttgtttaccataataattccgataagttctgtgttggaggtgtccttgcttcaaggctcctaacatccgtcctgattatgattttactattttatactccataaatctcacatgtttatggttgctggtaacgcctagcactatggtgcctaggaggacgttctattcagactattttctttcttaatcaggaagagcacttgacgaagggaataagagacatgaaacaaagacacacggcttcttttcttgctgctattgagaaaggtgttagcaaaaagcttagggagaaagacgtagaactagagactgtgaatcgcaagaatagggaactggttgacgggataaagcaggtgactatggaagcccagaattggcaccatagagcaaaatacaatgagtcagtcgtcaa

SEQ ID NO: 109 - DNA, 410 bp, Gossypium hirsutum
  misc_feature (58)..(61): n is a, c, g, or t
aacttcatgtaaaaaaggtttcattctcgatggatttccgaggactgtaggccaagcnnnnaaggtgttgcttcttttgaatctttatgcacccttggtttttaaaatttttatacccacatcccttattacgtgttgttgatcttcggtatacagcttgatgacatgcttgaaaagcaaggagtcaaaatcgataaggtgcttgattttgcgattgatgatgcagtcttggaggagcggattactggtcgttggatccaccctgctagcggtaggacctatcatacgaaatttgcacctcctaaagttcccggccttgatgatgtaagtcaaacaattgtacttcagtttttgcataaagttgactagtcgagtggtaaattaatcaatttatgtgaggcacttcatat

SEQ ID NO: 110 - DNA, 375 bp, Gossypium hirsutum
tgggttgtttaaactatgctttcgactttcttgacttttgtgaaatatatttatgaaatacaattattttattgtacctaatatgtgagatggcccaacaagcccatctgacatgtgatggacgacaaccctagttccaaatagtggtgtcccgcccacctccctattatcctagtaggacatgtgatgggagacctttcagagatgagtcaaaccaatatcattttgaggacgtatagaagacctcgtgagaatgggtggagagaatgttatgtgtcgtggatcaaagcccgtgaccattgcacacaaaatgtctcatggaggtcaacttattaaatgtgactcatttgacttacttgaactgacccgactcaa

SEQ ID NO: 111 - DNA, 398 bp, Gossypium hirsutum
ttttagcccgaaaacccatctcaagcttcgatttcgacaaagaagagatggtccccgatggctcgtttgaaggtatgcttccttttttattatattatgcagaaaacatatgaaacacgaaaggaaaatgaaacagatgcgaaaaaaaaaagaaagagcacaaggcgttcgaaaaaaatcaccttctttgctttgtattgtttttgtattctctttttcgtattcgttttttgttgccttcgtcagtaaccattacaaagattgaatcattggatttatagccggaaagaaaacccaaaagagaaaaatacaaaataatttcctattagctgccattctcgttgctgtcttttgtttcttttcgcaggtacagatgcggggcatgggtacaaagctgt

SEQ ID NO: 112 - DNA, 893 bp, Gossypium hirsutum
  misc_feature (833)..(833): n is a, c, g, or t
  misc_feature (886)..(887): n is a, c, g, or t
gatcggcgattcaggatcggcgtcgagtcggacgtgttgtttgtgaggctcagaacacagctgttgatggtgagtttcgtttgttttcggtataaattaatttgtttctctgttttaattgtttttcttatgcttttctttttttagtttgattggttgcttggaaagtgaaagaaagcgggaggaaatagaaaggattattgagcgtaaatgaaaaagaaattaggtttaagtaaaaatcaaaccttcgtagttgaagatttgattgttttatctagctataaactagtttaacagtgagttcacgtatgtttaaactttactaaataagtttcattagaattaattgtttgtatttgtagaaagtttgttctttaagctttaaataagtaattataggttaaagtattcggacttggatgtgaatatcaaatttagatgtaaatttcttcttcttgcttgttctcaaatgaaacaggataatggtacaacagcgtaatcattttgttactttccataaaccttcaaatttgaggaaatttatggccatgcttctttccttggattctggttttatatatatatatgattaagctagttcttgaaatttgcagtgccagcaattaaggatgaaacatggcagtcactagttcttgaatgtgaattgcctgttctggttgaattttgggctccgtggtgcggaccttgccgtatgatccaccccataatcgacgagctgtcgaagcaatatgctgggaagctcaaatgttacaaagttaacaccgacgagagtcccaacatcgcaactcgatatggaattcgaagcattccgnctgttatgatcttcaagagaggggagaagaaagatgcagtgatcggtgccgtnncaaagt

SEQ ID NO: 113 - DNA, 967 bp, Gossypium hirsutum
ctatttgttgcacgtgtcgttgttcctctggttgagtgcagttgtttcctctttcttctactttcaggtaaaaatgctatgatatagcttgaatttgctaaccatgcatgctaaatactgctactaagctttggcatgcatattctggggctctttttctattgataattatgattggtacaaggtacagtatctagtagtttgtaaaatcaagtgcgtcttgtaagagaaaaaataaaatccatatggaacttgatattatagatcattgatggatctaggattgctttaagaaagtcaattgtaaaactaaaatgtcatttatgagcttttgtagggattgtatgcataatcaagttcatagggaagagttaatgaatagtaaaagcacgattccctcctatattgatctctaagattctaaggtacttgtgtgctctttgtctgtgttgatcatgtttcactaggttagggcttcaaatcagataaatttctgttgccatagtttaaacttttagggagcttttagtttttgcctttttattttgtgcttgaggttgcatctaagtatatcctaaaagaagtccatagtgtttaatttgttctgtcagggctttctgtttagtgttgtgttcgataatatgtttggccatggtacaattttctaatctcttttacatacttgattactcatttgcagaaagttaatgtaattgccatgacagttgcaagctcggttggcagaagaagattgtttggccagatcaatagctttattgctgtctttatcctcgctggacaacttaccttaacagtatgctatacctatgatgagtttttgtaattattttgaactaacagctactcataacaataaagaaaatgaagtatttcttggtactcatttggtttttccaggtcttgacgctatctattttgattctggtgtaattttttctttcacatc

SEQ ID NO: 114 - DNA, 1239 bp, Gossypium hirsutum
  misc_feature (580)..(587): n is a, c, g, or t
  misc_feature (589)..(609): n is a, c, g, or t
  misc_feature (611)..(619): n is a, c, g, or t
  misc_feature (626)..(628): n is a, c, g, or t
  misc_feature (633)..(637): n is a, c, g, or t
  misc_feature (640)..(660): n is a, c, g, or t
  misc_feature (663)..(694): n is a, c, g, or t
  misc_feature (696)..(700): n is a, c, g, or t
  misc_feature (704)..(708): n is a, c, g, or t
  misc_feature (710)..(710): n is a, c, g, or t
  misc_feature (713)..(713): n is a, c, g, or t
  misc_feature (715)..(720): n is a, c, g, or t
  misc_feature (727)..(746): n is a, c, g, or t
  misc_feature (750)..(753): n is a, c, g, or t
  misc_feature (761)..(761): n is a, c, g, or t
  misc_feature (765)..(766): n is a, c, g, or t
  misc_feature (768)..(795): n is a, c, g, or t
  misc_feature (800)..(803): n is a, c, g, or t
  misc_feature (805)..(824): n is a, c, g, or t
  misc_feature (826)..(826): n is a, c, g, or t
  misc_feature (828)..(834): n is a, c, g, or t
  misc_feature (836)..(857): n is a, c, g, or t
  misc_feature (859)..(864): n is a, c, g, or t
  misc_feature (866)..(866): n is a, c, g, or t
  misc_feature (868)..(874): n is a, c, g, or t
  misc_feature (878)..(890): n is a, c, g, or t
  misc_feature (892)..(898): n is a, c, g, or t
  misc_feature (902)..(912): n is a, c, g, or t
  misc_feature (917)..(918): n is a, c, g, or t
  misc_feature (920)..(920): n is a, c, g, or t
  misc_feature (923)..(936): n is a, c, g, or t
  misc_feature (939)..(940): n is a, c, g, or t
  misc_feature (942)..(942): n is a, c, g, or t
  misc_feature (944)..(951): n is a, c, g, or t
  misc_feature (954)..(963): n is a, c, g, or t
  misc_feature (965)..(967): n is a, c, g, or t
  misc_feature (972)..(978): n is a, c, g, or t
  misc_feature (980)..(980): n is a, c, g, or t
  misc_feature (982)..(1009): n is a, c, g, or t
  misc_feature (1011)..(1017): n is a, c, g, or t
  misc_feature (1020)..(1024): n is a, c, g, or t
  misc_feature (1026)..(1027): n is a, c, g, or t
  misc_feature (1029)..(1039): n is a, c, g, or t
  misc_feature (1041)..(1043): n is a, c, g, or t
  misc_feature (1045)..(1045): n is a, c, g, or t
  misc_feature (1052)..(1054): n is a, c, g, or t
  misc_feature (1056)..(1062): n is a, c, g, or t
  misc_feature (1064)..(1065): n is a, c, g, or t
  misc_feature (1067)..(1073): n is a, c, g, or t
  misc_feature (1079)..(1090): n is a, c, g, or t
  misc_feature (1095)..(1108): n is a, c, g, or t
  misc_feature (1110)..(1111): n is a, c, g, or t
  misc_feature (1128)..(1128): n is a, c, g, or t
  misc_feature (1130)..(1147): n is a, c, g, or t
  misc_feature (1152)..(1189): n is a, c, g, or t
  misc_feature (1191)..(1203): n is a, c, g, or t
  misc_feature (1206)..(1207): n is a, c, g, or t
  misc_feature (1209)..(1211): n is a, c, g, or t
  misc_feature (1213)..(1229): n is a, c, g, or t
  misc_feature (1231)..(1236): n is a, c, g, or t
agagagagagaactaagagaaaccatgaattcagttattaccggtaatttcagacccgcgtttttcccgagtcaactcagtaaaaactcggcacaattcttgttcagacccttcaccacactcgtcttcacaagaagtttaaccgctaaagttcgtgccttcgttgaaaccaagccaacggtatgcaatagcaaaaccccccaaaaaaatggttaatattgatgccaaagttatttgtcttgttgcttgtagcattactttactctttggtaggcaccgattgcggtggagaaagaggagagcggcggcggcagcggcagctgtggtttagcttgtcccatttgttataacctattaatggtgattactgactcccctatatacgtgtgagttgctgttattatttttttcccccctccttaaatgaatttcaaattgggtttgaattagttttgaatttggaatggaacaggggatcaacagttgggactaatttgcaatgtaatacatgcaaaaagacttactctggtacccaaacgcatcttgacctcgttgcctcaagtgggtctaagcaatacannnnnnnntnnnnnnnnnnnnnnnnnnnnncnnnnnnnnnaacatannncatcnnnnntcnnnnnnnnnnnnnnnnnnnnnccnnnnnnnnnnnnnnnnnnnnnnnnnnnnnnnntnnnnncacnnnnncnaancnnnnnntaccaannnnnnnnnnnnnnnnnnnncctnnnnatactttncatnntnnnnnnnnnnnnnnnnnnnnnnnnnnnnccctnnnncnnnnnnnnnnnnnnnnnnnnancnnnnnnncnnnnnnnnnnnnnnnnnnnnnnannnnnntnannnnnnnattnnnnnnnnnnnnncnnnnnnnaacnnnnnnnnnnnactcnncnatnnnnnnnnnnnnnnctnntntnnnnnnnntannnnnnnnnnannnaactnnnnnnncngnnnnnnnnnnnnnnnnnnnnnnnnnnnnannnnnnngannnnncnngnnnnnnnnnnncnnnantattcgnnntnnnnnnncnnannnnnnnaaattnnnnnnnnnnnnttgtnnnnnnnnnnnnnncnnccaatatcatcacctcntnnnnnnnnnnnnnnnnnnttccnnnnnnnnnnnnnnnnnnnnnnnnnnnnnnnnnnnnnntnnnnnnnnnnnnnatnncnnnannnnnnnnnnnnnnnnntnnnnnnata

SEQ ID NO: 115 - DNA, 881 bp, Gossypium hirsutum
  misc_feature (610)..(610): n is a, c, g, or t
  misc_feature (614)..(614): n is a, c, g, or t
  misc_feature (620)..(620): n is a, c, g, or t
  misc_feature (648)..(648): n is a, c, g, or t
  misc_feature (663)..(663): n is a, c, g, or t
  misc_feature (695)..(695): n is a, c, g, or t
  misc_feature (704)..(704): n is a, c, g, or t
  misc_feature (741)..(741): n is a, c, g, or t
  misc_feature (873)..(876): n is a, c, g, or t
ctaggcgatcaatgcaatcctacacaaggtatgattctctagcttcatgtaaatacttgctcataccgaagcacgagccttattgcttttgtttctatatcatcagatcattacttctgccatcccagacagcgttggagacaaacttatcggactcgtcgcttcaagagaggatatcccagatttgcttaaggtgagctgcaagattttcagttcattaaagctctttggtatatatatatgtgtatgtttttttaatttattctattttgccacagcttgatgatgtgatagatcttgtgatcccaagaggtagcaatagtcttgtttctcaaattaataattcaacaaaaattcctgttcttggtcatgccggtaagaaaaataattcggctcttcgatgccttgcgaattagatcttcaactgaacttcaaaatattcattgcagatagagtttgtcatgtttatgttgacaagtcagctaacccggatatggccaaaaaaattgttcgggacgcaaagatagactacccagcagcatgtaacacaatggtaattccattatgcatagatttcggcttgtgttcctgtttttagctgcttatgttnccgntgcttncctttctatttttgtgtagtttgtttcngaattccttaacgangctgttttcaggaaacacttctattacaccangatttgtcnaataatgatttgctcaaggagcttcttgcggaactcngacgtgaaggtatgcttatacgagtgtatatatgattctggttgaggctgctaagttctgtcgttgaactttcgagggattactttctgcaggggttaccctttatggtggaccaagagcaagttccttgtnnnnctccc

SEQ ID NO: 116 - DNA, 430 bp, Gossypium hirsutum
gagatagttgggtgtgacattggtttttacacttactttgcattcagcatttagcctctcagatagaatcaagatttcttaatctagtacctatagcaacatagaagtcgagaaccaagatacaccaatgcaagcatcccagcaacatagaagttcagtcatggccagcagattgtttcctcgagtaaaggaagaagtcgagccttgcagcttccctcaattcccagctattgatcgctctttctgctataccgacagcagccacggatcccatttctcagtcaagaattcccatgagccttattgcaccttggaatcatcttctgcatgtggcagttatagagtctacaattcttcatcaaatggaagcccaatgtcacagcaagaatcacagtctaatatgtctgacctgcatcactcttccgataat

SEQ ID NO: 117 - DNA, 411 bp, Gossypium hirsutum
gagcagctgccgaagagccaaaggaagcggagcctgcggcggtggcagtcgaggaacctgaagcctcggttgaagttgaaaccaaggaggtggtagaagaaccaaaggctgttactgaggagccagtagtagaggagactcctaaggaaacagtgccagaaccagttgccgaggagatcaaggaaaccactgaacaaaccgttgaaaccaaagaaactacagagtctagtgaggcagcagcagaagcacccaaagaagaagttgagaaggaagaagaagcaaaaccggctgaagtggaggagaaagttgaaacagaaactgatccagcagagaagactgagtaaataataaagcttttgtgatgaaaatgagggtgtcaatggaagattgtttcaagtggctacaattgta

SEQ ID NO: 118 - DNA, 284 bp, Gossypium hirsutum
taggtatgtttttttactcgtcgatgggtactgagctatcgtacttattgtcgaatcgttatttggaactcactggctgaactttaaaaaaaaaaaacttaagagcccagtgatttagataaaaacttttgaataagtcagtaaattaaatgaaaacttttgaaaagttcaataatcatattataactttttgaagttgaattatcaaaatgtagatttactaatagtttagtgatcttaggggtagtttagtattaaattttttacatacatttggatgatca

SEQ ID NO: 119 - DNA, 395 bp, Gossypium hirsutum
acgctaattctatagacttgaacacaaaatcctacctctctacgacaaagcgcgcattttgcaggccaagtgaatacgcaaaggtcgttaacaccaccatcacttgttctccattttattgcagcaataacttaggatcgagatcccattcaagcagacccgaaatggaggggatagagcatagggtaatcaaagccaatggcataaatattcacgtcgctgagaaagggaaaggccctgtaatccttttcctccatggattcccagagctctggtatacatggcgcaatcagatcactgcttttgcctcgcttgggtaccgagctttggctcctgacctgcgtggatttggggaaacggaggcacccgatgatgcctccacctacaacagttta

SEQ ID NO: 120 - DNA, 305 bp, Gossypium hirsutum
atctctgttgttgttgttattttctttatggattatctcattcggttctgccatcggttcttctcgttttattttcttttattttcttcatagattatctctgtaatttcttttcccttccatcggttctgccatcggttctgccgtcgcttaatcaaccgacttcagtaattctcaagaaaggcttttatgagggggtgtttgaagcaacatttttggaggcattaataatacgttcaatcttgggaaccaacgcagtttttaatctgatatttccagttttctttataaacaattttcgccat

SEQ ID NO: 121 - DNA, 1159 bp, Gossypium hirsutum
  misc_feature (582)..(583): n is a, c, g, or t
  misc_feature (592)..(592): n is a, c, g, or t
  misc_feature (608)..(609): n is a, c, g, or t
  misc_feature (626)..(626): n is a, c, g, or t
  misc_feature (645)..(645): n is a, c, g, or t
  misc_feature (662)..(662): n is a, c, g, or t
  misc_feature (1103)..(1105): n is a, c, g, or t
cggggggccttgttatcaaacacaatgcaaaccaacgttatgcgaccaatgcagtcacgtctttcatattccgggaaatagctatgaagcataaccttcctattcaggttagttccatccttatcttaaccatagagtggctatgaattatttgatgtactaattttaatgagaaagaaaatttcatttcttgtatttttaacttctgaaagagcttttgatcccttcgaactgaatcagtaataatcatcatacttctttaaataaaactgagtgtaatgagaggagagcttttgctgaaaataagaaatttattcagtcctcaatctatatcacttggacttacagtgttggattctgagactaagttttgaggggactggtaaaattttcaaaaatttaggagttcaatgtgaaccttttttaaagaaattggggttccaattaaaaattttaaattttttgtgagattaatgagaatttccaaaaattttaagagagcttaactaaaattttctaaaaatttcaatgcaagaaatcaaaatttcccaattttttttttttgggggggggggggggggnnaaacccccnaggccccccaaagggnnccccttttggggtttanccgggggggccaaacccanattggggtccaaaaaanttttttgcccccccccccccccccaaaaaaaaaaacaagatatctatgtgtttggagggtccttaaaatctcgtatcaccatacctgtgattggataagcattggatgtggccatgtgggtacatagaaaaatgaagagtcggagcaacataactgaaaatttcacttatgattcaagggaaatgttctggcattatgcttctgttataacaaatggtttaatgcatgaaaattgtatacatgcaggattttgtggtgcggaacgatacaccttgtggctcaaccattggtcctatcctagctagtggtgtggggatccgcacagtagatgtcggtgctccccaattatcaatgcatagcatacgagaaatgtgtgctgttgatgatgtgaagcattcatatgagcatttcaaggcctttttcaaagaattctctcagctnnntaccaagatcaccggtgacacttagatcctcttatccttgagggaaggacacaa

SEQ ID NO: 122 - DNA, 1202 bp, Gossypium hirsutum
  misc_feature (873)..(874): n is a, c, g, or t
  misc_feature (878)..(892): n is a, c, g, or t
  misc_feature (896)..(898): n is a, c, g, or t
  misc_feature (900)..(900): n is a, c, g, or t
  misc_feature (902)..(905): n is a, c, g, or t
  misc_feature (916)..(917): n is a, c, g, or t
  misc_feature (928)..(928): n is a, c, g, or t
  misc_feature (935)..(935): n is a, c, g, or t
  misc_feature (941)..(943): n is a, c, g, or t
  misc_feature (946)..(947): n is a, c, g, or t
  misc_feature (959)..(960): n is a, c, g, or t
  misc_feature (962)..(968): n is a, c, g, or t
  misc_feature (982)..(983): n is a, c, g, or t
  misc_feature (985)..(985): n is a, c, g, or t
  misc_feature (987)..(989): n is a, c, g, or t
  misc_feature (991)..(991): n is a, c, g, or t
  misc_feature (994)..(1004): n is a, c, g, or t
  misc_feature (1020)..(1020): n is a, c, g, or t
  misc_feature (1022)..(1024): n is a, c, g, or t
  misc_feature (1026)..(1028): n is a, c, g, or t
  misc_feature (1030)..(1030): n is a, c, g, or t
  misc_feature (1034)..(1036): n is a, c, g, or t
  misc_feature (1038)..(1041): n is a, c, g, or t
  misc_feature (1044)..(1051): n is a, c, g, or t
  misc_feature (1053)..(1056): n is a, c, g, or t
  misc_feature (1058)..(1061): n is a, c, g, or t
  misc_feature (1065)..(1068): n is a, c, g, or t
  misc_feature (1073)..(1075): n is a, c, g, or t
  misc_feature (1077)..(1081): n is a, c, g, or t
  misc_feature (1084)..(1085): n is a, c, g, or t
  misc_feature (1090)..(1096): n is a, c, g, or t
  misc_feature (1112)..(1115): n is a, c, g, or t
  misc_feature (1120)..(1121): n is a, c, g, or t
  misc_feature (1126)..(1127): n is a, c, g, or t
  misc_feature (1130)..(1136): n is a, c, g, or t
  misc_feature (1138)..(1140): n is a, c, g, or t
  misc_feature (1148)..(1156): n is a, c, g, or t
  misc_feature (1158)..(1160): n is a, c, g, or t
  misc_feature (1162)..(1163): n is a, c, g, or t
  misc_feature (1165)..(1170): n is a, c, g, or t
  misc_feature (1175)..(1175): n is a, c, g, or t
  misc_feature (1177)..(1180): n is a, c, g, or t
  misc_feature (1197)..(1199): n is a, c, g, or t
ccccctgagctccgagaaaactgtaattttgactgtcgacgtgatttataatggatcattgtttaatttggagtcaaaatacgtacaattatggtttacttttgttcaattgcgttttcgagggagtccaattagggatgataaattatttccttggtctagttcaatatgactttcttttggagaaaactcagagaattctcttttacgcttggatgaacgtgacgattctcgaaatagtttatatattttttgatatttaatcttggactttcttgattttatagtaatctgcatcgttgtattgcatgggaaacagttgctttctttctattttcttgagtggttttcggtacgctaattatatcgggagtgggcagtatagctgatatgtctcacttggcaggcataaaacaaggctacatattgggcaattggtgaaggacacttcagctaaacttaaacaagctagtgaaaccgatcaccatgctgaagttagcgtaagtttggtttctggttgattatgtctaccaagcaaagcagctgtgatgtttgttgttattatttttatttatttgaaattcatggtaagtcatacgaagtaagaatttgatgccttttgtttccttgtaattgtagacaagcaaaaagataacagatgccaaacttgcaaaagattttcaagcagttttgaaagagtttcagaaggctcaacggcttgcagctgaaagagaaacttcatattccccttttgttccccagtcagctcttcctgcaaggtatgtatcatgggagggcctacatgtacatggatgtgtggcagagtgagttctatgtgtttgtgttagtttcatacatggaaaattgagtcgnnagcnnnnnnnnnnnnnnnatgnnntnannnnctctatactgnntactgaaattnctgccanttaccnnntgnnaatttaaattgnnannnnnnnactcttcaatcctnntntnnngnttnnnnnnnnnnntttttaaccccagatntnnncnnntnaatnnnannnnccnnnnnnnngnnnngnnnngccnnnncttannnannnnncgnnaaacnnnnnnnttctttttaaaaaagnnnnaattnnttttnnaannnnnnnannncctccccnnnnnnnnntnnncnngnnnnnnggggnannnnttgtaccttttacaaannnaca

SEQ ID NO: 123 - DNA, 380 bp, Gossypium hirsutum
ggttggtttccgccgccaatacggcttctaaagcaccatctgcagtcccagtacccgatgatgataccatcggcaacactgatgatggagcaggtgcatcctcccctggtgcttctaatgacgctgttgctgcccctcttggcagtgagcaggaagctaaaagtatggctcctgctccttctagtgatgcaactaccacaggtgtctccgccgttggggcagctgctctcactggggcagctgccattgctacatacttcgtcttctaaattagcttcgtctcaatctaagtagtaaacctcgaaaaagggtcttattatccataatttgtacttctacattaatttcttagtctggtaaaattgaggatgcaaaggcag

SEQ ID NO: 124 - DNA, 382 bp, Gossypium hirsutum
agctagcctctccctagtgtcacagggctagatctttcgtctcgtgatccgtgcgatcttaggcgattcgttcatccaaactcgcctaagtcagcttttatttaagtgaggattccttaagaactcgtccaaggcactaattgttgagcaaaagcaaacttatgccaaaagaggcaacaaagaactacagaaagccacaaaaaagatcgcacacaaggtgtttgagtaaatactctcagtattctattacttttaagaattcacatacaatggaatgatttaaaagtgagggggaggctctctatttatagttgagctccctcaaaactgatggataagattaagttacatcgacggacaagatcgaccatatcccttgatt

SEQ ID NO: 125 - DNA, 380 bp, Gossypium hirsutum
tcgacagcctatgaagcgcaaagtctttcagtttcttcttgatgctctctgtaagtaatttcttttcattcccatattctctgtttcttctcgagaccatacattaccttgcatttttgtagttattagatgatattcaattatgtttttctaatttgtggcaatattagatattttcctggttagtcacaggattgatgctaacccttcattactattatgtgtgcagtgaagcagatgaaatttacaatatttgcagtgtagtaggcactccaactgaagattcatggccagattagtctctctgttcgttggatccttgcagaaggccaactgctgctgaggcccttcaacatcctttctttcaggtagtttttttt

SEQ ID NO: 126 - DNA, 1136 bp, Gossypium hirsutum
gggacctcatccaggtacatggtctctctatatatatgtttatatatggttctaataatggtgttctagcaattgtgcaaagttttgagtgatttacagtggcaaatagactgcttgatgtatatacgataatcacaagagcagtctatgatctaaatttcttggagcatttcagtactaggattacacccctagggctctaataattgtgacttgtctttcttgtgttgtgtctaaaacttaatctatgttgccccagcttggagtaccctatatacccttgtccaaaacgtatttgggtggggataaagataaaccctccaaatactgagaaacttgaaaaggttaaagcatactaatgtttagtacatacttgtatggaacacccatatctgaatctgagtaacataggacttggtcactggataaaaaccttaagtacgcataaaaacctctctcgattgtctgctatcggtagatattggttcgatttgcttggtttgtgcatataggtttcaactttaattctttatctgctcagattgctggaccacagttttgcattcctaacacgtatgacaagcaaatctcaaacaacctcatgtctcagaaatgactgtgtcatatttgtattcatctccctgttttgccatttaaattctctcatttttattgatttgataaaaatatagattagtaggcaatgctgttatcttgttgtagatgcatgtttattgtgaattaatccgttccttagttctcatttatactgggacttttgggattatctctgacgcatcaagctatacctacaggagctattacaaatgcacgagtgctggatgcaatgttaggaagcatgtggaaagatcatcaactgacccaaaagcagttataacaacatacgagggaaagcataaccacgacgttccagcagctagaaacagcagccacaacatggtgaacaacagtttgtcgcagacaaaaccgcacaaggttgtagctgagaaccagaaccattctttacttaaagcaatggattttggaaacaatggtcagggaccagcagttttaaggctaaaggaggagcagataagagtgtaatcccccacctcttaaagcagccagagtctggc

SEQ ID NO: 127 - DNA, 825 bp, Gossypium hirsutum
  misc_feature (770)..(771): n is a, c, g, or t
gactggtgtgtggcatacccaggcaccgcatcaaacaggtagatttcttccttattccttagacttattgtggcaatgatatgggctaactggttagccgatcttcgaacaaagagaaacgagatattctggaaactgctcttttcactatgaatgttgctgatataagtactaacatgcgatttgtctctggattttgtcatgcatttgttgataattgttttggaatctccttcaacgaggatgtcttagaagcccatctccttccccatgagaaccgcttcataacatgctatcgcttctgcttcaaaagtcgtagtcaccatggaatggaggtatgacttggttgctttgatctcccctttacaatttcttactactaccacagatgccgattgatggttatgatcatcaaaagcagcatcaaaattgattttgatagtggattgtgcaggggccttccatttatcagttttctgggcgtcactaatttgtctctcatttatgccatcaagttcacccaggtaatacctcacatacctagcattctcttttcctgaatgagccattccttcatgcaagtttttgttcctgtccatccagagtacccagataccacaaatcactgatcgacgttgtgctatagtacaattactgaaaatccaggtgagccattcaatgcattcattaaattcactttgcctaatccaactaagatttagttccttccataattcttctgactcaggacaccccacaaaggcatgccnnaagggtcagttccagttctacaccttgaacatatggcagttagggccactcttg

SEQ ID NO: 128 - DNA, 429 bp, Gossypium hirsutum
tattgtgatggatggtaatgggactctctttgggacattaagtggcaatgctagagaggtgctccataagttcagtgttgatcttcccaagaagcacgggagaggaggacaatcagctcttcgttttgctcgacttcgaatggaaaaacgacacaactatgtgagaaagactgctgaacttgcgacacaattttttattaatcctgccactagtcagcctaatgtttcaggattaatacttgctggatcggctgatttcaaaactgagctgagtcaatcagatatgtttgatcaacggcttcaggctaaggttctgaatgtggttgatgtctcttatggaggtgagaatggtttcaaccaagcaatcgagctttcagcagaaatcctgtcgaatgtgaaattcatacaggagaagcgttaatagggaaa

SEQ ID NO: 129 - DNA, 711 bp, Gossypium hirsutum
cagttctgattcttctgactcgagtagcgaggatgaagtgagtattatgctcctatgtaatttggactaagggtgtgagtccatgtgtcggatgcagtacttaaaaggggaaaatagagaccgcgtaacactaatatttgtatggttgtaggatgttcctttttttgattgttgacattcaattttttggttttacaggaagctcctgccaagaatacaaagcctgtagttgctaaaaaggctgctgttccagcggctaagacagtgaaagccgatagcagttcggattcttcttctgacgatgattctgatgaggatgatgttagtattgagacaaatagtatagatagcatgtaagaattactatagaataacttgaatttatctttattgttgggttttgatttataggaacctgctgcaaaaaaagaagtagcagctgctaaaaatggtgcagcacctgttaagaaagcagagtcttcagattcttcagatgcagatagcagctcggatgaagatgatgtaagtgctggattgttgaatgatggttgcttttcaatttgattgggagtatgttttaaaaactttagcttataaatgtaatgttttttatatgcaggaaaaatcaaagcctgctcctaagaaagcaccaactgctgttaataaaaaggagtctagtgatagttcagaaagtgacagctcttcgagtga

SEQ ID NO: 130 - DNA, 432 bp, Gossypium hirsutum
ttctttatttattaaaaagtagatttaaactatatatatattttttaaggaagaaaacataacacaaaaatgaaatagtggttgaatcgcaaggggagaaaactctcgtcttcgtcgcttccccgaccctcgtcggaacccgggtgggttttgtgacgtttgggtcaccgcagattcacaaccacgaaggagcacgaaccacggtaagatttaattactatttatgctttatttcaaacaaaaatgaagaaaaataaaataaaagaggcacctttgagatcttggttcctgattttttccttttttattcaagagtctctgtaaaaatacattgtgaatttctgactttcttatagccgaaaaccaaggcttttttgctatctgctactattttgctttgtttttgctactgttatcttctctgtttgcaga

SEQ ID NO: 131 - DNA, 563 bp, Gossypium hirsutum
  misc_feature (149)..(149): n is a, c, g, or t
  misc_feature (195)..(195): n is a, c, g, or t
  misc_feature (209)..(223): n is a, c, g, or t
  misc_feature (270)..(270): n is a, c, g, or t
tctccttccccttttctcccccagttctctctttgaccggcctttggctcgccggtggttcaccgtgcccacaccatgaccggtggtcggaaccgcgaggattcgggtaagtttcctcttctctttctttgggggggggggaaaagtanatttaaactatatatatattttttaaggaagaaaacataacacaanaatgaaatagtggnnnnnnnnnnnnnnnagaaaactctcgtcttcgtcgcttccccgaccctcgtcggaacccgngtgggttttgtgacgtttgggtcaccgcagattcacaaccacgaaggagcacgaaccacggtaagatttaattactatttatgctttatttcaaacaaaaatgaagaaaaataaaataaaagaggcacctttgagatcttggttcctgattttttccttttttattcaagagtctctgtaaaaatacattgtgaatttctgactttcttatagccgaaaaccaaggcttttttgctatctgctactattttgctttgtttttgctactgttatcttctctgtttgcagattcg

SEQ ID NO: 132 - DNA, 467 bp, Gossypium hirsutum
tggcaaggaaataaagaacaccatgagaaacttcattaaatcattgaccgtcccagccaaagccaaacttcaacctcaagttacctgttggtggaaagtagtggaaagttaccaatcaatgataccagacgcaaagcctgggaaaagccccaaaatcaaggtcaaagtggtgaaacaatcaggagagaaaacatataaatatgggaaagttttgactttgcaagggcatatcccggagcttatcgagcatgtcactaagggcgatactgaactcttaccggtcatcgttgctgcaagggatgtctctattcaaggaatttgcaacgggcaatgtgcagatcatttacttactggtaagcttttttatttttggttgtggtagttaggtcctttggagattattgcatatgatgattgacgcttttggaaattacagaggatccccatccgcgaccatacatcatagt

SEQ ID NO: 133 - DNA, 380 bp, Gossypium hirsutum
atccctataggaaaacaaaggggattctttttaggtagcttatatgagtggtttgggaataatttgcaagataaatagaggctgtcattgatggatctagaatggacgagtctctttggcctccttgcatgacgcatatggaagaacagaaatctctttattttcagaggtacgcgatgtagtgctaatgacattatcaaaatatcttacagttggactaagtaatatagattagtacagaatagaagtctgtttaaaagccaacaagtaagaatggcgactcgttggaaggaatcatgggtccaactaaatacagatagtgtcgttaagatggaaactagtaatgctacttttagaggagtcttacgagatcatgaagg

SEQ ID NO: 134 - DNA, 350 bp, Gossypium hirsutum
cattcctggaatgttgggtagggaaactctgaccattcctactattgtgtgtgaggaaacaaccattcctgcaaccttaggtcaagaaactcctacccttcctgcaaccttgggtgaaggaactcatagtattccctcaacctcgagtgaagaaaatcatatcattcccactaacctggatgaagaaactcctactgatccagtgaccttggcagaggaaaggccaagtattcctgaaaccttgggtgaagaaaccccaaccgttcctctgacattcagtgaagaaactcaagttattcctccatcattcagcgaaggagctactattcctccttccttcaatgagggaa

SEQ ID NO: 135 - DNA, 313 bp, Gossypium hirsutum
atcgtactctatattttggaagcgtgtgttttgggcagccgattaagtaagtatcttactgaatcactaaaataagagatattcaccaaaatatcattattttgatacgatacgaaattttgtcaaaaactaaagatttaaggattgatctcatccctaggagttggattcaaagttgatatcatcggattttgcgaaatcagatgtagggatttattcatcttaaaatgtgtgaaattattgttaatttaataaattttctaatattaaatatttaattaagaaaaaaagaaacgtgaaatgtgcgaataca

SEQ ID NO: 136 - DNA, 389 bp, Gossypium hirsutum
cattagcactgaagccagagaagctacgagccacaaggcacgttctttcagagtatggtaacatgtcaagtgcttgtgttctatttattttggatgagatgaggaagaaatcaagggaagatgggcttcagaccacaggagaaggattggagtggggagtgctctttgggtttggacctggcctcactgttgagactgttgtgctccatagtgttgctgcttaaagttaaacaaacatgccttttaagtaattggtcgtgctccacttggcttgcagttttatcttcttcttttttccttttttagaatcctatgaatttgtgtgtttattgttaaagactagaagcctttgatggtgtgggcgggaagcttaacgcctattcagttca

SEQ ID NO: 137 - DNA, 1273 bp, Gossypium hirsutum
  misc_feature (755)..(756): n is a, c, g, or t
  misc_feature (766)..(766): n is a, c, g, or t
  misc_feature (778)..(778): n is a, c, g, or t
  misc_feature (783)..(783): n is a, c, g, or t
  misc_feature (789)..(789): n is a, c, g, or t
  misc_feature (811)..(811): n is a, c, g, or t
  misc_feature (819)..(819): n is a, c, g, or t
gtaaaactgttctcagtctcttagaagctccaaaggtattggataactctgcgtattggtttgcgatttctaaatttttgagctaccgtattgatgatttgactatttccggcgttttaatcctcctgatttagatgaagaatgattagattattttatgttcattgtttggtggtgaattgacgttgaatgcatttcatcttggttaaaaacttaaaatggtctttttcttggataagggcatgtgggtttttggtagatttatatatacattggattgcttcattcccgttgctgatataatgttgatcagttgagccttgaaagcaggtattcatatgtaatttttctaatgttttataggtaagttgattatcattgccaacaactgccctcctcttaggaagtcggagattgagtattatgccatgttgtgcaaggttggagttcaccactacaatggaagtatgttccttaaccttttgttctcgtgttacatgctttagcacgtacttgtatcatgatttgagtatttgtctcttggattaatttccttttcacattgaactaagcagattattaataagattagttcagctatgttgctccaacatccatatctaaagactatttctgcatgagtatgggatatgattttccacatacaagaaaatcttgggaaaaatagagctgatctgtgttaagacagatacccatattcaacactgccccctgaatctgaataatgtagaatnntgcccttccntgcttccttccnttctntagttnttacaaacaaagcttgtatttntagtgttnccgatagaaggggtaggatgaacaaccttcccgattgatatagccccttgcctgtgttttttatttatttagctcaacttttttcgagttttatatataaagttgtcaaaagtttttgggccgtcctccttttttttaaagggtaatccccctgacaagggttttttttttgcagacaacgtagacttgggcactgcttgcggcaaatactttagagtgtgctgcctcagcattattgaccctggtatatataagagtgttgataacatgctgaatttacgaatacatctgtagtttctgattgtggtaaatatcttttgtgtttttacaggtgactctgatattataaagagcatgcccggtgatcactaagctatggggggataacttcctaggtgctgatttagtttcaatttttgggtgtctaaaaacattgttgatgttaaagacaaac

SEQ ID NO: 138 - DNA, 626 bp, Gossypium hirsutum
  misc_feature (203)..(209): n is a, c, g, or t
ccatgcagcttcatactctgtatggtaaactaaaggtcgatttttaatatcaaccaatatgctacgattctcctgtttatttagtaatggatgaaatagaaggaatggaaaattttttgcccttatttctgatttttctattggatttatctgatagaaaaatgaaattgcaaaagacggatttgttaggcacatgagagatnnnnnnnacctgtacagcttcgcagatttcatggcgcttacgtctgccgttgagctccgcatagctgacataatacactctaatggtggcgctgccactttgtcgcaaatagcttcatgcattagtgatggccttacttcaccagatatcaccgcccttgctcgcataatgagattgcttgttcgcagaaagattttcactatccaccctcctttagacggtggagatcccttgtacaacttaactcactcatcaagatggcttctacatgactcggagcaaaccctagcgcccatggtactaatggagaaccatccatggcaaatggctccttggcactacttcagtcagtgcgtgaaagaaggtggcacagccttcaagaaagctcatgggtgtgagatatgggatttaacatcgagggatc

SEQ ID NO: 139 - DNA, 863 bp, Gossypium hirsutum
  misc_feature (850)..(850): n is a, c, g, or t
cacttttttctatgttttgatttcggagcaataattgagggaatccgaaaattgagaaaactgatggaattgggaaagaaaatggaagcacagaagaaaagcaaagtttcaaagatggatcaatttgtgggtatacttcgcttcaccacctcttgagcgcaaatctcaagcctcaactctaccaggtcttttcttattcttttttcccgctttccgggttgtaatttatctgtcttcactttgttgattaagattttatttatgttttcaagtgtagcataatgctaatattatgcacaatcggagcccaccaattgtttacattttttgatcaaaccattgaaaaaaggaaagaaaaaatcttccatctacaacgctgaagcaaactctcaagtctcaaccttgaaatttgctggttcttaaaccctcaagatataaccggtattcctctttcagttctgtctcgtttaagcaattgcgtttggttgctgagaaaatgctggaatatataagtttaaccttttcttttaagattttcttgaagcaataaaattgtttagtggatggcaactaatgctaccacaattaatcaaaatttctttctttttttccttttggttttgcattatatcaggatgctttgttgtagatatgctctgccactcgttactaaaagattggaatcagttaaaattaaccagaggcctaggaataccgtggtaggctttcaattgaaattttcgcatgtatagatatattgtctcctcctaaaccctaaagagagaagggaatgctgtatgaagtttgaaattttaatggtgttattggtgaattagtaaatctgaaatanttcaggtatgcgc

SEQ ID NO: 140 - DNA, 955 bp, Gossypium hirsutum
  misc_feature (930)..(931): n is a, c, g, or t
  misc_feature (933)..(933): n is a, c, g, or t
  misc_feature (935)..(935): n is a, c, g, or t
gttccacaacaaggtaagcaagatgattagaacagaactaggcaatggaaatggttaaccaatataaaatgcatctccttgtgaccttgcagttgcaaagatctgatttaacaatttttactagcattctttgattctgtatttgatttcaatacttatgctatttcaggttgttattggcccagctactgttggaggaattcaagctggagcttttaagataggtgacactgctggaacaattgacaatattgttcactgcaagctgtacaggcctggatctgttggctttgtctccaaatctgtatgttatctttcatagttttttcttatgcatgtgcacatgtgtctgagtaactatgcctctttctcttctgcttaagcaattacacctcgacacattgtgcaccaatttcctatcactaatttgccatttggtatcatggctttggccagaatgtgacccatacatatggcattagttttaacttatatctttttaaaaatattgcagggtggcatgtcgaatgaaatgtacaacactattgcccgtgttacagatggaatctatgaaggtaactataagctacctttaacgtgtacaaatatattcatatttgccaaattgaatttcatatgaaatattaatttttgggtacatattgcaaaataatgtaggcatagctattggaggagatgtcttcccaggatccaccttatccgaccatattttgagatttaacaacattccccaggtatattatagttttcattcaaatcattgtgatttccttcctacaattttttctacaagcaaagcactcatggttagggtagcacaaaactagccctcctaactcccatttgattgatttttgcattttaaaattcataattctcatagaagcatcttctacattgcaaaagaanngncntgacccttttttccccatca

SEQ ID NO: 141 - DNA, 1006 bp, Gossypium hirsutum
gtttctgatgcttttgaggatgccataacgtttatattgtcatggagtatgtttgtacttgttatagtttatttttaagatctcttattctttctagtagcccttcctcaatctttaagtttaatcttttcaccagttcaactgattgaaataaacttagccagaatatcaaacaatatgcatcatacataaggaacaatttgtgattggtctaggcatgcgtcctaaaccagcgagttaacaagtttcctccaaagtaattacagtgaaatgttgttttgttgtcagattatgtgaaggtggagaactacttgacagaattttgtctaggtatcgaaggactaccctcttctcttgcaccgtccaagtcaattcttaacctcatcgctaaaaccatgtttcgtattgttctttattgcagaggtggtagatacaccgaaggggatgctaaaaatataattgtgcaaattttaagtgtagtagctttttgtcaccttcaaggggttgtgcaccgtgatctaaagcccgaggtgtggcatagaggaatatgatacttaaattttaatttagttctatgctgctttattgttaatatacggcacaatatttttgacattggatccaattctagttattaaccaatcattctttttgcagaattttctttttaccacaagagatgaggatgctccaatgaaaattatcgattttggtttatctgattttattaggccaggtaagatttaattgggtttttctatatttgcattaatcttggcattccatttgtcaaatgtgctctcattggcataattgtctgaatcatgtaatacggaactcccctcccctctgaatcatataatttatcaacaatttgttcgaacaagaaccattcagtttttattcatttgcagatcaacgtatgaatgatattgttggcagtgcatactatgttgcaccggaagtactgcatagatcatacagtgtgaagctgatatgggagtat

SEQ ID NO: 142 - DNA, 1551 bp, Gossypium hirsutum
catttgctttgcgtagaggtataatgttttcttgaccagctttatcttgttgacaaattattatttcttcatgcctacgtttgaatcactgtctgcagttattgagaaatatacaaagaatacgagatttgcactgatctgtaatcacgtcaacaagatcattccagcactacagtccagatgtactcggttccgatttgcacctcttgatcctattcatgtcactgagcgacttaaacatgttatacaggctgaaaggtaactatcatgtttcattttgtctttcattttttttgtgctcaactttgggttggagtgaagtgttcctaatttaagtgctctcttgtgtggtaaagaggggtgggaatgagttgctttactgggtgataatcagctaaaattattcaaagtatatgagcttactagagtgcaagataagtcttgcttgtagtttttacctatgcttcctttttgccagtactataactcaatagaagttttcttataatttatgttctcaatgtttggcttgttaaggttttgcagctcacttcaacttaattcaaagaccccgtttgatactttgatccttgatcacttcccatttaaaaccttatcaccctgttgatttgtcagattataaataactttttcctgcttcctgttgttaccaactgttcataccaactgttaagctggagtttgcatttttcgggcttggttcaagcttgcataaataaataactagttgtgggttgaaagttttaaagcgtagcttggctcaagtcaattgcaaatttttctattagagttgtaaaagaatgaaaatccgtgtattagcgtatttaaatggctttaccttttgttctttggatcatatctttgaatctttcacctgaatacggttaccaattttcacttcattggaccaggcttgatgtacctgatagtggcttggcagcactagtacggcttagcaatggtgacatgagaaaggctttgaacattttgcaggtgtttaaactacttattcctatactgtttctgcgtaaattgttttacaatgatagttacttgtttaagaagcgtaagtcagagaaacaacaggttggcttcgatctgttatttgctttgtggcagaagtggtgttacattaccacattatctcattgctcttcagaggggtggtgtagccttgtctaatttatgtgtttaggtgatgtgaacactagttttaattggataggatggatttcttttttccacttggggaagggggatttaaagcaggctcctatggggatgtctctgaaccaaatgctcaagtgcatgaatagacattattttccttattgacggggatttgggcgagtaagatgcctatttttatgaagtggtcggtgttattcatgaatgtgcaagagtggcatgttaatgacttttttgctgcatgcagtcaacacacatggcttctcagaagattacagaagaagccgtgtatctctgtactggaaatccattgcctaaagacatcgagcaaattcttactgc

SEQ ID NO: 143 - DNA, 692 bp, Gossypium hirsutum
tgcgcagagagtggttgtggatgcaaggcatcacatgctaggaaggttggcttccattttggccaaggagttgttgaatggccaaaaagtagtggttgttcgatgcgaagagatttgtatgtcgggtggtttagtgaggcagaagatgaagtacatgaggttcttgaggaagcggatgaacactaagccttctcatggccccattcattttcgtgctcctgctaagatcctctggcgtaccattcgtgggtaatttctctttttaactcccttctctctattgggtttctttaatgaacgttttattgtgaagattagttctattattttgtcattggatttttttcattgtagagttttggatgaattttctgtgttctcgttgttgtttggttcttgggaaaatataggaaagaaaggaaaaagaacttatgagtttgcttgagaatattgctgaatttagtgaatactataagctacaaatatctatgaattttatgccgctgaagaagggtattttgctttaatatgtacggttcataaagtataaacactgctttgctttgacttgaattatagtgagctttaactttccttttgattattggcatctgttttggttaaagcatgattccccacaagaccaagcgtggggcagctgctcttgctcgattgaaggcttatgaggggat

SEQ ID NO: 144 - DNA, 369 bp, Gossypium hirsutum
tgctgagccatgaagtgactaagcgctaccaccttgcagggcttccagctggtacaattcatatcaaactctcaggaagtgcagggcagagcttgggagctttcctgtgccctggcatcatgctggagcttgaaggtgatagcaatgactatgttggaaaaggattatcaggtggaaaaattgtagtttatcctcctaaaggaagccggtttgatcctaaggaaaacatagtaattggtaatgtggctctctatggagctacttccggggaagcatatttcaatggaatggcagcagaaagattttgtgttcgtaattcaggtgctaaagcagttgtagaaggcgttggtgatcatggttgtgagtaca

SEQ ID NO: 145 - DNA, 1040 bp, Gossypium hirsutum
tattatctctgccggtgattggtgagtaatatatctgaattatgcttttcttctctctctctctctctatatatatatgtatgtatgtatatatgaatgtatatattcagtttgacaacatgatggcctaggccttatggtaagtaggataattaaaagacttgatcctactctggtggacgacactggtgtctgacaatgtacatactgtggttatgtatcatgctatttatgaacttgtacaatcgggaatagtttggttattgtaagggtatgtgtttcaaatttgcaaaagttgcaaaatagcatttggctgtttttaatatcccgacttatgcttggttcctgctgatttatttgtctgcttctttgtcctgcaacaaagtgccatttctggttgctgtgtgctgtttttagcactcaagagttttatcatacggcaactcaaatcacctctgcattaatgatagttgctgtgtgctatgtgatgttttttttgtccttaggggagtattaatcaccaaacctcagaatcaggtggatcccacgaaaatgatcctagcctgggttcaaacacttcaaagacccctaaatctccttggatgcctttcccaatgttgtttgctgctatctcaaacaaaatccctcgttcagatatggatcaagttactaatcattatgaactattcagggtatgttgaatcagatgatttattgttagctccatatgcttaaaaagaaaaaggtttttgattcttttgcattattattttttttggacgcttatcaggcaaagaagataagtcgtgatgattttgtcaaaaagctgagattgatagtcggagatagtttgttgagatcaacaataacatctctgcagtgcaaggtatgatttaaactttaggaatgatttatcagctctataatgcaataggttgattttgatattaaagttaaactaatcaagttttctggctatttttagtttccatctagacatgaattagaggcggcagcagcggcaaagcagaagaacacga

SEQ ID NO: 146 - DNA, 503 bp, Gossypium hirsutum
aagaagttgatgtcttggatgagacatcaaacggcgataaaagttttgcaagtggcaatgagcctgttgatgctgaagacaaatttcaagttgaaaatgaggcagctttaaatgaaaagattaatgagatggagacgagaattgagaaacttaaagcagagctgagagaagtagctgccctggaaatttctctctattctgttgtttcagagcatgggagctcagcacataagctgcatacacctgctcgacgtctttctagactctatatacatgcttgcaagcattgggaacaaaacaagcgagccacaattgctaaaaacacagtgtctgggcttattttgactgcaaaatcttgcagtaatgatgtttcaaggtatgtatattatagtcagatattatttccttgagtgctttagaattttcccatttactgttgacagctgaataatgttcttttgcattttaaggttaaccttctggttatcaaacaccatagtgca

SEQ ID NO: 147 - DNA, 387 bp, Gossypium hirsutum
ttctgcagctcttaattttgagatttgtagtggtgttatttttccatgggggagtgggttcttaaacaggactacatccataccagaaagattcttcttaggtggcaatctatctccagtttgtgctttaggggggccaaaagcatcatggggatttaagacaagggcaacgagttcctatgaacctaaaagtcagattgatgatgagatcgctgatgttgctagtagggattctcttggaggaaactttactgttactgctctagcagacctttcatttgaccttccaactaggtggtttagagaaaggggaatccatgcacatgtctttgcttatgctggaaatgttgccatgttaacagagaatgagttccgaagtttctcaat

SEQ ID NO: 148 - DNA, 464 bp, Gossypium hirsutum
taggcacaaaacgatgagatattacaacaaaaaaagatttaatctatcttttccacaaagtattgcacctttacaacagaggctcctgtggcaaacttctttccaagtttctttgaagcatcgcttaattttacacctgacccaagtcaaagcacgataatgagatattgacattcacatcatgttacactttagaaagcaaagaacaagcatctggctcaccaaaaagttccaggccttttacagtagttatacatttgcgcttgttccgcacaaccttttcaattacaacttctttcttctcctacaccagaaaatccaaatttcaattctataaaaatgactggatgaatccactaaagttatgtttttatgcatagaagagtttgtgattgtactttctttttaattttcccaccaggaagacgtttaacttcctcttgcttagcttctgaactactacc

SEQ ID NO: 149 - DNA, 764 bp, Gossypium hirsutum
cttatgagctcagggatcactctgttggtctcaactgcggccgatgggattatattttcagctacgttaagaccttccaaggtcacccggaccggttgttgccggatcggggtcaagttggtatgacccaacacttcatgaggagttactccgatctcctcatccgaacctgtcatcgacgcggcgtccatgccatgggcggtatggtatgtatgaatataattatgacattttaattcatgtaatacataaatatagaggtgttcatgaattagatcgaatcagatttgaattgaactaatatatttgtatcaacatcatacatagttctccaaattaaaaaattattaaaaatctaaaggaaactaaaaatcttagtcaatcggtttgtaccaattcccgctctaactgattcaaaacccttttctgaatcaatacctgatcaatttctaatttaactagtttgaccggctaatctgatctggttgaatcatccttgcctattacatgcagcattttaaattcaattttgtgtttttaatgtgttgatgaaggtttcaattgtcttaaacaggcagcacaaattcccattagagatgatccaacagcaaatgaagcagcctttgaacttgtaagaaaagataaacaaagagaagttaaagcagggcatgatggaacatgggcagctcatccaggtctcatcaaaacatgcatggaagttttcaccaacaccatggggaactctccgaaccaaatcgaaactg

SEQ ID NO: 150 - DNA, 938 bp, Gossypium hirsutum
  misc_feature (6)..(6): n is a, c, g, or t
  misc_feature (801)..(802): n is a, c, g, or t
  misc_feature (805)..(805): n is a, c, g, or t
  misc_feature (810)..(819): n is a, c, g, or t
  misc_feature (823)..(832): n is a, c, g, or t
  misc_feature (837)..(837): n is a, c, g, or t
  misc_feature (839)..(847): n is a, c, g, or t
  misc_feature (849)..(851): n is a, c, g, or t
  misc_feature (855)..(859): n is a, c, g, or t
  misc_feature (863)..(865): n is a, c, g, or t
  misc_feature (867)..(867): n is a, c, g, or t
  misc_feature (870)..(870): n is a, c, g, or t
  misc_feature (888)..(889): n is a, c, g, or t
  misc_feature (891)..(896): n is a, c, g, or t
  misc_feature (913)..(913): n is a, c, g, or t
  misc_feature (916)..(922): n is a, c, g, or t
ctggcnctcttttcatctcgttctcgttttgagtacgtggaaaatgttcaatctactgagttgaatcatggtggcccacaagtgcttaatcatgttgctccaccaaagtcgtccagcttctttgcagaatttggaatggacagtggttttcagaagaaatcaagctcaaattcctcaaaagtgcaggtaatatgacatctgtagatgaccaccttaatattttatttataaatggttgatggaattctctccttttgcttttagaacatcctgctctttatgattctttatgtcactcaaggttcattccaaaacctctactgctggagaggatttcaacttcttaaagtggatgtctggcatcaagattgaacacaatattttatttcggttatcctttgacctttgagcttaagtgaagttgcattattccttgaaaatcaaaattcaagacatagcaactttactttcttctaacatgacattacgagcaccttgaatctactcggatgtattgcttgtacatccgaaatcgattgactctttgagaagaccatattgccatattgtacatttccatgtaatttaatttacgagaatttgatgggagagaactgttgtatgattatcttcaacatttataattaccccctttgaagtgttctatcttagttcttatttcagcttgcatctttttcttttttttcgttttgactttttaactttctttttctctatcgtttcattttaatttcagattcaggaaactgatgaagctaggaaaaaattctcggatgctanntcnatttnnnnnnnnnntttnnnnnnnnnncaaancnnnnnnnnngnnnaagnnnnntcannntnctntgaaaaaattctcagganntnnnnnngctttttttttttttgnagnnnnnnnaaaaaaaaaaaaaaaa

SEQ ID NO: 151 - DNA, 391 bp, Gossypium hirsutum
tgagttcgaggacgaaatctccctaacttgcggcaccgcaaagaaaggaggagccttttggctcctttctctccgccacggccaatggccaaacccgaagggtttggctaccttcggatcggcaagagaatgtcggacacgccccaaatagtaaatcagaggttcctttttattattcttattttattgttgttttgtgtgtaaaaaaaatgaaaaaaaaataaagaagaaagcaaatctaagtgaaaaaggatgaaaatcgaaactcaacaataatcaccttttgaaatcgtccattattttgattgatttttgtttggtaaatgtctgtaaccgattacaaatgatagattttggcttttaaagccaatctacaaaccgttcattcaaa

SEQ ID NO: 152 - DNA, 439 bp, Gossypium hirsutum
tatgaatttagattcttgacttcggaagtgatttccagaatagcttttggtagcaattacttggaaggggagaagatttttgccatgttgaacaagttgaaaatacttgtgagtcaaaatattcacaagactgcgattcctttcatcaagtatgtttcccctaaccttagttaatccctatggatttaattttttatatagagagctgacctttgtttgcttatacagcaagttatggaaacctgctgatatgctagaatctgaaaaactcgaaaaaggaatacaagattgtgtgatggagatgattaagaaaagagaagacaaagttgtgagtggagaagctgatagcttcggcactgattttctgggattactagtaaatgcttatcatgatttggacgataaaaacagggtttcattggaagacttggtaggtgaa

SEQ ID NO: 153 - DNA, 593 bp, Gossypium hirsutum
cgctttgttggctgtttcttgcatgattctctgcttctataggcagagactgaatatcgtgttctcgactgtttcgatgcgtttgagacccaaaaagtatggcaacagataaaccccgtgttttagtttttttatgtgaatctgccttttgttgtgctttcttttgggtattttcgttgttttgatgtcggattgctttgtttttggtttgcaggagttgttctggagttgagtgctttggaggttttcacataaaacaacgatttttttatcttttcttgtttctaagaggggctcatacttgatacagctttcatagttttcgactttgtcacccttttttgtcatttgattttgtttaaatagttgtctacagtttttccgggtattttgaggggggttttagttgagttttaccgagttttgcttccaaaaatgttagagcatcgaaaacaaaccatgaatctgagtaagtccggcaaaactgtagctgtagacaactatttaaacaaaatcaaatgacaaaaaagggtgacaaagtcgaaaactatgaaagctgtatcaagtatgagcccctcttaaaaacaagaaaa

SEQ ID NO: 154 - DNA, 500 bp, Gossypium hirsutum
aatttgtccttcctcgtcccgtacaaacaatcctgatgccgatctgaaggcttgttggtcgtaggccgcgtcgaagtatattgcgactcctggtctccttctttcctgtacaacatttccaatgggttgaacgataagtctcttctctttaatcccatttagctcagaaatatagctgtaagtttgtgtcgcaacatcctttccagatacctgtattttatcgtatattaacctatttctgttgaaccaaactagccataggccgcaacaaaaataccgaatctgctcagtcgttccttggctaaagatccaggtaagccattcccatatattctgatgatgactatttagtatccatgaaagctttaaatgatcccaaacttctcttgccgtagggcactgctgaaaaagatgatagctatcttcctcattttgtctgaatcgagggcaaatggcgttaactactactttcttctgcttgaggttaactaatgacggaa

SEQ ID NO: 155 - DNA, 604 bp, Gossypium hirsutum
ttcttccgttgctgctaagaacatcgtctctgagagaaaccgacggaaaaagcttaatgaacgcctctttgctcttagagctgttgttccaaacatcagcaaagtatgttatcaaatcgtcatagatttgtgaatatatgtttgtttttttgttattttttctgaattgatttttaattagtttgatgttgttgatttgaatcgatttagatggacaaggcttcgataattaaggacgccattgattacatccaagaattgcacaatcaagagggtagaatccaggccgagatcagcgagttagaatcgggaaaactgaagaaaaatccaggtttcgaatatgatcaagagttaccagggctgagatctaagaagactaaactcgataacatttttgattatggtggatcaagagcttgccctattgaagtgcttgaagtacactctccaactcccccttcactttctccctgtttcatgtaattagttattttttctcaaaattacacctgtaactgtatttccttttggatttcactttgaattttcgaagctgaaagtgacgcacatgggagaaaggacatggtggtgagtataacctgca

SEQ ID NO: 156 - DNA, 381 bp, Gossypium hirsutum
tttgttgttgatcagttgctgaaaaagggagctttttcttttttatataatagggataatctaatctaatcatcaggccatggctgttgttgagaatgcttcgaatcaagacacggcggctgcaacactgacgtcaaacgaccaagatcagtcaacgcttcggtcaaaaaccgatctgagcttacacgaaaacgatcaagggatgtacaacaagatcggtggaaccaacggtggtggtggtaaagatgagcttgaggatagtttcgaaagagataggagaaagttacaagaactgttctctaagcttaaccccatggctgaagagtttgtacctcactcgcttgttaacaatggactcaatggtgggtttcacactaacac

SEQ ID NO: 157 - DNA, 258 bp, Gossypium hirsutum
aagtgaacctaattgtagaatctaaatacttttgttaattttataaattttattaaaataaaatgggtttaagatcaaataacccatatttaattattcttaaattctcaaaatatcaaaatgtaaaacagtatcgataccagaataaagatatcgacactttgataaaggtatcgatactttaagcaaagtcaagatactttaagtaaacatattcatcaaaacagtttggatagcagtagtggtccaaatttgaaa

SEQ ID NO: 158 - DNA, 813 bp, Gossypium hirsutum
cgcgttcgccgctttgtgcttcaccaacctttacctttacgctaaggaaagatcggggccgttgaaacctagcgtcgagaccgttgagggaacggttaagtgcgtggttggaccggtttatgataaataccatgatgtccctgttgaattccttaaattcgttgattccaaggtaatatgatctcttcgtttttattcaatttggtttctttcatttcataggcaatgactataagtaaattctgtgtacatgactttgaaattgaaattctgggttggtgttggggtaattggcatttggaaaatgcctttcaaaaatgtgattcaaaactggtaatggtttagttgcaaaattgtgggcttgttagttttgattcgaacctgaaaatcggattaatgagaatccaaattcaaatgccttgaaatctatatccagaataacacaaactagagttgaagcaatccaaattcaaaatgagtttaatccaaaatgattcaaaaattttggatgttttagtttaactaaaattactgaaactatttttgctcaaatctttgattgccaagaaagaaaggtagtacccaaagattgatcctttgtttttattgcaggtgggtgaatcagtgaccaagcttgatcgtcgagtccctccagtcatcaaacaggtctcaaccgaagccatctctgcagcccaaaaggctcccgaggttgctcgtggcgtggcttccgaagtccaccgtgctggagtggtgaacaccgcctcaggattagcaaaatcagtgtataccaagtagaacccacagcaaaacagc

SEQ ID NO: 159 - DNA, 364 bp, Gossypium hirsutum
actaaggtttcaggccatactatattttgcctggatcgtgatgggaagaataagagtgtcgttattgatgctacagaatacattttcaagctctctctgcttcggaagcgatatgatcatgttatgaatatgataagaaactcccagctctgtggtgaggccatgattgcttatctgcaacagaaggggttccctgaagtggctctccattttgtcaaagatgagaaaacacgctttaatttggctttagagagtgggaacattcaaattgctgttgcatcagctaaggagattgatgacaaagatcattggtataggttgggtgtggaggcccttcgccaaggcaatgctgctatagtggaat

SEQ ID NO: 160 - DNA, 683 bp, Gossypium hirsutum
agaccgggcagaatgtggcttttggtgtggtaaacaatgctgaggctcctataatgaaggaaaaatgggtcaatttttcttctttatcatgcaaaaatgccagggtagcgccgttctttcctctagaaactgtgggatttcgaagcaaaagaaggaatggtgtgattgttgcagcaagccctcccacagaggatgctttgattgctacagaaccattgacgaaacaggatcttgttggataccttgcatctggatgtaagtctaaggaaaaatggaggtaagagttccccgtctttgttttgttttgattaaagtacattttatcttgtccattttatgtttttcgacttgtctaatatagtaccagtctcacacatgatattttaagaatcttttgctgcctttataatttcttgatgtcaatagctagccatatctggtccttgatgtgtattttagtatttatattggatccagttctagtttaaatctttccattagcaaattggtcctctttctatatttttacttgttcactaatgcaagtatttggtttactcaggataggtacagagcatgaaaagtttggttttgagataaaaactctgcggcctatgaaatatgaacaaatagcagaattgcttaatggtatttcagagagatttgattgggagaaagtaatg

SEQ ID NO: 161 - DNA, 1117 bp, Gossypium hirsutum
  misc_feature (1040)..(1041): n is a, c, g, or t
  misc_feature (1070)..(1073): n is a, c, g, or t
  misc_feature (1094)..(1097): n is a, c, g, or t
  misc_feature (1100)..(1104): n is a, c, g, or t
  misc_feature (1111)..(1113): n is a, c, g, or t
catctccggagttgcgccagtgaagatgttagtttcgaattaaaatttaaattcaaaattttatgagttaattgcaccgagcggccccaaacaattgtttggattttaaattggtcctttgtaccatgctctcttggcctataagttataggtgagaggatggagctttgctcagcgcaaactcgttagattggcatggtttcgccttttgactatttgagcactcaacctaagagtgtaattgagctaagtcgagcttaaatagcggtaaacttgtgctccactcaaaatttgatgcttggtatttgaattgagcttgactcaaagattaattcttaagtttgagcttgattcaagatataattgagttatttgaactcaattaagttcgttaaccaatttttatattaaagctcaaacttgagctcgattaagttcgttcctaaataattttatttattaatttgattgataactcaagcttggcatgataattactgaatcaaattgagtttctttctagtcgaactcaaataagtcatgttcaccggtgtgctatttacactcctaattaaaacttttaatagagtcaaaagacaaaatcctcattggaaacaatagaagaagtgttaagggatcactgatattccagtagatgacactctaacttcgacactcttaacttcttttaaagaagtcgaaaatccctcaacacaatttgagatcaattcaaaatctaaatcatagtaaccgaaattttattgcaaaaaatatatatatattttgatgtttttaataataacttttattattgcaggacctttgagggaccagagatgggcactactgaatcaggacatggatgcagctgtggatcaagctgcaaatgtaatccatgcacctgttgaaaagcttgatgaaagccatagattatgaaaaaagaaagcagcaaaataacaggcctctgtaatgatttattttcaaggatggatgcctacaaggtctataattatgtctctctctgtcttgtgtaataaaanntttgtttgtggtgaaaataatgtataagnnnntttggttgggagcaaaatttnnnnttnnnnnaaaaggnnntttt

SEQ ID NO: 162 - DNA, 662 bp, Gossypium hirsutum
agattcctactgcctttggtactcatttctccctcatatttatctcttatctccttgtattaacttgcctttagcatggaaattcaaacttatcatcaactgtatgctgctagatccgtttgctgatgcaaatgctgaagacgctggtgctggtgccaaggaatacgttcacattcgtattcagcagcggaacggtaggaaaagcctgaccactgttcagggattgaagaaagaatttagctataacaaaattctcaaggacctgaagaaagaattttgttgcaatggcaccgttgtccaggacccagaattaggaaaggtttgtgtttaacctcctaagaaagcgacctcagccgcctttgtcttccctctccgttgttaattttattatctacttggtttatttgtaggttattcaacttcaaggagatcagaggaagaacgtctccactttccttgttcaggtaattgccattatgcttcggtttaaatcttcttagaactgcctagaagattcaacgtagttgtttgagttcttagcaaccaatctctttcgttttatggacaggctggtattgtgaagaaggatagcatcaaaatccacggtttttaagtctcggctacgagagtttccaggagacttaaaaggtctatcatcttca

SEQ ID NO: 163 - DNA, 960 bp, Gossypium hirsutum
tgcagagatcttcttcagccattcaatccagttccaaagtttatcatcataaaatctgtggttttcttaacctattggcaggtaaaatcttgtgtgcctgttatttcctctcatactcatgcatgcaaaaagaagacaaatcctttgtttttggcttttagatacttttatctttccttctatttcattgcatcacccttttgttgctttttggtgataatcatcatttagaaatcttgttagtatctttatagcaaaccttggggatggtgaattctggttactggaatgcaatctttcctaacctgtttgctgtccacattgatatcatcttcatgttttgttttataggggaggctgtttttctatattttgctttccctttttatactgatgtctaatcataagacagcagttcgaagttccggaagtgctgtgacggcattgtacaatgtattaaaccctgtaaaatagaatgcatgcctatattgatggttatccataacatcttgtgttgtgatggcattgtactgtttgtaaacctcatctagttgcataggtgctaaataaactcaaaacatccttttcttttatttccttttgcagggtgttatgttttttcttgctgcaaaatctggatttattaaggatgctgatgcagcagctcaatttcaaaacttcattatatgtgttgagatgcttctagctgctctaggtcatctttatgcatttccatataaggagtatgctggtgcaaatattggtatgtctcgtggttttacacgaagccttgcacatgccttgatgttgaatgacttctatcatgatactgttcaccaggtgacccttacttctgttgccatttcccaaaggttcctctactggattcttcttcttttgtttagggttatttatggtttttatcatattcgcagtttgcacctacgtatcatgattatg

SEQ ID NO: 164 - DNA, 755 bp, Gossypium hirsutum
  misc_feature (329)..(329): n is a, c, g, or t
  misc_feature (332)..(332): n is a, c, g, or t
  misc_feature (340)..(343): n is a, c, g, or t
tctaactgctggctcaacagatgcagaagagttggagaagtatgttgccattagagaagaactatataaaaaggccaaagagctcgattctaagatcattggttttgaaacagctatcagaaggccttactttcatgtgcggcccctcaatgttgctgagcttgagaactggcagaactacctggactttgtagaaagagagggtgacttcaataaggtatttgagtttgttttttccatctttcagtttagctatggttcgtagtgttcagttgccctgtttgttatatattgacttacagttaagtaacatgtgttgcatcattttnctnattgtcannnnaccgaatcgactacagatctagcattgaatgtgagatcgaaaagttctgccacggccatgacccgacggacaacccccacgactagctccttcaaccgacagcgcttcttcaacaaggtttacgttcaagtttacttcctgcaatacttgagcttgaccactctcacagtcaactaaagcatcaaccaaacgctgcaacgaaagaattccaatcaacaacctagcggacgagataactgcctcaaactccgacggtaagcccgcgagcattacttcaatcttctcttcatcagaaatacaagaaccagaggcatctaacatagcacacaagtctttaattctagcaacataagctttaatagaaaggttacctttcttcaaagaatgaagttcatgcagaatccttgactgc

SEQ ID NO: 165 - DNA, 820 bp, Gossypium hirsutum
tttgaagactcatatttatccgttgtgaaggtttggtactagtttaacatcatgacttctaaatcttttctggagcatacattcttcaatagacataatgttatacaaagaagagcttctgctgctttatattattaatattgttgttaaattatctgtcttttcatctttttaacctaaggtgtatggtaagagctcataaacagttatccaactgttctatatggtggaggggttaacacattgatcagtttatgttactccaaattctgtattgtggtattactaatctaaaccattttggtagatgacatatcatattgtgattgattgataactaggtaattcctttttagtgatgcaaaattatgtgcctactaattgtttttgttctttaaatactgaagtttagtggcttgttcatttatatctctgatggtaaccattatagtgtctaattctctgtgctatatgttttcttttcctcgtaggcacttttacatgcctgcattgcatgctctttgaagccatctattgactggattgcagcttcagacctcgaagatgattctgccgaatcggtatctaaacagcagtgcttttgctgttacagtctatatttacttaaaaataattttgattgtgccatctaaaaacattcttctatctcatccaggccccagaagcgcatgctgctgcatggaaaactttgagagtaagccttttattgtttttacctattgttttcaatgctgtgcagtatcagatcctttacccaacatctggtttggtttattattttcatggattagctacattc

SEQ ID NO: 166 - DNA, 378 bp, Gossypium hirsutum
tgactctcatcttttaagtatgtttcatacaataggctccttaccttttattgccttttgatgtctcttaacgttaatagttacaatgctgttatagttattatgagttcgaacttgaggcctagtctagctagttttcgaggtcattcttagaggttgcagcttgtcgtgtacccgaaaacaatcatattttatcatttaggaactcctaagaattagtttttgagttcttagacttgtgggaaatttatctctgtgttttgacaattttccttttttctcttgtagtcttctacgagtttgtaagttgtattctctaatgttcagccattcagaaagaagcttttgcaattgccgatgcttatgtggttacactgt

SEQ ID NO: 167 - DNA, 540 bp, Gossypium hirsutum
  misc_feature (177)..(178): n is a, c, g, or t
  misc_feature (312)..(312): n is a, c, g, or t
  misc_feature (344)..(344): n is a, c, g, or t
  misc_feature (357)..(358): n is a, c, g, or t
  misc_feature (384)..(385): n is a, c, g, or t
  misc_feature (400)..(401): n is a, c, g, or t
  misc_feature (431)..(431): n is a, c, g, or t
  misc_feature (467)..(468): n is a, c, g, or t
gcgtgggtgcggacgtaggtattcttttaatgagtgaactggaacatatgatgaagttaaggaattgcatcttagtataaatttgatcctgagttgctcttgcggtggaagatgttgtacaggcaatcgagtggggcgggtgggtgaaactctcatcttttaagtatgtttcatacnntaggctccttaccttttattgccttttgatgtctcttaacgttaatagttacaatgctattatagttattatgagttcgaacttgaggcctagtctagctagttttcgaggtcattcttagaggttgcagcttntcgtgtacccgaaaacaatcatattttatcanttaggaactcctnngaattagtttttgagttcttagactnntgggaaatttatctnngtgttttgacaattttccttttttctcttntagtcttctacgagtttgtaagttgtattctctaannttcagccattcagaaagaagcttttgcaattgccgatgcttatgtggttacactgtcattctagacgtaatt

SEQ ID NO: 168 - DNA, 556 bp, Gossypium hirsutum
  misc_feature (539)..(541): n is a, c, g, or t
  misc_feature (543)..(544): n is a, c, g, or t
  misc_feature (547)..(551): n is a, c, g, or t
actagttgggcagtaaacgtggattttccgaaaccgttgatcttaagttgggtgacaacaatcgagaggttaagctgggtcactccctccaagaagctgctaagtctcctgtttcaaagtaagtcatatatcatcatggttttttttttctagactgaatctcaatggttggtaatagttagtttagtgcttattttaatggtttgattgtaaaaatgttataggacacaagtggtgggttggccgccggtgagaggctttgcaaagagaggaaagaagagttgcaaatatgtaaaagtggcggtggacggtgctccatatttaaggaaagttgatctcgagatatacaatagttatcagcagctgttaacctcccttgaagacatgttttcatgtttcaccataagtaagtaacaattatatcatttgtctttctttttcctccttatttttcccttttaatggtaatatataaaatttggtcattaaattgatgatttcttttacaggaaactattgaacgagaagaaaatagagcnnngnnaannnnnttgag

SEQ ID NO: 169 - DNA, 1020 bp, Gossypium hirsutum
  misc_feature (668)..(669): n is a, c, g, or t
  misc_feature (966)..(967): n is a, c, g, or t
gggaatggccatgggttgtggaccgaacatgccatctcgtttgtccatttcaatcttatgttgtgtctgtaatcaaaaatgttgttaagaaatggttcaaaataaggatataacaaaatgtcattttgcatgtattagaaactcttcatacctgcatacatgcacagaccctgcaaaaggttaaaataaacgggtcgtcagtgtattctgaatgcaaaattaactagaagatggatagggcagaatggaacagatcactttacgtgcaataaaccatatcagccaaacagttcagcaactgtgcagcatcttgaagctcatcacttccaacaatcattgcaactatggaaaatatgcaggcaacttgttgcaggcaaaacatgaaaccctgtatattaagtgacaatatgtttaatcattggccaagaacatcagatggaattacagatactgatatacattaggtgtagaaagggatagtttacaatgatgcagttgtcacattttgttgtttgaatgttgaattcatcttgcagcagaaaccgggtggaagccacggagttgcaacagcagaggaaaacctggaaatgaaaaacacattatacgaaaatgataacaagatacgaatggaagctcactgcaactggcacaccatcttgcaaattatnntgaaagaaaaccacacaaaaagttataagcctatcacaaaaaagtaggttctttcgacgattttaagattgcgctttataaaataatacaatgtcccttccaccctctcctttcacagattggacgtgttgtgcgcctaaggatcgttttcctcacggctagatcgtttaccaaattttcggaattggacatggtttatctttaaaaccctgtaggttttttcaatctcagtctctctaatattcctatagtttgtgggtagtttggagtagggaaccgagtctgtgagcttaaaanntaagttgcaagttgaagaaaaaagacagcaatagagaccatatagataaactt

SEQ ID NO: 170 - DNA, 1181 bp, Gossypium hirsutum
  misc_feature (1170)..(1172): n is a, c, g, or t
agatcattccatattcctggcctacgggtattaacaatttctttttttagttgttgttttgtgttttcatgttcaaagctgggattagatttcgtggtagcttcaaacggcttaactttattgttcagaccttgatttatctggattttaagtttaatttgaaattcgatattagttcctgaaaataatcattgatgtttgttgaattttaatttgccatactatttttcttgagagaaacttgctttgattaccagctcaaatgtcaaaactaatctgtgtttccttaaaggggaaaatagatcttagaattgtttacgaaattattccatcaatatagaaatgggaactagaatatttagaaagggttgtcccatcagattattgtaatgtttattctatctcaatttactctttactactagcttccttcatgaaggctatttttcacaatagatgaacatcaagcatcattacgaaagtttgtaagaaaaacaaaatccttatgaaagtcatcctctatgcgtctaaaagaatttagagagaaaactcaccagaatttgtacagaatcttaatgcaatgaatgtttttccaggtgaactttatgcagttgcctgtagcccaacagatccagtgttagtggctactgggggtggagatgataaggggttcctttggaagataggtcatgctgattgggcttctgagctccaaggtatggccatgatacaatacaacatctagacagttcactctctttttgcagtacaagtttttctcttcagtgatttattgaagccaattttacttttgcattttgccaaagtggatgtgacacacacatccctttgacttttctaacattcttcatttcttatgcttctactaaacctcttgtaaatgcaacgcctgtgcaggccataccgattcagtctctactttagcctttagcagtgatggacaactacttgcatctggaggttttgacggacttgttaaagtttgggatacctttggaaatttcaaacgcacacttgagggtcctggaggtggcattgaggtaaaactacataatacttggatgctaactactcttaatattatatgttttctttggaacttaattaatgatggacttgttgcctgatagtggattaggtggcacccannnaggtcatct

SEQ ID NO: 171 - DNA, 364 bp, Gossypium hirsutum
aatgttgtttctcgggttcgatcgggttcaaaatcggttgtggttcgtaatactcttactataaatggttctgattttagtactagggatgttattttgtttaatggtggtaatggtggtggagatgttggaatcagtagtcgaaaaatcggggattgggtggaaaagggtgtgagtaaagtcattttcgatggaaatgttgacgatgattacgcgttcgagaatggtgaggatttaaacgagaatgctgtgttggaagaggtcattcgagatcaagataattatgtaaatgctacatcgcgtatagagcaggtcgcgaaacatgggcgggaagtgtctaccggtgaacttcgggatgtaaata

SEQ ID NO: 172 - DNA, 891 bp, Gossypium hirsutum
taggttctatcgtatggtctttttccacttctgattgattttcttgtatactattagctgactgcttgattattctgttatattgcagaatctttgtgtgactgctgcacaccgtccaattaaagagattttggaaaaggagaaaaaggtaggtattgtggtaaatgtctcattgactaatgtttactatattttttgtatctattttggctctatccatataatttgtcgatgcgacaataactacttcattcagtggttgtcatttgcgattgtactttttttgttgaattgagctgtttggttaggtagattgtgtattattcttgcattccttaatcgaagtaccaatgctcgatgtttaccatctgtgtttatgaataaaactaattcctaatgttaaagctttgagtgattgacttttgagtttcgaccattatgcaagggttgactgctaatatatttgttttctttatagttgtctgaaatagagatgagaagtaaaataagaataaaaggatcatattgtatttgcatattgccattgtgttttaatagtcaacatcgatgccaggaacgagctgctgctctagcagagggcaaacctcctccgcctttgagtgggagtgctgatatacgttctctaaacatggacgacttcaaatatgcccatgagcgggtaatctataaaattcaagttatattagttatttttcgtccaaaaggaggagaaaagtttgataactaagttactttacatttcaaatcttaacaggtatgtgccagcgtctcttctgagtctgtgaacatgactgagctgcttcaatggaacgagctctacggtgagggtggttcacgaagaaagaaggctctcagctacttcatgtgaag

SEQ ID NO: 173 - DNA, 389 bp, Gossypium hirsutum
tgatacagtccagtagtagctctgttttaatgaaattcaagggtaaaaccaactatcagcttgtctacaagattgacgaagatattggtggtgctcaaagttcaacaattgatgacattaagagatttgctagtgctgttgtcattagcaaggactctgtgtttcctgaaaattcagcattcctcgctggtgcgacagatgttgtatcaaggctacaagctgctaatctctctgtacttgttcaaaccttcagaaatgagtttacatctcaagcatgggacttcttctctgatgcaactgttgagatcaattccttctatgcgggagccggcattaatggtgtcattacagacttcccaaagacctctgatagataccggagaaaccga

SEQ ID NO: 174 - DNA, 365 bp, Gossypium hirsutum
  misc_feature (22)..(22): n is a, c, g, or t
aactgagcagcttcggtaccgnattcatcatccaggctcggaactttaaggaatgcaagactacatagctgagcaagcccaggagacgctgataatgaaggatcaagaggtcgtaattgactgtatggaacctcctcttgattcccgtaatcaatataaaacacttcaaagttgtcattaggagattgaactcctcctcgaggtgcattgacaatcttcacaaggtaaaagtggaacacaagaacatgtcagaatggcatacaaagattgcataacaggcaagcaagaaaggaaaaggccatccccacaaatatgtaaaatataagccatacaaatacgaattgaaaagaataaaacaaaggaca

SEQ ID NO: 175 - DNA, 443 bp, Gossypium hirsutum
acactgtgatgctgagttcttcacaaatacccaggttagccactgtacaaactccaactgattttcttgcaaaaatgtttggcatgataactctctccaaacttaaattgaaacaggacatttacggaaaagatggtccatgttctctgttcctactctacaacgggggcatactgttgtgtttgttaactttattagtagcatattaactcgtgtagataggaaattccatgatatcttccagattgtaatttttatttttgaaggaaggttcagaagccataattttttgtagaactccttatagtcagcttgtaaagagtaagctctaggatcattttccgacgcctcagcactccagacccaaaaatcttcatgaggttcttctgccaacggaatgcaaataatcttctcggcaacatcctccggaaaggtagaagcta

SEQ ID NO: 176 - DNA, 510 bp, Gossypium hirsutum
tccggtgaactggcttcaaaacctattggaccaaaagatgccgccgccatgcagtcagctgagaacaagatccttggagaaacaccaaaaggtggtgcagcagctgccatgcaatctgcagccatcgccaatgaaagagcaggcgtcgttagtcacaaccaagctgacgttgctggagaccaaggcgtcgccgtcattaagtctgacgcagatggcgatgttatgatcacagaagccgttgctggacaggtaaaaagtattggaaaatcgttgcatttcagtataaaaatcataaagtgacattgtaataatcttggtttatttatatgcgtctaattaacaagtttaaatattgagatacagattgtggggcaatacaggcaaccagatgtttcagcggtgactactccagcaatgttggttgatccaggatcaattacgattggagaggctttataggcggcggccatctctgctgctgataaaccgattagctgctgataaaccgat

SEQ ID NO: 177 - DNA, 395 bp, Gossypium hirsutum
  misc_feature (177)..(177): n is a, c, g, or t
aaatggtggaggatgtgtatgaaaacgttggcaagccaattgatatcggcgaattggcattctgtgcgttaatcaatttgatcggaaagatggtgtggggaggcgcactccgaggagagaaagggactgcggttgagggtcgcttcaaagatatttcttcgcagatgatggtgttantgggaaaaccaaacatttcagatattttccccgcgattgcatggttagacatccaaggtattaagaggggaatgaagaaaatccgtcaatcgttcaatgaacttttagagtctgtgattgaactcagaatgaacacggtgactgagaaagaaacgagtgaacaaaaattcgacttcttacaattgctcttggatttacacaagaaccaagatagccct

SEQ ID NO: 178 - DNA, 475 bp, Gossypium hirsutum
  misc_feature (472)..(472): n is a, c, g, or t
ctcccggcctgaggcggaggctgaggcggaggcgcaagctggtgctgcgaagagtatagtaactaagggaagtagtgagagtagtattaggaaagaagaagttaggatttttggggaagctaaaattgatgcaggaaatggtgggggttctttttatgggaatggtggcagtggtggcggtggtggaggagacggcggttgtgatggaggtgatggtgaaaagggtgatcctgaagaagaagaatttggaccattaatgaagtttgaggatgtaatgaaggagacaaatgctagaggagctactcttccttcagacatgatggaggctgcaaagactgttgggattcgtaaattgcttcttcttcgatatttagatttgcaggtaatggattgattgtaatgaaagttagctgatttacgattaaagttcaactttttgaattaaagtttgaatatgtttgtgattcgcatngtg

SEQ ID NO: 179 - DNA, 416 bp, Gossypium hirsutum
gtgttgattcaaaaaccaatgacatgcaggtacgggcttttgtaccgggggagatcattgcttgtcatcagtccagtgatctagaaccggaaaaccagagttctttgggagcattggtggagaaagagttgagcgttgataagttagagatatctaccagcattagagagccaaagaaacgagctaaaaaccgaaaggtcttagacagacttgcttctgatgctcataaattgatggctcttcaaacctctgtcaaacaactgaaaaagagaatggaaatcaagaagaggaagaaggcattcgatttagaatacggacaagtcaaagaacaattgcaagaggtggaggatgcaatcaaggagttgtgcaacgtcaatggtgaattgaccaaggatgtcgaagggagttcatcttta

SEQ ID NO: 180 - DNA, 828 bp, Gossypium hirsutum
ggaatccaggtatctctttttattttgattcagatctatattattcgattctctatgtcaatgtatgtaacttcacttcgtttagatctgcttagatccgttgcatattttagttatttgtttgattttctattagatctgagaattttaggtcttcgatcttcgtgtttggctttgttttctatcagatctggaaatgctagtggtttttaggttttcgcttcagatttggactaaagttttgtagtattgaacattgtcttacgctttccttagaacattttggaggctttattagattgttgccatttatctatggaatgtaaggtttggtgagtaaataacgaggggttgtgtgtgttaacagcctgatggccagatgccaagtgacaagactgtcggaggaggtgatgatgcttttaacacctttttcagtgaaactggtgctggaaagcacgtccctcgtgctgtctttgtggatcttgagcctactgttattgatgaagtgaggactggtacttaccgtcagcttttccaccctgagcaactcatcagcggcaaggaagacgctgccaacaacttcgcccgtggccactacactagtaaattcttttaaccttatttcattaatcacttcatatgtctacgatttgtttatttgttttactggaactaacaattagttgttcacttgtttcagttggcaaagagatcgttgacttgtgcttggaccgtatcaggaagcttgctgataactgtaccggtcttcaaggtttccttgttttcaacgctgttggtggaggcactggatctgttctggggtacctc

SEQ ID NO: 181 - DNA, 430 bp, Gossypium hirsutum
ccaaagaaagagaaacctgaaccgaaaccaccagtaaatgaacctccaaagaaggaaaagcctgagcctaaaccaccggtttatacaccaccaaagaaagaaaagcatgaacacaagccaccggtgtatgaaccaccaaagaaagaaaaacctgagcctaaaccaccagtttatgcacctccaaagaaagaaaaaccagaacccaaaccaccagtttataagcctccaaagaagccaccagtgtatgagcctaagccaccaaagccaccggtttatgcaccaccaaagaaagagaagccagaacctaaaccaccagtatatgagtctcccaagaagccaccatatggtcactatccaggacaccctccattggagaagcctcaatagagagatttcctcggctaaccattcccgacaactgagctactat

SEQ ID NO: 182 - DNA, 428 bp, Gossypium hirsutum
atgatgagggaagaagatgaagtttactacagaagttcgcctagtctccgcatcggcaatcggagatggggtgacaatggatatgtaagatcggggcgccgagaagccaggcctgttcaacgatcatccagcagttcccagaactctgatgcttcatcttcaagtgagcccaagaagaaagaagtttcgaaaagtataatggggcgacgggcaaagagggcactgaagcgtgaggctgctgataaggcagctgctgcagaacatcaagagcatttgatgaggctggggcggaagtgatttctttgacgcaatgtcttttttatggaacattgtagcagaggaattagggtggtttgataacccagattcgctgtatcatatcctggctttgtacagtatttccctttctttccttgtctgtggaacaa

SEQ ID NO: 183 - DNA, 841 bp, Gossypium hirsutum
  misc_feature (801)..(801): n is a, c, g, or t
  misc_feature (803)..(805): n is a, c, g, or t
  misc_feature (829)..(831): n is a, c, g, or t
cagagttcctcgaggttgccctctctttcctctatcttaattccgttcctggggttttcgcatctttatgtaaactatcaaaatcttgaatttacaagttctttttttccatagttatcaaatgtttaggttgcattgaaacccagaaaagcagccacgatcctaaggtttctattaagtggcttaaacccatcgaccccatttgacttagtatgtctcaatagttcattttcgtttgtcacaaaagcatgcttggtagaagcttgttgactaaggttatcactgattaacttgatctctagaaagtttgtttatcatagcttgtttgtatgtttatctctatgcttagatatttgtacccaattcaaattctttagtttcttcttattaacataatgcaatcttggctgttgctataaaatgtcagctttctgagaatatgaatgcgatgttggttatttgattacagcatcacatgattttcatcatgctttctaagcattatttggggctaaatgcatatattatttttggtcatacagactgtgagggggaagtgctttgaaaagtgtatctcaaagccaggatcaagtcttagtggaagtgaaagtagttgcatctctagatgtgtggatcgttacatcgaggccaccggtattgttggcagagctcttttcacatcgcgctgaaattctgaaacccggactgttgtttttgaagaatatgttagctagctgctaaagtttggaaacggaaatctcaaattcaaggacgagtgagatttgcaacattgtttttagntnnncacgttttctaaatttgactgggnnngattataact

SEQ ID NO: 184 - DNA, 944 bp, Gossypium hirsutum
  misc_feature (895)..(897): n is a, c, g, or t
  misc_feature (901)..(903): n is a, c, g, or t
  misc_feature (911)..(913): n is a, c, g, or t
  misc_feature (921)..(923): n is a, c, g, or t
  misc_feature (932)..(935): n is a, c, g, or t
atacgtcataatcgataatccagagagggaagtgttaaatgaagttgagttatatggggtagaaatgggaaaagagaatgaggaggaagaaaagaccactgaaaatctggaacaagaaaatgatgaactagtctttcagctcgactggtggcataagagtaaagaataactagaataggtaagcccatctacaaacaaaatggtacctaccatccactagccttcccgaattagttaagaccaataagggtcggtgatcagatttcaatttaaaaggatgtcgcacgatggtgtttggcgcaaaattctaccattccttattgcaaattgaacgatcaagtctctgaaacaactaccctctattccatgtgaacattggcccctgcaaacccaaattatgaagcccgtgttagaagaaaaaagatctaaaatgatcacatcctggatgactagaaaccactccgccctgacgttcatcatttttcataataacattaaagtcacctaccatcaaccatgactctctaatttcagatgctatctgatcaagctactcctataactacttctgtaatcctcgttaaggactcgcatacattgatgtgcaaagaaagggatttcggcttctttggtcgaaaattttgcaaatgaataaattgcgggtggattttcaaaatctccacactgacattctcattccaaaataaccagataccagatgcaaaccccattacctcaactctaaacaaaaaatcaaacccaactttacaatcactgatccagccctaagaccattgattttggtctcaaaagggaaaaaaaaattagctgaattctcttctatattctttcaaaaaattatggaaacgaagaggcccacatccctgacaattcnnnaatnnnaaatggannnctttctcnnnaaattgtannnnaaaaaaaaa

SEQ ID NO: 185 - DNA, 405 bp, Gossypium hirsutum
acgtctcctccatcgagcagaaggaggaaggccgtggcaacgccgaccacgtcgccgtcatccgtgactacagggccaagatcgaggccgagttgtccgagatttgcgctggaattttgaagctccttgacgagaaccttgttccggctgctggaaacggggattccaaggtgttttatctgaaaatgaagggagattaccataggtacttggctgagttcaagactggcgatgacaggaaatctgctgccgagaataccctcactgcctataaatctgctcaggtttgtgtgcgtttctgtaatttctggttcgatcttgtgaatttgcttgccttgatgtgtaattttaaggttcggttaagtttggatgtgaattatgatgaatacgtgcttaagttttttt

SEQ ID NO: 186 - DNA, 837 bp, Gossypium hirsutum
  misc_feature (516)..(516): n is a, c, g, or t
  misc_feature (744)..(744): n is a, c, g, or t
  misc_feature (809)..(817): n is a, c, g, or t
ttggtctgaaaagcactgcacttttctctagctgcgaacatttcaattcatctaaatcaactatttgaaagagtctctcaagtttcacctaagtcaagaaaatacttgcatgcaagaaaattttctgcaaagagattttgacacagataagacgtgtagcttccactccactgttgaatttcatttatgaaatatatgcaagttccatacatcagaaaaatccaaaccattcattgaaatttattttaactataagatataattatttcctttgtcaaattatgcttaaagcatgtaataagtattcacaaaatgttctagccatgaatctcaaaagggttgtgagaagtaagagaaacattgatcagaatgtgcattccaggttttgaacttgataaagttgttagttacccatgtctagattacccaaaatgcagacactgtttctgaagatgcatgaaatttaagaaagagaaattcacatctctaccaacatagaagagaagagaagagaancgctacctgatcatagtcaatataacctgtaccctcattcaatctatatggcattgtctcaaagaatattgacacagcagatatcttcttactgtcagtctgtatgatgcaaagaagaatcaacacttgagtttcaaacactataaacaccagttgattggccataaagtaatgttacctgatatgctatttctttagaaaataaatgcagataaaaaataaaaaaanactagaattaacaagagaagacaaaactataaccaagttcagcagaaaagctcgtgattgatggnnnnnnnnnacacctgataaccatgtgaa

SEQ ID NO: 187 - DNA, 525 bp, Gossypium hirsutum
ctcccccaacaatatgaaagttgtaaattttcaattttcattaaacaataattttatattccattaaaacttttcattttatttatcaggttggccatggagtcaaagcagcaatacatgcaggagtagaaagaagggatcttttcattacatccaagctatggtgcaccgagttgagtccagaacgagttcgacctgctttattgaacaccctccaagaactccaacttgaataccttgatctttacctggtaatctgatcaaaatgtcatttacatcaacatgttggaagatgaaatgcctgaaagatttttcattacagatacattggccatttaggctagcagatggagcaagcagaccacctaaaccaggtgacgtacaagaaatggacatggaaggtgtttggagagaaatggagaggcttgtaaaagacaagctggttagagacattggtgtgtgtaattttacattgaagaaaaagaacaagttgcttggttttgctgaaactatgccatctggttg

SEQ ID NO: 188 - DNA, 831 bp, Gossypium hirsutum
  misc_feature (14)..(14): n is a, c, g, or t
acagctcatgaccnaggatgccgttatgcaggcagctaaacaggttaccacctttttttcttttcttttaagtttcatttttgtattccaatctttctcatcattgctgaaactagtaggggctgctaattttgaattaatattcatagattgcattgtattccctttttccataaattggtattgcaatttaactttgcaatgtaagacgtttatcaccactttgcaatttaatgcttgtgcggtgcaccctaactgcctcactgtgctcttttctggttacgtactgacaaattttgagttaataagggaccttcttcttttccttttctggggaaagcattactctccacttttttcttgtttcatgggcatttagtcaagttattaactgatgtagtaggaaacttttacatggaggacataatagaattcttatacctgcactaggttagtttcttactgtcttccgctcctcctcatacaatatgtataaactgctatataatgtactttgagccatgatttgtgtgaattatacttcttgtagcatggtattagtgatttgtatattttcggcaggctaaagaggctggtagtacacgcttttgcatgggtgcagcatggagagacacagtccgaaggaaaactaacttcaaccaaattcttgaatatgtaaaagaaattaggtaataatgcatcattgatgttagattgcttatagtgaaagtcagagctcaaataattgttttttatgatgcgacttttgttacctagcttatagcctacatttcaagtgaacttgattctgtgaagttattaaaacaattg

SEQ ID NO: 189 - DNA, 365 bp, Gossypium hirsutum
ccagaagtcttctggggccgtgccatttggaacaatgtttgctctggtcctcatgtggtttggaatttcagttccacttgtttttgtgggtggttacgttgggttcaagaagccagcaattgaggatcctgtgaagacgaacaaaatcccaaggcaaattccagagcaagcttggtatatgaacccgactttttctattctgatcggaggaatacttccattcggagctgttttcatcgagctgttcttcattctcacctcaatctggctgaaccagttctactacatctttggtttcctgttcttggtattcattatcctccttatcacttgtgctgaaataaccattgtgctttgctacttcc

SEQ ID NO: 190 - DNA, 1056 bp, Gossypium hirsutum
  misc_feature (1027)..(1028): n is a, c, g, or t
cgccttcttcttcttcttcttcttctttttatatctttctttccttcttgtttatatatagagagctgaaaccagttctgggtttgctttaaaccacaataaaaatggcttcttcactctcttttccatgccccaagatctcttcttttttgaaaacaaaccagcaaacccaagctcacaagggttctttgtctcttcctccaacttcaaatttcaactccaaatcttgcttgtcatttggatcttcaatccgcgtacctgcattttcagcatctcaggttggttactttcatacttttttgtttttgcttttaattcttggaatgagaacgggacttgagtttatgggttttttattatattttactggttatgcttagggatctgaattttgtggttttattatgaaacaatggttgaataaattattactacacagaaagaaaaattgcttttttttgccaaaatgttcaacatatcttatgaattattttttaaaatttcaatatttaaaagtggaagtattgcttatatagatagatgagttcaagtattgaagacctcgataatttagatgctttttttggtggtattttgatgtattatttttactgaattaagaaagaagtagtatatttgatcatagttcttatacataatggtaattcatattctgatttttgttttctttcttgaattacggtgaccattttctaggcttctttatgtgtttttgtctaaaatcatggcttgttatacatatatttcttctttgcaatcaacgtgtctacgaaaatcatattgcataaccggttcgtatgatcattagtggcgattcgcagttcgttttagtaaattgtttaattcattggttgattcggtatctggctgtcatttgcagtggcctaatgatgggaagcaaactacagtcttcgcaagccatacgcagcttaacgaggtgtgtttttcacggtgaagttgaaatttaatcttttagacgagatcttatccacgtctatttaacccnnctttgtaaaaattaaggtgctgcagaga

SEQ ID NO: 191 - DNA, 812 bp, Gossypium hirsutum
  misc_feature (753)..(754): n is a, c, g, or t
  misc_feature (760)..(761): n is a, c, g, or t
  misc_feature (763)..(764): n is a, c, g, or t
  misc_feature (780)..(783): n is a, c, g, or t
  misc_feature (785)..(788): n is a, c, g, or t
  misc_feature (792)..(795): n is a, c, g, or t
  misc_feature (797)..(797): n is a, c, g, or t
  misc_feature (802)..(802): n is a, c, g, or t
ttgtgcgaaatgagtactgagttttcgccatgcagattggtaaacctgaaaacccttgtttggtgtacatctcgatctgtttctcagcctggtttgagagcaaaagaattattcatgacaaagagaaaagtctggacaggtttctttatatttattgttactaatatctgaatttggttcgaatatttttggtttttgacttcatgatccacaaacagatcttaaccctgaactgaacaagtaaaagaccttatccgaatcaaacctgacgctacagtttcgaatcagtttttccttttgctcaaccctagaagctccttcactgtatctttttcttaaagaccaagcttttaaagggtttccgatgcctatttggtttcctacccgaaacgcaaagaagatggtatttccacaatattttcattttaagaattcccagtatacaaaatgtgtcatcaaaaagagacaagtagaaatgcaagaactccaaaacaaagtaatctaaattcaaacgatgatgtgcacaggatcaaagacattttgaaacggaatatattgattaaagatctataaagagtttacctgttcggtgtattcaacaccactggcaccgtatgacttagcaattgcctcaattttctctttaatgctaatatccaaaggatacaggtatttgagttgctgattcccactcgcacaagccctttgaactgcaactccaaggtcgacctgacaaaaacaacactaatctgnnactganngnntcaactcaactatatnnnncnnnntttnnnngnaaaanatacaaactc

SEQ ID NO: 192 - DNA, 457 bp, Gossypium hirsutum
  misc_feature (358)..(358): n is a, c, g, or t
  misc_feature (360)..(370): n is a, c, g, or t
  misc_feature (373)..(375): n is a, c, g, or t
  misc_feature (377)..(401): n is a, c, g, or t
  misc_feature (408)..(414): n is a, c, g, or t
  misc_feature (422)..(426): n is a, c, g, or t
  misc_feature (428)..(428): n is a, c, g, or t
  misc_feature (430)..(430): n is a, c, g, or t
  misc_feature (432)..(453): n is a, c, g, or t
ttctgtttgaaccaatatatctgtagagttgcttcatgggtgtaatggatctgagagcaaaggtggatcataaaaaaaaaaatcatcttcaatgcttcgaagtttttcatttcttttttcaacctattgtttcttttctttttaatttactgattagatttgtatttattattcagaaatcatggagtgaagatatgatgagtgagagcaacaagaagttttgtactgattgcaaaaccacaaaaacccctctttggagaggtggccctgctggccccaaggtattttttttatccttccattttcatctctctctcacacacatctttttgaagtttgggtttatttccttttttcntnnnnnnnnnnncannnannnnnnnnnnnnnnnnnnnnnnnnngcttctnnnnnnntttctcannnnntntntnnnnnnnnnnnnnnnnnnnnnncccc

SEQ ID NO: 193 - DNA, 555 bp, Gossypium hirsutum
  misc_feature (488)..(493): n is a, c, g, or t
tgggttcatggatctcatattgtttaacttttatgtttgtagttgtttaatgcttatgcatggttttatcttctaggaatggattttagcaaccaaggttgccacttctgatgaagtgggtattcgtgtttctggccggacaactattcgaccgtcttcacaattcaccaaaggtagtacttcatgtattggtgttgggtctgttgttgatgtctggtggcatgatggttggtgggaaggccttgttgttcaggagttggaagataaatttcgtgttcatttcccaggtttgtaaatggctttaaatcttaatgtacgatttttttatgctcatgaatggtggaatatatattgttgttttttcttccagatctgacataattgcctttgcaggagaaaagcgggaatcagtctttggtatcggtgatataagacaatctcaggaatggataggaaatcggtggataaatatgaaggaaaggcatgannnnnngagtaccatcatccaggccggaaagcaagaggcaagcaaatcctataattcaataccgacaa

SEQ ID NO: 194 - DNA, 810 bp, Gossypium hirsutum
ttccctaatttcttatctcttattctcctctctctcgtcgccatcgcctctgctgaagttttcttcgaagaacgcttcgaaggtaaactattttctttactcatttctctcggttttcgagtactaaattttttctgtcgtatctcaacctttagatcggcttgtttttttgtcatttggatctgttttttttagatgttttagctttctgtttgatctaatttgtacgaatcggggatttatatgttttcttttggcagtcggatttttttcatttgtttctttactcaaatacttaattacgtttagaagtgcaattaattcgagtagatcaactgatgatctgctttcctaattcagttctagataaaattagtgttagaaatgtagtttaattgcgataaaaaaatgacagtgaatgttacggtcactgacttttcagttttgatctgtaactgtagaggatggtagaaataatggtaattaatatattattatttgtcgttttgttattcattttattccttcattttatagtaattggctaattacgagtcaagtatgtcttttaaataaggggatgaaaacgttaacttgacaaaaataagtgatgaaaacgttaattttagaaatgtgagagggaaataactaaaagttatcctttttagctgcaaggatagaaaccatagcagagcagaaattgcatctatttacaaattgtgtactctttctaacattccttagattctgtactctttcgaacaaatgagtgagaacttatgaaaaggaagctacttttgctttaattga

SEQ ID NO: 195 - DNA, 374 bp, Gossypium hirsutum
attggacgatggcgttgttcttccgatgttctaattcagccgtctgatctatggcctatgtgggattcacaggttgttatgcttatgaaaggatgtgtaagatgtcagggcaaaagggccttaatattgattggaaggggctgagtcctgatctatctttgtcatccaagacctttgccatgacaggtgcgcttgcatggcaggtcacccaaacttaataaaaattttattttcttggtgtttttgaggggagttcgcacggggttgcccgggttctcccctctgctgtggtgtggtgtttcccgctcttttatttttttttctttctcttttctcgctttccactgtttttcctttgatactctgcaccattc

SEQ ID NO: 196 - DNA, 352 bp, Gossypium hirsutum
gccttcaattactgacaccaactctcatcatccattcctacaccatccctcagtcaccatcgcctccatcgttagattttatgtccttcagaactcactctgcatcctactcttcttggtcctctgggatggacgatatgctggggactgaaagtggagtttacatgatccatagtgcgttgaaaatgataacgatggatcataaagccaaaggtcctagtaaacaacgtaataagaggaagcaagggcgtccaagggtgggagaatatccacccccaattccattactagcaagaacggggaatttgccaagccacatgccttggattttagccagatattacagcaacgg

SEQ ID NO: 197 - DNA, 360 bp, Gossypium hirsutum
acatccgagccttggagtcccttttttagccttaagaccccctcgacagttcgattcctgcgaagaggaagggatctcgcggcgtgctttcaaggtaaggtctcctcttctttttggtttgatttcccttttttaaaaaaaaaacaaaagcgaatggctaaaaggaaacgatcagtcgaagaactcagaagaaactcgagaagaaatgaccttttaggattttaatcgcctttttgtattgcgtattgagccttttgtattctctcttaacgtaaacttttacaattgattctcttcaggctttatagccaagagaagaagagaaaaaaaaataaaatatacaatttttccatttttttc

SEQ ID NO: 198 - DNA, 590 bp, Gossypium hirsutum
gagtctctgtgtggtagacatgcgactgctacttgaaacctgtcggttttgcggaatgtcattgagttcactggatgaaccaggcctgcttgttactacagctttccttgaagtgctaccatatcgagaagaactgtatcttttatctgaatctgggtgctgaaaataccggactggagattagaatgtcggaaactgcagtcaaggaaaatggtaagatagtttctttgactggaagttaaagctcaccgtatgctttgacaaggttacaccctcagcagtcttgtgtctagaatgatcacgacgaggactaggacttgaaccatttctcttagaaaatgcttcaaccgcaccggagaatctatcccgaatctctcttcccactgaatgatttcatcaagaatgcatagaggttagtataaatcatgatagttaaagaatggccatcttctaaaccaaatagttgagcaacaaatgtctaagttccccagtaaaaaagtatgatcatacgacttaacgagaaatctagttcttttgaaacaaagcagacctgagattctttcgggtttttcaatggctgcttctgcagc

SEQ ID NO: 199 - DNA, 385 bp, Gossypium hirsutum
attcgagataacgagatgaatggacagcttctgaacttgattgttccaacagtgtactcgacttttctaatggtaatgaaaaggaggtccgagattttgtgacatttaactctcattcttcaaagaatatggattcatttcaggactcggttttttatttggacaaaagtgtaatggattgtgaattgcctgaattggtagtttgttataaagagagtacatatcatgttgtcaaggacatttgtattgatgagggagttccgacacaagacatgttcttgtttgaaagcagtgtggacgagaagagcgagtgcaacttttcgtatcccaaaaaggatcaagataatgaactaatgaaagaaatgtcagagactgatatgcccaa

SEQ ID NO: 200 - DNA, 400 bp, Gossypium hirsutum
tctcgtatagagactgagttttagcctcgagagatcgattccgagctttgatttttggcgaagaggaaatcgtccccaatggctcgttcgcgaaggtaagcccttcttttcttattctttgatctcttaacaaaacaatgaagataggcttaacgagaaaacgaatcaactcgtagaaaactaaagcaaaaaacctagaagaaaaaccaaagaaatcaccttttgttatttctttctattcaatatgtgaatcagctcttttttttgtgtgagtatattgccttttttagaaaaggagtttccccccgttacaaataaaagaaaaatggctttatagccgaaatcaaatgaaaaaatacaaagaaattccttgctattttttctttgctaccatttgctg

SEQ ID NO: 201 - DNA, 942 bp, Gossypium hirsutum
  misc_feature (209)..(209): n is a, c, g, or t
  misc_feature (212)..(219): n is a, c, g, or t
  misc_feature (330)..(332): n is a, c, g, or t
  misc_feature (334)..(334): n is a, c, g, or t
  misc_feature (344)..(344): n is a, c, g, or t
  misc_feature (467)..(467): n is a, c, g, or t
  misc_feature (594)..(594): n is a, c, g, or t
  misc_feature (625)..(625): n is a, c, g, or t
  misc_feature (851)..(853): n is a, c, g, or t
  misc_feature (923)..(926): n is a, c, g, or t
tattttcactcaaaagacattccttgcttgatagccgtgcaagcgatggtcgtattaggagtaactatgatgacatatcacgcatgttgaacaagttggattctcttaatgattatgatccagtaaacgtatttctgtcagctgctgcttctagtacttcagcttctgatgggcagaggtctttttttgacttggaagaagcacaggangtnnnnnnnncttcttttctgatggatgcatccctcttatccgattcttacgaggatttgctcggtatgttgttttatttgcagcctattattattattattattattattattattattnnnantattattaanacatctgtttaatatattattcagatatatccacttgctgggctatttgtctggcttgacagtcaatttgagctggactttgagataactttagtaatccgagtcaaccaattcagattatcnttttaaataataaattcttttatgtaaattaaaatttgaaaatatataattattagatacaaaaattttaatagtaaaacagtttttcagattacacttgaggaggccaatattttgtgtttagacnccatagatacctctcagctaagttaatcggncttggatatgagtattggacatggatgggcttcagaccctaaactctaaagctttttcatgaatttaaagtgatctaggagtcatatatcccttcccttggtacgtgttagatatgaatattttaaagaaaatgaagaagtacgaacaacttacccagcgtataataggattctttaaagggaatttttttcttttgtttatctattaattaccacatatctgccnnnatgtattattattattattttttgacaattattattattattattattatcattattattattaagaagnnnngtatgtttgtgcagct

SEQ ID NO: 202 - DNA, 325 bp, Gossypium hirsutum
aagaggaaggtggggctatccatttgtacatcatgacattggggttatccatttgccagcatattaccctagacttctgtgatgagttaaatggatttaactcaattgaataatgattaattcacttgttttaagtgttttttttttcattttatattttttatataaaaattatatatacttaaatcacaaaatgataactaaactatacttattttcccaaattgatatttaaacttttttgttgtcataagtggtacttaaactataccacttacccattttatctctgttgttaaagaaattcccttaaccaatcattttg

SEQ ID NO: 203 - DNA, 738 bp, Gossypium hirsutum
taaaatcaatgatgatagatttggaatatcacactgacaagtaatcttttaatacgttcatatgtttcaacatataccttcttgaaacactatgttggtggcttactggcatgttgacttttgtgctttgtcataaattagatatgagaattgagtgttttaggatcttttattcagtttatcttgagtattatttgtattttgttgtctcgctatggctttattgcatgctgatttcgaggctcatatttgagtcgtatgcatgactactcttgaccatagatttttgtttctttattttattattgtttcttacatatgttatttatgatgttattttttctgcttactttttatgtaggagttattataagtgcacaaatgctggttgtcctgttagaaaacacgttgagagggcatctcatgatccgaaagctgttataaccacatacgagggaaaacacaatcacgatgtgccaactgcaaaaactggtagtcatgatacagcaggagcagtagcaatgtgtgggccatcaaggattagatcagaagaaaatgatgccattagccttgatcttggtgttgggatcagttccgttcccgaacatgcttcaaatgagcatcaacaattgcattctgaactggtccaaagccggccacgggctggtggttcaagtttcaaatttgttcaaccaactatgatggcatattacggtgctctaaatggcagcatgaatc

SEQ ID NO: 204 - DNA, 1100 bp, Gossypium hirsutum
  misc_feature (56)..(60): n is a, c, g, or t
  misc_feature (622)..(622): n is a, c, g, or t
  misc_feature (625)..(625): n is a, c, g, or t
  misc_feature (628)..(628): n is a, c, g, or t
  misc_feature (652)..(652): n is a, c, g, or t
  misc_feature (660)..(660): n is a, c, g, or t
  misc_feature (663)..(664): n is a, c, g, or t
  misc_feature (668)..(668): n is a, c, g, or t
  misc_feature (1085)..(1085): n is a, c, g, or t
tgcctggcttccaatttaactacacttgatttgtcttacacctttttgacgaattnnnnnccagtttttgagtcttgtttgcagctcaaggtaactttaaaatccttgatatataagcattgattaaccgtacaacacattggtttattcatgttaagttcattgtactccacaatatagggttgggaaaaaaaactgaaaaaacaatttgaatcatagtgtttggttcagttttattaaatttgatccaatttcagttcgttttattaaatttgatttttataatataaaaataaattttattttattttatttatattttttatttatattttatttatagtttttgtataatatagaaataaatattttatacataaattagtgaaaataacttaagaagtatataggaattttttagaaaaattttaaaaactgatgaaccaaactggtccaaataattggaattcggttccttttttaagaaccagaatactacaaggcaacggcaatccttttccaaacccatttgaactgtgaactattatcgcccctaccacaatatgtgtgtcatattggtttgtgctcttagggattttgttttttgatctaaattttaatnccnttntatttacttagggggggagttttntcccatancanncatngggttgtttttttttttattagtaaagctggtttcaattttcccggaaaaaaaaagatgcgagcaagtttaagaaaattttcacattcttgtaaattgtctcaatcaagcttccagtgttttcatgatttactgctatgttctttggctcacttttcctttattgtaggtgttaaaattacaagcatgcaagtatctggcggactcatcattggagcccctttacaaggaaggtgctttacgagaactccgggatttggacttgtcatatggtaccctgtgccagtctgccatagaggagcttcttgcttattgcacgcatcttacccatgtgagcttgaatggatgcataaatatgcatgacctaaattggggttctactggtggtggatttgaatcacttaacggatctagcagnttcctttgagaacag

SEQ ID NO: 205 - DNA, 484 bp, Gossypium hirsutum
ctgataatgcatggcaatatctaagaatatctttaaggtatcatcctgaagtagagaatatgtcttctaatcatgcgaactagttccacttacgtatcttccatttttcgttttcattgttgcagctgtgtctcgcggaatgatatggtggaagcttgtgattccaggaatcttgagcttttacagaaggagtttcctctatgaatagaatatgatttcgaatttttaagtaggatgggtatcatgactaactgaaacaggggcaaaatgttactgtcaaaaatcaattcaaaaagctgtagatgctgatgtacccctgacaggttgcagctagggccatgctggtagatggtatctggggggaacgaataatgttttgtatattttatttatgtctcaacgccatgaagcatgtaattttgttaaacggggtatgggatggttgatagcgaaagataatgtttgttaggtgagaggaaagcaa

SEQ ID NO: 206 - DNA, 661 bp, Gossypium hirsutum
agtacaatgtagctaaggatgatgaaatcttgcaaacgaggaacaaagatcaaaatcaatcaactatagcaacaaatacttctcataagatagttaacatctctgtcaatgtaaatacctggaaaccacctcattatcaagagccaagggaggtttcagaactggacagccgaaaacctcttccagagagtgaagcagttgctaacaaagctaatcataggttgatggagaatggcaacccagttaatgttggtaatggaaatgtaggattttctaacctatattatttcctctctcttattctttgcactggggctgttgaaatttacttttgttgttaattttaggtaaaaggtgctgcttacaaccaagaactgtctcagaaagcagtgcagccttcttctggtgagttgtcttctattgttaggattgattatttggatattgcatgtgttggataaggaattcccttgtgtactgcaacctatatcttttttgttttttaattgctgtgctaaagaactttattctgttctgttggatttttttccttgcattaaacttttttatttaaattgctactttcattttgcagcttcttatgctgctgctcgtcctctacaggacgctgattctcgaaccatctttgtaagcaatgatg

SEQ ID NO: 207 - DNA, 394 bp, Gossypium hirsutum
atgatatcttttgcgcggtccttcaattgtatgacaccattagggtgaatgacaccaaggtccttggtcctataccatccatctttaaatgcttcttctgttgcttttggatctttaaggtaccctaacatcaatgtgttccctttaaacatgacttctccgatcgtcttcccgtcatgacgtacgcttgccatcgtttccggttccttcacgtcgacattttcgaccacaatgttatcctttttatgttcattggttgatctccatggcttaacaatagcaggaccaagtacttcggtcattccatatgcatggctaacagtatatcccaatccttcaactttcatcactcgggacatcggtaacacgccggcaacgataagtcgaaccttaa

SEQ ID NO: 208 - DNA, 499 bp, Gossypium hirsutum
  misc_feature (81)..(83): n is a, c, g, or t
ctggcgcacgatgagcggcgtaaagctgtccagcaccgccaagaagttcgccacgaaggatttgcgcgccgttattgaagnnnttgtctctgtgatccaagagctaccgaggctgctttgatatgcaccaacacaaccgcttcaataacggcgcgcaaatccttcgtggcgaacttcttggcggtgctggacagctttacgccgctcatcgtgcgccagaggtacgccgtcgttgtcaaaggaagcggtgacaccagagtgtacggctttggcgagtgcatgaaagaccttgagcaaggagactgtaacatctgctttgctcagtgcaaagcgcagatcatgagatgtctcccctttcagataggcacgcgtggaggcaggcttttctacgatggttgttatttaaggtacgatgattataacttctttgacgaaagtttgagtgaaacagaccgaactgtttgtgctacaaaggatgttggcttgagtaacgagacag

SEQ ID NO: 209 - DNA, 871 bp, Gossypium hirsutum
ggtgatggggatgcagacacaaagaaaaggatggaggtaattcaagatgaactgaaagagaaggaagaagaactggaagacttggaagatcttaatcaagctcttatcatcaaggaacgcaaaagcaatgatgagttgcaagatgcccgaaaagagctaatcactgtaagtatatgttatattccccttttttcttttcttagaaaacgtgtataaaagctaaccactggcatgttatattacttgagatacgacctttcacatacatgtctgtgtctaacagtgacgttcaagcctctcgtaatataacttgcatgcaatacttaatttcaaaaataatagtaatgttgaacatcaaaaaatttctgagtttgtgttttgaagcgatggaaaaagggttagctatttaatatttattgtcctttaaaacattctgaattttggttttgtcttttttgtttcagtcactttaaaacacgacaagttaatttttaacgttcaatctcactatagtgtgtaaaattttaccttttttgcttcaaaatcacttttatagtaatggaattagtttagttagatgaagaacttacatgcatcaacttgcctttgcatattttgaagaaagatagaagcttaacaagtgctttctatatatatatatatacggtgtccatgaattttgcaagagatttttgtgttacttgatttttgtttcacaggcatttaaagatgtttccaccagagctcatattggtgtcaagaaaatgggagaagtggacattaaacccttcttagttgctgccaaaagaaaatactcagctaaagaagctgatgtgaaatcagcagagctatgtacactgtggcaagacta

SEQ ID NO: 210 - DNA, 1261 bp, Gossypium hirsutum
atcatcattttcattttgttcatatataaattcttttatggctgctctttactcaacttcctcttgcttttgtggtagtttgggttcttacccagttcataaatcagtaaaattgggtcatggcaaggttagagattctgggttttattttcctcatcgttttcagtgtgctactcctaaattacatgtccaaggtactttttaactttcatttaggatagctgaaatggctttttctaaattcaaatttgtttttatatcacatgattagctttgtttctagggttattttgagtaattgtgagttttatttttgtagttgttgtagtagtttatgggatcattcaggaaaacgtattcaatttctctcttcttaattttaagtatgatttaaggaaaagaaaaaagctaattagctaattatagaactgcggaaagcgtggattatggatttttaaacttaattaattaaaaaaagtaaatgattttaaatagttgtttaattatctaaaaagttggagcacaaggattttcaaatttagttgcttaccttattttattgatcatataaagagtactgtttaaaaaatggattaatagtattaagcaattgatagcatcatatatagagtaaattttgatttagagaaaaaaaaaacccggaaatctgcatatatacatatatagtgtcatttgattagtggagtggaggataagtttgagtgatgcaaagataattaggagttttttattttaatgatagaaacggatgatttttaacagaaaggattaatttgctctttgatctaatgtatagggactaattttcccagtttttaaagtaaagggagcaaaatataacctgactcccagtacaagagcctccatggtacttttacatgatgccatttgattagttgagtgatgcaaagataattaggagtagattttgttgctttaaatgtagagggattattatttgatacattgccgttagagtaaaagctacacgaatgttaagtaatgctccattgctaacattatagttttctagtttttacctgcggattgtaattattgtggtgtataattttcattatgttgtttatttgtttcagcaaaagccctttctgttgatgggttacctgaaataatggattcttcacttgtggtttgtttcggggaaatgctgatagattttgtcccgacgatcagtggtctttctttggcagaagcccctgcattaagaaggcccctgggg

SEQ ID NO: 211 - DNA, 508 bp, Gossypium hirsutum
  misc_feature (420)..(420): n is a, c, g, or t
  misc_feature (427)..(427): n is a, c, g, or t
  misc_feature (467)..(467): n is a, c, g, or t
tggagtttcaagtacatcaccatcattactcgcaacccttttctgattagccacgaattcaatcccaacagaacctttatccccaacagctgtttcaaatctaaacctggaatcaaccccagttctaattcctgcccgaccaatcccaccccagtgttcctcatcaaccctggacataagcaatacagctccgagaaaatcaacttcccctctcaaaacggtacttgattcttggaatgggttccccttggatgatttgtaaaatgaaaataaacgttccactttgtcttgtctgtctcggagtttcatcaagtctgaaaatgattctctttgtagccgcttcaagatttcaatctttaaaccaacaaaaaaaaacaaaacaaaataggctaaaatcagtagaagaaaacagaggaaaanaaaaaanaaagagtaaaaaaaaaagggagggggggggaatttatcanacagaattgggggaaaataaaaattccgggcctgaaaaaaa

SEQ ID NO: 212 - DNA, 1295 bp, Gossypium hirsutum
  misc_feature (709)..(718): n is a, c, g, or t
  misc_feature (730)..(737): n is a, c, g, or t
  misc_feature (740)..(745): n is a, c, g, or t
  misc_feature (750)..(761): n is a, c, g, or t
  misc_feature (763)..(765): n is a, c, g, or t
  misc_feature (767)..(768): n is a, c, g, or t
  misc_feature (775)..(781): n is a, c, g, or t
  misc_feature (783)..(788): n is a, c, g, or t
  misc_feature (793)..(798): n is a, c, g, or t
  misc_feature (800)..(801): n is a, c, g, or t
  misc_feature (803)..(809): n is a, c, g, or t
  misc_feature (814)..(816): n is a, c, g, or t
  misc_feature (825)..(830): n is a, c, g, or t
  misc_feature (837)..(837): n is a, c, g, or t
  misc_feature (839)..(842): n is a, c, g, or t
  misc_feature (844)..(846): n is a, c, g, or t
  misc_feature (855)..(875): n is a, c, g, or t
  misc_feature (883)..(888): n is a, c, g, or t
  misc_feature (893)..(898): n is a, c, g, or t
  misc_feature (904)..(907): n is a, c, g, or t
  misc_feature (913)..(914): n is a, c, g, or t
  misc_feature (916)..(930): n is a, c, g, or t
  misc_feature (932)..(947): n is a, c, g, or t
  misc_feature (949)..(949): n is a, c, g, or t
  misc_feature (960)..(965): n is a, c, g, or t
  misc_feature (968)..(968): n is a, c, g, or t
  misc_feature (970)..(972): n is a, c, g, or t
  misc_feature (974)..(974): n is a, c, g, or t
  misc_feature (980)..(980): n is a, c, g, or t
  misc_feature (982)..(986): n is a, c, g, or t
  misc_feature (988)..(993): n is a, c, g, or t
  misc_feature (998)..(1005): n is a, c, g, or t
  misc_feature (1010)..(1011): n is a, c, g, or t
  misc_feature (1022)..(1022): n is a, c, g, or t
  misc_feature (1025)..(1026): n is a, c, g, or t
  misc_feature (1028)..(1028): n is a, c, g, or t
  misc_feature (1033)..(1037): n is a, c, g, or t
  misc_feature (1045)..(1047): n is a, c, g, or t
  misc_feature (1061)..(1063): n is a, c, g, or t
  misc_feature (1068)..(1069): n is a, c, g, or t
  misc_feature (1071)..(1077): n is a, c, g, or t
  misc_feature (1079)..(1080): n is a, c, g, or t
  misc_feature (1083)..(1088): n is a, c, g, or t
  misc_feature (1100)..(1107): n is a, c, g, or t
  misc_feature (1126)..(1138): n is a, c, g, or t
  misc_feature (1142)..(1144): n is a, c, g, or t
  misc_feature (1146)..(1146): n is a, c, g, or t
  misc_feature (1156)..(1159): n is a, c, g, or t
  misc_feature (1161)..(1161): n is a, c, g, or t
  misc_feature (1168)..(1170): n is a, c, g, or t
  misc_feature (1172)..(1172): n is a, c, g, or t
  misc_feature (1174)..(1178): n is a, c, g, or t
  misc_feature (1185)..(1189): n is a, c, g, or t
  misc_feature (1196)..(1203): n is a, c, g, or t
  misc_feature (1206)..(1206): n is a, c, g, or t
  misc_feature (1210)..(1217): n is a, c, g, or t
  misc_feature (1220)..(1228): n is a, c, g, or t
  misc_feature (1232)..(1234): n is a, c, g, or t
  misc_feature (1239)..(1243): n is a, c, g, or t
  misc_feature (1255)..(1265): n is a, c, g, or t
  misc_feature (1279)..(1281): n is a, c, g, or t
  misc_feature (1283)..(1289): n is a, c, g, or t
  misc_feature (1291)..(1291): n is a, c, g, or t
aaacaatatgacatgtaaataagcacttaaaaagtaatgtcatggatagaattctgcatcatatgaaaaaagaaactaaatgcacaattgtagaagtcatactggctgtggccctctgtttattgcttactaaaatgagcaaaaagcatcatgaaaaaggagcttaaaatttctataactatgtatagaaattatatgcaaccataccatggattcttcatctccttcaccaaatcgaagggccaggtcacaaagagcttgtgttgtggactctacagtcattggctcgccatatgagaatctgtggttctgtgtgaccgtagaagatatcagcataaagttgcaaaaaaatttcacatcaaagagtaggaaataacaactacggtacctgagtctcaactcgtgcatgttcaacaagtgtacgggcatcagcaatcaagccactcatagcacatcctatatgttcatcaatttccataatcttctcaacactgctgggctcctgaaagagagtccagtacttatgaggctgggaagaagttgcaataatctacatcccacaaaatctactatatgcaacacatgctacgtgctggacatcaagtgtcatttttaagaagaatgtagcttcaattgtaagtcttaagtaaagatgtggcaggtgaaggaatcttagggagaatcaagcagcatacagagaagaaaaaannnnnnnnnnactaattggaannnnnnnntgnnnnnncttannnnnnnnnnnncnnnannaaaaccnnnnnnntnnnnnnacaannnnnnanngnnnnnnnaaaannnccccccttnnnnnnccaaatntnnnntnnnggggtttgnnnnnnnnnnnnnnnnnnnnngcttgtgnnnnnnaaaannnnnnccaaannnnaaaaanncnnnnnnnnnnnnnnnannnnnnnnnnnnnnnncntttccccaagnnnnnnccncnnntnaaaaantnnnnnannnnnnttttnnnnnnnnaattnnaaaaaattaanaannanggggnnnnnaaaaaccnnntttttaaaaaaaannntctcnnannnnnnngnntannnnnnaaaaaaaaaaannnnnnnnagggggaaaaaaaaccttnnnnnnnnnnnnnaacnnncncctttttttnnnntntaacccnnntngnnnnnaaccccnnnnngtttttnnnnnnnnaanaccnnnnnnnnaannnnnnnnncccnnnaaaannnnnaaaaaaaaaaannnnnnnnnnnaaaaaaaaaaaaannngnnnnnnntntttt

SEQ ID NO: 213 - DNA, 901 bp, Gossypium hirsutum
gctgcagaggttcataacctctcggagagggtcagtatttaattggtattatagtacatggtcttctgcttctatataattgcatccttttagatgcctgatatctcatccatgtgcagagacgcagagataggataaatgaaaagatgagggctttgcaagaacttattcctcgttgcaacaaggtttgtcatgtgtatggttttattgaggatatttcccccaatttggatatttttctctctatgattattaacaattttcattcatatttttgagtctcagtcagacaaagcttcaatgttggatgaagcaatcgagtacctaaagtcacttcagttacaggttcaggtatgtctttgcttatggttaatgagagatgtatgagattatgtaatagcactgagcccttaatcaacaatcttttacccaccttattatgaaagtttgtgtagctgttaagcacagggacttttgccattttagtgaaaaaaagataataagatttcacgaaacaccgccaaggtcaagaggcaagacctctattttgggacattgtttttagtcactagatgtatatgagtagataaattttgaattttcaagctttttgtgttctttcttttccttataatttaacactaagaaatgtagttggggttgttctaaaaaagaaagtgcttttgcattatttattgacagttttagattttaatgttctgcagatgatgtccatgggttgtggcatgctcccaatgatgtttcctcagcattacatgccaacaatggggatgggaattgggatgggcatggtcatggatatgggattaagtcggccaatgatgccatttcacaatgttatggctggatcaggtttaccaacaccagctgctcagctcat

SEQ ID NO: 214 - DNA, 514 bp, Gossypium hirsutum
ctccagtattgttagccagcatgatgctaccctcctccatttctggcataaggtttgctttcttaacctcacctctattttatatcatgtaatttatattcagattcatttttcgtagttccgtaacgctccggaaggctctcccaaaaagactgaagctcacaagcaattgatggatgaactttccctaaggaaacacattgatgaaagtgtaaatcagataatatcagtcgtttttgggcaagaaaaagttccagagatgctcaacactgttcaatctgcggggaaccctcttgttcatgattgggattgcttcaaaatgctggtaagtatagcaatttcataatgaacaagtgcagctgggaaccatactgatgcttgtttgataatgttgcaggttaatagttttaaaaaacagtgtggaagcacatcaaggtatgaaatgaaatacagtagagcttttgcaaatatgtgcaatgctggggttcatatcaaccatgctaccctagcaata

SEQ ID NO: 215 - DNA, 1415 bp, Gossypium hirsutum
  misc_feature (57)..(57): n is a, c, g, or t
  misc_feature (61)..(63): n is a, c, g, or t
  misc_feature (1395)..(1397): n is a, c, g, or t
tttttgtacaatcgagcctaatgaagcccgagttaatgcccctaatgagcgattcgnatgnnnttgccagttgttcaagcccaaaagtgaggtgtgatctgttttctgctttgttctgattgtctttgcatgtaattagcattaattgcacttaagccgctatgtttttactatatccatataagtcctgaaccttcagtgtttactataattagccattcatttgaaatgaaggcttgtttaggtgcaattcaagtgtaggggcttactcaagtgaaatcgtttaggggtttttttagtgtgttaaccatttttaatctacaaggtagattgtacacttattattatttttttagcttgtttcctcttaaaactttgagatgttcgatgcaacaggttccagctttcctagaaattcatgatatagctggaccggttagaggtgctcatgagtcatgaagggcaaggataacttcttgtctcacattcctgcagttgatggcatttttcatgttttacgtaagatacctagtcttttgagctggaaatatctctattttatgtttttctattaaaaatgggaacttttgcttaatatgcagcgtaaggttttaagtctatcattatcttgttgtatataaattttgcatgtacgacagagggcttgttaaaagttatcaaaaggtttatgttggtactgttttgaggttatctaaaaccaattttgatttgacagtttttacttctgtggtttttttgtaagaactctttggaatcttatttttccactcaatcttataggtgcatttgaagattcaaacatcttccatgtcgatgactctgtggatcctgtaagggatttaaagactattagtgcagagttaaggttaaaggtttgttcttgaattcttatgttcttgcaataggtatttggaactttgatttctataatacaattcaaatagtctgctttttcatttggagttggaagattaagtaacgcatttaataagcttgaaaatgaaatttgaattaaaaagattaatacatgtagacatgtatgttcgtgcacttgttgtctgcacgtggctttgtttggatttttttgtattcctaatatttgtcatctccttattcattaatatatttatgttggtttttaatatttgaagaaatttagctatatacatatttgaaatttaaattgtggccccatttaaaagatttcactcggtattctattttcagcttgttacacttggaatcctgctattaattcattatgaatttccttttcgctttgataatatttttttattctacttttacttcaacattgaagaacctaacaggacctttctgattacttattctaatttcattttctctaggatnnngaatttatgaaaggaaga

SEQ ID NO: 216 - DNA, 508 bp, Gossypium hirsutum
ttttacagagccctcatagctgagttcatagccactctcctcttcctctatgtcactgttgctaccgtaattggtcacaagaaacaacaagatgcatgtgatggtgttggtctcttgggtattgcatgggctttcggtggcatgatctttatcattgtttactgcactgccggtatctcaggtaacaccgacaccgacgccaacaccacaccaaaacaaaaccccataccctaaaaactaaattacccttttgtttgctttaagtgttttggttgttttggttacaggtggacacattaaccctgcggtgacttttgggttgtttttggcccgtaaagtatctctcatcagggctgtggcttacatggtgtcacagtgcttgggtgctatatgtggagttgggttggttaaagctttcatgaagcatccatacaactcccttggcggtggtgcaaacacggtggcttctggctacaacaacggaactgctttgggagctgagattatt

SEQ ID NO: 217 - DNA, 735 bp, Gossypium hirsutum
aagctgcagctacttcttctgccgggcccatgatcaagatcgacgtcgcttatggttcggcccagcataaactctttgtcccctcccattccactgtcggtaatttcttgtcctttgtacctttctttaccgcctaaacttttttgggtaattattggttccatgcatgcgcgtcgtgttaaattgttactgtgggcgttaattggagctattttcgtcgttaaaggatgatgagtaaatgaagaaacgaaaatggatgaaggataattaggtgttacatcttctttttgtttatgcatttcatatgggtcttggatcttccagttgtaaactttcttctggtattattctattttgatttcatttattatgttctgaaatggattattgtgctgcttgatatatcgctgttatgaactgtaaattattatgttgattgaaagtgatatgtgttgttttcatggggtaattataggggaattgaagaaacaaattgctgaagaaacgggtttggaacctgataaacaaagggtattatttaggggtaaagagaaagaagatgatgtgcatttgagctctgctggtatgaaggataaatcgaagattttggttttagaaaatccaacaggcaaagtgaaaaaggtcgaggaaatggcgaatgttgaagagaaggttgaagaatcgatagctagaaaagaaagtaaggttgaagagattaaggaaactgaagagatg

SEQ ID NO: 218 - DNA, 716 bp, Gossypium hirsutum
cattgttgacctttcatccctcacaatgaagagtactaccttaacatcgtctccgagcgtcttggttgtagcattagcttttcagagtgtggaggaattgaaattgaagagaactgggacaaggtactgtaacctaaactagaattcttcatcacttgatctttatttcttgtattcttacagagttaccttaatacaggtaaaaaccatatttatcccaactgattcatctttcgcctcagaaactattgctccacttgttgcaacccttcccttggaggtaatttttcctaatacttaattgcttttgtgtgctcttcctgcatcttgattgtagtttcacaagtatttttggtcattaatttccaatgtcagattttccatttcataacttgcgcacattccttccttgtccaacagacaactctagatggatttaccaaatacatctgaatatatatatatatatatgcatgctgcaaaatccgctctgaatctttgaaaaattgtatgttctttaattataggtcaaaggagaaattgagcagttcatcaaagtgatctttactctatttcaaggtatgccatatatcggttttgaatctagtactattcatatcaacatttggagcttaacattaactctttcatgtttcaaaatgccaaaatgttagatcttgactttactttccttgagataaaccctttcacattga

SEQ ID NO: 219 - DNA, 1081 bp, Gossypium hirsutum
  misc_feature (1022)..(1026): n is a, c, g, or t
tagattcattttatgcctactgttttgtttcgtttttctctacttattgacattttgtgatggataattgttatcgagttataccagaaatactggctattgttgttaatgaacctatgttactaggaactcaggcacgtgtcagatacatgtacatgtttgacatggggatatgtttttgcctcgtgtccaaaaatgtccaatatggacactttaaaaatgatgaaaagttgggtttgtttcccgttttctttgacaatgattcaagtatcttttatcgtgatgaaagggagaagcaactcgttttccatcgatttcctttagattgtaatctatttcagtgtgtaataacaaatggaaattgtgtggtttgtttcaggattcataccggtggagaactcctacgagccgattcacagtccggtgatgctttgctgaagcaactgtggaaccattcagatgcgataatgtgctgttcattgaaaacaaatgtaataaaaattctcctttaaaaacgatattcttaagttgtattctttgtttttacctggctatcaaaagctcttgaaatgccttgtttttgggaaacaaacacaatccacggaattatattgcaggcttctccagttttcacctttgcaaaccaggctgggcttgatatgctagaaactacattggtagcccttcaagacataatgctggacaagattctcgacgaagccggccgaaagagcctatgctccgagttctcaaagatcatgcaacaggtaaaaattattccaaacagattgagctttgacattgaatttctctcgaaaagaaaacctgagtataaccagctggtccctaaaacactgccttacctccttttcattggttttatgtaaatataacctatgttactcagactcgggtgcatattttttgttcaagatttccatatattcggtacctctaaatctgcaatatttgcaggggtttgcacatctaccagcagggatatgtgtatcgagtatgggaannnnnagtgtcctatgagcaggtgattgtgtggaaggtgtcgagacgacaacgatgagct

SEQ ID NO: 220 - DNA, 760 bp, Gossypium hirsutum
tcccagaaactatttaacatttttctgccttgggaaccgagaggttaagaagagtggagaatatgaaccttctgaaagaccagaccctgatacagattatgccagagctcaggaggcccgtcgtttcatgatctatgttcatgcaaaaatgatgattggtaggtgatgaataccttttttaaatttaattcacacacctcacttgcttctgttattgaatattagctttgaatttggcggcccggggggatctggtaggtccttgaaccactagtgggacagagacattgaagttgacattttctttttttgaaattatacaagcctttgcagaatatatccaccatatggttgggtcatgaggaaaatttcctttgaagtaaggtggtataaggaggagcaatggtcatggtgctgtaaataatgaaaattaacaggctttttcattcgaattgttttgaacactgagctccccttcagttcttttttatgtttctctttagtacctacatctcatataactttggttggctttcttcagttgatgatgaatacataataattgggtctgccaacatcaaccagcgatccatggatggtgctagagactctgaaatagccatgggagcctatcaaccatatcatttatcattaagggaaccagcacgaggtcaggtccatggtttccgtttgtcactgtggtatgagcaccttggcatgcttgatgacacattcctcgcaccagaaagtgaagagtgtg

SEQ ID NO: 221 - DNA, 463 bp, Gossypium hirsutum
atgctcctgccgcactcccatccacagctggtagtcagccacctggcttgaatgttgcagagttggtggttggacgtggctttggctcagtgataagacatagggattttgaggaaagatcaaactattatgatgcccttttggcagctgaattacgtgcgatttctgggaagaaaggaatccattctgccaaggatcctccagtcacgcacatacaagacctcacaatggttggcaattgtatctctttatgttattcattttcttgtttgtatattgtatttcgaatctaaattctaatatccatatactgtcttccctactctcaggcaccagccaagaaagctagagatttcttgcatttcctgcttcacaagaggataccagctattgtggaatatgtcctaagcggtcatcgttttaagttgttgatccctaaggaaacttgtagcattgccttctc

SEQ ID NO: 222 - DNA, 375 bp, Gossypium hirsutum
caaggttataggaacaatattatgtgtggctggagcatcagttataacactatacaaaggtccaaccatctacagcccagttccaccgctgaatagacccacaccaacgtttgtttcgttgggggatgcaaatgggaagagctggacccttggttgtctctatctaatcggccattgcttatcctggtccggttggctggtgttgcaggcacccgtgttgaagaagtaccctgctagactctctgttacttcctatacatgtttctttggtcttattcagttcctcatcattgcgctagtttttgagagagaccctcaagcttggatgttccactccggcggtgaactattcactattctctaccgggagtggta

SEQ ID NO: 223 - DNA, 703 bp, Gossypium hirsutum
ctcgccgcaagatccacctactgatttttcgactcaacccgccggtaccctttttccccctccctccattctcgtttttgtgtatcttgaactcaagggtcgtttccgtttattacgtattgttaattggatgagtccgttgaggatctaggtttagttgaatcttagcaaatggaaatttggatttacaatagtagttaaattttgcatttggtaaagctttggacttgcttctcataagcccccatcaaatgtcctccattgatgtcatcaagttactagaatactgaaggactgtctgaaacgaaattaataaaaatggttttcttgatggattcatgttcttgtgattgattacttttggggttttttttggcatgcagtttctcctgatgtcgacgatgaagcctccggtcctttgtcgctcaaacatcaccctgtttctgatgctgatcagggtcagaccagtgcttataatggtggaattgatgaaggatcagcatccagcggacgggatagaagcattgagccttcaaatggttctgcttttgatacaagtggtgaaccgaattcatttctggtttcatcaaatgatcgaagttcaccaatttccacgtcagggacagtacagggttcagaaacatctgctcggaaacataacttcttcacccctaaacaaataagttctgccattgatggatct

SEQ ID NO: 224 - DNA, 546 bp, Gossypium hirsutum
agaaaagaacttcaatctgtaatatcacagcttgaagaacaattgaaaaacgaaaaagaaaatgaagaatctctaaaatcagagattaacaatctcaaggctgagattgcggagagttccttactgcaaactcatgtcaaaaaacttgaagaacagttggtgacggttgaagctcaattgaaagaagaggtgcactatagtctgttaataaagaaggatactgatctttgacaagttttctaataattcggtttcttgctcgtaggttgaaagtgttaagacagccgcctctgtaagagaagctgaattaacttcgaaattagaggatcatgcacaaaagattagtgatagagatgttatcaatgaacaagtggttcaacttcaacgagaattacaacttgctgaaacaacgatcactcaacaggttcgacatttataaaaaagaatagacatttttttcgatcattttgccatatgatgaattgatgaataacaccaagttccaaaatcaacttttgtcaacagaaggatgcagattctcagaaa

SEQ ID NO: 225 - DNA, 542 bp, Gossypium hirsutum
  misc_feature (16)..(17): n is a, c, g, or t
  misc_feature (321)..(321): n is a, c, g, or t
  misc_feature (323)..(323): n is a, c, g, or t
tatagccatctattcnngtgagtgccaaatgaatacgtcttactgttttcgtgtatcttcttttacttgtgatgtctcattcatctcaccattttcatttgtcaggcattaatacatgggctaaacagacattactactccatagccattaactaccggaagaatgaactggaggaaaagatgctgttgaatcttcacaagaagaagtggacagatggactgacacttagacgtttcgatactcattccaaaactaatgagcagactgttcaggtgattgaatagactttatcatccaagctatgctgttgcatgtatgtntntgtgtatatatattgatgtcccccatggaagcgaggtatcttccataaagtgatgatgttgtgttggtttattttgatatgtgcaggaaatgctgaatttagctataaaatacaataaggcagtgcaggaggaagatgaattacctcctgagaagctggcgatcgcaaatgtcggcagacaagatgccaagaagcacttagaggaacatgtctcgaact

SEQ ID NO: 226 - DNA, 372 bp, Gossypium hirsutum
tgaaaagaaagattcattttctcaagggaaaaaaatgtcaatttttttttgaaaataattagtcttttaaaaacgtctatttgcccttcttaattggcattgagcttgcctcatatgaagcttttttgagctaatttgttgatgatataaccagaaggttagttaatcttttcttttccttcttttttttcgtttttaaaatttttctatctttgtagtttggattattttatttaggaatttagatattatttatcataaattttaatattatttaattgtcataaagataaattttatttattttaatatttaaatttgttattttatttctggattaggtagttttggttgctgttagctcactaggag

SEQ ID NO: 227 - DNA, 360 bp, Gossypium hirsutum
aaattcctacatggttttctgttgcaggttatgtaacaattgctaccatctccaccatagttcttccattcatctttcccgaactcaaatggtattacgtattggtcatttacatctttgctccaacattggctttttgcaacgcatatggaactggattgaccgattggtcccttgcttcgacctatggtaagctagcaatctttacgatcggagcttgggctggtccgaatggtggtgtccttgcaggtctcatagcatgtggtgtaatgatgaacattgtttcaacagcttctgacctaatgcaggattttaagaccggttacttgacccttgcttctcctaggtccatgtttgtta

SEQ ID NO: 228 - DNA, 317 bp, Gossypium hirsutum
tttcactaagcttctgcaaagttcagaaagtgttgatatttttctcaaatcaggatgcttacatacatcaagttcataatgcttcaactcatatgggagacgttctttctcttgttgagaaaaatcttctggatagaacttgttcacaagaatgcaaattttatcaatatcaaataacttgaaaaactccttgggatctaaagctgtagtaagagtgagaagctcgacaacattttcgttaaacctgctcttcaattcttgcaactgagtatctattgtagcaaaaaatatatccactcgataataatgctccacgg

SEQ ID NO: 229 - DNA, 383 bp, Gossypium hirsutum
gtgggttttctgatgctcaaaccatttctaaagatgcaaaagaacgtgcagcctctatgcggaaattgttaacagcagtagtgctgtgcattgtctttatgagtgttgaagtagccggaggaattaaagccaacagtcttgcaatcttaactgatgcagctcatctcttgtcagatgttgcagcatttgcaatttccttgttctctctctgggcatcagggtgggaggcaactcctcgtcaaacatatggattcttcaggattgaaattcttggtgcccttgtttccatccagatgatatggcttctagctggcatccttgtttatgaagccatagctagacttatccatgatacaggggaagttcaaggctttctcatgtta

SEQ ID NO: 230 - DNA, 397 bp, Gossypium hirsutum
atcttcaatctttttgtcgctgttcctatacttatttcccttctagttggtgaaaagctcatctattctgggtcacttcttgtttataccactaatctttctgtattaagacagtgtttcaaagtcttggttttatcacctgcgtgggagaattttggatcctacaagggtccttcttggtttggttctaattgagggattaagttatgatgcagccaagggtagtggctatggaggaaggtaaagaacccatttctgcaaacaaaacgaacctcttcagggctttgccttccagactccttgtgttttgtttgttgtttctgggtgtgggcgtcggattatcgatcatcagtatgtattcagtgcgattttctatggtccagcagctagcaactaa

SEQ ID NO: 231 - DNA, 393 bp, Gossypium hirsutum
cgaagaatgccattcctaacgtagttaatctccgtaatcacgttgtagaaaaatctcatgaagcaactttacacacacaagacttggaagattctatcaccacggtgagatcgatgaaggaatgcggtttcccaattgcagacgagatgattaaggacattaagagttccttaatgttaatgtcctcaaaacaaccgaagagaggattgatccacagtcctgcttcaagctttcagatgggaagaactagctcttcgggaccaatgtcttggaatcctgctgggaacatccagtttgatgggagtaattatttttcgactgtaatcaagtccgcaaaacaaaaagcaagcaattttaagtggccacaacttgataccaggaacagatggtagc

SEQ ID NO: 232 - DNA, 512 bp, Gossypium hirsutum
catactaaaggttagctgcatacaatttagattttgttggtgatactagtttttgttgtttagataagtaagaaactaatttcaagactttgtttaagtggttctaggatggatgatccagaattagaatgggaaatccaagaatcatcaactgggtatagtgagaatggcaaactaagttggttgatgagattgggaaggaaaatatttgtcactggaattgttatatcatctgcaccacttgtcttccctccaattatggctatttctgctattgggttcgtctgttcggtcccttatggagtcttattagtaagctatgtttgcactaagactttaatgagtaggttacttccaatgccttcgcgatctgccccattattgttggaatatggaaaagcatgtaatggagaaggagaaggagaaggagaaggagaaggagaaggagaaggagaaggagaaggagaaggagaaggagaaggagaaggagaaggagaaggagaaggagaagg

SEQ ID NO: 233 - DNA, 459 bp, Gossypium hirsutum
tttggttccaatggcgagaaaatgccagttttagggttcggaacggcagtcttcccacccgtaggagctgaagctacaaaaatggcaattctccaatcaatcaaacttggttataggcattttgatacggctgccaagtacgggtcagagcagccattgggtgaagcaattcaagaagcactttcgattggattaatccaatcccgagacgagctcttcatcactactaagctatggtgcggcgatgctcatggagaccttgttgtccctgccctcaagagaagcttacagtaaaaacaattacatatgaatgatcggtctcattctcatataatcaatcatgtaaatttttcttgtctaagacattattgattggctgcagaaatctcaagttggagtacctggatctctttctgattcactggcctgtcagctgtaaacccgggacttatgaatttc

SEQ ID NO: 234 - DNA, 549 bp, Gossypium hirsutum
caaatctatcatcatctcttgacattcccatcattgatctttctaagctcatgaaaacagacaaagatgaagttatgcagctcaaaactgcctgtgaagaatggggatttttccaggtactgaaacagtcagattgtctttattttgttttaagtatggaagctaatgactgattgcatttcaggtactgaaccatgggattgatctgaatgttgttgaagacatcgaaaaagtagccgaggatttcttcatgttacctttacaggagaaacaaaagtatccaatggctccagggacagttcagggctatggtcaagcttttgtgttctcagagaaccaaaagttggattggtgcaatatgtttgctcttggtgttgagccaccttgtataaggaacccaaaactctggccatcaaaaccagttaacttcaggtaatcacaaataacactaaatatgaaccttgaagtatacagatgtaactctcttttttgtttttcagagaaactttagaaatttattcaagagaagtgaggaaactttgcaagaca

SEQ ID NO: 235 - DNA, 384 bp, Gossypium hirsutum
ttgtgctagacctccttcagacattactgatacgcccgagtcacccgattccacacccgaatcacctgattccacacccgaggcacctgatgatgactattcacctaatgcaccagatgaagcagcagacggttatgcacctccacctgaagcaccaaccccatctgcaacctttacaatattgcccggcggtagttaccctgagctcgatcaaatttgtggagcaaccgactaccccatcgaatgcgtaagattcatttctccgtacttgaacgacagtatcaaaatcgacccactcaacgtccttaaagtcgggattcacgtaccgactaacatgaccatagaagccctcaatctcgctatagaagccctcaatctcgctat

SEQ ID NO: 236 - DNA, 370 bp, Gossypium hirsutum
tcattgtcaatgctttgaaccaaagacgctttagggatgcacttcttatggttaggcggcacaggattgattttaatgtgattgttgattattgtgggttgcaagtgtttattcaattagcttccgagtttgtcaagcaggtcaaaaatttgagttacataactgactttgtttgtgctattaaacatgaaaatgtgacggagaaactttacaaaaagtttctctctccacctagctgcaaggagcaaaaggatctgttaactaatgatttcaagggttctgatgctagtttagatgcaaataacaaggtctcattggtgcttctggccataagaagggcacttgatgaacaagtacctgaaagtcctgc

SEQ ID NO: 237 - DNA, 1284 bp, Gossypium hirsutum
  misc_feature (55)..(56): n is a, c, g, or t
  misc_feature (1226)..(1228): n is a, c, g, or t
  misc_feature (1279)..(1281): n is a, c, g, or t
ggatactccggagttgaagttagagttactcctatgcgtactgagatcatcatcnnagctactcgtactcaaaatgttcttggtaattaattcacccaattttttctaggtgtcgatcataccttttctgccgtgattgtattgttgattttaatcttttaattctcacttgatgtttgatgattttatgtcaggtgagaagggtagaaggattagagagttgacttctgttgttcagaaacgattcaagtttccagagaacagtgtggaactctatgctgagaaagttaacaacaggggtctttgcgccattgcacaggccgaatccctgcgatacaagctccttggaggccttgctgttcggaggtaaattaaagaaaacttatgtcgtgtcttggttttacataaagttttataagatttgggtttgctttggggcttgggcatgaaaatatgttttccagcttatgttggtgcaggtgtcctattagtctaatgtcatctttacagcaagttggtaacttacaaacaatactctctcgtgtctgaggatgactatattttttattccatctagatttcttaggtcaaggaaaagatacattcatattcttgcaacaccaatctagatggtagatttcatcgaatatatttcttatatttttttgtatgtagcaacaattctctttgcacgggcattgatgcattactattatttagccccccatctgttgcatgaaagcctgggggggtgtgatcagatgcccaaataaaatatttcaatggagtttgtcaggcttcttgtgttcagtttaaggtgcttggagtttggaatatcctccaacatgttttacatttctatttgcttgaacaatgtatgctggtcttgtgagatttagtttacttctgcaagctaattgtcttttctttatttttcctcatctagatgtagagaagttaattgtagtatttttgtttacctaactcttaaggatgttctcatgctagcattttaagtctttgtttttctaaatgaaatgaatgccagcattcatttataccccttgaaaaacaaacaaaagtctaagtagggttttttgttctttctggactgtggatagggcttgctatggtgttctcagatttgtcatggagagtggagccaagggatgcgaggtaaatccagtagcttttgtcctccttgattctaactggctgcacccagnnntttagacatcatagttatatttctgggatatgaactcaggtcatagtgagnnnaaa

SEQ ID NO: 238 - DNA, 599 bp, Gossypium hirsutum
  misc_feature (16)..(16): n is a, c, g, or t
aatcggctatctgacntaagtaagacactaatatttctcagtccatgaaacttattcttatatctatccaaataaacatctcggagcatagatcagattaaacatgcttaaaagtggaacgaaaaggcattcacagagaatctgaagcaagcaaatataatatatttatatatatataaaaaaaaaactttaccctttatgaccacgacaaatacttttaaccacttcctttactcctctcttcaagcatttgggctcagcagctacagcaataaaaaaaaatacattggttaaatatttacacgccaccaaaaaattccattattaaagctttgggttttccttatcatggctaaaataccaaaaagagatctaaattattccaatttcacaagtaagtcattatatgtcttccgatttattcttaataaattcttacttcaagtgaaaaaacgttctatgctaaaagcttattgggatattaaggttaaaattcaaacttttttttgtcaaattattgcaccatcaaaagtaaaaatccccaaaagtgattttgaaaaaaaaaaaaggttgaaagggaataaatgaaaaaaaaaaaa

SEQ ID NO: 239 - DNA, 522 bp, Gossypium hirsutum
aggctactcaccccgatgctctcaaggctgctttggctgagttcatctcaaccttgatcttcgttttcgctggatcgggctcaggaatggcctttaacaagttgactgacaacggagcaaccaccccggctggtctcgtagccgccgctctagctcatggcttcggtcttttcgtcgctgtctccgttggcgccaacatctcaggtggccacgtcaaccctgccgtcaccttcggtgcttttgttggcgggaacatcactctcttgcgcggcattctttactggatcgcccaactcctaggctcaaccgtcgcttgcctgttgcttaagttcgctaccggcgacctggtaacatcaccatttccctccaaactactccgttacaaaatcagttatttccgttattgcacagtgtcttattttatttattaatttggcgggttttgttacggtgcttcgcaggctgtacccgcttttgggttgtcatcaggtgtgggcgtgtctaacgcattggttctcgaaa

SEQ ID NO: 240 - DNA, 724 bp, Gossypium hirsutum
  misc_feature (40)..(40): n is a, c, g, or t
  misc_feature (66)..(66): n is a, c, g, or t
  misc_feature (136)..(136): n is a, c, g, or t
  misc_feature (305)..(306): n is a, c, g, or t
  misc_feature (433)..(433): n is a, c, g, or t
ggaaatcgttttgataacttaaaaaaatcttaaacttcanaatgtttttttgttgaaatatttggntgtagataaagttggtaaaccctaaatatcttgatttactataggttggagctgatattgttaaaagagntttgagttaccctctaaaattgatgattatatttttcttgatataggtggtcagatgttgcttggagcatgcaacatcagtggccaagacagtcttgatgtccgattgtgtggttgtggaaataaaggaacccgagcccgtgcctgctgggaaccccatggatgattannaatggaacacttttttgttctttatattttgcatgctaatatgttgggttcgttgattatgtcaggatacggctactaaagcagatgttgaagggaaaccaaataaggtatcaaatctccaccgtancaacgatgagcctgtttagagatgtccctactttacaattttagtctcaagtgtttttaaagctagtggtactcaaataaaattagtatatccatgaattgtaagaatattcggtagaaaggaagcctagggggaattgagggaaaggatttgtgttcaaatcctagtttttgatgattacatttttcttaatataggtggtcagatgttgcttggagcatgctgcatcagtggccaagacattcttgatgtccgattgtgtggttgtggaaataaaggaacccgagaccg

SEQ ID NO: 241 - DNA, 750 bp, Gossypium hirsutum
  misc_feature (58)..(61): n is a, c, g, or t
tgactggtatgtgcgcgcagacactcaaacactcatagcaaaatgttttttcatggtnnnnttatttgtgcatacacttaaagagcttttggtctcaagaatataaggtattgaacagttgattgtaatgataatctgcaaaatagaaagtttaatttttcttgtaaaatcttttatgctatatcttcgcccggacaatcctttcgcagctgtgatgtctatgcatatatatattttttcttttcttggtaatggaattaatcttgtctttaatttctaagtgatactgtttcattagatgatttcatatgatttgtttattcatgcagattacaccgatggtggatctcaatatccaaaactagaactcccagggactgattacatgccgttggctcgtgaggttaatttattctcttgtagttttggctgttcaacaggttcttccttcataccgtcagcattatagctaacatttagtttaaatgtctactttaggatggtcgggaaaattcatctaaggatttaagtcccaatatacccaaattatccgcaaatgggagttctgctaactccaatggatcatcagctgctgtcacatcacggggttctttttcctctggtcagcttctagctcagagaaaactatttgcagaatctacgattggaaggtccagcttccataagcttcttgagccaagttcagctctacgtcctggaattgctccttatcgaattgttcttggagat

SEQ ID NO: 242 - DNA, 598 bp, Gossypium hirsutum
ctaacttgatttctaatatccttagtaatacctagtttagggtttagggacaagacattctcaggaaacaggttaaattcattatttgtaattacccaaaaattatctactgtaatcttgaaaacgccaatgttggtcttccataatctagattgcaagaagccagttgttgcggctattgaaggattggctcttggtggtggcttagaattggcaatggtttgtattttctgctgaggaacactggtgattcacttcttttgtagccactttgattgtcaaaatcatagctgaattctttcattctattccaacctcatacagggttgccatgctcgtattgctgctccaaaaactcaattagggttgccagagttgacacttggggtgattcctggactcggaggtatggctgctttcttatgtggaacttcaaacatagctttgttcttctggtgaaatagtgctttcgttgaggtgaggtttacaaacattgacttgttctgtaatatggttgttttttaaggtactcaaagtcttccaaggcttgttggggtatcaaaggctattgaaatgatgctggtaagactgttatggg

SEQ ID NO: 243 - DNA, 798 bp, Gossypium hirsutum
tatgtcaagaataacatatttgatgacactaattctttcagatatctgatcataattgagtcccctacgccaaaacttcctaaaacatctcaagaatatggaatacacgtatagaccctgccagggtttaaacaactaacttgatttctaatatccttagtaatacctagtttagggtttagcgacaagacattctcaggaaacaggttaaattcattatttgtaattacccaaaaattatctactgtaatcttgaaaacgccaatgttggtcttccataatctagattgcaagaagccagttgttgcggctattgaaggattggctcttggtggtggcttagaattggcaatggtttgtattttctgctgaggaacactggtgattcacttcttttgtagccactttgattgtcaaaatcatagctgaattctttcattctattccaacctcatacagggttgccatgctcgtattgctgctccaaaaactcaattagggttgccagagttgacacttggggtgattcctggactcggaggtatggctgctttcttatgtggaacttcaaacatagctttgttcttctggtgaaatagtgctttcgttgaggtgaggtttacaaacattgacttgttctgtaatatggttgttttttaaggtactcaaagtcttccaaggcttgttggggtatcaaaggctattgaaatgatgctggtaagactgttatgggtagagcagagacatatcatagtggttgaccatcatattaaaatatgtggtcttgattccttaatt

SEQ ID NO: 244 - DNA, 400 bp, Gossypium hirsutum
tatgcaggagcactgagcatttatatactctgcttgtgagcatagtcatatagctatttgtttctttaacttttaacacaatttggcatcagttctagaacctaatagccagtccttttagtatcatttgcgaagcacatttggattaaaggcatacacatatgtgcaagctttttatcagccctgataaatgtataagttgctctaaaggcaccatgaccttgtatggcttgaggtgtaaatagaaaagtgcaaatctaagtgaagaaaggtgcatattcctataaaaatctaataaagacgtggcaaaaggtaaaggaaatgcataaccaatataacttatgggtgttaaagcagttgactcccgtcacttggccgagctcaagtggtattgataaaa

SEQ ID NO: 245 - DNA, 669 bp, Gossypium hirsutum
atatcatacggatggttatgttcttggcccagaacttactgttgcatttgctgaggaaaacaggaagaagccttcaaaaatgagggaaagagaacgcagaaggtaagcatgggttcttttgtgatgcatgcccatattttgcgcactatttcttttcccaaattagctcctgttcagttgatattcctgtgttgtaaagcatagaaggatttaggaagacgagatttctatttgtcaaggttttctgattataaagttgttaattggaaaatgttaattctgattataaatatatatctgcatgatattaacaacaggagtcggacagataggcactccccgcttcattattctcaatcaccgtgataggactgaagtttctcctgcagtccagattattattgtccttctaggaaaaggcattactcaaggtaagctgttcactgttgttgttttaatcatttatggattgtgaatggttatattaatgctgccttctgatatttttaggttaatttcacccagagatgggagatatagagggtgatcctactcaaggtcgccttatagtaggagcaggtgtcaaagtctggactattctaggtgactaatttggtggtggatggattaatatgtgtatttctcaggagatatgtttctacgtaagtg

SEQ ID NO: 246 - DNA, 603 bp, Gossypium hirsutum
attttttccttttgtcattgacctttgtttagggtttctgttttctttttcattattttgttagtctgtatcaatcaactggaaacttgacttttggatgtgcatcagatggaaaagtccgatgcctacagaaaaggctttggttcaagcaagaaatgggatgatggtccaggaggacctggaagtggaccatatggtggaggtggtggcccacgacgaccaccacggggaatggacaatgttcggggaattgaccatagtacgtcatttgcccccttttttatctgttgtttgtcacagctttcctctttctttcgtttctttccttttgatttgtccattaaaagatttttctttctgctgctatatttcaggttcccttcctgcctgtggctcctgctgcggtggctaaatgctgcaagcatacatcttgtgcatgtacactgttatatagctaaagtcctcttattataagtaaggatgttccacatgtttttaatgtcaatagattgcctgtgaaacaggcaactttgaacctctataaaaccagagatgcttttatgtactttcaaacttttgctaatggtgggctgatactgctct

SEQ ID NO: 247 - DNA, 367 bp, Gossypium hirsutum
ttgcttaatggcaaagatcagcatcgtgacattgcaagcatagctttgaagacaatcatttctgaaatctctactccatctcttgcacaatctgttttaatttctctgtctcctcaactaataagaggaataactggcggggcaagtttctgaacacagcttgtcaatgctttgtgatttatatcttcaattaatttcacaatgaaagtgtttcttttgaagtactgttttagtttcttatttcagttaagttccaatgtgaaagtttaattccacaaagatttatggacaataatatttgcttgttaaatttctcaaatatacttcttttacagtttcatcatgctaatcatatacagggccttga

SEQ ID NO: 248 - DNA, 389 bp, Gossypium hirsutum
aatcttaattcttctgtcattcgtccttccaagcctcgccggttccatcagttgactcgctcctttatccgttgcgtttatcacaatgactccgttcaattccctaatggagtcggtttaaaccgcgctgattggcagagctcttgcgctattctttctagcaaggtcttttcgcaagatcaaggttccggtgacaaatccactgctccttccaactcggaccaccttgctgccgccgtcaatggtcataaaacttccatagatcttaaccttgtccctattgaaacaaacaacaagcctcaaccacctacacagaaacccttaaccatcaccgacctctcccctgctccgatgcacggctctcagttgcgcgtggcttaccaaggagt

SEQ ID NO: 249 - DNA, 386 bp, Gossypium hirsutum
attgttagtgattgattgattgatagtatatgttagagtttatatagaaaagaaaacgacgatttgatggaaatttagtgacagccaattatcatcaaaagtgcgaagccctaatagttttttttaagtcaatggattctgcaacgaacccgaatatcatcaagaaggatccagtaccagttacagtttcagcaccatcgtccacgggtatccagcaaggagttggtgagtcgccgtcgtcttctacttccccagcagcaccgagtcggtacgagtcacaaaagcgtcgagactggaacacgttcttgcagtacttgaagaaccataagccgccattgactctggctcgttgcagcggcgcacacgtgatcgagttcttgaaatac

SEQ ID NO: 250 - DNA, 921 bp, Gossypium hirsutum
  misc_feature (868)..(872): n is a, c, g, or t
gctgccgcaggcagctttctcctaaggaagccgacatccaaatgatgttggccgccgaagtccatctcggtaccaaaaactgtgacttccaaatggagcgttacgtcttcaagcgtcgcaatgacggtaaattttccccttttttccttttcctttatctacttaattgttgggtttttttttcctgcagaagcttaaaatttcccctttttgatgttgtttgttttatctgattagtatagtatgtatatttatagagatctgagatctgttgaatgcgttgcttttagtattttcatgttctcaattcatatgttaaaatatcttatatatttacagaatatatctttcacctgcaaatttatctagcttttctgatgaaatttagcttgtcacgtttcgtgctccgtagaataatatgcacaattgattggaacacgaggttattgatgataacgtagctttttatttggcttttgtgtatttagactatttgttgcttatataaatagtaatttgttcattatatgccggtgttcctagtagtttatttttgctattgatgatacgatggttcagattaattgacttcagagaaggatcttaataacaccttgaattatcttaaatctatttggttataagctaaaagttatgtaagtatgttttaatctgtttttaacgattaaattatctcttttttttgtcattgataggaatctacatcatcaaccttggcaagacctgggagaaacttcaacttgctgctcgtgttattgttgccatcgagaaccctcaggacatcattgtccaatctgcaaggccatatggtcagagagctgtactgaagtttgcacaatacactggnnnnntgcaattgctggaaggcacactcctggtaccttcactaaccagctccta

SEQ ID NO: 251 - DNA, 332 bp, Gossypium hirsutum
  misc_feature (318)..(318): n is a, c, g, or t
  misc_feature (326)..(328): n is a, c, g, or t
ctgggagttgtataatccccatttgaacttcgatttcaacgaagcaaacaaggactcgaaggcgttcttccaaaaaaaaagaaaagataagtccgtttccttcttatattttgcgtgaaagatttatgtgccggaacaaaaaaaaacaaatcgaaacatggagaaataaatctgaaatcaccttaatttttgattgcttctttgtattcagtgtgtaatgtgttttttgtgaaaagatcccatttacattcgatttcattggctttttataaccgaataaaaagaataataataaaagtacaagaaaatttcccttanatctattnnntatc

SEQ ID NO: 252 - DNA, 398 bp, Gossypium hirsutum
tttcttgtattttgctatttctttctttctttttaatattgatgaatagcaaaagggaaaacaaaactagaggttgggtatatgaatctatcgattctcctaacatgagaatctccgccaagtacaccataaaaaacttaacgggagattgagtgtttatatgtgggtgaaggatgaagcccttgtgttgtttgttttggccattgtgctaatatagtagcttacctggtgatttctaatttctttaggtggagatatccctttagctgctaccttgataaaagggttcttgagaatccctgtcttttatgtattattctttgaattttaaaatccctttccacagtgtccaccagctttggaagagaatgagtctttaacacctcatcgtggatcag

SEQ ID NO: 253 - DNA, 1400 bp, Gossypium hirsutum
atctttttatcagagttacttaatgtcaaccccccagacaaattcttcaatccctaaaaccccatttccagtttggacccctaaaaaccttaatctctcccgacccttctcggactcttctcctgattttttcaaaccatccttcatggaaaccgaaccggtgccgggtaaattttattcttcattttgtctttgtcagagtttttttctctgaacatcgaaaaagaagaggtttttttttaaaatacacataaattttggttctttaatttcagttccagagaatgttgtccccgttaagtcagaagaagagtttgatgctgcacttagcaaagctaaagacgaatctgtgccggctgttttctatttcactgctacatggtgtgctccatgtaagtttttctaaccttttctttctagtttctgatatcaaaggcactggctgtgtttcactatatttgttctgttccatctatatgtaggccgattcattggtcctgtcatggacgagttggctcggagaactcctgaagtaacagtttataagatggatatcgatgaggtctaaatgatttttttattgaatttattaccttcataatttactggttgtggtatatatatatttaataaaggaactttaaaccagaatggtaatgtattgtcaggtctagatttaggtatttcttccataggttttgaattgcaaatatctccattgaagggtccagtatgtattatttatgaaccattcattttgaattgccttcttggtggtaaagtgaatctatttattatgatttgtacaaggatttgttatggaaaggcaataaacttagtatggttctatttaggtataatgtttgctgcattcgtgtttgagatggaactgtttgataatacaagggcatattatgtagagtttgtcgttaagctttctttggaataagttattactatcttttcaagtcattttatttgttcatgtaagttctgcaaaactgtacctgagaaagctttcaaatgtttattacattcattcttattgatttaatgttttcttgctatgtcgagccatttcttatttttgtttcatgaagtacatgttttggacacctatgcttgcctcagactaattcatgggtacttggataagatgctttaagaaccatccaaaatccaaatacatggaaaaacttagaaagaaatgaacatacctgtgccatacatatatctgtgtccaaaactcatctgagtatgagtaacagttttattgggctttattaattttaaatagaagctaaacacttacctcctttaacttttgcatttcagaaacactttctgacaatatgttacgggaattaatgtgtcaacatgtgcaggaaggcctgcaagaa

SEQ ID NO: 254 - DNA, 508 bp, Gossypium hirsutum
ttagtgtgaagtacggttggtttccgatcactggcgaggcggcagcggtggaaagagtctctaggaaagcgattaggccttgccctcctcctatgaacgggaacaataattgtgcttctggtgatatcgtagaggtgttcgatgacttatcctggaaaccggcggtgattgttaaggttcttggtggaaacaacttttccgttaggattcttgggtcgagtagcgaactcaaagcgcatcaatctcgattgcgtattcggcagtcttgggaagatggcaattggttcctcgttggaaaggtaaatcctttcgattctttttctaaacgataattttaatatttctcttcattttttttgttatacgttaactgattcttaccttaattattattttctacttcagggttcatcaaattccactgggccgcagaaaaggaaaagatcttcgcttggcttctcatatattggtgcgcaaaagaagagggtgttggaggaaggtaggaatg

SEQ ID NO: 255 - DNA, 491 bp, Gossypium hirsutum
ctttacctcctcggcttcgctgccgccgccaaccctgaagagaagttcatcgttgaaggccgagtttactgcgacacttgccgtgttgaatttgagaccaaaatcagcaaaccaattaagggtgcgtatacaatcaaaattactctctactttttcttttctaacaatctttttattataatggaggctttgggttgcacttattttgcaggcgcatcagtgaaattagaatgccggaacattaccaacgagaaaatcgtgtcgcacagccaagacgtagttaccgacgaagccggaggatacaagatcgaggtgaaaggtgatcacgaagatgagatctgtgaagtgagcctggtgaagagtccaagggctgattgcaatgaacctactgaagtatggaggaaagccagggtggtcttgacaaaggcagatggtgtcagtgggatttatcgattcgccaacaatcttgggtacatgaaaaacgaaactct

SEQ ID NO: 256 - DNA, 610 bp, Gossypium hirsutum
gccatgcagcttcatactctgtatggtaaactaaaggtcgatttttaatatcaaccaatatgctacgattctcctgtttatttagtaatggatgaaatagaaggaatggaaaattttttgcccttatttttgatttttctattggatttatctgatagaaaaatgaaattgcaaaagacggatttgttaggcactactttgggtgtatttctgctatcgagtctctccctccgtgtgtgtccttttttacagaataaaaagaaggctttatagcctcgactactacaatttttggaaagaaatctttgatttctttccgtatttgcttcgcatgtctgctgtgattttctttccttttcttgcaggtacttgcaaaaaaatccggcaatagcaaaggcttgacgatggtccactggtggcgttgatctcagcgtgagttggggcctagaatcatggccttgatggggtagcaggagttgaagagtcatgaggcttggcttctggaaccttctgtttgcggcgcgaagagaaagagggcagaaaccctagggtttcttgcctgggtctgcagatgtttgggccaattgggcctctggaaattttgggtttg

SEQ ID NO: 257 - DNA, 373 bp, Gossypium hirsutum
ttccttcaatgctggacccgactccaccgagtcgtactcgctcgacgagatcgtataccggagcctttcgggcggactgctcgacgttcaacatgacattgaggctttgaagaagttcgacggcgcgtattggagggagttgttcgattcacgcgtggggaaaaccacgtggccgtacggatcaggagtatggtccaaaaaggaatgggttttacccgagatagacccgaacgacatcgtttcggctttcgaagggaactccaatctgttctgggccgaacgttacgggaaacagttcttggggatgaacgatttgtgggttaaacactgtggaatcagccacaccggtagtttcaaggatttgggaatgaag

SEQ ID NO: 258 - DNA, 140 bp, Gossypium hirsutum
catcgaaagcattaacatatggttttgatcaaacactatcacagcctacattgattatgctatccaccacggaccttcctactcatcatcttcctcctgcattaaaataagaaacaattcattaagtcaaacaatagcaa

SEQ ID NO: 259 - DNA, 370 bp, Gossypium hirsutum
catcaaaactattgtggtcctagtgatggagaatcgctcgttcgatcacatgctaggatggatgaagaaaatcaaccctgaaatcaacggtgttgatggaactgaatggaaccctttgtctaccactgatcctaactccaaaaagttgttcttccagaaccaagctcagttcgtggatccagatcctggtcactctttccaagccataagggagcagattttcggctctaatgacacctccaccaatcctcctcccatgaatggcttcgcccaacaagcttactccatggacccatctaccactatgtctcagaacgtcatgaatggatttgaccctgaaatggtccccgtttacaagtctcttgtctca

SEQ ID NO: 260 - DNA, 1179 bp, Gossypium hirsutum
  misc_feature (65)..(65): n is a, c, g, or t
  misc_feature (870)..(870): n is a, c, g, or t
aatgtagttatgttgaaattgttagttttcattttcttctttgtaagataatagttcagacttantgcccttgcagtacaattttgttggccgaattttgggaccacggggaaactccctaaagagagttgaagccttgacagagtgtagggtgtacataagaggcaagggttcagtcaaggattctgtaaaggtgaagttagtcatgaattctttttaatttccagcaagtaattttggtagaagagtgtagtttgatatgcaccataggtcaagtcttaagctacttctagcttggtcatttatacaagttctgattataatggaactgtgaaagtgttttgtactttctcgtgaaaattggagtgtagctggttcttgggctagttttaggagcatgtttttcatattttttccctcccaatggcattttaaattgtatgtgatgtgaaatttgctcatgtaacttcatttatgctagtaatctgcttctccatttgcatatgacatgctttgcagccaatttcggtatgatgtttatttgggtttttttttgggcttttttctgtttgtctcttgtttatagttaatgtgtattttatgcttttcacttttcgactacaagaagcaaaaagcaaaagcatcatcgaaatggcaacttagtcttttgcatttttggacaagtgactattgtggatcaatcaatgcagtgatcacctttactacataaagtaactccttaaatacaatagtgcatgagctagttctgacagtttctgcttaagtataagatcaagttttccttggttgtttggccacttatccattcctacttcctttaaattctcacaactggtggctggctttttntacaggaagagaaactgaaagataaacctggatacgaacaccttaatgagccactgcatgtgttggtggaggctgaatttcccgaggatatggtaaattctcgtctggagtatgctgttgcgatactagaaaatcttctgaagccagtggtatgaatgagcaaaagcaatttgtgatatcttctatggatagctaaccctaccattccatttctgtttttgtgctcacccttctccattccaccatttccaggatgaatccttggatagctataagaaacagcagcttagggagttagctttgctaaat

SEQ ID NO: 261 - DNA, 580 bp, Gossypium hirsutum
gggtttttccacttctgatacagaagagccaggtgctgcacccgacccctttaacggagcaaagagcataagggaactatatgagcttgcaagtacgaactatactgggaagtacacagtccctgtaagttcataaagtattaaaagcgcctcccacctctcattctgtttttcctttacatttccatgttcaagttctttcaatttattttgtgctttctgttatattataggtcctatgggacaagaagttcaacactattgttagtaacgagagtgctgagataatccgcatgcttaataccgaattcaacgatatagctgagaatcctgctgtggacctatatcctccacatttgagagccgaaattgacaagacgaatgagtggatatacagcggaatcaataacggtgtttacaaatgcgggtttgctagaaaacaagagccttatgatgaggtattttcatgtggttgttatcttcagttcaatgcgagacttgtcggtctctacattcttgaaagagttatattcttctctaaagcatgtattatataagtagaccatcgcggtgtaaaaca

SEQ ID NO: 262 - DNA, 355 bp, Gossypium hirsutum
ctaaaaatggcaatgtctgctgccaggaagcttgctgggttcaaatcaaaacacacaaaaaccaaaacttagcgtaaacaatctaatcgtaaggcactactcctattgttagcgttgcattaactgattcaccatcttgtaacaaattttggttcaagcaatgctcatggattccactctagcgttgtccttatggggtatcgtcatcttcctgagtgtcatcttcactgagatgcttaagaacaactcttggtttcttaggttctgatacgccttctggtttattgtcatcacctttcctttttacactttcctcctcttgcccgtcatgctcagccacagtagcttcatcatt

SEQ ID NO: 263 - DNA, 413 bp, Gossypium hirsutum
  misc_feature (394)..(403): n is a, c, g, or t
acacaacaggaagggagttagcacaaaatattcaaagacactgggcaggatttgaaggtttcaaaaacttgaaaaagaataaaagtataaacagaagccaaagaacacagaaagtcataccgagaacgagaatttattttgatgcagtgtttgacagtagaaccttcatatcagcgacaagtttagtaggatgggatctgaggggaaacttaatggcgttaaagacggttatccatagaaatatcccctctccttttgcagcagaagcatatgcatgcctagaaggtgcaaaattaggtagctcacttagagcatgtttggttgagtgtattggattagccactacacccctaatccatggccccactgattaccctgtttggttggttagcannnnnnnnnnctgcctaggc

SEQ ID NO: 264 - DNA, 365 bp, Gossypium hirsutum
aaagaccaaactttaaacactcatcaagctgagttctttaaccccaagcttccacccagaatcctttcctcttccaaaaagttcgaaggctcatcggacattgtcgacctccgttaccacatgggtcccgtcctttcctcgtcgccaatcaatatctacctcatttggtacggtcgttggtctgtttcccaaaaactcctcatcaaagacttcataaactcaatttccccttccgcgacgccgtcgtttccgccgtctccttccgtttccgactggtggaaaaccgtctctctttacactgaccagactggagccaacgtttcgcggaccgtcgtcattgctaaagaacactccgatacgggtta

SEQ ID NO: 265 - DNA, 901 bp, Gossypium hirsutum
ctgaatacatggtttgtatgcttacatgcttatttgctttcgtatttttagcttttttgctcgatcttttagatttaatctcgagtagaaaaagaatcctctgagaggatcgatgatttgatttatttttcctgatctgaatcgaacactttctcactttccaaagtgagcatgatttatgaaaatgcaatgataacagatctgttgaaatgtagatctagtagagatttatgaaaatgatctgttttatttgtttttagtttgaaaacccgaatataattgtttttgctgtttacgttaattattgatgtgattttgtaattttatgtgtgtagacgtacatgtttaagtacgacagtgttcacggtcaatggaagcatcatgagcttaaggtgaaggactcaaagacccttctctttggtgaaaagcctgtcacagttttcggtatcaggtagtattttgttctcttttgaagatcttatagactttttgaggatcatagagagtttaattatgtaatgagtttttcttgattgattggctctgtgttgatgttagaaaccctgaggaaatcccatgggctgaggctggagctgagtatgttgttgagtctactggtgtttttactgacaaggacaaggctgctgctcacttgaaggtttgtgataataatttcagcttatggtcatatgagaagaaaattttatcagaattaacttgccatttttttaagaggcattaaaaatttaatttttggaacctaatttgattttcttgtatggattatgtttttttgcttttcagggtggcgcgaagaaggttatcatttctgctcccagtaaggatgctcccatgtttgttgtgggtgtcaatgagaaggaatataagcctgaccttaaca

SEQ ID NO: 266 - DNA, 315 bp, Gossypium hirsutum
tgacttccttttcctgccccttattccccttctatcgccgttgctcaaaacctctcccctcaatctaccgcttccatcccttcttttgatcattcactctgccgctccttcgctgccacccacggcttaggcgttcgcgccatcgccatcgaagtcgacgacgccgaaaccgctttcaccaccagtgtcacacacggcgcgttacccttttcccctcctaccccactcggcgacgtcgccaccatcgccgaagtcaaactctatggcgacgtcgttttgcgttacgtcagttacaccaccaccataaactccgac

SEQ ID NO: 267 - DNA, 588 bp, Gossypium hirsutum
  misc_feature (24)..(24): n is a, c, g, or t
ccttttttttcttttttagagagnattgtgtaggcacttatgtgtgtgctgatgagcagagtttctacgttctcataggtgatcaatgcatatgaatttgagcggcatgctggttgcaaaacaaagcatccaaataatcacatatactttgaaaatgggaaaaccatttatgggattgtccaaaagcttaaaagcacacctcaaaatatgttgttcgatgttattcaaacaataaccggctcgcctattaaccaaaagtgcttccggatttggaaaggggatgtaagctattgaacttgatttgcttttccttttaattctacctatcttgactgacaaatttaatcagaaggaaatgcttcttttactagtgcactttattgagaaaaaaaaaaaggtcaggtctattcggcaagtcgggttgattttggatcgaatctttctggattggatcaattcaaaatttaaaatgtcagggtcatttttgttaagtcaatttcaaattgggttcgagtcatttttggggggggttggatgggttcatgttgttgactttttatggtcaaatcgggtttgggattggttttg

SEQ ID NO: 268 - DNA, 358 bp, Gossypium hirsutum
ggctggttaaaatccctcactttcgccactattacaagaacttcatacaatgattccaccacccctttactttacacgctgcctcatgatgttgtgcctttcatggagttcgatcattcccagttttccactaatctacatcttggaattcctcttttagccactcatcttccttattccttcttacccagatctataattgattctggttgtaaaattatttacatttgcagggaccccaaagatacatttgtttcattgtatcatttcattgcagggcactgcaaatccaaaaatgctcaacccattcaacttgatgaagcgttcgaattgttttatgaaggtgtaagcccgtttg

SEQ ID NO: 269 - DNA, 388 bp, Gossypium hirsutum
tgtttctttgactgcacatataatacaacttacataatgtattaataattttgcctctattggttatcagatgaaattaactttgcatgttgcatattaccatgccatctgaagttaatatctttatcttttgttctttttccaggtcttcaccttagagtattctctaatatgcaaaatttcagattacaagaagctttatagagcattctctattttgggtatagtttttagttatagtatgtatttagtatttaaagataaagatatacactgattctataggtaaaagtaggtttctcaacttcccaataaaaaagagacagtttatggagcattggacaaatgggtagcttgggagactgagtttccattgattgcagctgta

SEQ ID NO: 270 - DNA, 1371 bp, Gossypium hirsutum
  misc_feature (57)..(58): n is a, c, g, or t
  misc_feature (69)..(70): n is a, c, g, or t
  misc_feature (72)..(72): n is a, c, g, or t
gttctgaagcgagagattgggatgttccgaaagcctataaaatggtgagattcctcnngatgcacttcnntngtaataaaatttggggaccaaagatttcttcttatttttttccccattttccaatttattaattcctagtttgtgcctgctccagttaattgattgcttacaatggagaatacagaatgagattgacaacatattatcagtgagtttttctgattataaactaattgattcctattttttatcagcttatactgcaaaaccatgctgttgaaacagcatgatttattgtggaaattggcaatctttgagataattgatttactttgtttgattatatagaaaccaattattcccgctgacttatatagagcagtgcgagattctcagcttgtaggattatctggttactcgaaagaggtatttactcttttcattaggaattatcttgatattcgtatttattttgattgccctgctagtggattttgtgactcatatttgtttggaaattttttgttacattcgaaagtggttccatggtgattaactggcttatgcctttcgacatttccagggtcttcctgtcattgctatcggtgttgggcttagcacatatgataaagcatccgtaagggcatttgaactgtttaactttaaactctgcactgagactatagaatctggtttgatgcttaaaactgctttgaaataaatcttccgaagacttgctattgagcttttaagtggcaatatgattctttgaaacattatcttggtataacttattagaagaacagaagttatattctttttctgaaatgcactagattcaactgtttaattcagggcatcagatacttgaagttcactattttctcccagaaattgactgttgccatacaatgattccacactcaattttcttcttgcggacttgttccattaataagttgtgccatggtggaaagcatctttttgctatgttgctttgactctttatttttcttgaagtcttcattttcaacacatatctgaaagtgggtatatacagatatctgacactcacacccaagtccgaataacatagtctttttgcacttccagatgcatgtgtatacttcagcttgctgtgtatggagttatttcggtgatacttaaatttgtaaatcttttgtgttctaggtgaattactatgtacagtcacacattcaaatgaatgaatatagagatcgtgtagtattggtgagtatggactgtgtcaatttgatgtttcttgctttacttacgtacctactttttatattgtctaacatattgcttttattacagcctgcggccacacagaagtatgaaaacata

SEQ ID NO: 271 - DNA, 1044 bp, Gossypium hirsutum
  misc_feature (13)..(13): n is a, c, g, or t
tccttattctggnaactctctgagaaactcataactgggagatcttcaggccaagattgaagctgctagagatataagaaaagttgttaggaaatcatctgttaagacacgttcaaagtttgcttctgccggtgttattcagcctctagtttttatgctcttgtctcctaatcttgatgcacgtgaagcctcccttcttgctctccttaaccttgctgttagaaatgaaaggtttctaattctttccatctactttttctttctccttttaaacatagatccatgtttgggtttattttaaagtttcaactttttgatgggttttggtttctttctgcaatttattgttgtagttgtatagaagttaatgacgaggtatcgggtttggattgttccggttctttgagcaaactcaattaggtttctattatatgacaaatgtcgagaaaaatggaccatggggtgttgttttgatgattgtgttggctgatttttgttggattttattgcatatccatttggcctttgtccaagcaaagaggttaattgaggggaatggctcatgttaagtctagctctttgttttttgtggttgtataggttctaatgttgaaatggatattttggatgagaatctataggaaagctggcttcttgatgcaatgcaaatctctgtatatggttgcttaaatttagtgtctgtgtgttctctctctgaccactatgttcctaggtaatagactgtgttctgtgatgattgtaatgcaagaataagaaatgttgtttaaaaggatactagtttccagaatgtttttattgaatcatttactttcatgtagttgtatgcggtatggtactttttactcttaccaccttccttttctttcatcggttaattgaattgttattgtacaattgcgtgatgtgtttgtttatttatcagaaacaaggtcaatatcgtgacagcaggggctgtccctcctcttgttgagcttctcaaattgcaaaacagtggttgagagagctagccacagcagcaatata

SEQ ID NO: 272 - DNA, 771 bp, Gossypium hirsutum
  misc_feature (25)..(26): n is a, c, g, or t
  misc_feature (757)..(757): n is a, c, g, or t
  misc_feature (761)..(761): n is a, c, g, or t
  misc_feature (763)..(763): n is a, c, g, or t
tctggatacaggattactcaaatannggggcctctaaggtacaatgaccatcttgtgttttaactcataaattttgcttatggtttgacgtttcatgtaattctttattaatatttatcaactagcattcccttattaatatattcaaagagatgttaaatgatcatttttattttgtaaaatgctgcttctattattagttctttacagatttgttagccagttgccctgcttgaaaaatataggtccaatcttgcaaaaccaaaagaatcattaaaaaaatattcttccaaacagtttgcatatcaaatctttcactcctatgatccccatttttgtttctgaatttcttttactgttatgcagactcagtttttagttttctctgttattcctattgcttagatatgtatcaagttataatgtttgtatttgagacactaaatgattataaaatttgatacaggggaatgaatcagatgaggtgatggtcaagggctcatttcttgctgaactacagcgccgagttcttagagctgaggctgctctgagggagaaagaagaggaaaatgacatcctccatcaacgggtccaacaatacgaaagccgctggtctgaatatgagctaaaaatgaagtccatggaagaagtgtggcagaaacaaatgaggtctctacaatccagtctttctatcgcaaagaagagcctagcagttgatgactcggagagaaattccgatgcatctgttaataatgcnaagngngacagaga

SEQ ID NO: 273 - DNA, 497 bp, Gossypium hirsutum
gggtagtagttctgggggcgtagggcgtggggaaagattgaatgctgctcagagggaaagaatgcgccttttaactactgccgcctttgatcgagggaaaggcgaggatacttttggtgccaaagatgaagattggcaactttacaaactaatgggaaaagataatgatgacgatgatgatggagctgatgaagatgaggcagagctggcccgtgttagttctaggctccaggtcagttcgtctttgcgtgtattgatctatttgtggttttccgaattctaatgtaagatgaatcattcgttaatttctctgttcttgcaggagatagacccaacatttgttcctaaacctgaaccgacagcttcacagccagctaccactgaggtaccccatgttcgtccgctcactaaggaagatttccaaattgtgctcggggttgaaaggtttcggtgtcctgaaatattattccacccgaacttggttggtatagatcaat

SEQ ID NO: 274 - DNA, 402 bp, Gossypium hirsutum
ggagtttgatgaagttctagagcctggatgccattgtttaccttggtgtattgggagccagcttgccggccatctcactctgcgtttacagcagcttgatgtgcgttgtgagaccaagactaaggtttgcaaccatcaaatcctcgctttataccatttatgttggttagactcaaaaaattgttggtgcaggacaatgtatttgtcaacgttgtggcatccatacagtatcgcgccctggctgagaaggctaatgatgctttctacaaacttagcaaccccaggactcaaattcaagcctatgtttttgatggtctcacaaacagctatcttattgctttaatatccttctttaatttgttgccaaatggtaacttggattttcttctttacctttttttt

SEQ ID NO: 275 - DNA, 485 bp, Gossypium hirsutum
actaccatgatccaccacctgctccattgattgatgctgaagagttaaccaaatggtcgttttacagggcagtgattgccgagttcattgctacacttctcttcctgtatgtcactgtgttgaccgtgattggttacaaggtccaaaccgaccctgctaagaacactgttgaccccgattgtggtggcgttggtattcttggtattgcttgggctttcggtggcatgatctttattcttgtttactgcaccgctggtatctctggtgagttcttcttcttcttcttcttttttttttctcagtaaccaaacaaaaaagtacggcaatctaaaccatgacacatgcaggagggcatatcaacccggctgtgacattcggtttgttcgtgggacgcaaggtgtcactcatccgagccctgatgtacatggtggctcagtgcttgggtgccatatgtgggtgtggattggtcaaggctttccaaaaaa

SEQ ID NO: 276 - DNA, 539 bp, Gossypium hirsutum
cggaagcatatttactttgaagaatttcattgtaaccgacaaaccaagcggcaaaaattggtgtcctctgaaactaaaactaaaacaaaaaccctaactctaaacccggaaccggtacgaaacccgccgggttggaatcgtttccacgccattcgtccttgctcatcttcgtcgtctcgggtgcacaaacggtggcagaagagaaacaatttcagaagctcggaagcttctcgcaactgggtcttctcttcctatgattgttctgattgcaaaggtataaaaatttcatataaattttatggtaagtgtattttggttagttagagcattgggcattagcattccgtaccatttattactactgctctatattacccttttctagaaagttaagaatgtatttgaatctcagttattctgggaagatgaatttttcatctaattttcaatttgttttatccttgcctaatctttgaaccattgttttgcagataaagttgtcattgtttcatataatatacttggtgtgaaaatgcagc

SEQ ID NO: 277 - DNA, 397 bp, Gossypium hirsutum
cacccccggcgcgaatcgcgccaaggaatcgaaacgaaagaaggggcacgtcttctgtcgccgcaccgttcgcggtgtcgatgcttcagtgatgttgttctcttgtcgcaaaatatacagaacgactctcggcaacggatatctcggctctcgcatcgatgaagaacgtagcgaaatgcgatacttggtgtgaattgcagaatcccgtgaaccatcgagtctttgaacgcaagttgcgccccaagccattaggccgagggcacgtctgcctgggtgtcacgcatcgtcgcccccatccaaccatgagccctcgagcctcggttggaccgcgggcggaaattggcctcccgtgcgctcacagccagcggttggcctaaattcgagtcctcgacgacat

SEQ ID NO: 278 - DNA, 800 bp, Gossypium hirsutum
gaaaccgaaaaaagaggacgaatttggtatttcgagtacagaatgaccgaaatttacttgtttcttgttgtaggctgccatgagcttctcgtattctgatttcctttccgttgctttcactttgtacggagccttttcctaatgattgcaaatccatacaaagattatgtctttgagatggaatcgagaaaagctaagtatgaaacaacggatagagaacagagcttacagacaagtctattttcgactaatttatataccatacatctatgttccctgcagtttataccagaatagcattggcttaaccatgccataacagtttcccgagtcggtgaacatttgatcggtacatagccaagtccggaggagccgcattggaagttttatgcatcaccttttcaaacagaaccatcggaagagtgtacgacataattcatcgtccatgcacatcgcaaccaacacaaccaaatttaagcaataattgagtaacttactgcattcgacatcgacttccatttctctccgcccgctttgcccaccttcattcgcggtaaggaaatcaattcgaaacactccgaatgaagagacatataaacaaatgacaacagatttattaacttacagctgagatagccttcactttaggatgttcttgtttgtaacttgtcctaaactcttccctgcaataaaaaatcatagcttgaatgtcatctttgcatatgaatcgaattcggtttcgaaccttttttcagcatcttacataaacacaaagaaagcagtggcgggtctcttcggtt

SEQ ID NO: 279 - DNA, 326 bp, Gossypium hirsutum
tctccaaaaggcatccctcactatatccatcttctctgtttacaattttaagagaaagaaatacaaatagttataaatttaaaacaaaagatattgttagaaataaatgcatgaagacttgcctttgaaagaagccgaagaagaatccatagcgggagcctgagcaaggttaggattgtatctgttaggagcggacatgttagcgtcgcgatccgcagcaggcgatccactatccaatggatgaaccgagttcctcaatcccgattgtgcctggttcggtgattgctcgttttgaatctgactctctttctctttctctggctctg

SEQ ID NO: 280 - DNA, 1454 bp, Gossypium hirsutum
attagtgactacaaaggggctaactattatgaagattttgagcggatcatgcttacagaaatctctggttactattctcgattagcttcagagtggcttctgtatgactcatcagctgaatatgttcaaaaggtgtttagttgtcaaatacttatatttatttaattgttattgacaatattaatcagtatatggtctcctaaactttctaggttttctggtgcttgaatcgggagaagcaaagagctcgacagtacctacatcctgacactgaagttaagatagtgcaggtatagtcaataattttaaactggagaattcctttttgtgcttttaattggttatatatcaaagtgtgcttccaaatgaatgtttagtaaattggaaggtgtttttttttccctttttgtactctttattatttcaattcatgcttgtcatggaggttggtaagtgtaaataacagctgaattaatttgaaagttgatcaagttggggctcttcatcttgtaatgatcttcaaaacctggatatgttatataaaaaatccattttacaaagaacaaattctgtcacttatatggcattaaagattccaagaaatgtcaataactcttatcttctatggtttctgcaggttgtcagatatcatttgctagatcaaattgcgaataaactgatggaaaaaaggcaagctgagaattctggcatggtgacagattatcaggtgccaataaatctccaaatgagtaactttatcattgttgcataagtctatcctattatagtggtattgtaatgcatgtgagtgcacgtatttgctccaagtcctgttagtggtctttggcgaggcaattctcttggatcatttggtgggcttggaactggaagtttcagggtcttggagcataatcattcgaagtatgtgtgcttaggtctggattctttgacctactttttttgttacaatgttgtggtttcgaggagaccccaagtcaattggatgactgaaaaattactgatgtgtatttaaatctagtttgtgagattgttacattcagtttaggctctgttggtggtgtagcccggagaattcattcacactgcattgaagccccatttaaggccaaaataccacaggtacacacttacctgattgttttgactccaacagagctctggtgtgctgtgaatggattcccaccacaccggactatgccacgtaactggggcccttagtgtgctgaattatcatgaagtcaaagaaccatggatcctgtgcagccctggtcataaaaaacaaaactgaaaagaaatatttttgaatgtctccatggttaaggcgatcgagaactcgtccataatttatcctcctgttgcctgatttttctgcaccgattattcttttgattcatggcaaatatggattgcttgcaggaaatattgttgaaatg

SEQ ID NO: 281 - DNA, 770 bp, Gossypium hirsutum
cagcatggtgcttttgagagtaaagaaagcttgcaggatccattttctgctggaaagcagtatcctttaaacataaaggagaatggcaaatcacttgatattgaggtggaagctgtcgaccaaggaatgtcagaggaagagcaggctgcctttgctgctgaagcagctgcccgagctgcagcaaaagcagctgcagaggtatgtctttcttttaccctttcaacggtggcatattaatatggatgcattgtcctttttgtgcttttggatgtttggctttatcttgtttcctttaaacaccaaaagatttatagagcttgcaccctgttttggtgttaactctttcagcatcagcctttttgtacaatcattaaggctttgtattgtgaaagaattgaatgaatgcctcttttttgcttttgatcaagttgattgactggttgaatttgggataacttatgatagtatttgacattaatttaaaaatgcaaagagttgcctaacattgcagtaatcatattagtcatgtacattttgtttttcatcttcaataaaaaaatatttccttctttcttttctgctgtgatcatggacttgtgttcaaaaagagattaactattgttcttcgcaggcacttgcatccacagaagccaattgcaacaaattactgcagcttcctaagattccttcttttcacaaatttgccagaagggagcaatacgcacaaatggatgaagggaaatggcctggtagtgtttttggaagacaag

SEQ ID NO: 282 - DNA, 494 bp, Gossypium hirsutum
cgtcttctaggagcggaacagccgttgaaagcccggtaagccattcaaaaaattcctggtctgtcgctaatatgatatcatgaaaacccagtaacccccatacctcttttgaaacagggcagccacgaaagactggtcaacattctcgacatcaatactgcatcttggacataatagatttgacacaagtcgtttataatacaaatttgaaaaaataggaatatagttctttgaaattcgccaaattgttttagccaggagttctgaactccaaagtttcttgtagaaatctttagctttggtttgtaattcgtttaaagtagtaggattatcattttgtaatagtttgtaggcgctccgcacagggaaatcccccgaaggttcccccctctatatcaacatatcctcatgaggagtactggccaaagttattcgcaaaattctgtctgcatcagcacgcgaaaaggtatccagaatttgatcccttctccacc

SEQ ID NO: 283 - DNA, 420 bp, Gossypium hirsutum
  misc_feature (16)..(17): n is a, c, g, or t
ttttcctttcaaattnntggcttactgctttcgattagaattttccctgaaaattctggattactactttgctttactctactctgcggctgtggtttggggattgagaatcgagataaaagaaatggagaagggaaacaggcaagtagttgtttcagcattgcaattcgcttgcaccgacgatgtgcccaccaatctcgccactgccgaaaggtttctttttttttactcctcctattacttcccatttgattagattttctgggtctttcattaatttcgaattgtattatctgatcaaacctatattctggatttgctttgctactcttccactttcatctgttaaaaagtctcttcatattggttttggggtttcttttagttaattcttcctttagtctctatttgattgagatt

SEQ ID NO: 284 - DNA, 370 bp, Gossypium hirsutum
tacttagctgcagttccggatggcgaaaccacggtgcctacagctaatagcacaccggttcagcctccagcggtcccacctgcagttgtaccaccaactattgctccactaccggcagttgtgccacctattgctccaatacctgcagttcgccctcccgtctttaaaccacctgtgcctcaaaatggtgaggtgaaagctgttgattcagactctgaccatgaggttgatgggcgagctacagctggtgaatatgagatctcagaagagagtagactggttcgagagcggcaggaaaaggcaatgcaagaacttttgatgaaacgtcgtgctgctgcactggcagttcctactaatgacatggctgtcc

SEQ ID NO: 285 - DNA, 367 bp, Gossypium hirsutum
  misc_feature (42)..(42): n is a, c, g, or t
gcattgcttcagttggttgacccacttggcaagagtggtaanacagatgagcttgctcagaaggatgatcttgtgtttttacggatagattccctccccaaaggccggaagcttcttgcacggttccttcagcttcttcctccaggtggtgagcttatgcgcattgtctgcatgtccattttccgtcatttaaggttcttgttcggaggccttccctctgatccaggagcagctgaaaccactattaaccttgcaagggttgtttcctcttgtgttcatagcatggatcttcgtgcacttagcgtctgtcttgcatctgtggtttgttcctctgagcagcccccgcttcgtccccttggaaagtctg

SEQ ID NO: 286 - DNA, 907 bp, Gossypium hirsutum
tgtttcgaattcatgtgaaattgattgggaaagcttgaagaataggcttgtttcgatgtgcccttcgtgtttggttccatttttttcctttaattatcagcaaggaggagatggaaatggaagcacaacccatcctctgatttatttgttgaaactttgttgcttggaccgcaagggattacttcatggttagggacctagaaccctttaaaatcttttacgctttttgattgattcgttcaccatgtttagattagtagctaaattatgggatttttctaaatagatgttacaaggatactgtcggagctccagtttacaattcaaagagtgaaagttatgacaacgccggatggaagagttatgtacttggttttcatcacggatggaatgtgagtgtttatattataaagaagtttttattcgaccgatttatatagtatgcaaattttgatttcttttaactttgtatagcatgttttcaactctcgttgtcttggatgtatacctagttttgagtcagcaccccttgcggtgtagaacaagctcttaacatcattatgatgatttattgatgtgctatcttttttcctttaagtgttgctggttcttgtttggacctttgtgaatgttgatttctgtaatggtggatttttgttgattaagatttatagtctagtagatttttggctgagatcgagatgaagatggtggagctgtagaaatttgtatatatgaaagcagcataatacagtatacttgttctatggtcgaaactttcgaaactttctcctgagttaaatctactttacctagtggaaacttttattacccgttgttaatgcatggctgtctcattacagggaactcttacatacaaaagagagacgagagacacaagggagca

SEQ ID NO: 287 - DNA, 1025 bp, Gossypium hirsutum
cgttgactatctagaaacacaacccaccaggtaaatcatttatccattctttagactcatcgtagctaggttatgggccagttgattagccgactggaaagcaaaatggaaaactaatgaccgaaaactgttattttccttctgaatgttttttgatgtgagcactaatttaggacttatctactgaactagttttgcaattgttaatgatggatatggaatcctttgccactattacatctgttaaacccaactcaatccctatgagcacagctttgagacaggcgaaggtttctgcatcaaaggccgagccaaccatcacgtgcagacgagacttggagaccaaaacttcccctttcacatttcgtaccacaatccccgaagcctacttaaaaccctggcagtcaaacggggcatcaaaattgattttaaggagctgccctaaggtgttttccaattctcattctcaccaacaaaggtagtctttttctctatcaaacaatcgagttctccaatgtagtttttgataaaattagctactcttatacctgaatgagttttccctccatgcaggtttttattcctgtttaaccaaaacgatcacaagccacaaccagaaaaaggtctttggcgctttgtgtatcttccaaatacccaagtaagccattcaaaaaagttcatatgttgccttgtaattacccattcaagctttaaaatttttcatgtttctactgaaataggacattctccaaagacatgtcataaggtctctaatcataccttacatctgggatagtttttactttaagtcaatcttttggtatataagttgaccatcgtggcgatgaaattccaaaacactctccatagcattattttaattttgttggaaagttctagattccatagttgtttgtagaaatgttgtgttttaacttataagtcattaaaagtagggtaatgttctaagtctgtaataatttataggcacttcgtaccgagaacacactcgagggctcaccgcg

SEQ ID NO: 288 - DNA, 899 bp, Gossypium hirsutum
ttctgggtgtttcgaagaacgcttcccaggatgatttgaagaaagcttataaaaaagccgccattaaaaaccatccagacaaaggcggtgatcctgaaaaagtaagaacaattttttcttcatttttgggtattttatatgggttgctttttgattgatggtgggtttaatgattttattgttaactctgctgcctctttttttttggtttttgtttgattggcagtttaaagagttggctcaagcttatgaggtattgagcgatcctgagaaacgtgagatatatgatcagtatggtgaggatgcactcaaggaaggaatgggtggtggtgccggtgctcatgacccgtttgacatcttctcctccttctttggtggtagcccgtttggaggtaagagatttagtttaacagttaccatatttaaaattaaagatgtatgatttttttaagaagatcctgatataggaatagtttaagaatcttgaaaacattgttattttatttaatgatgttgggatcattacaacttgcagtcaaaatctggtatgtggtcattttctttttaatacatcagcttatttgatgcactagtgaaacctgatgaaagagaatcttactatacttggttaaggatatattataaaaataggggtagggggtagcggcaggagttgtctagagattgagcctgagttgtattcgacgaaggcataaacacaggtgttttttcttaccccacctaaggatcagtcgacactgttttaggaatttgggaaatgttgttgaactagttctaagggaagtaggatatggttgaaacttgaatgatggtgttattgttaatgattaggtggtagcagtcgaggtagaagacagagaaggggagaggacgtagtc

SEQ ID NO: 289 - DNA, 1278 bp, Gossypium hirsutum
  misc_feature (378)..(378): n is a, c, g, or t
  misc_feature (380)..(390): n is a, c, g, or t
  misc_feature (393)..(398): n is a, c, g, or t
  misc_feature (404)..(423): n is a, c, g, or t
  misc_feature (426)..(427): n is a, c, g, or t
  misc_feature (429)..(438): n is a, c, g, or t
  misc_feature (440)..(443): n is a, c, g, or t
  misc_feature (445)..(447): n is a, c, g, or t
  misc_feature (452)..(461): n is a, c, g, or t
  misc_feature (463)..(477): n is a, c, g, or t
  misc_feature (482)..(497): n is a, c, g, or t
  misc_feature (500)..(506): n is a, c, g, or t
  misc_feature (514)..(514): n is a, c, g, or t
  misc_feature (518)..(521): n is a, c, g, or t
  misc_feature (523)..(526): n is a, c, g, or t
  misc_feature (529)..(535): n is a, c, g, or t
  misc_feature (537)..(538): n is a, c, g, or t
  misc_feature (544)..(544): n is a, c, g, or t
  misc_feature (546)..(550): n is a, c, g, or t
  misc_feature (553)..(553): n is a, c, g, or t
  misc_feature (555)..(555): n is a, c, g, or t
  misc_feature (557)..(559): n is a, c, g, or t
  misc_feature (561)..(562): n is a, c, g, or t
  misc_feature (564)..(564): n is a, c, g, or t
  misc_feature (569)..(574): n is a, c, g, or t
  misc_feature (576)..(581): n is a, c, g, or t
  misc_feature (587)..(590): n is a, c, g, or t
  misc_feature (593)..(604): n is a, c, g, or t
  misc_feature (609)..(611): n is a, c, g, or t
  misc_feature (614)..(616): n is a, c, g, or t
  misc_feature (618)..(628): n is a, c, g, or t
  misc_feature (634)..(641): n is a, c, g, or t
  misc_feature (648)..(649): n is a, c, g, or t
  misc_feature (651)..(653): n is a, c, g, or t
  misc_feature (655)..(659): n is a, c, g, or t
  misc_feature (664)..(671): n is a, c, g, or t
  misc_feature (675)..(680): n is a, c, g, or t
  misc_feature (685)..(685): n is a, c, g, or t
  misc_feature (687)..(704): n is a, c, g, or t
  misc_feature (710)..(711): n is a, c, g, or t
  misc_feature (713)..(716): n is a, c, g, or t
  misc_feature (718)..(722): n is a, c, g, or t
  misc_feature (726)..(744): n is a, c, g, or t
  misc_feature (749)..(760): n is a, c, g, or t
  misc_feature (762)..(766): n is a, c, g, or t
  misc_feature (768)..(768): n is a, c, g, or t
  misc_feature (770)..(783): n is a, c, g, or t
  misc_feature (786)..(795): n is a, c, g, or t
  misc_feature (797)..(806): n is a, c, g, or t
  misc_feature (808)..(810): n is a, c, g, or t
  misc_feature (812)..(844): n is a, c, g, or t
  misc_feature (846)..(847): n is a, c, g, or t
  misc_feature (850)..(851): n is a, c, g, or t
  misc_feature (853)..(854): n is a, c, g, or t
  misc_feature (858)..(876): n is a, c, g, or t
  misc_feature (878)..(878): n is a, c, g, or t
  misc_feature (884)..(892): n is a, c, g, or t
  misc_feature (894)..(895): n is a, c, g, or t
  misc_feature (897)..(902): n is a, c, g, or t
  misc_feature (904)..(905): n is a, c, g, or t
  misc_feature (908)..(916): n is a, c, g, or t
  misc_feature (927)..(936): n is a, c, g, or t
  misc_feature (938)..(943): n is a, c, g, or t
  misc_feature (945)..(948): n is a, c, g, or t
  misc_feature (951)..(962): n is a, c, g, or t
  misc_feature (964)..(964): n is a, c, g, or t
  misc_feature (966)..(970): n is a, c, g, or t
  misc_feature (972)..(983): n is a, c, g, or t
  misc_feature (991)..(997): n is a, c, g, or t
  misc_feature (1000)..(1010): n is a, c, g, or t
  misc_feature (1013)..(1027): n is a, c, g, or t
  misc_feature (1032)..(1040): n is a, c, g, or t
  misc_feature (1042)..(1043): n is a, c, g, or t
  misc_feature (1045)..(1047): n is a, c, g, or t
  misc_feature (1049)..(1053): n is a, c, g, or t
  misc_feature (1060)..(1061): n is a, c, g, or t
  misc_feature (1063)..(1077): n is a, c, g, or t
  misc_feature (1080)..(1087): n is a, c, g, or t
  misc_feature (1092)..(1093): n is a, c, g, or t
  misc_feature (1096)..(1107): n is a, c, g, or t
  misc_feature (1109)..(1113): n is a, c, g, or t
  misc_feature (1115)..(1115): n is a, c, g, or t
  misc_feature (1117)..(1127): n is a, c, g, or t
  misc_feature (1129)..(1135): n is a, c, g, or t
  misc_feature (1140)..(1144): n is a, c, g, or t
  misc_feature (1150)..(1150): n is a, c, g, or t
  misc_feature (1160)..(1161): n is a, c, g, or t
  misc_feature (1163)..(1167): n is a, c, g, or t
  misc_feature (1169)..(1169): n is a, c, g, or t
  misc_feature (1173)..(1204): n is a, c, g, or t
  misc_feature (1206)..(1212): n is a, c, g, or t
  misc_feature (1217)..(1222): n is a, c, g, or t
  misc_feature (1226)..(1226): n is a, c, g, or t
  misc_feature (1229)..(1239): n is a, c, g, or t
  misc_feature (1242)..(1243): n is a, c, g, or t
  misc_feature (1245)..(1245): n is a, c, g, or t
  misc_feature (1247)..(1247): n is a, c, g, or t
  misc_feature (1249)..(1260): n is a, c, g, or t
  misc_feature (1262)..(1264): n is a, c, g, or t
  misc_feature (1267)..(1275): n is a, c, g, or t
gtgctcgagctcaatgggtccctgtctattttcgggattccttttttgctgcaatatctctcaatcaaggatttgatggctctttttttgatggttatgtgaatcaacagaccacgattcctatgttctttagacagtatgaacgagcaatggagaattggtttgaaagggagattgaagctgattttgacagtatttgcacgacacctgtgctgcggacaccatctcctatggagaaacaagcagcagacctatatacacggaaaatattcacaaaatttcaagaagaactagtcgaaacatttgtttatactgctaatagaattgatggggatgaaactatcagcacatttagagttgcaaagtttgaggacgctncnnnnnnnnnnnccnnnnnnctcccnnnnnnnnnnnnnnnnnnnncannannnnnnnnnngnnnnannncctcnnnnnnnnnntnnnnnnnnnnnnnnnataannnnnnnnnnnnnnnnccnnnnnnnccttcctntttnnnncnnnncannnnnnntnnctcccntnnnnntcncnannntnncnccatnnnnnntnnnnnnttaatnnnntannnnnnnnnnnntatannntannntnnnnnnnnnnncttatnnnnnnnnccttcanncnnnannnnnaccannnnnnnnatcnnnnnnttccncnnnnnnnnnnnnnnnnnntccctnntnnnntnnnnnttannnnnnnnnnnnnnnnnnnctctnnnnnnnnnnnntnnnnncntnnnnnnnnnnnnnnatnnnnnnnnnncnnnnnnnnnncnnnannnnnnnnnnnnnnnnnnnnnnnnnnnnnnnnncnntcnncnntctnnnnnnnnnnnnnnnnnnncnttccannnnnnnnntnntnnnnnntnnatnnnnnnnnnatcatccaatnnnnnnnnnntnnnnnncnnnnccnnnnnnnnnnnncntnnnnnannnnnnnnnnnntccctttnnnnnnnacnnnnnnnnnnnccnnnnnnnnnnnnnnntctcnnnnnnnnncnncnnnannnnncaccctnntnnnnnnnnnnnnnnnccnnnnnnnnccatnnacnnnnnnnnnnnncnnnnntnannnnnnnnnnnannnnnnnctacnnnnntcaatntcaatcccanntnnnnnancttnnnnnnnnnnnnnnnnnnnnnnnnnnnnnnnncnnnnnnnaaccnnnnnntccncannnnnnnnnnnacnnangntnnnnnnnnnnnncnnnccnnnnnnnnntac

SEQ ID NO: 290 - DNA, 395 bp, Gossypium hirsutum
  misc_feature (159)..(159): n is a, c, g, or t
ggacgaaactattcctgttcagactattagtaagaattcagatgcctgtgatgaactgggctgcttaataaatcagatggagcctactttgaaacatggagatagtggtcttcctaaagtaggggatgacttacagcctgcattacagtcaggagagtntccaggtaaacttcctgggttgaaagatgatataggaggagatcatctgctggttgaagatgtttctcaaacgcatgaatttggcacatctgttgatagcacattggacgatctaaatactagaaatactgatttgcctgtgactaagagagatgattctaaagaacatactgttaacgaaagtctagtggaagcttctgttgatcaatctgtggatgacagggagcaggaagata

SEQ ID NO: 291 - DNA, 1238 bp, Gossypium hirsutum
  misc_feature (654)..(656): n is a, c, g, or t
  misc_feature (671)..(674): n is a, c, g, or t
  misc_feature (698)..(698): n is a, c, g, or t
  misc_feature (1173)..(1179): n is a, c, g, or t
  misc_feature (1225)..(1227): n is a, c, g, or t
  misc_feature (1230)..(1235): n is a, c, g, or t
tacaaggaaaagaaaatgaagaagaagaggggaaagaaggcaatcaaattattttctctttgaagacaagtagtagcagcaataacaaggaagcttctccaaaaccagttcttaaaagtgctcttaagagacctaagcctactgaatctaaccctgaaggtgaaccctacctacaatttgcacaattcttcttctttttcccttttctttcttttctgggttcgtataattttatgtctttgatttgattttgaattcttgttgttgcaattttccttattttgaagtggaatttgacatgggctttgctttttggatggaatgagacttttttgtgataattttgggattttgcagcaattttcagtttaaagtttcgtttttttagtggggtaaatttatttccggggttaggggttattggggcttgaactttttagagaaattttgttcttatgcatgaggttaatatgcattgcagtttggaaaaaattgctttgggaatgatacttaagtatggccttggctattgtgaacattaccttgttattttattctttggtatatgagaaactaggagcaaacagagatgaaattttgagttcctgtgtttagttgtttcgaaaattgaaatggaaagggaagaattgtagnnnggaggttgattagannnnatttaatgacttaagataggttcnagttttatgtatacggcggtgtatgcactttatgatttggtctttttcttttttatctgaatgataaaatagtacatggaaatggtttcattttcattcgggtgaaaggaggacgaggtcaggagaatgaagaaactggctttttgtgtcataatattttaaatatatttatatgagacttggatattgaaatgatttgttttggcataatataactcaaagggaaagttcttgtatgctatttttgtttgttagttttacgattttgctacttgacaacttctccctagaagcctttttttggctgaactctctttgcaagtagctgattatttatgcattgtactacccagctgctgtacaagaaaagcgcttgagatttaagatgacaacagatgcctcagagacacaagttattgaggcaatgcagaagattgagtcacatatcaagaaccccaccaagttttctaaggcnnnnnnncttgccatacagttgatacaggctggaagtgtgaagggggggactnnngannnnnnttt

SEQ ID NO: 292 - DNA, 380 bp, Gossypium hirsutum
gccatctggaggtggatgaccccaatcaagaagaaccaaccttcagcacacgacattttcgtgggtaactggaaaccaaccaagaatgacacagaggaaaaacggggtcctacttttggctccaccatgaacgttctctacggagattacacttgcgggcaaggcgatatcgatcccatgaacatcatcatctcccattaccttcattaccttgacttactaggtgttgggcgagaggaagcagggccacacgaggagctaagctgtgccgagcagaaagcattcaacccaaccccagctccacctgctgccagtgcttcctgatctttggttcagccaatttcattgttaaaatgcagttgtcaatgaagggtattcaa

SEQ ID NO: 293 - DNA, 924 bp, Gossypium hirsutum
gattgtatctgaaaactatcaagatttcaaaagaatgttgacaagcctatggtttgatctttatggtcgaggaggtacatctggttcctcttctgcttttgaacatgttttcgttggggaaatcaagcaacattgtgagcaagaagttagtggcttccacaattggcttcaggtgtgttaatgtatcttttaattgtttgtcaattcaactaggttactgcaatcattagttcatgacctggtttattttataccatcgagttgtctggaagcaatactgaaatataataattttcttagaataacttttcatttacatctgatggagcaaaatggaaaaggttcattaaatttttgaaatgttggttgcaatgcgttggtgatagttatatcgtctttacgtctgaagtatttaaaatatcaatttctacttgctagtattttaatatgttgccaacccttgtcacaagcataccttaatacattttgttttcagaagttgatatttaggtgccatgtagtagatgtgtattgctaatcctttattacgttttccagttttacctagaagaagcaaaaggatgtgttgactatcatggttatatattaccccgaagacgtggggaaactgtaagtctcagtttgacttgtttctgtttctctctgcatctactgcattttatgcactcttctaagttttgcagtaaatggaagaaaaagaagaaagttctttgtaatcacatttgataaagaattgaagttctagatcattgtagttaataatattaggttgaactaggaggaaaacgttgttcacacccactttcaatatttaatatcactctgcatgtgtttcttttgcagcctgactccgagacacagttgctaacagttcagttcgaatggaatggggttcttaaatcc

SEQ ID NO: 294 - DNA, 751 bp, Gossypium hirsutum
  misc_feature (328)..(328): n is a, c, g, or t
  misc_feature (334)..(334): n is a, c, g, or t
  misc_feature (548)..(548): n is a, c, g, or t
  misc_feature (635)..(635): n is a, c, g, or t
  misc_feature (727)..(729): n is a, c, g, or t
  misc_feature (731)..(731): n is a, c, g, or t
taaccctcatctctgaattttggattcaacgtgttctttatattttgacactgaatcaacgaccataaagagttgacgtgcgtgtatctgaatttcctcttcgctttgttggattgcttcttgcaacctcagttgcgaagcctatattaagaaaaaagagaattttgtttaggcatcatacaggcactcgtatgggactacccttatttgaaggactgcattgaaatttcttacacaataaattggggagggcgatgaacattcctcctaaaatgataaaagctgcttttgctaataacagaatggccataactcgtaagcatgaccncattantttatctatttatgttttcaaccactggaagcaaaaaaccaataaaagggctacctttaaaatctctgttgcttctctttccgggatatctaacttatgcgtccccaaatggaactcctccaccattttcttggcttctgcagtaaaaccatgaacacattcctggatttcccttctggaacaaatttattggggcttcaacccaaccagaatnattaaatatagaaggttaatgtcaaaaactagccctttataaactgcaagtttgagcatcactggcaaaattaatatacattttcanacattagcactgatcaaatattcgtatacagatattagtgataaaggggtaaaattttaagaaatatctccaggaatgagaattaagggaannncnaaacgaggtcaagatggaaa

SEQ ID NO: 295 - DNA, 625 bp, Gossypium hirsutum
  misc_feature (128)..(129): n is a, c, g, or t
aattgtaatatatgttagtttggaaaattaaataggcgacacaagaagttgtttcacaaattcctttaactacaaatgaagagttcaaagctgcagtggctgcagcaaagcaagctttcccgtcatgnncttggtcatggacaatagtaaggctaagagcaatcccaagtatgttgatggtggttttggattagagcttggcggttctaagtctttgtttccctacgagttcccttatgggtttggatctttgggtttctcttcggatccaagttctccggttgagtcagtggtgggttctactgagacagagagtgacgaagaagattatcttgctgggttaactcgtcaaatggctcactctaccctcgaagacggtattcgcagaaacggccgtgccttttcttctgaaaaccctaaggtctgttgatgaacttaacactcaacttctccacaaagttatttgattcaaggacggtttcttattttagttttattattatttttgcttttttaagggtcgggtcatgtccagttcgccgcaatcaaccttatgtgtgtcaaggagcgggtgcagttgcatgcaagggtgtagccgtggaagccctacttgccaatcccgagt

SEQ ID NO: 296 - DNA, 382 bp, Gossypium hirsutum
acttgtttattgtaaaaggttacagaatttgatgaattaaacttaatagaacttttgttcttgtgaggttacctcctctcttcttttgttcgagtctcgaagcgacttatctagcttgctagtggcgtcaatccgaactccattggacttatcacctaaccggtgtggtgttcaaccatattattatacctttggttcttacctccatataggtaacgggtcaaggtccgcttctatccttcatcataattcaccttaagcaacataagactcggggcaatactttttagtattgaaacattcttgaagcttgagttcaacttccattccattttatctatcaacttaaaaattatttctttgttaaaccgaacgtatcaac

SEQ ID NO: 297 - DNA, 1204 bp, Gossypium hirsutum
  misc_feature (1192)..(1194): n is a, c, g, or t
cccggaaagggtgcatttacaagtactgtaaggactttatatgccggtggtgctggattaacttttttgtggaatcgtgaatttcaaacaagtgctaagatgatggtggattcgggcgcagcagcaagccagggtcccgtagtccataaattcccagagaaagatgatgctggatatgttagtggagggtggaaaaggtaaatattgagctttccacctgtaataattagttgttttatcatacagattgagctataagtatagccagttttctggatggcctggtttggttaaaaaccaacctggggattggtgggtctgaacttttaatatgatttggttctggatgaatggtggttggaagtacttgtatgccggtgaattttgcaaatgctgatagggtaaattcatattatgtttcttatttgatttggcagtgaggatggaagattaagctgcggttattcaagtttcaggggaaagagagcaaccatggaagattgctatgatattaaaacttccaagattaatgggcagacagtctgcttgtttggaatctttgatggttagtttctctcttatcattgctttccttgtagattggtgtgaaataggaaaacactacaatttgctgtaacatattattaaaaagctcatggaaggccccatctaatatgattattggagaagtacttagtctacaatgtgaggctaattcccatgatctgtatttccacaaccacaatacttataatgcaaagaaatgctaaaacatacaagttttttcatggtatgttatgtttgtggtttaaatatgtgttcagatcatctgaaagcatataataaccttggagtagtgtattgggacatgcttacaactaattagtggctatggcacaatcgtccaaagtttcctaggtcgaagacagtttaatttctaaattatgtctgtctaagctttcttgtggtttcatttaaatcagagtagtaactgatatgtgattatgacaatcaatctgtcttattttcattttacatctcaaaagtgcctttgtttggaagatttgagttttggcctatttatacaataagttatcctggccatgcatttttcggtgatgggaacatttcccgagagtaagatgcctttcatatctgagaatgacagcttttgctgacctgctttttaacnnntatcatgtgt

SEQ ID NO: 298 - DNA, 385 bp, Gossypium hirsutum
gagtattggcgaatgtgcgttggagtatcaataacccaaaatttcccacatcgaaaatccatggaaaacactggtttttttcacaaaaacgcctccgttttcatggctgatgatcatgatttctccgacgtcttcggtggtccaccgcggagtgtgctttgcaggaagttcactgatgatttcacccaatcggcgtcgttttacgatgatgctttcgggccattggatttcagttcgtgttattcgattaagggtgggaggagtttgccggcgtttaggattccggccaaagtggaatggtcgttctccactgacattttcgagtcagatgatgatctccggcgatctagctgggaacgaaccgagtcggattcatcttcggtga

SEQ ID NO: 299 - DNA, 358 bp, Gossypium hirsutum
aaattgaccccatttgacatccttgcgtagtactttgttttcaatccaaatggatatgcatagaaggagacccaggccatatgaacaggtactgtactggagtgaatatctaagagaattgataaatcgtaattcatacatatttctatcccatgcttagcacattttatggatgattttttcttaaatttagtgaattcgatgctcctaatgtcttaatttcatgttttatactcaggtgagtataggagagtgaaaggaatgagaaacgggccaaaaatggagaaaatgggccaacgtacgaaattaacacgtcctggacttcctcacacgggcagaccacacggtcgtgtcaatt

SEQ ID NO: 300 - DNA, 1220 bp, Gossypium hirsutum
  misc_feature (1181)..(1184): n is a, c, g, or t
  misc_feature (1204)..(1207): n is a, c, g, or t
gaagcagtaagtgctgactgctgagaaacttatatgatttctgagattcaaaaactagccgagtaactttttctttttgtaactagttgatttagattagccttttatcagagttctaatattatcttaatattacatatcttggttaatacctttgaggggggggggattatgttgtgataaggtgcaaggatataggtttatgcttagcaaacctgtcctcaaggatatagattctaatttctctttcccttttaaaggttcaaatgtctgtgtacttatctgatatgtctctgatcaatgcaggctactttacaaccaacatatcttgttgctcaagagcctgatgatgacaatattttacggacccgaacctatgatgtcagcatcacgtaagacaattctggtgccaacatgcttaggattcattttcaggttatgattttgttatgaaatctcaaacttgacaaacattatcaaatttgtaggtatgataaatactatcagactcctcgtgtgtggcttactgggtatgatgaggtaggtatttgagaatccttgtttttacagctgtgaattcaaatattgaactaattgatatggctgcaaatgttgtcctcatctgaatttgtttatagtcaaggatgctcttacaaccagagcttgttctggaggatgttagtcaggatcacgcacacaaaacggtaggctgtatttaataattcaaattatctctctcattcttccttaagtggtaggagtatagattttagtttgctcattaggaatttggaagatgttttttactctatgctaatttactggtataggttactattgaggaccatcctcacttacctgggaagcatgcatccgtacatccatgcagacatggggctgtcatgaaaaagatcattgatgtgcttatgtcacgtggagtagaacctgaagttgataagtaaaacttttgacctctcatttctaaattgcttggaattgaccctttcacttttgagaaaacatgtgtgcggtgtgataactttttggcacaattttcctttacaattacaatcataatattcttctcttaccctcttaaagatgcagtatacatttacttttgggtactctactgcaaatacttagattgttactgtgaagcaattctccaatagattaannnnacatggtgtgactttttccnnnntgaattgttattt

SEQ ID NO: 301 - DNA, 376 bp, Gossypium hirsutum
accggtggtaaggctccgcgtaagcagctagccactaaagctgctcggaagtcagctccggcgaccggaggagtgaagaagcctcaccgtttcaggccaggaactgtggctcttagggaaatcaggaagtaccagaagagcaccgagctcttgatccgaaagcttccattccagaggcttgtgagagaaatcgctcaagattttaagactgatttgaggttccaaagcagtgccgttgccgctcttcaagaggctgctgaagcttaccttgtcggactgttcgaggatactaatctgtgtgctattcatgctaagagggttaccattatgcctaaagatatccaacttgctaggaggattagaggagagagagctt

SEQ ID NO: 302 - DNA, 469 bp, Gossypium hirsutum
agcatgggctgatttatcgtgttgaatgtgaatattgggtttcattagttgccattctgaacatcaagcatcatttataatggaaatagaaagttaatgtaattcgctgcatgttttatgtgtaacgcacatgcatgtctttcctgtttatcgtcaatgtatgtatttaatttcttcataaagtttatagcttcaaaaaatggaagtaatactaatgttatattaggtagaaggtttttaaatttgtttattcgacgttgttataattcattttgcaaacattgagatgttatttactgcaatttgctggttgtttcaatgctggtatctggattgaaacaacgagcaaattgcagtaaataacatctcaatgtttgcaaaatgaattataacgtcgaataaacaaatttaaaaaccttctacctaatataacattagtattacttccattttttgaagctataaactt

SEQ ID NO: 303 - DNA, 686 bp, Gossypium hirsutum
gctgaatatcgtgctcaagtagagtatgagttcaagaagaaggtggcggaggtatgaattcataatttctttttcctgttgcaataactgcagtatgctgaaaatcttagatatgagcaactgtccctttcttggcttccatttactgaatctctcacacggttaaatagtttctgcaagttttctggaattcattcatgttcttaaatatctgattcttatttagtgagatgctattttgccatttccatggtatctgaaatcttatcatgtgattgaactctaggcgatagacttgcttcgagacccagttatccttgattacaatatgagctaaaccattaaccatgtttgtggattatcagagtagcggatactcgggggctaatgtgaagcggctcgagacggaaacagatgcaaagatcaatcacttgaaaaacgaagctgcaaggatatctcatgatgttgtacagatgcttttgaagaatgtgacaactgtgaggaactagggggtcttccatgaagactgatggtttaattttctactacattctatcaattcccaaaactcagctcatgcttgggaacaattttatgtcattattttatcatttgttgttatttttgtttgtgccatgttcctgttctgaaataaactccaatgtgtgccttctagaaatggtttc

SEQ ID NO: 304 - DNA, 701 bp, Gossypium hirsutum
ggttctttgcagaaacctcttactacatgcctcactgtttccatgctgttctctgtttttgtcttttttttaaataaataaataaaaaaacttaacccttgttgtttaatctttgatcatatgaaaaatatttcagctatacttaaaagaaatcggtcacttactaaagaagagattgaagctttctggagatcaaaaaggaaaacagaggaagagcatcttaatgctatatatggttcaccagatagttgcaatcagcaggtacaaattatttgtttgataatcagtgtagcatggtaattttgtactgaactagtaccatcttttgacatctatataacatgaaactccattgatgaagtatggaagggaatatatgagatcaagctccatgcctataccaaatagaaaccagggtttcatagacatggacacagaaaaaagcctggaaaatatcgtaaagcaaagtgggtggtaagtagctaaaatcttattgaatacccaccaaaaagaaaagcttaaaaacttgaaattaagagattttccatggatgattgtaggtggacaaggagcacttgggcattcttgaatgaacctccagttcttgaccgacctacaaacaattaccaaccacagttccatgttgccagcctcgctacttcaaagtttaacaagaattctggaatcagtgccaattagtg

SEQ ID NO: 305 - DNA, 402 bp, Gossypium hirsutum
tgagaaccatgcattctctgaccgtgtcttgatccggtccatcgctggccggccggacggtgggctggcctctcggggcaacgtgtccgcgccggtggttggctgaagactgggagagagcaagggaaaggttcttggaactgaacgacggtgcgtgtctggggaacttgcaggtgattatggatgccggagtggctgttctcagtaagctggtggcgaccggcacttgcgtagtggttgatggaatattgaaggttccgcctgaagggacgaagcagaggattgagcttcgggtcgaaaaggtggtccatattggttaggtggatccggctaagtatccgataccgaaaacgaagctcacacttgaattcttgagggatcatcttcatcttcgatctcgaa

SEQ ID NO: 306 - DNA, 399 bp, Gossypium hirsutum
aaacaaggccttcggccgtaaggtttagctcccgatattcacttgtgagtttcagtggcctcaaggaggtgacatctgtgaactgtgaaacggaatcctccttcatcggcaaggaaagcagtacaactcttagaggctcttttgcgctgaaagcacggaaagcaaaccgggcgtctcgttatggcttacagctggtggcatcgtacaaggtggctatacttggagctgcaggagggataggtcagccattggcacttctaatcaagatgtctccgctagtttcggcactgaacctctacgatatagcgaatgtgaagggagttgctgctgatctcagtcactgcaatactccttctcaagttctggatttcaccggtgcttcggaattaggagattgtt

SEQ ID NO: 307 - DNA, 1086 bp, Gossypium hirsutum
cataacacatatgagttgaagttggatctttttgataaggtcaacgtggaggtaagattctggtctagtgttccatctgtttaggggtatttgagaatctgttgatgatgttggtcagtttatgatggtattatgctgctttttaaagtaaattcaacatatttgatggctagcctttagctccttagtgtatacggctcacttcattttgattgcattagcataatttctgttagatcatgctatatgtttcaactatcttttaacatctttgacacacattcatgcacttgcatcatctttactttacgggtgtgcttgctagaacagtaaagcagatggatgaattgagaagcgtggaaaagtggaagaaaatgaatttttggtgtgtttagcaagggaaacataagaggaaacatatagttattttactattcatattcgacaatcaatgaatgaaacatcctttaggcttttctacaaaaactaaattgtgtttcatcttttgttttctcaatcgcctttacagtgctaagtctaaattcttgttggagctcgttgttagtgttgcatattcatatgcccttgatgtgttcatgtctttaggatgaatattcttcaaatcacttaatgttttgacattgtgttatttttgttttgaaaaaaggaaagcaaaattaatattggagttaggagtatattctgcatcttggagaaggctgaaaaagtgtggtggaaaaaattattgcgcggggatggcaaagccccccattacgtcaaagtggactgggacaaatgggtggatgaagatgaagacaagggtatgtttctatattcagattgaattaatgcgaaagctgatgcattccaaactgacaatctattgctttgcttctacattttgagtaggtcttggtgatcttgacttaggaggaatggacttctcggtatgggatcaatatataatattttatgtacaatctcattttagcattagtttattaagacttccttccttacatgcaattatggtgttgtccagaacttcgggggaatgggcggcatgggcgacatgatgggcggcat

SEQ ID NO: 308 - DNA, 360 bp, Gossypium hirsutum
taacgacttgctgggcttgaacatgagccggttggcaatggattgtctgctgaagtagctatccagaatacaaccagaaagtctggaaaaaccgaagcaaaaccaccatgtgttttggcggataaagcaactcagcagctaaatgttggccttgatgtcacggtctcgaatcaagcttctccagcagttcttggtacagtaatcaataacataagtccccacgaagatagaacaattcttgcagagcaaccacaaatggtgggaacccaggacagtgacagcaagtcagacctacaccctttcttttgttctgacccgtgcctggaatttgcaatcaaaactcttacaggtgcaataccg

SEQ ID NO: 309 - DNA, 370 bp, Gossypium hirsutum
tggatccaaatgaaaaaaagaaaaaagaggaaaaatagaataaaattgcagtaaataatcaccttagaagtattcttggttgcttttctactaattttcatatgtattttgtattatcactcgtccgtcaaaaaaaacaaatgaaaattcgtggccttttatagccatttttacatctgtttcttctccactagttgcaggtatggcgaacgtggttcgaagtgcaaggatgtggggcgggcaatacgcgagtcaaggggtcgtgtgtggggcgtgcgttggtggctgctggtggctgcggcgcaaggcaaatagaaccctagagcttgctatttctgaaaacgatttggggcattgggcttgtgtaatc

SEQ ID NO: 310 - DNA, 634 bp, Gossypium hirsutum
  misc_feature (622)..(622): n is a, c, g, or t
acaaatcgggtttcgaccacagggaatgagtccgaagagggaggctttccagtaaccaagctgctttcaagttgagctctacagggtttgacagagttgaacttaagaccatacccttttaaaggaaaaattggtctattccctttgacccatatgggctgaagcaaagaacccatcattgcagctccattacaagcctgcattttgacttcccactagtatttctcacaaataacctgcaaatttacaacagaataacacatagaattaaaataagaaattcaattcatcatcaattaatttatatgttaaagcagaaaatgaacagctattaagacttaaataatcccatgagacacaggcaaaaagaaaaaaaggtattttccttttagaacttgatcattaccaattcttctgttaacccaaaacacgaaaactaaagaacagcaatctatcttaagttaaaatacagataataaacaaatatctcaataactggatatgaaaattagagagagcaacgaattaaacaaaattttaagaaagaaggaataattcaagaaatatagaaagaagggcatacttgttggaaggattctcttttttttttttccccggtttntttttggggggg

SEQ ID NO: 311 - DNA, 378 bp, Gossypium hirsutum
  misc_feature (339)..(340): n is a, c, g, or t
  misc_feature (346)..(346): n is a, c, g, or t
gagtttagttgaattatcttctagtagaggtttaatactgagtttcaagtaaaagtgcatgcgtagaaataatgttttgtatcatttattacttagcttccggattaatgaaattattgtagatttgcaattcgtaactttatgatccgtttgttttcttgcaaatcgtataataaggtattttaaattcgaagctatgatgagattgacttgactttaattggagatatacttaatgaatttgtaacctagatggaagggaactaaggaaatagaatggaatcaacattgtaaaatgcatcttccagagaaatgttgcatgtgaaaagagatggctgnnaagagnacggttgaataggtactgatgatgctaaggag

SEQ ID NO: 312 - DNA, 550 bp, Gossypium hirsutum
gatgacagtcccttttgatggaaatgatttggccgtgtaaatatttctttttcatttgctgtaattttgaccgtaacttcagttcttttcagtgtcttatttatcatttcctttgaacttctttgttgcaggagcaatattgtgtgtgataacaaacatatgctattgggtctttctgatggatctttgtatagtatctcttggaagggggaggtaatccatagataacatgtagttgcaatttctccttctatgcaattccttcaaagccaatttgattttgtaattctctttttctctatagttttatgcagcttttggatttgattcctctcaacataatgacaatgaagttacttcattatcacattctctagctaattctattgcttctggagaggctgaaagagcttttgcctcaaattatagagtctccaagaaatctgctatagcacagttggagttttgtgtttcgatgaggctgctattagtcttatattctgatggacaactggtggcatgctctgtgagcaagaaaggtctaaagcca

SEQ ID NO: 313 - DNA, 372 bp, Gossypium hirsutum
ggctggtattatcattgcatcggcctcgatccataaaccctgttttgttttgttttttttgaaaaaaataaaagaaacccattgtttttcgtcgcgatatttagtggattttgatttgattttttgaaaaaaagatggttcacaatgagcagaagaagaatcagggttgtaaaggcaataagttattgaatagcgtctctgttttgggaagttccggtccgatccggttcgttgttaatgaaggagaactggttggtactgttattgatattgctttgaaatcatatgctcgtgaaggccgttacctgttcttggatcggatcttaatgagtttcttctttattcccctagtgttggatcacatgcattgag

SEQ ID NO: 314 - DNA, 800 bp, Gossypium hirsutum
tgcaatgccgcaaggtacttttcttttttctgtcaatttaatgcaatcttttgatcccttcatacattcactgccactcacagctgtatatctacatttcttcgtttcggtttttccgtttatttttgtggaaattgtgccggaatttataattattcgttggagattctggatctatcaacaaatttgttcatcgccttaaagaatttacgccttcctcagatctccgttgtcttcagtttagagttctattaatcggaaaaatgcgaatttgattattttaataaaagaaccgaagagaggagaaattgagcttgatatttaggaggttcaagtagaatgtagccttttatgttatgaattaagtagtgtgtattaatacgatgatttttagagcgaacggggtttgttgatatcgaagatatataaaatgcctctgtaaacctccattcattctttcattttttcaggcgacaaagttatattgtttcgtgcacaaggttcctgtttgtggagaatgcatatgctttcctgagcaccaaatatgcgtggtaagtttataacatcctactctcttttaactcaaaaccgtatttccaagacttgaacttggttcaagcagaatgtagttaaactactgtgactaggagcaaaaattaaagaattctacgagtaagaatgggcatggatgtatctatttgggaggcgttagaactgttcttgcaaaagagtacaacttctatggaagctttatgtttctggttatgttttacttgttaataacttttactcttttattg

SEQ ID NO: 315 - DNA, 723 bp, Gossypium hirsutum
gagaaagcactaccgtaagaattctatcatatttttctattgtggaaattaatactcatgtattaaagtaagtctcagagcttattgtctatcaggtatatggactttgtctttggcaacgaaactgaagcaagaaccttctcaaaggttcatggctgggaggtaatagctgttaaatataatatgttattatgaatttgatggtttatgtttggtaatgacctgtttgggctggttttgctgtccagactgatgatgttgcagagatagccctgaagatttcacagtggccgaaagcttctggaacatacaagaggactactgttattactcagggtgcagatccagtaattgttgccgaggatgggaaagtgaagcagttccctgttattttgttacccaaggaaaagcttgttgatacaaatggtgcaggtatacagtcacttccaacacttgacagtgttaatgctaaaatgaaatgccatacaagacacataactcagattagttatagaaatgatttaacttagatccaatttgacatatcagtgagtcagaaacaaagccgcaaccatttaatggagccatttttaaccatttaatgcaattttgtgcaggtgatgcctttgttggaggctttctttcacaattggttcaagggaagtccattgaggattgcgtaagagctggttgctatgcatccaacgttatcatccaaaggtc

SEQ ID NO: 316 - DNA, 946 bp, Gossypium hirsutum
  misc_feature (416)..(416): n is a, c, g, or t
  misc_feature (443)..(444): n is a, c, g, or t
  misc_feature (491)..(491): n is a, c, g, or t
  misc_feature (516)..(516): n is a, c, g, or t
  misc_feature (570)..(570): n is a, c, g, or t
  misc_feature (616)..(616): n is a, c, g, or t
  misc_feature (618)..(618): n is a, c, g, or t
  misc_feature (636)..(636): n is a, c, g, or t
  misc_feature (690)..(690): n is a, c, g, or t
  misc_feature (728)..(728): n is a, c, g, or t
  misc_feature (761)..(761): n is a, c, g, or t
  misc_feature (763)..(766): n is a, c, g, or t
  misc_feature (770)..(770): n is a, c, g, or t
  misc_feature (792)..(792): n is a, c, g, or t
  misc_feature (802)..(815): n is a, c, g, or t
  misc_feature (820)..(820): n is a, c, g, or t
  misc_feature (822)..(830): n is a, c, g, or t
  misc_feature (837)..(839): n is a, c, g, or t
  misc_feature (841)..(843): n is a, c, g, or t
  misc_feature (845)..(850): n is a, c, g, or t
  misc_feature (852)..(856): n is a, c, g, or t
  misc_feature (858)..(880): n is a, c, g, or t
  misc_feature (882)..(886): n is a, c, g, or t
  misc_feature (894)..(896): n is a, c, g, or t
  misc_feature (898)..(901): n is a, c, g, or t
  misc_feature (903)..(903): n is a, c, g, or t
  misc_feature (905)..(909): n is a, c, g, or t
  misc_feature (914)..(916): n is a, c, g, or t
  misc_feature (918)..(923): n is a, c, g, or t
  misc_feature (925)..(932): n is a, c, g, or t
aagaaaagcagagctttgaatatctaaccaaaaatggcagcagaggaaggtcaagtaatcagttgccacacccttgattcatggaaggagcaacttcaaaagggaggccaatccaaaaagctggtaattttattttaatgaatcccttccccccccccccaaaatatttagggttaaatttataattatttttaaggtttcaaaaaaggggtcaaatctgttgccgtttgcttcaaaaaaaattaaatttataatttggttgttttatatgaaaaaatctaaatttttctattcaaaaaattccacaatccgaaaagttgaagcctcttaaaaacaaaagccattttctgttgatgctaaagcttcttcttctatttttattttattttaaaaattcccggttaaaaaaaaattanttagtcaatttcccatgttaaaactannaaattttgatgtgtttgtttctagggaaattttgttaaaaattttgnaacccttttccaattaaaagttttnaaggaaagaatgctgtaaaaaaaaaaaaaaaaaaaaaatgggagggaaattaangaaatttaaggttagaagggggggagggggaaaaaaaatcaatgtngnattttaagggggacgttnatgtttgttctttgatttttacccttccccattaactttttcatctttttttanaactttagcttcttcccaaacgttatgggaatttgtanttaaagggaaaaggggggggggggttgatttcncnnnntcangggggggaccctgccgttttanttcccccttnnnnnnnnnnnnnnccaanannnnnnnnnatgttannntnnntnnnnnngnnnnngnnnnnnnnnnnnnnnnnnnnnnncnnnnntaaaatcnnnannnnanannnnnaaatnnntnnnnnntnnnnnnnntttttttttttttt

SEQ ID NO: 317 - DNA, 801 bp, Gossypium hirsutum
gctccttgatttctcttcttcaccatagctgatggtaagcgcatccttccactgcttcagcctcagcctcttgaatccttcaaggtcaatgcaacccaggtatgattatgactccgattagattgatctcttccttctgcttctcttccaactcattccactaatatgtagcatttcccaagtgattaatatccatacatgccttgaaaacatcttcgattatgagattgttttggtgagagtttctttgagcaaatcttgctgggaaacttcagtgttacagattcccctgttcatgaaatttccaggaagtgaatgagggaaaagacaaatatagtgtcagtttttatgggttgtttcatttaacttctaaaacatactgttttacatcgttcctttgatagaatgtggggagctgcacttacacagtatcaataaggacaagctgttcttcaactacctacacaagagatcagatcagtcttgcatttggcgatgcttatgggaatcaggtatgttttaattgcccttattggaccatcacatttcaactattaaatgctttttcagtggaatcaatgaaattggtaaagggggggccattttcttaaaacagagtattgtttgaattgaataggtgtatgcaccaaggctggatgatccatactcgagaacatttgaaagctgttcaactgatacatttcaaataaagggtccttgcacataccagatttgctatctttacctctacaggagtggatatgatggttggaagccagagagcgggactgtgtacggata

SEQ ID NO: 318 - DNA, 394 bp, Gossypium hirsutum
tcccaccactttccctctccacctccacctccgcctttcctcctccgccacctgtctccgtcacagccgatcttccccgttcttaaccttctgcgccggcggcgatggtggtgatattaacagcaacaacaacaactcgggtggcggcggtggaaacgatgagaatggaaaacacaggggtggtgatgacgagaatgcgggtgataagaacaggaaagaggcgatgattgtactggcggaggcagggaggtcaacggagagtctgccgaaggacttggcggcggcgatccaggctgggaggatccctgggtcggtcatagagaggttcttggggcttgaaaaatcggggcttatgagatggttgatgcagtttggagggtttaaagaaaggcta

SEQ ID NO: 319 - DNA, 935 bp, Gossypium hirsutum
atgtttttattgctttcttcctcagttctgcctgcatcatccagttaaaacaagagaaatccataataaacacaatcaattgaaatccgatgaactcattttgggctttgcttaatgaagtttaaaatgtaattttcactagttcaaacggggaccaagatcactactttcatataatatttgagtcccaataatttcctaggacgtgtaacattaaatagtaggggccactacacttcccaacatccctggaaaccatagttggattaatttgagggttagtggggtcattcaatgcttggtgtttaatgttcccaggaaatttccaacattgagttcctaggtggaactgcatgatttcaggggagcattaatatcaatatccaaaagaaacttggggagtagttgagtgaaatcaaagtaccagaaatatagaggatctttttttttctgaagaagatcttaacttggattttttacaggttgcaaagagaggaagcaaagatcagtgcttgggagaatctgcagagggcaaaagctgaggcagccatacgtaaactagaggttcacatgcacacaggatttctatttttgtcactttttatctctatccaactgtttaaaccgtcttaaaatctcttttttttcctgaattttaatatcagatgaaattagaaaagaagagatcagcttcaatggataagatcttgaggaagctgagaacggctcaggtgaaagctcaagaaatgaggagttccatatcaggcaaagaggatgaacagattcccaagacttcaccaaagtttacattcttccatatccgcatgagttttctcagcagttgcttcacctgccatggtttctagtttcttgcaaatcttatgtccatatcctcaaatcttttccatcaggtataagcttccaagggagtattg

SEQ ID NO: 320 - DNA, 367 bp, Gossypium hirsutum
cgttcccggtccaacagtctggcgagaaccggttcacccatgtccggtctcttgcggagaaagaaaaccagtaaccagtactacgcaggtggcggcggttacgtggcgcaaccggagccattgatcgcgagatccgggagcttaaggccagtcggggaagctttggctccactcatggaaggtcctgatcccgacggagtcgaaatcggggactcgaaacgagtcgggtcgggtataggacaatgggctaaggggcagttatcgaggaacccttccgttactgcttcgtataagaggtctgatctgagattgttgcttggggttatggctgcaccattggctccggttcatgttaactgcaataaaa

SEQ ID NO: 321 - DNA, 380 bp, Gossypium hirsutum
aggtattggctgatcatatggaatcagaacatcacaatcttacggaattgggcaatgagtgtgtagaaaatgcttctaataaatcaaattctctcgatggggatactggtccagtggatcagtctttgcacaatgatgtagatcatgatgctgtgcctcctaaaaatggttgccattttggtgacatggagaaagaacaaactaaaccaccaggaaattctgtccatgatgccttgtgtgttgagtacacatctgctgttggtaatgtcagaggatctgatggcttggatagggtggaagatatgcagaatggtgttatgcactcaattgatagaactgagggagaatgtgcagaatctcctagctgctccaatatcacc

SEQ ID NO: 322 - DNA, 401 bp, Gossypium hirsutum
atatacgagacttaatattattattttgtttgtttatttgtgtgtgtctcatcttgttgtgttcattactcagatccctatcgcttttatttctgttccatttttcctctttattttctaattttgggtgttatttattccatatagatttttaattataattttaatcatcttccaaaagagggaacttgtttttaaaaaccctaagcagaaggaagaaatcgaagtgatttgagccaccgcctctgctccgccaccagccatgaaggttccagaggcctgcaagagcctgggacatttatacttaggtttcctacttctaggagttggccccaccccgatgctggtagcttagttgtgacatatgttggcactgattacagtcttccacaagctgcttt

SEQ ID NO: 323 - DNA, 683 bp, Gossypium hirsutum
tttactctactctatcccttttcctcatccccatatcggctcaactacagaaagtaactaaactaagtggtatcttctttacaggaaaacccgggcagggccaatggtcacattttcaatgtgggtaacccaaacaatgaagttacagttaggcaacttgctgaaatgatgactaaggtgaaggacatgattgatgctatatagtttatttaattcatatcttcattaatatgtttatggtgattgatcatcatacacgatttgtaactgtatatgctatcggattcttcaggtctataccaaggttagtggagaatctgcactggagactccaacaattgacgtcagctccaaggaattttatggcgagggatacgatgatagtgacaagagaattccagacatgaccataataaataaacaacttggtattctcttgcttccttgcttatattctcactatctttaatttcaaatgttggagcatctgatttaaagtaataacgtcgcattaggttggaaccccaagacatcgctttgggacttgcttgaatctacactgacctaccaacacaggacttatgctgaagctattaagaagtcgatggcaaaacctacttcatcctaagtaagcaaacgaacaaacaaaaattttaaagatatgcctaagcaaggactcgacg

SEQ ID NO: 324 - DNA, 1353 bp, Gossypium hirsutum
  misc_feature (498)..(498): n is a, c, g, or t
  misc_feature (500)..(500): n is a, c, g, or t
  misc_feature (502)..(506): n is a, c, g, or t
  misc_feature (508)..(517): n is a, c, g, or t
  misc_feature (519)..(522): n is a, c, g, or t
  misc_feature (526)..(529): n is a, c, g, or t
  misc_feature (536)..(539): n is a, c, g, or t
  misc_feature (541)..(541): n is a, c, g, or t
  misc_feature (543)..(554): n is a, c, g, or t
  misc_feature (559)..(564): n is a, c, g, or t
  misc_feature (569)..(580): n is a, c, g, or t
  misc_feature (589)..(590): n is a, c, g, or t
  misc_feature (594)..(610): n is a, c, g, or t
  misc_feature (612)..(615): n is a, c, g, or t
  misc_feature (621)..(623): n is a, c, g, or t
  misc_feature (626)..(629): n is a, c, g, or t
  misc_feature (635)..(639): n is a, c, g, or t
  misc_feature (641)..(643): n is a, c, g, or t
  misc_feature (645)..(647): n is a, c, g, or t
  misc_feature (651)..(657): n is a, c, g, or t
  misc_feature (659)..(663): n is a, c, g, or t
  misc_feature (665)..(669): n is a, c, g, or t
  misc_feature (671)..(672): n is a, c, g, or t
  misc_feature (675)..(685): n is a, c, g, or t
  misc_feature (687)..(700): n is a, c, g, or t
  misc_feature (702)..(716): n is a, c, g, or t
  misc_feature (719)..(723): n is a, c, g, or t
  misc_feature (726)..(730): n is a, c, g, or t
  misc_feature (736)..(748): n is a, c, g, or t
  misc_feature (750)..(759): n is a, c, g, or t
  misc_feature (764)..(777): n is a, c, g, or t
  misc_feature (779)..(795): n is a, c, g, or t
  misc_feature (799)..(799): n is a, c, g, or t
  misc_feature (801)..(804): n is a, c, g, or t
  misc_feature (807)..(808): n is a, c, g, or t
  misc_feature (811)..(814): n is a, c, g, or t
  misc_feature (816)..(816): n is a, c, g, or t
  misc_feature (818)..(821): n is a, c, g, or t
  misc_feature (824)..(837): n is a, c, g, or t
  misc_feature (839)..(843): n is a, c, g, or t
  misc_feature (845)..(851): n is a, c, g, or t
  misc_feature (854)..(862): n is a, c, g, or t
  misc_feature (866)..(867): n is a, c, g, or t
  misc_feature (872)..(889): n is a, c, g, or t
  misc_feature (900)..(927): n is a, c, g, or t
  misc_feature (929)..(930): n is a, c, g, or t
  misc_feature (933)..(936): n is a, c, g, or t
  misc_feature (938)..(949): n is a, c, g, or t
  misc_feature (952)..(953): n is a, c, g, or t
  misc_feature (955)..(960): n is a, c, g, or t
  misc_feature (963)..(973): n is a, c, g, or t
  misc_feature (975)..(978): n is a, c, g, or t
  misc_feature (985)..(987): n is a, c, g, or t
  misc_feature (990)..(1010): n is a, c, g, or t
  misc_feature (1019)..(1024): n is a, c, g, or t
  misc_feature (1027)..(1030): n is a, c, g, or t
  misc_feature (1032)..(1036): n is a, c, g, or t
  misc_feature (1038)..(1058): n is a, c, g, or t
  misc_feature (1060)..(1070): n is a, c, g, or t
  misc_feature (1077)..(1078): n is a, c, g, or t
  misc_feature (1082)..(1088): n is a, c, g, or t
  misc_feature (1090)..(1096): n is a, c, g, or t
  misc_feature (1098)..(1100): n is a, c, g, or t
  misc_feature (1102)..(1106): n is a, c, g, or t
  misc_feature (1111)..(1111): n is a, c, g, or t
  misc_feature (1113)..(1113): n is a, c, g, or t
  misc_feature (1115)..(1119): n is a, c, g, or t
  misc_feature (1123)..(1137): n is a, c, g, or t
  misc_feature (1141)..(1151): n is a, c, g, or t
  misc_feature (1157)..(1160): n is a, c, g, or t
  misc_feature (1162)..(1166): n is a, c, g, or t
  misc_feature (1172)..(1177): n is a, c, g, or t
  misc_feature (1181)..(1182): n is a, c, g, or t
  misc_feature (1186)..(1186): n is a, c, g, or t
  misc_feature (1188)..(1190): n is a, c, g, or t
  misc_feature (1193)..(1196): n is a, c, g, or t
  misc_feature (1199)..(1211): n is a, c, g, or t
  misc_feature (1214)..(1216): n is a, c, g, or t
  misc_feature (1218)..(1226): n is a, c, g, or t
  misc_feature (1228)..(1231): n is a, c, g, or t
  misc_feature (1233)..(1257): n is a, c, g, or t
  misc_feature (1260)..(1266): n is a, c, g, or t
  misc_feature (1271)..(1295): n is a, c, g, or t
  misc_feature (1298)..(1303): n is a, c, g, or t
  misc_feature (1305)..(1305): n is a, c, g, or t
  misc_feature (1307)..(1323): n is a, c, g, or t
  misc_feature (1327)..(1328): n is a, c, g, or t
  misc_feature (1333)..(1344): n is a, c, g, or t
  misc_feature (1347)..(1350): n is a, c, g, or t
cagatgcggggtgttcaggccgagattcagaagatcattgtaatatcaacaaggtatttgttagatcttgcaaattatttgttggttggaacttggacatgcctggtccggttcccagatgaagaaaggatttaatattttatttttcgtttgcagcattcttatatttaggcaaatcctctcgagcgagcaagtctctgacatggaaagaacaatatcaaattgcactgaacagctctcggaattcttaaactgtgtcgaagatgcagatattgaagggattgttgacacaatcatcgggacctcaagacttggtgacaaagtaacagatgacaaaaaccttcagttaaggaaatctatgatggccaggatgctagcaaagagcttgcaagctgaggatccagtgttcaaaaaggtatcccttgccgtttatttagctttcagaggggttgtattcggcgggagcggtacccatggtagaaagttggcggaaactancntnnnnnannnnnnnnnngnnnnttgnnnngtgcacnnnntntnnnnnnnnnnnntggcnnnnnngtttnnnnnnnnnnnnttccaggcnnttcnnnnnnnnnnnnnnnnntnnnntctcgnnngannnntatgcnnnnngnnncnnnggcnnnnnnntnnnnncnnnnntnngtnnnnnnnnnnntnnnnnnnnnnnnnncnnnnnnnnnnnnnnnaannnnncannnnntaatannnnnnnnnnnnntnnnnnnnnnnagggnnnnnnnnnnnnnntnnnnnnnnnnnnnnnnnggcngnnnnaanntannnncnannnntgnnnnnnnnnnnnnnannnnntnnnnnnngcnnnnnnnnntgcnnggggnnnnnnnnnnnnnnnnnngtatttttgtnnnnnnnnnnnnnnnnnnnnnnnnnnnngnngtnnnntnnnnnnnnnnnnttnntnnnnnnggnnnnnnnnnnntnnnntggcacnnnttnnnnnnnnnnnnnnnnnnnnnccgcctctnnnnnntcnnnntnnnnntnnnnnnnnnnnnnnnnnnnnntnnnnnnnnnnnttttctnntctnnnnnnntnnnnnnncnnncnnnnntctanancnnnnntagnnnnnnnnnnnnnnnttcnnnnnnnnnnntccgcnnnntnnnnnaactannnnnncctnnctcntnnncannnncgnnnnnnnnnnnnnttnnntnnnnnnnnntnnnntnnnnnnnnnnnnnnnnnnnnnnnnnccnnnnnnnctcgnnnnnnnnnnnnnnnnnnnnnnnnnttnnnnnntnannnnnnnnnnnnnnnnngtcnnttaannnnnnnnnnnntannnnttg

SEQ ID NO: 325 - DNA, 457 bp, Gossypium hirsutum
acctttccccggggtacgtacttcattaaccccacccaaccaaaaacaagatttcattaattgcttttaacttttttttatatgcattttgtttgtagctatttttagatcacttttatacgaggcctgtgggcgtgtggtaaatccagtttatgggtcaattgggatgctttggtccgggaactggggtgagtgccaagcagccgttgatgctgtgctaaaaggctcccccataacccaaacttcatcatctttggaatcagttgaagaagagcaaccgatttcccctctcaagacatacgacatccgccatgtcttcaaggacaccaaaccagctgcagcagcagacatcgacaaggtcaagacccgcactcgtttcaagcgatccaggactcgctccaagcgacaggtggtgactcccggatgaacccactccgaaatggggacagcaaaaaaa

SEQ ID NO: 326 - DNA, 347 bp, Gossypium hirsutum
agctggtggcggccggttgccgaactccatcacctaagataacggcggatgctctggtgaaacggttccttgagacgaactcctccggcgtgtccatgcacatcggagaccatgtccaattcgcttattctcaccataaagagtctcctttacagcccaggtaaaaaaaaatcatatatggtattggctgttggatgatctcaatcgttgaaaattaattatgaattcaaacttcagttgatcatcgagtgctttcgaacgaacctaggaattactgtaatttgtttaatcgaataatttacaattttttggccgatgattttttttattatcataaatcataaaac

SEQ ID NO: 327 - DNA, 679 bp, Gossypium hirsutum
gatggaggattgacggtcactgataatagtggccttacacctgaacagctcgcttctgacaaaaatcatagacaagttgcttttttccttgtaggttccatgatattttaacttggttaagaaatatgattagtctttgatgaattgtttggatatttatatgtttttttttcagtcttgtactgttcaagctcttccttgttagcaatgactcattaatgccttggctgaatgaaagacatttctggcttcttccgccccacaaatatttcttgtgaactcttgataaaaattcaaataatagatgctttataagcatgagataaatgtccaaaatgtgttatttattctttatatttctggggacaatttgaaatggttgatgctttatgcagttgcaaactcaaagcattttccgtacctttatgctgtgttaaggtttatgaagctgggagttctctaataactaatatttttgttcttgatggtcaaaccttttacctttctttgtataggtgcaacatgggtgcagcatttgaaaattttgtgacttcactatggaaatattaggatgcaattgttattgcttttgattggggtttttatttgtttcggtaaagactgtaaaatttactttgtaagtgcttaatttgtctcctggctattggtctgttttgat

SEQ ID NO: 328 - DNA, 771 bp, Gossypium hirsutum
atcttcactctgctttcgaaatccaacgatattcttcggcagccattgatctttaggttttatctctcatctattagattgattcttttataacacaaccgaaaaaagtaattttttttcttaataaaaaaatcagaaatacacttgctatataggtgcttgattttttccccaaaaacccaaaacagtacaaaatggaagaagaatcttacaagaaatctgaaggatgcaccattaaggaatgccaagacatgattcaaagaagtctacggagtaatatttcaattctttttttaatctttttttttgccaaaatgtattatttttcttttattggggttttagggtaataatcatttctgaattattggtggttattcattgggaaaactatgggaaaagttaaattttgttgctttactttcttgaatgttcaggatttttttcattttagggttttttttccttcaaaaaatttggggggtttagctaatatgtttggaagtcaaataatttaaggttttcatgattttttgctacgaaagagtgaatttgactgtttccaagttttatgtttttctccttctttttcccgcatttcctagcaccgaacaggtatatatatgattgaatggatctaattattattattttttgtgtgtatatttggaatagctccaatggtgaaatttttgatggagcatatggagaaaacagggtgtaaggtaggagataatttcatcaaggcagttaattgcaataaaaaaatgg

SEQ ID NO: 329 - DNA, 547 bp, Gossypium hirsutum
tgcagagactctcacgtccctgtaagttcaattttcttcaatggaatcattcgattgtctaaaccatatatgagatttttaaccataaccatgtgtttggtagattctggcaccattgccaattgggttcgcagtgttcttggtgcacttagccaccatcccaatcacaggaaccggtattaacccagctcgtagtcttggtgcagccatcattttcaacaaggacaagggctgggatgaccatgtaagccccaattctttcaccgtgatcactattattttttttctaactatgaatgatatacttatctacttcgggtcatgttttgctgcagtggattttctgggtgggtccattcataggagcagcactagcagcactctaccacgttgttgtgatcagagccattcctttcaagtcaaactgatcaaaatcaacggtccatatgatcatatgatctcaacaaaatgaaaaatttcacccatgcaccctttcagtttgtgtatttcccaatttatccttttgtttttgcatgccctttgtgat

SEQ ID NO: 330 - DNA, 393 bp, Gossypium hirsutum
gggagagatcctttcttcaattttggtggtgaccccttcggtggtgacctcttcggtggtgaccccttcggtggttctgggggctttggaggatttggtggtcctagaaatttattctccaacttctttggaggaaggaacccatttgatgacccttttatcacacgcccttttggaagcatgtttgattcaagcttctttggccccggtcaaagtccttttatggatatgcatccgactgggtttattgagcgtcaggctccagagccaaagagaccaaggggtctgattattgaagaactaaattctgatgatgagaaggaagaagcagataccgggatgaaagggaatcctaggaagcatggtaggtctaatgccgaaccttatgttgag

SEQ ID NO: 331 - DNA, 372 bp, Gossypium hirsutum
aactgatccaacagaagactctttaaaggaatgtgatgtaaatgaatactcgacaaagtcattcagaatagcagagagcagggatttctcctatttagtcgatgtcttgactgaggcaggctttcatactagaaaccccgatatactcaacggatggcactctgctgaaaccccaataagcctctcggttttcgagacattagagaagaagtacggtgaacaaatatcttggaaaaggtcagcaaggaggctactgttcgaccgcataaatttgggtttaatcaaaatcctccagccatgcttacgagaccctatgtggacaaaacctgttgcaagaagacttattagctacgcacagaacttgaaagaaaa

SEQ ID NO: 332 - DNA, 349 bp, Gossypium hirsutum
  misc_feature (221)..(222): n is a, c, g, or t
  misc_feature (235)..(236): n is a, c, g, or t
  misc_feature (238)..(238): n is a, c, g, or t
  misc_feature (242)..(242): n is a, c, g, or t
  misc_feature (247)..(247): n is a, c, g, or t
  misc_feature (260)..(261): n is a, c, g, or t
  misc_feature (271)..(271): n is a, c, g, or t
  misc_feature (278)..(278): n is a, c, g, or t
  misc_feature (287)..(287): n is a, c, g, or t
  misc_feature (289)..(289): n is a, c, g, or t
  misc_feature (292)..(292): n is a, c, g, or t
  misc_feature (308)..(309): n is a, c, g, or t
  misc_feature (314)..(315): n is a, c, g, or t
  misc_feature (318)..(320): n is a, c, g, or t
  misc_feature (329)..(330): n is a, c, g, or t
tcatcttatggcaatcatcttccaccttggcaattcggttaacagttgcatgaaatatatatccaacaagtaatgcaattacaaggatgccaatcgaagtagttattgctaaccatggccatggtggcttttgtttaaacctgtatgaagaacaagcttagtccatgtctattcaagttctttatctttgaaatgttttaaagaacttagaccctcttaannattggctttatgnntnatanatatntattgaaacttanntcatggtcancatgtcncttgctaangncantttactaaaatacttnntttannaannnagaaaaaanntaggtcaccaaccaaccat

SEQ ID NO: 333 - DNA, 730 bp, Gossypium hirsutum
ctctttagacccggctgatgctcataccatagcccgagcttttcctcacacttatggcaagcccttggctcactttctcagggcaactgccaaagtacctgatgctcagattataactgagcatccagctattaggtgcttgttatatcacacttcatgatattgtttctttacttttttcttttggttcattttcatcgcaataattctccatcctttaacctttctgtggaattattggcatttattcatggtcgtatgcttctgtatgtatgtatttatgtatgcaagtgtatttttatttgtctaatgaccagatcttctcgaataacagggttggacttgtcttttgtgggagacaatcccctggtggccataacgtcgtatggggcctccacaaagctctcaaaatccacaaccctaatagcactttgctgggctttttgggtaagcagcgctcagtttaaatggtgttatacagtcaatgccacaaaacacatacatgatacaattatatgagaggacacacgtaaaatgcccaagatgtcggtgaaaaacaaactttgattgaaatagtaaaatgaaaactataaagttcaaatcaatgtgtattttttttatttttataaagaagatataaaaagatgaactctctcaaaattatataatttattttgtaaaacaatgttatttttagtcattacccaacaatcgagttggtacttgattg

SEQ ID NO: 334 - DNA, 382 bp, Gossypium hirsutum
caagctaagatccaagacaaggaaggcattccacctgaccaacaacgtcttatcttcgccggcaagcaactcgaagatggccgcaccttagccgactacaacatccagaaggaatccactctacaccttgtcctccgtctcaggggaggtgcgaagaagagaaagaagaagacctacaccaagcccaagaagatcaagcacaagaagaagaaggtcaagctcgccgtcctccagttttacaaggtggatgagtccgggaaggttcagagactgagaaaagagtgccctaatgcggaatgtggcgccgggaccttcatggctaaccattttgataggcactattgcggtaagtgtgggctcacttacgtttaccagaaggctg

SEQ ID NO: 335 - DNA, 971 bp, Gossypium hirsutum
gtatgtttttcttctctttttcttcctcattttcctgcgttttctcggtagccaaatgcaaaatatcgatcaatttgttttacacgttgccatttgcttgaaaatttgccaacacgttgtacgttttttgtcttagtaaccgaatctcgccgtttttgcataacttgttcttttagagactattaaaatttgcatagattttgatttttttttctttctttattacacttgtgtaggtatctttcttgaatgctacgatactgaaattcgctattagtttgtggaaattttgagatcaggtttgcattttttttaaaaattgctttaatcgattgtttctgttactcattgccaatttaaaatgtaaattttacggcttttgttgtttttctttctgtttttagctagattagttgggttttgaaaaatgagttggaatccgaacatggaagttcagtacatcaacagtagctacctttataacagtgctggcagctttatggaatattttgaaggtcttacatatcaacatgtcaatttcatttttgacggtgcttcccatcttcaggtaccagttattataaaaaaaatttccttttgatttcctgaaacgacttcctttagaatctatggttttctttttgcaaataatcagatgaaaaatatgcctattttctggataaatttgtcgtaatgatccattggttcgttgcggtatttgcctcttagcttgcaagaatatctccgggtgtgtttgaaggatttgaatcatatccgttgtactatatttagatgttttattgtaaatgaattgctgcaattggtcacactcacatccaaaaatggattttccatctgcaggagagtgcgtacccatcgatgactacaagcttctacaagtttggattatctgattttggcaataatatttcatattatgatcatagtcctagttatgatgggagtaacca

SEQ ID NO: 336 - DNA, 364 bp, Gossypium hirsutum
tctcttttttggtctcgccgttttggattaggcggtggcggaaatgagcgttgagggtgaggcaactcaacttcgcgatgctgccttgccataataatatctcagtaaccaatgaacgacccactcgtctccctcgaagtcgatgtcgtcgttggcgtcagagccgtgccggtattgccttcgttgcggttgccgcgttgcttatctctactgccgcttggctttctcttgttttctccggcactaccactcatcggtggcgtcgtttgaagtactgggaagggagtccacattccctttccggttccataccctggtcttcttttcctgatcggttaccgattcctcctcttcctccttggtt

SEQ ID NO: 337 - DNA, 585 bp, Gossypium hirsutum
  misc_feature (375)..(375): n is a, c, g, or t
  misc_feature (415)..(415): n is a, c, g, or t
ccgagtggatttcagcttcctcttctttacaccacaaaatatttcgaaatttccagatcattcttctgagacaataccctttgcgttacatgaaatgatttgatggacataagcacgagacgactatataaaacttcaaccatacaacgaggaaactaatccactttaagctgagtctactccttcaatctgctgccgagcaaggtatctttcccttcgctctttctgcaagacagaaatttacagttgtaagtaattccatatcatacaagtaaaatatctataagaataatttttcatcagatgattacaagaaaacttacccattcatctatcacaagtccttccccaattatccttggacctgcatcctcnggaggctttttgcgtgcctcaactgcagcatcggcatcanctaattggcgcttcaatttttccagagccttaaacccataaaaatatttaggccgtttagtttgctatgattttgataatttggtatatgcatgtcaaacatcatgcaggcggaaagcattgacacgctagaatgaataagggcacatatatcagtgacttaggggtaat

SEQ ID NO: 338 - DNA, 665 bp, Gossypium hirsutum
  misc_feature (623)..(624): n is a, c, g, or t
  misc_feature (643)..(644): n is a, c, g, or t
  misc_feature (647)..(648): n is a, c, g, or t
  misc_feature (650)..(653): n is a, c, g, or t
  misc_feature (655)..(662): n is a, c, g, or t
tgtgtaaggttcaatcttcagggatgatgaaatattaatagattgcttaaaaacaaggtttaatgcatatgcatcgacgacgaaagccttcgcatttgccatcctcataaccctctgtctggcaaacaatggcacagttatcacgattcatgcacatccctttgaatttatgacttggagactcgcattttctaccttccactgccgtaggtcccatctctgctttatttcatataattgcatcataaaaatatgtaaaaaaatatatagaaaatgcaagtatatgtaaatccaaatatatatgggaaaaaaataaatagaaaactattaaaatataaataagacccagaccttcttgtttatattttaatagttttctatttatttttttcccatatatatttggatttacatatacttgcattttctatatatttttttacatatttttatgatgcaattatatgaaataaagcagagatgggacctacggcagtggaaggtagaaaatgcgagtctccaagtcataaattcaaagggatgtgcatgaatcgtgataactgtgccattgtttgccagacagagggttatgaggatggcaaatgcgaaggctttcgtcctcnntatatgcattatacccttnnttnntnnnntnnnnnnnnatt

SEQ ID NO: 339 - DNA, 413 bp, Gossypium hirsutum
tctcatctctcaccccaaagaagaaaaacagaagaagaataaggaggattgtcttttgagttcgtaaagccgcgcgtgttgtacaaagtcgccttatttgtcttcctttcgttgtttgtcgtgtgagacaacaggacggagcaaatgtctgaggacgacgagaggcagcaatctccgccgtcggatcttgagttcgtttccaacaaggcgcggaactgtaacgccacgggatctggctctggtcacccggagttccagtcgacgtatccggaccaggttctggagaacgtgttggagaacgtgctccacttcctgacctcgaggcgggaccggaacgctgcttcattggtttgcaagtcatggtatcgggtcgaggcactgactcgatccgagctgttcatcggaaactgcta

SEQ ID NO: 340 - DNA, 398 bp, Gossypium hirsutum
acttcttctccaataatccccaaacatttctgataaaataacgcgggaaatccatcttccccaggttccttagtgggccctaattctgacaaagcctgctgaatttattccttcgtgtatctctccataagcattgcattatattctttcgatatacatcgaggaactcacgacaaaacgtactcaaattttgccttgctgcttgcgtagaaaagtttttggaaatacattctggcaatcatttccatttcttgtaatttgtccgtttcatcttgcattttacgaatcaaatttctttgtctcttctgtgtggcttgttcgtggaagaaagctgtgtttttatcccctaatcttaaccagttgactcttgttctttgtctcttcgaatttgtcttgac

SEQ ID NO: 341 - DNA, 377 bp, Gossypium hirsutum
gagtgagaagaacccgatcagtacaacccggtctggaggaaaatgttctcgtgatcagagaaatggtaggttctctatgtcagctgaagttgacggtttgttaagttcagttgagggtgctaaatctttgaaggaggcatctaatggtagattcccaaatgatcatgttaggaataaggaagagaggtttactaatcgaaatgcaaaactaactcctgaaaatgacagcgaagttaacagtttcttagatcctcagagggaaatttcattgccatctttgccctcaaaatctgcgggggctgtaaatcctgatacgaaggaagcaccacaaactggtaaccttactatccggattgggaaagataaaggaagaaggc

SEQ ID NO: 342 - DNA, 902 bp, Gossypium hirsutum
tcttcttgtatgcttctgcattccttcaatttacttctctataagtttgatattatccttaaataggtttaggaaggggttctaaggagcattcggcattcggttatattatttggttcaaaggaagagatttttgcctctattggacaccggattaacttttctgatattgaacgataaatacacatgcttaaagcaatatatggacttaatggactatttctttcccatgttattttttatgtccatttgttcattgatttcatatttgcgcagcccccggaaaaactccactgagttgggaaaccagaatacaaattgcgattgatgtggctaatgctttggtagtagcagttgttctttttcggatttgcagttcgttaatacaaaattatagtcttgctaaatcatttctctttcctcgtacgaaccttgcaggagtaccttcacttttattgtgatccacctctgtgccacagggacatcaaatcaagcaacattctgttggatgaggatttcgttgcaaaggtatcgggtccgttgaattcaccagaacttctgatttccttttaatcttcccaatgcattggtttgtataacatttttctttctcggtatacatatatttggataatagaaaatgaagtatgaatagttttcgtcaatgctttctgctttattgtatcctctaggttgcagattttggccttgcacatgcttcaaaaggtggctctatttgcttagaacctgcaaaaaccgacatccgtggaactccaggttagccagtcattggaaggtttaaataatgtcttatgctcttaaataaagatctaaaatgttagatgactttcaggttatatggatcctgaatatgtggtcactcaagagctcactgataaaag

SEQ ID NO: 343 - DNA, 395 bp, Gossypium hirsutum
tggccttccctgtctctgcaatcggatttgaaggctgtgaaaaaagacttgagatttcgttttttgaccctggtttttctgttgatcctcgagggatgggcctccgttccttatccaaagcacaattggatgaaatcctaaaactggctgaatgcacgattgtttcttcactttcaaacaatcatgtcgattcatatgttctttctgaatcaagcctctttgtctacccatacaaaatcatcataaagacttgtggcactacgaaattgctcttttcaatccctgctattctgaaactggccaacagcctttcactttctgtacagtctgttaggtacagtcgtgggagcttcatatttcctggggcacaaccatttccacaccgtaacttctgt

SEQ ID NO: 344 - DNA, 520 bp, Gossypium hirsutum
cgaatcaaagaccttgtttctcggatgaccctgcaagaaaaggtcggtcaaatgacccaaatcgagctctgtgttgctactcttgacgatgtcagaaacctctccatcggtacacttttcaccttcttttgctccacaatcattgacccatgcagcttccgagcttcaacacccccacgtttaaactctacatctgttgctactcaaatcgcaattcatattggctaaagataattactgattcgttttgtcatagttacaggcataatgaagttgctatatagatccttggcatgaacaattaacatatatggttctaactctatgttttccttttaatgtaattattggtggacgatctcgtagggagtatggtcagcggtggagggaaagagcctttagagaaagcaatggcatccgattgggccgaaacgattgacaggtttcagcaggcagcagttgattccaggcttggaataccgcttgcctatgggatcgatgcggtttcatggaacaacag

SEQ ID NO: 345 - DNA, 603 bp, Gossypium hirsutum
ttgttaacagttatggaaatttgtggtttatttttatcaatctcatttaactctaatatgtagctatgaacaaatctccctatttcttttccagatttactcccttttttatatactctatcattcctgtctccccagatagcccataatgcacagcaaaaaatcctacattgtgatgccgaactctgtgaaaatacccgggttagccactgtaaaaactccatctggttatcttgcaaacacttaagatatgataactctctccacactgatgctgaaacaggacattcacgaaagagatgatccatattatttgtttctgagccacaccggggacaagctgttgtgttcgttagccttttaagtagcatattaactcatgtagctaggaaattccatgatatcttccacactgtaatttttatcttggaaggaatatccagaagccataatttttttgtaaaagtccttgtagccgacttgtaaagcataagctctagggtcatcttcgatgccttgtaatagtttgtaggcactacgtgctgtgtactcgcccgacgcttcagctctccagacttggaaatcttcatgtggttcttcaga

SEQ ID NO: 346 - DNA, 309 bp, Gossypium hirsutum
cagcatttaccagttaaaagcaaccttcttgattcaggttcggagacgaccaaattcggcttcggtggttacgagcagctcctttgccccaaacctcgccgtgtcggacccgtcgttcccgagtttctcaagcccctcagatgtaccaaacacaggttggtttcaatttcattgctatgttttttttttaatttacattacattggctaatttggcctctcatgtaaatcatcatcagcgaacacaacactgatgggagaagtggagttctgaacataattgctgagacggtaagggatttcattcatc

SEQ ID NO: 347 - DNA, 388 bp, Gossypium hirsutum
cggcgaccagcgtgcgcgaacctcgagattactttttcagccttaagattccctctatacctcgattttaacggagcagaaggaatcccatggaatttgtaaggtaagcttttcacttcccttctccctttcagcccatctgcgggcttcatcggcgctgaaagcgcctccacccaagacgcgattttaaacagatccctaaggatctaaaatcttggaccggagaagtgaacaatgaatagatcgacccccgaatcaggtaagtaaaccctttccccttttttatatatctttatgcaatagatttgaaatcaataaaaagaaaaaaaaacgatgaacaaaagagacacatttaagatgtttgcctccgattgtttcttcttctgtt

SEQ ID NO: 348 - DNA, 814 bp, Gossypium hirsutum
ttgccctatcggtttccttttggttttcggcatatccagtgacacttttaactaggtacacctcctccattttcaacgattttgttgctagtatatgtgctaaaacgtttgctgatctcggggtatatacaaacattaaatttctagatctaactgttatctgttgaatatcatgtatgtatactcctacctgtgatttgtcttgactttttgccttgtatttttttattattgataatgagtttccttcgataatgatcttcggccactgcatttcaattcctatttggactacttttcgacatgcaaacgctttatcagcgaaggccgatgccacctcttgatgaatttctgaacaagataagagggtggtcccttcattgtttctggccacaatccccgaagcagattagaaatgacgcccatcgtatgctccgtcaaaattgatttttacggacgcaccaggtgggtaactccattttttaaacccctttaaaataatgggaattcttttttcaacactatttaattaggtaatataattattgacgaaactcactatttcctgaccagtgccacttttcttatcatgcattctagcattcctttctccccaaatggcccatagtacacaacaaaaaagtcggctttggaaaaagggatattgaacaaaaacccaggtaagccactgtaaaaaatccatattagaatccattacaatattcgggattgataatgttgcctagacttccactgaaacagggcatttgcggaagaggtgatcaattatttctgctcttcctccacatcaagg

SEQ ID NO: 349 - DNA, 497 bp, Gossypium hirsutum
ggatcagccagaaccaggatgaagatggcttttacgacaacaccgaggatgatgtatttgatgtcaatgacattgttgatttgctcgcagatccctttgactttgtctctgacgaagatctccagttcgaagagttcatccaatctaatgaaatggaaaccatagcacctcctttaccgtcaaatggtggtacgtacgagtaaataaattcttacgactctggaaatggagaattatgtgtgtgtgtcgattctacttctactacttgcatttatcgttttatcaaattacattaggctttgagaagggtgttgaagctctgatgaagaatctgagtttggtgccatctagtcctcggttttcagcagaaccagcaaaatacgtggagaagccggcgaagaatgtgaatgctaaaagtggtcgtcgttgcatccatcaacctcgttgaatgtgtgtattagccatccaggttttagctgaaattctctggtcgtttg

SEQ ID NO: 350 - DNA, 664 bp, Gossypium hirsutum
tttaataatgggcccactgaattgagctgtaatgcataggtattacagccaaccaaacatgctgtaagtttttgctttcatatatatctgaggaagatatatgacaaccgctgctagacccacatggcagcctgccaaaggtgaaaacgaataaggtgatactcggatttttggcccatctcagaagtactcatccatggaccttgctgctcatactactctaatactctaaagcataggtcagtctcttttaagacttctttatacttcatcatatctatatgtgcgtgtttcatgggctgttctaacttcaaacatcatgttggtgttttttgtttaattagagtatctaattgctgtagatagaaaggtaatgattgaagcggaaaatgatgctgtgaatatgaattgttgttcttgtgttcttctcacgtgtttacaaagccttggttttggagaatttccatatttaaaatccatgcttcttggcatttagagatgcattaaggtcctatggtatacttgtattgcacccaagttcattgtttatctatttgtttttgcatgtgtaaaatgcagaaaagatgggcaggacacacaagacgagttgcagaagagaaacctccgtgctgagctgaagagcggaacggagacatttcaaaaa

SEQ ID NO: 351 - DNA, 363 bp, Gossypium hirsutum
atttctaaaccgagcaaaacacgaaaatggcagtggtttagttaatacatcagcaacttgatcggacgcaggaacttctcggaccagaaccgaaccatcggcaaccttctcacgaacaaaaaatagatctaactccacatgtttaaacttggagtgtaacacaggattagcagcaactgcgactgcactagagctatcacactagatatttggtggagaagcagacccaatttgcaattctcgtaataacgaaagtaaccacataacatcactcgtaacagcagcaagacttcgatattcagcctcagtcgtagaccgtgacaccacctgttgtttcttcgatgaccaggaaatagggttaga

SEQ ID NO: 352 - DNA, 375 bp, Gossypium hirsutum
aaaactgcaataattcatctaagttcacaaattgatatgatatgatattcacaaatcaagaaccattacaaagaacattaccagcaaggtaaattcaggtagaccccaaactgttgctctcataatctatcttagaccctacttttagaatcgatttcaaaggttttggttcctctatttcttggtcaaatgaacccattttttctgctctttttttcttcttacttttcttcttgcttgcagttgcagtcatctcctctactgtatcatttatgctaaccattttcttcggaggtcgagcttcagacattgctgcttcaataacatcctcatttttctcttcattagatgttgcagaaagaattccactttcac

SEQ ID NO: 353 - DNA, 403 bp, Gossypium hirsutum
ctgataatgtcgcggtgttttccttatcaacgtccggcggggtatttaagagagggattggtcgaatcgattaaggttcgttgggcaaaagtatttggttttcactttcgttgctcaactgcatgcgtttgtgatacttgattatgattttatatttgtgtatttgtagagtttgtaaaaactgaaatatgacatgaaccgctttaattactgttgttaatatagctttgtaattatgaacaacgaggatctgtgcaaagaactatggtagttattcaaatatattaatgaacctttttgggtttacggttttttaaaagaacttctgggttcctttttaaagtttggtgcttgattttgatttgattatgtaaatgaatgaaaagcttggtaattcgtgtct

SEQ ID NO: 354 - DNA, 391 bp, Gossypium hirsutum
attggagaggaagtggctattctcttttgcaggtgcacctcgtcctggtaatccaaagtcaataagggggcagattatcgatcagtgtaggaattcaaaggtgtgcaagttgttggaatgtgattttggggagagcaaatgtcattcaccaagcagcataatgcagatgtttcagagctccctcttctgcctacaacctcaaggagactcatatacgaggcgatctgcttttgactcaatgttggctggttgtattcctgtcttcttccatcctggctcggcatacacacagtacatttggcatcttcccaaaagttttaccacctattcagtgttcatcccagaagatgatatccgtaaaaggaatattagcatagaggagaggctcagt

SEQ ID NO: 355 - DNA, 486 bp, Gossypium hirsutum
tctgattccaaatatactgttatttgtttttattttttttggtattctgggtgtgattgcgtattgatatttgattggtttgttacagatgatcaaagatgcgatcgttactttgaaagagaggacaggttcaagtcagtacgccattgctaagttcattgaagagaagcagaagaatcttcctggaaatttcaagaagcttctgcttgtccatttgaagaagcttgtggctgctgggaagttggttaaagttaaggcttcgtataaacttccttctgctaggtcttcgaagacggctactgctgcttctgctcctgcaaaaaagaaaccggctactactaagtcgaagtctaagcctgcctcaaagcctaaggaagggaagagtacaaaaactactcctaaagcaaaggccaagacaaaaactacttcgaaggctaagagtaagccggcgcctaagccaaagcctactatctaaggcactaaggc

SEQ ID NO: 356 - DNA, 502 bp, Gossypium hirsutum
  misc_feature (7)..(7): n is a, c, g, or t
  misc_feature (31)..(31): n is a, c, g, or t
  misc_feature (370)..(370): n is a, c, g, or t
agcaaanaaagccaaagaacccaaaaccaanaaagctgcagctcctaggaaaccacgggctgctcctactcatcctccttacgaagagatgatcaaagatgcgatcgttactttgaaagagaggacaggttcaagtcagtacgccattgctaagttcattgaagagaagcagaagaatcttcctggaaatttcaagaagcttctgcttgtccatttgaagaagcttgtggctgctgggaagttggttaaagttaaggcttcgtataaacttccttctgctaggtcttcgaagacggctactgctgcttctgctcctgcaaaaaagaaaccggctactactaagtcgaagtctaagcctgcctcaaagccnaaggaagggaagagtacaaaaactactcctaaagcaaaggccaagacaaaaactacttcgaaggctaagagtaagccggcgcctaagccaaagcctactatctaaggcactaaggcagtggcttctgtgaag

SEQ ID NO: 357 - DNA, 713 bp, Gossypium hirsutum
tatgtagcaggactcgtggggttaggtctttccaaacttttccatgcatgcggtacagaagatttggctcctgatactctctccaattcaatgggtttatttcttcaggtattgctctaatacgtgaatgaagtaacttttttcttgtgcatgggtttcgacagttgtttgaagatacgattctttaaccatgtgttttggatctaacaaaattgcagaaaacaaatataatccgagattatctcgaggatatcaatgagataccaaagtcacgtatgttttggcctcgtcaaatttggggtaaatatgtcaacaaacttgaggtaggcccaaatttaattgaagtttgagtaactttacacagaaccgcttttaaatgggtgttcccttatattaattttcccccgtaggacttgaaatacgaggaaaactcagtcaaggcagtgcagtgcttgaatgacatggtcactaatgctttaatacatgtggatgattgcctaaaatacatgtctgctttacgtgatcctgcaatctttcgattttgtgctatccctcaggttcgagagagagtatttcttctgttatcttatattcgctctcgtatattgttcaagtggcatgttatcttcatgaaatcatgtactgttatcgaattgacttgtattgtgctattactaggtcatggctatcggaacactagccttatgctacaa

SEQ ID NO: 358 - DNA, 571 bp, Gossypium hirsutum
ctttggaaatatttagatgagcccgtctttcctcgtaactgcaatttcaatatattgaattggtggagagttcacactccaaggtatccaatcttgtcaatgatggcacgagatgttctcggaactcctatgtcaaccgtctcacaagagtcagcattccacgctggaggtagggtgctcgatagttgtagatgtccactgactcccgagactcgacaggctttgatatgcacacaagattggttacggatgcaatcagatggtacatacatacattatctttcatctctttacacaatcatttctatttcatcatacatctcttaacaatatgctattgtcattaatgcaatagaccccggtccatcttcaagtcattatgctctacccctttatgtcgaaacaaattgatttgttctcggtacgtctcagataaacttacattccttgcttaagaatagctaatttcgcaagtgcccttattttgacgtttcttttcatgcaaggtacataataggccttggtctcaaataaggtattcatctccatggagtgccaattgctttaaagt

SEQ ID NO: 359 - DNA, 381 bp, Gossypium hirsutum
agcgcccatggggccgttacgcagccgagatccgagacccgaggaaaaagactcgagtctggctcggcaccttcgacaccgccgaggaagcagcgcgtgcttacgatgcgaaggcgcgagagttccgcggcgctaaggcgaaaacaaatttcgccgacaacaacgccaacgacttcacgcgcagccctagccagagcagcaccgtggagtcttcttctccgccgccacttgaccttactctggccagcccgtgttcttccctccctgtgacggcgcagcgtccggtttacttcttcgatgccttcgctactggcggttcgggttgccccgcatccggattcgctcaaagcgactccgattcgtcgtcgtctgttgtagatt

SEQ ID NO: 360 - DNA, 466 bp, Gossypium hirsutum
cccggtgcacctgtaaatccagcattcattcaggcaacccctggagttcaaatggtaaagggtggcgatgccctcggccagcaatacaacaccccgtattcagtaagcgtttttatcgcatcattaattttacaacctggctcttctaccattccctaataaccgagaaaaacgatattgtaggtcatctttgataggggtagcgacataataatcgttggtcggggaatcattaaggcagcgaacccagcggaggcagctcgtgagtaccgtcttcaaggatgggaagcatacatggctaaatgcacttaagagggtatcttatcttttaaatatgttacgtccctaataacataagggccaaattttgttgaatctatctatgattttgcatgattggcttgttatatttgtattacttgttgagggaaatctttgggatcccattactgtttcatccttgtga

SEQ ID NO: 361 - DNA, 407 bp, Gossypium hirsutum
atagctcagaaattgccagtgtcaatctcacttctcaaccttgttcaaaatccgcattttcacctctaaaaaaggtttcaccttcccttgctgaacgccgaggtagtttgtcaaagtctctcaagctgccagtgatgagcgatagtataagagaaacaaatgatcggtcttgttttcttgttaagcaagatggggttcggatagatactagctcatcatgtgaatcagatattgaaattgtctttgactccaagcgtggtgttagaaatggtggggatattttggttcaaggttctggtttgaagatatccccaggtagactagctaatgttggccaacgtgattctgaatctacttttgttaatagttgttgtgaaagtccaagaaaccattctcctcagactcag

SEQ ID NO: 362 - DNA, 738 bp, Gossypium hirsutum
tgtgtagcttttaacccattctcctttattgaatacaagaaatggctatggctatggcaatggagatattaaaaatacatttttaggggaaagaacaagagggagtgtttggttcaatcagctctcaaacacattgagaggtgatgataagaaggaaaataagatcaaatctggtgtttttgctgttcttacatcaaatacaccaagggaagctgtggtatgtttcaaatttttttaccgtttttgtccctacatgatcttgtattatgcatttgtttttatgtatgattcatgactatttgagtaaatttatctgtttagacattgaaaccacgtcggtttgaaagaccaagagttgaccccaaaaatgtagcttcaatcatattaggaggtggtgcagggactcatctttttccacttactaaaagggctgctacacctgctgtaagaacatatatatacacgaatttgatgatatatacttgattttgatgctaaaagtaccatagaggtcattgtactccttgtactcagattagtcccacagtaaattggtcatttaatctacttaaggggactaatttgctcttttttcagtagaggggacaaaatgcaatctggcttctaatacaggggcttctatggtacttttaccaattttgattcatataaaacatgttgttgaatgttgttttttatgtgaattatgatgttgttaggttccggtcggaggatgtt

SEQ ID NO: 363 - DNA, 865 bp, Gossypium hirsutum
  misc_feature (769)..(770): n is a, c, g, or t
  misc_feature (807)..(809): n is a, c, g, or t
  misc_feature (814)..(815): n is a, c, g, or t
attttcccaacttccttaattgctcgatatctctttatggttaccgaaatgtacatcctcacacctccaacccaaaattttccaattgcaaacgaaagttgaaggaaccgtatcccctttaaaattcaatcgaaattcacctacaacagtagaataacaacagatagatacatgatgcacattacaatgtaaattctttttttattctggaaattataaagcaagcaaaagatcatgaacagaacttttcagactaagagaactcaccagaaacaaataaaattacagtatgacaagaaagaaaacaactaagcgcacgcagttgacgaaagaccacagcattttgttagactttgattcaacccagaagtgactattgaagaataaatccaagtcttttgcctgccaaaaaaaataaaggaagaaggagttaaaatcaaacaaagttacacaaacacttacattaagaaaccaggggatctgcagtaaaagaggaatgaagtaaacaaaaggatcaatgataattcaagctcagtggaactaaaactcaaacggaaaattaaaatcaaagaaagtagttctaattggtagcagatatagatctaggagaaatttagaaaacgaaagcactgaagatttaatatagaaaaactcactttccattaaaaaaaatcacaaattcctcagtggaactatatgcacgaattgcagataaattagaggaggaaaacacagagactaacaaaaatactaccattaaaatacatannatacctattttttaagggggaaacgtaaataatctcnnnaaagnntaaggaaaaaaatgaaaaaactttcaataaaaacacagagaaacaaaaaa

SEQ ID NO: 364 - DNA, 503 bp, Gossypium hirsutum
  misc_feature (439)..(439): n is a, c, g, or t
  misc_feature (484)..(484): n is a, c, g, or t
tatgtgttgttgaatgattcttttgtatgcccatgagcttgggaaacaatttcgtgttgtggtggtagactcgcatccgatgcttgaaggccaaaagctacttcgtaggctggtggtaaagggccttagttgtacttatactcaattaaatgctatttcttatgtcatgcacaaagtcactcgagtttttcttggggcttcctctatattttctaatgggactgtatattcgacggttggaactgcatctgttgctatggttgctcatgcatttcgtgttccagttttggtctgctgtgaagcatataaatttcatgaaagggtgcaacttgattcaatctgctttaatgagttaggtatgtcggtgttttatacaatcccctccctcaaccgcccccgcccccaaaagaaaaagaaaaaaaaaaaaggaaaacaattnacccctccctccggaaaggcctggaagggaacccaaaggcctaancaaaggccccagaaaaata

SEQ ID NO: 365 - DNA, 564 bp, Gossypium hirsutum
gaggaacaccaggtatatatatacaagtataatcctccacattgtgtgctacatatatgtctactcatttgaatgaaatctaaaatcatatgttgaattccatatcaggtatgtcgacgctataatgacgattccgaagggaaccttgttccccatgtgcggaatgaatctggcatttaaccgagaattgatcggccctgcaatgtactttggactcatgggagatggtcaaccaattggacgatacgatgatatgtgggctggctggtgcaccaaggtatcttatcttatctttcacgctagcgtctactcaatcttttctcccctataagcttatgattaaactgcattgttcgaataccaggttatttgtgatcacctcggatggggagtgaagaccggacttccctacatttggcacagcaaagcgagcaacccgtttgtgaaccttaagaaagaatacaaaggaatttactggcaagaagagttgattcctttcttccaatccgttgcccttccgaaggactgcaccaccgtacaggaatgctacatcgagatcttcaa

SEQ ID NO: 366 - DNA, 902 bp, Gossypium hirsutum
gcattcttagtagcttcattggcaaaactttctgcacataccccagggagatacccccagatcatcaatgaaaatcttgagccagcaaatcaagcagctttacttcagctttgcggcatttacaattgccaaatagtttgagtaagtgctttcctgtttgtttgacttgttatttttaaatgccaatgtgggattgtagtgaggcagggtcctgcctttattctgcgtttttaacttttaaatctgaatttgtagctggtggctccgggatagacaacatcttctgaactttttatttttctaagttttatgaagttggattagatgtatggatgatgtccttaccttatcaaacctatcataggttttagggagaaagttctctcattccttagcatgaatatgaggaggtaaactgcatgcataagcaatagtgtgtgaggtacacttcatccgaacgaccaattgctgggtgttttgacctttgaagctgcccaattctgatttcttgaatgatggaaggctcagttattgttgtgctcagtcacctaataaagtccttgattttccatttcttgtgtttggattctcttttcttttgctctctctctaatccattgtccaaactccgaacaaatgaattccttctattttatgtttaggttaaaatgcaacttttttgtttggggtgtgcattctcacagatttgtggtttattgctaggttgcagggtttttatctttattttggtgcattaccttgagcattcgtttgtcagcaattgatgcttttcgacacaaaagttggaaggattcagatgtggtgatggattttgcggttctactggttggcagcaaagtgagccccccacatagtttatggatcttgtttgacatgcatat

SEQ ID NO: 367 - DNA, 1289 bp, Gossypium hirsutum
ctcagcaaggtctgttagtcctaataggtaatagcttgtttaaatgaactggttttgaaagattttgacccatttaatgttttcaggacctctccgcgtaggatgcgtggcagtccaatccgaaggcgttctccacctccaaggcgccggtatgcatgcgatttatttatttccataatgctttaattttattgccctaaggtactagtgagtcgacgcaacttgtgaataaatgaataaattcacatcttactgaatcagagaaatcaagagtgctataatttgctaggcaaacccagtattggccgttttaactaacactttggcgttgatttcttgccagtatgaagtgtagattagtcgagacaaagtagttcaactataatttgcttactattaagttttattacagttcacctcccagacgacctcgtagccctccaagaaggtctccattcaatcgtagacgtagcccttctccaattcgtaggcggagccgttctccaattcgcaggcctcttcgttctcgttcaaggtcaatctcaccaccaaggtcgggcatttgctctaaacaatcttttttttcattttcatcacaacactgtttatcctgcaatatgccaaaaagttttcaagaatagtgataaaatggaatgcattattatatttaattatatgggctggaattaaatttgattaacttcattgaatgagtgaatttgagcttgtgctggtcctcttatcaattgtctaccgttgtttgtaatcatgtgttcaccttgtatcttacttcagtattttatcttcaaaacagaggcagaggacctgcagcacggcgtgggaggtcatcatcctattcccgatcacccagtccccgaaaggttttgcgatttctttacttttggttttgaggggagtaacatatttactagttatttaacatgactttttctttttcaattatgacaggcaggacgaagggtttcaaggagtcgcagtcctaggaggtaatttcaactttttccccgcaatcgcaagatggtttctttgtttcgtcatttatttgttattagtttgttaatgatcgatagatgctgtgtgttcacggaaactaagctgtgcttgcatgagaactctctctctcttgtgcgcgtgcttattcttaaaaacttttgcctatggcccaagttgcttcttgttgtggtttccaatttataatatgaagggatgcttttttcatgtgcaggccattgagaggaagaagaagcagcagcaacagcagcagcaga

SEQ ID NO: 368 - DNA, 799 bp, Gossypium hirsutum
  misc_feature (771)..(773): n is a, c, g, or t
  misc_feature (776)..(777): n is a, c, g, or t
  misc_feature (790)..(796): n is a, c, g, or t
atggccagaatcaccggcgccgccgctgatggaatctctgttaccggattcctcatccaccggaatcttctcttaactactcacgttaacctcccttccgtagctgctgctgagagctccgagatccggctccaaaatggcgttgctgccactctcgtacctcaaaggtatgttttttttggtttataataagggaaaaaacgagggattataatgctgtttactttatgttgctatgaattactattatggaaatggtattgaattatgataaattgattaaagaaacgtgggtcaagattgatagctctagaattggtacaattctcaactttgagatttgattgaggaaattaatttggctttgccttttgtgcttatatttcatgacatgtcaaaacttcttagttgtaaagtttacattattaaaagaacattctttgttaatctttattatcattttcaagctttttctttatttctttctttctttttttgacatttcaccgacataattttactttgattctctagacagggctatttatgcttcatttcacctagtagttaaatttttagctctttaaagtgtcataatacttcaccttaactagaaaatatgcagcctaggcttcattattggattttgatggattagtataaggggctgatggttttgtttaatttatttaattttgaaaattttatccctgtgggtacaaaggtgtgataactctttgagtatctcgatcccacaacgtgggtatgggnnnacnnccttggccaatannnnnnnggg

SEQ ID NO: 369 - DNA, 1173 bp, Gossypium hirsutum
  misc_feature (1156)..(1160): n is a, c, g, or t
gggaaaacttgactgaccaaatcaacagaaggacgtgtaaagtaaattcccttaactgaacttagccattcacatccatgagaaagattttctctgtctcttacttcgacacttgctttgtgtgtatttgatgacataaaggtcaaggaaaaacattgggatcggctacgtaactgtccagaagttatatccatcatcaagcaaattgaagagaaatggccactgctatctgatctcgaaaaaattaaggagaataggagtgaaatcctaaccaagttcaaggcaggccgtttaaaagaggatggggcgaagcaggaattggacaaactaaaggagaggctcaatcatgtagatggacaactacaggtgtgctaatgtttaagaatcgaattactgagtttggtttcatgatctaattgtccaatttaactttggtttttcaggagttgcacaaagcaaacaatcttgaggtaagcacagtaacaatataattactaagttcgatatcctcttgatctaatgatttaacttggtttttcaggagttgaacaaagtaaagaaccttgaggaaatgttccttaatgaggtatgcacatttcttatcattgatattaactaatataggagggcatagtaccaaaaaagtcccatctccttatccactaaacttgtttttagacatagcaaaaagtacttttttccagctatttgtttggattcgggtttatgcattgtatacgtatttgtgtatttgaaaatatacttatattcaaatatgtgttgctacgttcctcatttataaatccaatcacaatgtaatatgtttcttcattcactacacttattttctagatttaataagaagtcattttcaattatattagttgaattcgaatatgaatgtttttatgtgggtccagtataatcttaaaatgtttaatttctttttttttaaataatatattttaaaaaacctcgaaaattatattctaaaccaatattcataaatgtgtcaaataccaacatcaagtcacatagcttgaaaatactatatatgttgaatcatattgcttcatatcaatttgttgtctacccatatcttctttttccaggtctcaatatctaaagttatccttagacttgcccttatttgctnnnnnaataatttgttta

SEQ ID NO: 370 - DNA, 204 bp, Gossypium hirsutum
caactcctgtcgattttgaaaacaaagaatctgaggcagtaactgagaggtcaataagcggagcactaggcatcttgaaggcatgcttgaagtcgaaaacagtgaagagagttgtgtatacttcaagtgcgtccactgttatgttcaacgggcaggatgtggaggtggtggatgagagtttttggactgatgtggacttcgtta

SEQ ID NO: 371 - DNA, 773 bp, Gossypium hirsutum
  misc_feature (511)..(511): n is a, c, g, or t
  misc_feature (557)..(557): n is a, c, g, or t
  misc_feature (701)..(701): n is a, c, g, or t
  misc_feature (718)..(718): n is a, c, g, or t
  misc_feature (738)..(740): n is a, c, g, or t
gcttctatcatggagtcggaggagttggttttggtggcctaacttgttctaccaaaacaccacttccaccacttccttcttcacgatcctcttctttccgtgttcaaatgtctgttcctgttgaagataagaagaggaattatacccttcaaaagtcacaagaggctttcaatgctgccctggtgattttcaactctttcccttctttgcctacttgtggattgtttgaatcttgccaagttaaagcttatttgttgaattttgtttaatttcaattcattttttattattattcgatttgtttttttttggccaaaggagaaaaggaaaaaaaaaaaataaaaattttattcttaaccccttggttaatcaaaaaatggaaggaaaaaggaaaaaaagggtaaggtccatggttaatggaaaaatggattccgaaatggaatttttaaattaatttttcacccattgcccccggaattggacccaaaaaaggtcccccggaagggttttnccccaaggtttcccccccaataaaccccaaaataaggggtgaaaanaattccccatttattaaaaacctaccggaaacctacccataacccaaagggactttccaagaaaaaataccttaggtttcccttttccttttggaacctaatgggaaacaactaattggtgaaatccctggaacccctactccnggcagctccttttgggngaaaaattggaggcctgccnnngtcattcccctggtcctggtttttaaaccggtg

SEQ ID NO: 372 - DNA, 1084 bp, Gossypium hirsutum
  misc_feature (326)..(327): n is a, c, g, or t
  misc_feature (336)..(336): n is a, c, g, or t
  misc_feature (343)..(344): n is a, c, g, or t
  misc_feature (354)..(359): n is a, c, g, or t
  misc_feature (769)..(773): n is a, c, g, or t
  misc_feature (842)..(843): n is a, c, g, or t
tctaactgctggctcaacagatgcagaagagttggagaagtatgttgccattagagaagagctatataaaaaggccaaagagctcgattctaagatcattggttttgaaacagctatcagaaggccttactttcatgtgcggcccctcaatgttgctgagcttgagaactggcagaactacctggactttgtagaaagagagggtgacttcaataaggtatttgagtttgttttttccatctttcagtttagctatggttcgtagtgttcagttgccctgtttgttatatattgacttacagttaagtaacatctgctgcatcatnntccttaaangctaaannttgtctcttnnnnnnctccgtttcagctgcccccgggcctgaaccctctttcatcaccttggatacccatatggcaaaaccggtttccataatgccaggcaactttcattccggccttcagaaagtctgctccgccaccgatgaacccgtcgattgtatccagctgctttctcccttgatgaccgacaggaccgccgtggatcccatttccatcctcagggtgggtatcgaggcgaccaaccagaaggtgaaagaagccttggacaaagctaatattatcatgaaagatccatccaccacccccgaatgcggcgagatcctctggacttgcgtcaagaacttcgaggacatcatctactcggatcagaaagccatggaagccatcaccgagcacaacgccaaccacatcatcgaagaactctcannnnntttgacttctttgaggctaagtacttcaaacgcttattttttcagtggacatttttaggtttgtaatannattgaacagtgaattcattttatatattttaaagttccaatgttatgcctgcaggtgtgttcttgtcttcctaaccatttatgtgtcaggcaatgggggtcccatcatatttgaggggcctctctgttccaacaatggagtatttcttatgcatttctccttctgctttgtatcatccattgttcattgctttgctgcaccagatctctgcctaatttttatattttcacttgcgaattag

SEQ ID NO: 373 - DNA, 757 bp, Gossypium hirsutum
  misc_feature (667)..(669): n is a, c, g, or t
  misc_feature (732)..(737): n is a, c, g, or t
  misc_feature (748)..(751): n is a, c, g, or t
  misc_feature (753)..(753): n is a, c, g, or t
ttattttgcctctcttcccttgttttgatttcttttaaattttgatttagaaatgtgctaatgaggcattaggcaatacacttatctttcttctaaaatttcaggttgagaagatgcaatgtaagaattgcctcatttgggctaaaagtgatagtttagtaagggacataatcaagctctcatcagatgttgcggtgagaagataactgtcctgagctcctttggattttctctataaaaataaactagtgttgaaagggtaattgtgatgtctgtctgaatgactatcttatacaatatcagttagattgtgtagtctgcattctttttaaggggaatgaaaattttatgtctggatgaattgcaaattgtcacatgctacctgatagtaatatttgtgctatagaggtggcaatagctgatatgatttgaacaatcaaaatctgacttaccaagaagttagaccagttgtttcaaacccaggattcccaagttgccataacgaaacacaaagaactgtttaccttctgcaatatgtcctttcacatatgtggccttggaactttttcccctctcttctgctttccttttccttcccttccctttcccttcttttcttactgatccatgcttcaaattctgaaaaaaatacggctaggaatagacnnngaccacctggtaattcatgttggcaagtcgtgtttcgtgttgcgtctttctccctccttgtannnnnntatttttggcnnnnanaaaa

SEQ ID NO: 374 - DNA, 372 bp, Gossypium hirsutum
ggtgcatttacatccagacagaccctaatgcgcatatatgatttttgccccaaaagtgggttattagaatcatactcaataaactttccacagaagttacctaactgcacagccatcgattcagatatcagtcctggaggtaaatcatggacctgaacccaaaattcagtggagtttaactccattactgccgggttatctccatacgatattctcttcaataaaagcagatggttattaaaaaaccaaggagttcccacaagcacccgtacaatgtcaacttcatgaaaaaattggaataaataccttttttccccaatatcagtaatacagatccctccaatagggtgccaaagatctgccatagtattc

SEQ ID NO: 375 - DNA, 370 bp, Gossypium hirsutum
tttttgtatcaaatcttagaattagaatgagttggtaatttgtctagttgtaggtttctttgtgaaataacataaggctagtattgctgattgagtcttagttcggttgtcattattgttgctgcaataaccggtattactagttggtaattttggtcatattgaattctgttgagggggttggctctcttttaggaggagtttttgaagtgtcgtctgctgagtgattgatcagatcctcaaacagtggaggtattgtgcccgggatgtctatgtttggttttagtctgggttttgtctctcgtaattcgagaagagcccaaagcggtacgtggagtttagagagcgcttagtcgcattctaaagcatt

SEQ ID NO: 376 - DNA, 378 bp, Gossypium hirsutum
atattgaagctgctgaacttagcatcactaaatgggattccttacatggcgacgaccatgtctcctactgtaacattgcttctgttttctccgaaaacaatcgtgatgaagccaaacagtatctgagttccattaagggtttgcagaaagctatgcgatacttggcttcgcttgaatccacttccgataaacttgtgcgagcccaaacgctgatgcaaaccgccatgaaacgcctcgagagggagttttaccagattttgaagtccaaccggaattaccttgacccagagtctgtttccaatcactcatcttctagaccatcggtttccaggtcgagcttttcagattcagaagaagatgagtctgagaacgattcca

SEQ ID NO: 377 - DNA, 401 bp, Gossypium hirsutum
gataccgtcgctgagaaatcccctgccgagaagaagccgaaggccggtaagaagcttcccaaagaaggcggcgcggccggagacaagaagaagaagaaggccaagaagagcgtggagacctacaagatctacatcttcaaggtccttaagcaagtccatcctgatatcgggatctcaagcaaggctatggggatcatgaacagtttcatcaacgatatcttcgagaagcttgctcaggaagcttctagactcgcgaggtacaacaagaagccaacgattacttccagggaaatccagaccgcagttaggcttgtacttcccggagagctcgccaaacacgccgtctctgaaggtactaaggcggttaccaataaggcggttaccactaacgcggggaccag

SEQ ID NO: 378 - DNA, 819 bp, Gossypium hirsutum
  misc_feature (18)..(19): n is a, c, g, or t
  misc_feature (674)..(676): n is a, c, g, or t
  misc_feature (739)..(752): n is a, c, g, or t
  misc_feature (754)..(754): n is a, c, g, or t
  misc_feature (767)..(773): n is a, c, g, or t
  misc_feature (776)..(778): n is a, c, g, or t
  misc_feature (781)..(783): n is a, c, g, or t
  misc_feature (786)..(797): n is a, c, g, or t
  misc_feature (799)..(805): n is a, c, g, or t
ttcagcaacagaatttcnngggttttagttctagaaactttttgtagcttttctccgattcctcgtatctgcaatgaaaaaacatttttagtacagacaaatgccatcaaagacttcaggatagctcaataaaatcatagtttcgtagtagttttcatcatttttttaaccaaaaatgtgaaaggaaaagagagtactgcgaatgatagattatatatatatatatccaaacttcctatgattcaacaataccggcatagctgacataaaagggatgcacggcgcatatatgcttctgaaagtgctggatctgcctcaatagcagcattgagatcattgagtgcctcactataacgcttcacttttatactctgtgaaactctctcgaacaactcagcagcatttcctagattttcatctacacatccaagttgaaatgttaagcaaagacatattgaaagtatatgcaatggttgcaaactccaagaatattaatttcgatgttcaaaaagcaagcactggctatttggctcctcagacttaaaacatcatacaacaatgaaacagacgatgcacttctatgaagacattgctgagcacctagtctagccaagtggtagtgttcttaaccactaatgccatataagggcatggatttcaaccccaccaaggannncaaaatgctaaacatttccttgatggcgaggcgctccccaaactccatgaacccgttgggctnnnnnnnnnnnnnngngaaaaacctgagnnnnnnntgnnnatnnntannnnnnnnnnnntnnnnnnntgtttgaggggccg

SEQ ID NO: 379 - DNA, 388 bp, Gossypium hirsutum
tgttagtagttagcagttagtagttagtatcagttgtggtttgttacaacaatagttaagtaacgatagtttgcattatatatatgtactctgcatgagaagttgattagattgaaaaatacaattttgttttctcttgagtattctgtaatcttagcatggtatcaagagccaaggttttcttggtgttcttatcataaaaaaagaagaaagctatgttctgcccatctctcatggccactgatgcggcagttgatacaccacgtcactcatccaacaccagggaggctgaacactcgcaaggtaatggtgttcttggtacaccagcagttcattacttctctaagcatgataccataaaactcacttcgcacaacttcctcctata

SEQ ID NO: 380 - DNA, 739 bp, Gossypium hirsutum
  misc_feature (355)..(355): n is a, c, g, or t
  misc_feature (672)..(676): n is a, c, g, or t
  misc_feature (680)..(682): n is a, c, g, or t
  misc_feature (713)..(715): n is a, c, g, or t
  misc_feature (724)..(727): n is a, c, g, or t
  misc_feature (730)..(732): n is a, c, g, or t
aacatataataataagatcacaccattcacttttagcacatatcaaatccaaaacacaaaagggcatgagaggaacctggaactggcggtccgctgttcagcaataacctttcttcggcttcgacgccagaaagtcgtagcaatgttcggttcactatgtgacagactaaggaagcaaaataagtaaatatataaaattagaaattatcagaaatgctatggcatattaaatattcaatcaagcaggtattttatcttgtgagcttggaagcacaggcacacagataaaacgggtatgacatgacacaacatagaaacagtaatattgcaatttctaaaaattttaagacacagntatgacaagactcagaaataaatttttttatataatactatacaataaaatagtaaaattgatatttttcaataaaacattaatatgcaaatagcttttcaaaaattttaaattaaattccttcagaaaaaattgctcattgtagttccaaatttgggaaaattgaaaaaagaaaaagattttcatcacatttctaggcatgtcaagccaagtccaaacaagtccaatcatatcctgacatgtttctgccatttattttatttttattttttgatgtgtcctcgcatctgatatgtattctatcatgctgttgacannnnntccnnntacttggatgctcacttgacagaagtgtctnnnttcatagannnnagnnncacaaga

SEQ ID NO: 381 - DNA, 521 bp, Gossypium hirsutum
atgtgggttttctgatgctcaaaccatttctaaagatgcaaaagaacgtgcagcctctatgcggaaattgttaacagcagtagtgctgtgcattgtctttatgagtgttgaagtagccggaggaattaaagccaacagtcttgcaatcttaactgatgcagctcatctcttgtcagatgttgcagcatttgcaatttccttgttctctctctgggcatcagggtgggaggcaactcctcgtcaaacatatggattcttcaggattgaaattcttggtgcccttgtttccatccagatgatatggcttctagctggcatccttgtttatgaagccatagctagacttatccatgatacaggggaagttcaaggctttctcatgttcgtggtttctgcatttggtctagtggttaatatagctatggctatcttgctgggtcatgatcatgggcatcaacatggccatggccatggtgggaacgatcatgaccaccatggtcacagtcataaccatgacactg

SEQ ID NO: 382 - DNA, 702 bp, Gossypium hirsutum
atattccaggttgataacattacataatttctcagtgacatggttgtaagatgatccagatgatcatatatcaataccattattatcaatgtcaacaatatcattcactctcactcttgatttcttcatattttatataccaaatatgaaaagcatatttaatgtcatcccacatgcaactctggattatgcacttatcattaggagaaggagttggattctgtatcaatgcttcaaatgcactctgttctttgatatgctcatggctgttacattcttgtcattagctctttactttcttgactggcttgaattcagggccggatggctgtatgtaatttagcttgtgaagggttaactggagcaagtaccacacctgatctagctcaaaggaagctctatattgggggcctatcaccagatgtcacaagtgagatgctcctgaattattttggaagacatggtgagattgaggaaggctcagttgcatatgacaaagatacaaatgaatcacggtgcgtactttatctttttggatgtatctttgtagttatgtttttttgttttgtacatgtgacgaattgttatcatttacctttcatttgcagtggatttggttttgttacatacaagacaatcgaggctgcaaagaaggccatcgatgacccacaaaagatccttggggtatgtgaacaatgccac

SEQ ID NO: 383 - DNA, 619 bp, Gossypium hirsutum
tttttctttctattttgaatttatatgttggaacttggagaaatgctggaggaatgagattagattttgaatcgaaggacagagggtttgaccttttggattaacgcattcttgtttgacagttttaatcgaagtgatttattttgatctgcgaaaggttttagtttatgaaatctgcggatttcaaagaaggtgaatgacaatggagctaagtgtttagatttatgctcgtttaaaaccctaggatttgatctgggggcttatattatgtgcttatcgagattaagcttagattaagtctaaattagggatcttatgattctaattaagttccgattggattgcttttctaaatttcgagttagttaggattgagggtgaaaagttcttcatttttttaattgttcacattggattcaattaagttaattatttgctttgtttgagtatattgcatttaatgctccttcagaagtaatcttgtcgccttattgtgattgtttgtgtgaactattttaattgcgtactgtttggtagatagatgataatcttagatttgttatgctttacttttgaaactgtttattgattattaaagttgtgcgtatgtatgtggagg

SEQ ID NO: 384 - DNA, 705 bp, Gossypium hirsutum
  misc_feature (345)..(345): n is a, c, g, or t
  misc_feature (361)..(361): n is a, c, g, or t
tgaagaggtaaaagaaaaaaaaaagaagataattaaaataattaaataaatgggaaattctctctcaactgaatttcttttgttttttctttctattttgaatttatatgttggaacttggagaaatgctggaggaatgagattagattttgaatcgaaggacagagggtttgaccttttggattaacgcattcttgtttgacagttttaatcgaagtgatttattttgatctgcgaaaggttttagtttatgaaatctgcggatttcaaagaaggtgaatgacaatggagctaagtgtttagatttatgctcgtttaaaaccctaggatttgatctgggggctnatattatgtgcttatngagatcaagcttagattaagtctaaattagggatcttatgattctaattaagttccgattggattgcttttctaaatttcgagttagttaggattgagggtgaaaagttcttcatttttttaattgttcacattggattcaattaagttaattatttgctttgtttgagtatattgcatttaatgctccttcagaagtaatcttgtcgccttattgtgattgtttgtgtgaactattttaattgcgtactgtttggtagatagatgataatcttagatttgttatgctttacttttgaaactgtttattgattattaaagttgtgcgtatgtatgtggaggtat

SEQ ID NO: 385 - DNA, 726 bp, Gossypium hirsutum
  misc_feature (484)..(485): n is a, c, g, or t
  misc_feature (548)..(548): n is a, c, g, or t
  misc_feature (557)..(558): n is a, c, g, or t
  misc_feature (560)..(561): n is a, c, g, or t
  misc_feature (565)..(571): n is a, c, g, or t
  misc_feature (595)..(595): n is a, c, g, or t
  misc_feature (599)..(600): n is a, c, g, or t
  misc_feature (602)..(602): n is a, c, g, or t
  misc_feature (604)..(605): n is a, c, g, or t
  misc_feature (607)..(622): n is a, c, g, or t
  misc_feature (644)..(652): n is a, c, g, or t
  misc_feature (657)..(661): n is a, c, g, or t
  misc_feature (666)..(669): n is a, c, g, or t
  misc_feature (671)..(680): n is a, c, g, or t
  misc_feature (684)..(688): n is a, c, g, or t
  misc_feature (690)..(694): n is a, c, g, or t
  misc_feature (699)..(707): n is a, c, g, or t
  misc_feature (709)..(710): n is a, c, g, or t
  misc_feature (712)..(718): n is a, c, g, or t
gcagctgcaagcacatggctactgagtcctggtaaaagtcactgaaatttctagtcctaatgaaactgatataagatcatttccatcggcaatggcatcatcaaaacctgccaagatatcttctgaagtacaccctgtatcatcgcatactttatatgcagcaatccttgctgatggaacccctcctcttgcaatgccttcagcaagtccatagaaactagcattcacttacattgtttcctgctgctgtggatgccgtatgagatccatgaccatccatgtccctggcggaatctgagtggtaaactcgagctccaataagcttactgtaatataagtactaaaatatcattactaaacaacaaacattgattcagggatttgaataacagtcggcccaatcgaaattttatttgttacaaggaaattttggcccccctttacaaccccctttccattttttggggggggaaccaaacccttnntcactaaacctatcaaactcggcccaaattccgctatcagggaccccaacaaggactttcctntcggggganncnntatnnnnnnnattttgtttgacccccaaaaaatnccannantnngnnnnnnnnnnnnnnnnaatttacttggaaaaaccaaannnnnnnnnttaannnnnacatnnnnannnnnnnnnnaaannnnntnnnnnaaaannnnnnnnngnntnnnnnnnaaaaaaaa

SEQ ID NO: 386 - DNA, 662 bp, Gossypium hirsutum
tgatatactgaggagattgagaagcgccgatttcatcaactcccttgcagccaaaacaaccagtctcagaagaattgaacagtttgaactatggaggtggttttcaaatttttattgaacggactaaggcaaatctggagaatggtggagaatttcctcttgtatatgttggaaatgatttctttctggtaacagttaataaccaggacgattataactttcttttatatgaaggttcttggattgttgcaagacattatttgacatttggaagatggaaacctttattccatctgattaaaaagattattagcacaacaactgtgcagataatgttaggatcaagccccaacccatagaccaaaaattatagatgtaagttagcaggaactttatttccttttaagcttgtactttgtagcacagaaccccatgaaatttacgtgatacaggtgggcctaagaaattttgcaaggaacacttactacctcaacaggttgggatgtcaagcacctgatgagactaaagtgaccactggcccccataaggcaacaatctcagtccacccaaatcccctggtgacacccgagagactgaacctgcaacctagctctaataacatctctaaggatcaagtctcacccactagaccaaatggctac

SEQ ID NO: 387 - DNA, 472 bp, Gossypium hirsutum
tctcaagatctgcctttgtgaggtcacggtcacggtcacagtactcggacctcttctcatatgcggatgcattatttttagccttttcaataagtttggtcatttcaacatatgcggtggccttatcatttttgagaaaatggacacgtgcaaggccttgatgggctctcgtgtgacgtattttaagggcattaatgtagcagtcggctgctgagtctaatttcccacaatcaaccaagacacttcccagattattaagagcctgagaaaataactcaaaccaagattagacatgctgaaaacccatgtttttcaacaccaaaattggaaccacggaccactaacaagcacaacattcgaatctttggtagaatgtggtaaccatttaccatcattagggcaaactcaaccaagttaaaagggaataggctcctagcaaaactacatgaaatttgtcatgatgtaagccttg

SEQ ID NO: 388 - DNA, 813 bp, Gossypium hirsutum
gattgttatggttaatcacatcttcataatttgattccctcactatcgtaattgcagctaactaggataattgccatctatctcagtatttccattaagctcaaaaacaatatcaggcaactttccatttttttcacttagcatgctgcttagttaagcttttccaagaattcctgcatcaagagagtaaagggtatgcttcctttaactcagtttaatctgttttgtgggaatgcttcatgtttccagcatcaatagctaacaaaggttttacttggtgtcccctgttccctctctgatctccaaatctcctccctccggcccttcacagacttcaccaaccctcaaactcttcagaaccccctcccgcccatccaacaatacataagtaaactgtgccaatgcagcaatagcaacaacagacaaaagaagctaatgcaaagggaaacaccaagattattagaaaagaaatagatgaacagacactcacaccagggaaaactgcattcccaagctagcaaacatccaaaaatgacatatgcccaacatcaaaagtctttgattcgtggcttgatgcatttgtaaacaaaaacggaatcaatatttcatgatggttaattgctgttcctaattcgattctccatctccctatcaacagttaactaaggatagtagttctctctatctcaatatttccattccgagtcaaaacaatgacaggcaaattagatttacatttgttacaataggtatcaatgaagcaaatatcaaacatgcttacaaaacaaagtaaaacggaaggacaaaccaaac

SEQ ID NO: 389 - DNA, 738 bp, Gossypium hirsutum
ccttccttttctttgtccctttgttgcaccctcgtaatgaagcttcggatttttcacagcgatcatatgcttcaatgctctgacctttcttcgtatttctacccgggttattttcatcagctaacgagagtgtcacaggtaaagcatcctcctcatcaacaagataatcacgcagataatttgactgagacgtagaatgatcataggcgagttcacctttctgccttttgtcagtagggtagaccctcgatgaggacttgtgtaacccgttaccaggttcccctcgtaactgggcacttttacccaacttgtaaacttgtttcctatcaacctcgtccattaatctagaagtagagttaagcaaggggctttcactcatcttgcccttctgttttcctttaaaatagtagttttctactccaggcacatgcacatcttccctaaagctcttcttggagaagtgagtgattccatcaacagtccatccatcctccatagaatttttcttcaaagatttggtctttttagaatctacaccggacttcaatgaagacaactgagaatcttttatgatacccgtagggtatgccaatttgcttctcattagaggattgctatcctcgtcattatcaaattgctcagatgagccggattctgtttcttcatttctaataaacgctctactgcctttggaaacagggcctctcttttgcacatagttcgctctggtcttctcct

SEQ ID NO: 390 - DNA, 771 bp, Gossypium hirsutum
tcacatatgtgctaagtaacagttcaaaaagcaactgaaggcagattactagtcatagtttatgttaaatgtaccatgatggaaactacatactgttttatgcaatcaaactctaagaaaaaaacaaggaaaaggaagaaaatgaaatgcagtagcaaaagctatggcaacaagtagcagatcatactctgtccagaacataactcctcatggcacttggataaagcaagaaactggagaaatttgttatgcttctgctgcttatccatgagctgagtcgatataatacccatagcaacaatttcagcacctctagtagttgtccagtgtttagctaaggtgtcaacgattgatttgcttgtccgtacaaagacattggtttctccacccctttcaaatgcccctgaactcttaagtttttctagcgatccatcaaccttcccagttatcagaaactcatggaaaaattgacccagcaaagcttctgattcttcatcttgggcagttctgcgtgtaataccagtcaaaccagttgcttgtctaccaccagcatcccatgcatctgaactagcccttctaggagcaatattgtttgcaaacataaggttccttctctcttcttgtgcagagccttcattcgagctccctttgcgtgacaagctccgctcagggggttcaaccccaccaagtacaacagccttttctggtattgcccatatccctgctttctcagtaagcacaacccatgcgccatcttccccatcatcagta

SEQ ID NO: 391 - DNA, 618 bp, Gossypium hirsutum
ttgcctctcggttcactgtagtgttggtgttgttaagtcacacacagagggtcctaagatctactccatagctgttccaccttccaacatcagtcatcattttgggaaactactagaaagtggaaagggaactgatgtaagctttgaggttgatggggaagtctttcatgcccacaagttggtacttgctgctcgttctcctgtgtttagggcacaactttttggaccgatgaaggatcagaatacgaagcaaataaaaattgaagatatggaagctcctgttttcaaggttcagtgcaaatccctctcttcttatattggacaaaatttcatgctactacttattatccttgataatggaccagcaatggatgcatggcatcaaactgtgaacttgctatggataatgtgaactgtcctcggatccatgatatcaacttgccattggtagcaaacctgatgccagcaattagtcactgagaacttcttgctagagcctttatgatagggttggctggtgctatacttttgaagtcaggattgtggcatgtactgtcttaagctcttttttgcttaatgtaacatgtgtttctgcgtgataatacttaactcatgact

SEQ ID NO: 392 - DNA, 650 bp, Gossypium hirsutum
  misc_feature (63)..(65): n is a, c, g, or t
  misc_feature (533)..(535): n is a, c, g, or t
  misc_feature (574)..(577): n is a, c, g, or t
  misc_feature (636)..(646): n is a, c, g, or t
aaaaggctgaatgcagaagatccgcacctgttcagtgctatgatcggatggtataagaccatnnntttggatttatgatatttaggcttctttgccttcattatcagcgtaataacttcatttttttttctattgacatgcaattagttgcttcaatcagagacaaccaaggccaagcttcctagttcttccagtaaacaccggattgaaagcaggcatggaggcaaggaacctgtcattggaacttacataaaagatacaggccccacggaggacatggaaggtgctggtactgtagaagtgcgtgaaaaggggaaaaaggtttaccggaagaaagtgaaagctggtgagttcataaacaatttgtctgatgatggtggagaagcatgtagcggcatagaagaaggaattatagatagggctgtcaaaggaaaagttgagatggagatttcccatggaaaaagtaaactttcaccatggagtcagaggaagaaaagcaagaagattgtctcgggaggtatgaacttgagatnnnggattgaataatgtgaaaagtatacctataaaaaagtannnngaaaaaagagagaaaaagaaaaggaaatgctaaaggatgtgcttaatgtcaaagaatcnnnnnnnnnnncccc

SEQ ID NO: 393 - DNA, 508 bp, Gossypium hirsutum
taccgatacagatacctttataagagccccaaggattagaaactagtgaagcaatggatagcaatcatgacagtttctatgataatatgatatggaaatttctgataaacaagtaaagaaagcaattaatgtttcgatagattcattcactcaaataatatagatactgctattctggcgacatgagcacagatgcttgctaacagttggggctgaatccgcttaattgtaaaatcatgtccaaagaaggaacagacaaatgaattgatctttattttgactttaaagtgtgctttgatcatatgagtcaagctcgagtcttatagaaaaagtgaaactaaaagtaatttgccttgtagttaatattttaaatatataataaaattttatttttatatcatggcttgaaaggagattcacatgcattcaacagaagtttccaagaaattgtcttaccagcaagcatggcgggtttaatagacaaatcccataggtgtcccttctgata

SEQ ID NO: 394 - DNA, 750 bp, Gossypium hirsutum
  misc_feature (743)..(743): n is a, c, g, or t
aagcaattacaatcaaatcttaagtaaaacctgtcagaacacatacctacaagcaagtcaagtacaatatcacagaaaaaccttttatctccccctggaacttgatgagtgaagcaagtataagaagctagcccgacacaaccgttgccagttgccactacgaagatgcttgttcaactgtcagcgcaactgaaaccaggattcttctgaatttgcttttctctcattatctttctaacaatagctgatgtttcccattcaccagaggttgcaaataagctggataactgtacgtaagcactggagtttccaggatcaagctcgataatccgctctgccacgtcctttccaagagttttgtctccatgcgcaacacagcctctcaaaacagataaccacaaacttgcatccgccttaaaaggcatttctcctatgagattcattgcttcctcaaggcaaccaacacgggcaaaaagatcaaccatgcaagagtagtgctctatccccggatcataatgatagtcccttttcattgagttaaaccactttcgtccctcctctagaagtccacaatgatcacaggcagacaggactgctataaatgttacgttagttggccctacaccagcatttatcatttcattgaacaacaacaatgcttcaaacccatgaccattggtagcataacccataagcatggaattccaagagatttcatctgattttgtcattgtgtcaaatanttcgccc

SEQ ID NO: 395 - DNA, 390 bp, Gossypium hirsutum
tggcagagcagtcatatacatatttccataatcatggaatcttagagatttcctccaggttaagaggagagatacggatatcaggtagcatagaactagaacaatattgagatcaaagcaacccaagccttcttccagccagcttcagtaaacgggcaaaccttcaaacatgacgcaggaaagccatgagggagaaaaataagtcccaggaatgttaatcaaagtttccacatagaaaattttttatcaaaagaaaccatcttttacatgctctaccttaaacctagataccacacttacacttttaaagactaactagacagtacaatatttgtgcaatgaaagattcttacctgggatagtgttagtttttggataatattatcatga

SEQ ID NO: 396 - DNA, 691 bp, Gossypium hirsutum
tgctgctgttgtattgtgtaaaatgttagccatgtcacaccaaattttagggcatatcatgcacagactgttaactccccgcacataatgcaaaacaagatgtgcaacaataggccatacctcttgcaagggctaaaatatcccccctgtccagtttcgtctctgcaactaagcaatgaaaagagaaaatagtcaaacattcaattgcttaaacacctgggaagaccgaaagagaaatattctaaaattccaaacctttagactccaacggtggagcttttagaaattctattgcccttctgtaaagtccctgccagccagaaattatcgaatcgatacaaaacgtaagctcttagatttaaacggtgggctacaataaatctgggaaagtacatcactatcttatttttttcaacccaaattttaatcctaaacaatctagatcagctataagaccttcctctactatgtctggtctatagccatcttagatactaatattcaagatggtatacatgcaaacaccaatattcaaacatagaacaaggcagctcatgtagatagatcaataatttttcagtaattgggatgtactacatttacatattatcctctttaacagtcaaacctctcttatcagaatccattctaaatttttcttcttttctgactggattacacagcgtccagt

SEQ ID NO: 397 - DNA, 582 bp, Gossypium hirsutum
tttgccttgtttcgagatgtaaaatagaatgtaaaatgagcaacaaaattgcaaggatggcgagaaagtttctactaaaggatccattcttattaatcaattaacctaattgatatgcctttattgcatatccctatttgtttatacatttaaatatcaagaataacttacattaggatgatcataaaagtaaggtttttacgcaccaatagaattgtcacatcatcaaattttaaagaaattaaattattattatactctcatatatcgagaatttatattgtggatccttcccgccacattatttataatccctttcaacaattttttttcttgtcattgacacgtaattttgataattttttactctaaatcctaaatctagaatcttgaatcccaaactcgaactcgtaaccccaaatccttaaacactaaatccaaaccccaaacccttcaaccttgaactcaagctctaaacatggaatccttaaaccctcaacatgaaccttgaatctcaaacccaaaacccaaaacccaaaaccaaacctcaaactttaaatttcagactcgaaccctgaacct

SEQ ID NO: 398 - DNA, 764 bp, Gossypium hirsutum
  misc_feature (756)..(757): n is a, c, g, or t
gcatctcaagggtattgtgagaagttcttggtatcgaaattgaactgtgataattcactcatgagctatgcctttgctcaccagcacaacgccaaactcgttctcgatgcggctttgtgtttgataacagacaacatggataagctaactaaaagggaagaatatattgaacttgtggaaaaggatcctcggcttgtagtggaaatctatgaagcttacctctctaaacaggttaatacagctgctcataaagattgttcaacgaaatcgtagtcatttctgatcaaatgatattgttgttcattgatattggatgaaattttagtatatgtatgtagaagaagagtttgaatgtttgatgatattgggttggggaaatatgtaatacgaagttacaatgaatgccataacgattgagcgttttttatctttttgtcccacgaacttgttttgcttaaattttagttattttgggtgacttgggatggtttttgagatgacaggaatggataagctctctaagggaagaatgtttgatgatattttgctgaggaaatctctgttacaactttacattgtctgccatacccagagagctttttggaccctttaatctctcccaaacatgttttggttagatttgaagttatctgcatgacttgggatggtttttagatgacaagaatggatatgcttattgagaagggaagaatatatccaacttgtcggaaagggtccttggcttctcacattggnngccatat

SEQ ID NO: 399 - DNA, 644 bp, Gossypium hirsutum
tactactagcacccacaaaaagtcataatgcagagagaattaccaatcaaactggaagcacaaagagaactgaaatcctaacagactgttaacatagtggatctttcaaaatgttataaccataaggtttgtgaaccatgcttctagaaaagaaagaaaagaaatatatgcaatataaccataaaataggcatggtaatggaaacctacacaaactaaagatgcactttttaagtgatttctcctcattttggccatatatacacacacacacacactgaagtccaacagagctagagaacgtaccagttatggctcgtactgtttcactagaagcatactcttgaatggtattgttagaaaatagaagtttaacaaacatagcagcttgaatggatgtatctggatcacttgaacctattagatccaatacaacctgaacaccaccagcctcagcaactgctctcttatttgatcggctatacattacaagattctgcagagcacatatggctaccactttcatttcttctgttggttggtcttcaagcacattaacaagagcacgacaagctgaaacagcatcagcacttcgagcaagtgcctcattctgaaaaaggtcaccaagagccaatgtgccaaaag

SEQ ID NO: 400 - DNA, 580 bp, Gossypium hirsutum
gaccttacactataaaccctagaacctaagtttgagagttatggatatttatttataatagttacgattaattgtgtttaagtaaaattattagtatttatttataagttttttatatatatttttatttgatttaatgacgatgtgtcatactattattcattgatggtgcattaaatttatgcagtgatagtgcattaaatattatttctatttaaaaaatataaaaatataatttaaataaattttaaattgaaatataaaaaaaatatgattaaattagaaaaagtaacattcaaataacataattgaaatattcacaaaaaatgcataatttttttttataaaattttgctattaatcattgtgttgtacgaaaattattgatttaatccatctattttattttgatttttaaaaaaatatatttatttcttgaattttaaaattttaaagttaatgatagcggttaaattctatattttccaaaaaatataaaaaaataaaatgattaaattaaaatttacacatagaatttaacatttttttgttggctctttttacttcctttcaaagggga

SEQ ID NO: 401 - DNA, 679 bp, Gossypium hirsutum
ctgatggtcatgtttggcgtgtagggattaggaaaggtgacaacaaggtctggtttcaagagggttggcccgaattccttgaccgatactatatccgaataggatactttttgatctttcgatacgaagggaattcggcttttagtgttagtatctttaatttgtataattctgaaataaactatcagtctaatgctcttcttggtagtcaatacaatcatgggaaatcgtatccgttcgatgaactcgaagacgatgaatgcatgtcttcagctatgcagcatttgttcgggggatccaaacttaaccattgcgttaattggagcggtgaagttaaccttaatgcagcaaaaagcgcgaataatcaacctattcgaggtatggttcttcgtttaatgtgcttgaacttaagatgattctgctaatggaagtgaaattgcgtacttcaggttcagagacgccaccaccaaagaaacccgggaggaaaaagcagaagttcgaccctagtaagtgttcttaagtttttgcagtatggaagggatttgcgatttttctcaccggttgtttggtgaaatgcagatgatcaggatttgtctgttggacatgaagacgattcggaaatgcggtataggttttacgaaagcgcttcagctcgaaagagaaccgtgacagccgaaaa

SEQ ID NO: 402 - DNA, 767 bp, Gossypium hirsutum
actcctaggtcggttcatggacagactcttttctctcttctctatagtacttactggtcaggctttagcagctttgcaataaactcatctatgttcctatctgagctcccacctacactaacagctcttttagcaagctctttccatttcgatgcgttactcttaatctctccgcttctttctccgatcatgacttcccttaaacaattcccaagttcctccctcgtgacgatcccttggtcttgtttagctctcacacctaccttccatacatgcgctaagaacttggcattagttggctggtcactccattgtggcacacacaccatcggaacgcctaggctcaagccttctagagttgagttccatccacaatgtgttacgaagcatcctactgcttggtgagccagcacctctagttggttgcaccatttaacaactagccccatttctccaatcgagtcaatgagctcgagcagctggttgtctttgagttcctttgcaacccataggaagggcatattacttgctttcaagccccatgctatttcctgaaattgttcattggagatgcttgccatgcttccaaatgatacgtataccaccgattttaatggcattgagtccagccatttgagacactgatcattatcatagttccacaggctagccccatagcttgtatctccttcaattcgagaatctaagtagaatgatggcaccatgggaccaatcattaccacgggccattttgccatcagagcctc

SEQ ID NO: 403 - DNA, 525 bp, Gossypium hirsutum
tgtggaaaatctatagtaccccttcaacccctaaatcaggaagtaaaaaattcaatgtggaatctaggctttcccaatccttgtttacagaaagttctctatgcatggatcttctctcagatgctagacggcatagagaagttccagagaacgattaccttggacaagagactcctttggtatgcaaatatattttgtttccacaactgtttttatttctttttctattgcacatgttagtcttggattaatctctttcctgctgacttaattaaacgtttcaaatttacagcatacccttactgttgcataaatgttttttaaccactgttgtatttagaatttgctctgacctcagttatctccccttttttttggtatcatgcatgattcagcaagtatatttgatgccttatttatttcagacaagcctaaaagcagttgatcaaatagatctactaagggagcagcacatcaattaaaaacaattgatcagatagatctactaagggagcagcacatcaa

SEQ ID NO: 404 - DNA, 512 bp, Gossypium hirsutum
gagaaggagaagtttgattaggtaccttcagccttttgaagattacattatgctgaagtattgctatttttagaacagagtagtgtcagcattaagcaaggcacaaaagtttgtctttttcaattaaaaattgcctccgtttgttttgtcgcttatgccttttctttttccaattaaattctgtttttggtttgcagtttctgtctgtgctttgttatgcaacatgctagttcaccagagggctatgtccaagcaaaggtgtcttctgtggctgctcaattgatgaaaagaggctggtaggttgcatgagcttccaaatgtaacatgtgcatatgcataccagcaattatgacctttgttctcaggaatattgcttgcttcatttcattaagatttaagtaacattcaagacattgctattgaatttcacatatgctccgagatattggaacattgtaattatttaaatgaatattttatttgtaggcttgacgttacagaagctgagaagg

SEQ ID NO: 405 - DNA, 760 bp, Gossypium hirsutum
tagtaggctactgctgtaaataaatgagtatgaaataacatttatgacctaatcctaacaatattaccagtgacaagaaggctagaattggctgttattctcgtgtgaaagcaatgcatgtcactatcaataatccctgtgattaattttataaatagcagaaatatctcccaccaattatcattcccatcatatcaatcacatcgtaaaatcttttacagcaaaagaagttccctgctgctagcaattcactgcttgattctaagcatgcacataaaaagggctaaaagtcttcttacaaggtaaatcaagggagaaatgaaaatattactagctttctactatgaaccactcaaatagttaaacagaggattgaagatgcgaaactacacgtgcccaaaataaaaggtcagaaagaagtcagcagtagctatcacttattgatgcacaataaacattacaaaaataaagcagattggaaatacctcttcacactttttgcagcaaaaccaattttcttttgcacatatttccaagctatctgcccctctacggcatatgcactgaacatgatctgcatcaaatacacaccaaaaaaaagcataagaaactattaatatgtggttttgacctgtcagaaaatggagaaaagcaacctacatttatgctcacactgagcacaagtaagaactctatcatcctcaatattagcaacgtcttctttaagcttgctttgaccacagattccacagcaacaaga

SEQ ID NO: 406 - DNA, 731 bp, Gossypium hirsutum
  misc_feature (64)..(66): n is a, c, g, or t
  misc_feature (704)..(704): n is a, c, g, or t
  misc_feature (707)..(707): n is a, c, g, or t
tcttcatgtcttttgaggttatcagcctttcagaaaccattttttccccatggcgccggcactnnntaaataagccctcaagtagctatataatcataaacaaactcttttagcaaccaattactgtaagatatgaatatcttcaaattttagtatcagatgcatgaaacaaaatgcagggtctattccaaatggaaaacagataattcacctcgagtggcttcaaatcaatccttgtattcgtaagtgaatccatacgagcaggaggatgaggtttcaaggagtcaaattccgataatgagcctgcattagagatgggctcctttaggttttggcgatacttaggcctgtttataaaagaaaacctgtaaaaatttgtcctgttgttatatataatagtgataagttattagagtgccaaataaaacctggcaaagcaagatccttcaggcatgtcaaggacatcattgctgtattcatcgtatatggacaacgaagcaataatgtaacaaattccgaaccaaaatgaggattcctgaaataagaaaaacccacaaaatcgagttatatgttgaacggaaatatggacaaggaagacaaaagctatgtagaagatattaacctgataaacaatcacccctgcgtaggcacctaggaagatgctggagaccatggatcccaacactgcccccacagtagccagngcncaaagtaagatagcaaggcctgca

SEQ ID NO: 407 - DNA, 748 bp, Gossypium hirsutum
  misc_feature (725)..(725): n is a, c, g, or t
tgtgtcatgccaatattggatgagtactatgttcaatggaaacatcattgggcttgtcaatgggacggcagccggttggggaaacatggggggtggagccactcagcttattatgccgctcatttttgagttaatcaagcaagctggtgcaactccatttactgcttggaggattgcatttttcataccaggatggttacatgtgattatggggattttggtgttgacattaggccaagatttgcctgatgggaaccttagtactttgcagaagaaaggagatgtcccaaaggataagttctctaaggcaagcatatgccatgattttcatttacatgcttttgtttttctttgcaatttagggaattaattaacctatgccatccactgtttgattaggtcctctggtatgccatcacaaactacaggacatggatcttcgttcttctctatggaatgtctttaggtgttgaactaaccactgataatgtcattgcagagtatttctttgacaggttcaatcttctcattataactttacaaaataaaaaacagcaagtgacaattaacatcggtctttgtgacctatatatatataggtttaacctcaagctccgtacagccggcaccatagctgccacttttggcatggcaaacattttcgcacgccccatgggagggttcttgtccgatctagctgcacgtcggttcggcatgcgcggccngctctggaacttggacatccttc

SEQ ID NO: 408 - DNA, 759 bp, Gossypium hirsutum
gcacttccagcccaagatctagataaggtagaatgttgtttttctcaatcaaccagccagtggcatgatgatcaaagtgtttctgtgcaggtagcaaccatttgcttctgatgagttttagcgtacagagtcacaatcatctcttctcagttttattatcttagaacgatgtcaaaaacttaggtattattttgcatatggtcttatctttgacagaattaatggcatgcataccaagattcctttataattgtgtcttactctttcaatatccttttgtactttgatcggtcaaatttggaatgcttatgtcattgtatgttctatcgtctcaatcaaataagaatttatgtaaacagtaaaaatgatattccatagatttaacatgttgcagtagtagtggtttttatgggcttgaacattggcttggcagtatacctgcactcaatcttttgacaaaaagaatcacccccccctcccccagccttttctctcccaacaaactcttttatctctcgctctttttttccctgttagaccatttacgacagttctttaaaatctttctgactgtattagcatttgctattcatttatttggttcgagcatgagtaatcttgcatgtctaaatttttacactgctcaattacttggaagaaaatagaatgttcaataaaatcatcttcattgtctcaaaccaaatcgacttttgtgtaatcttctttttctgctatcatgatttttttttacctcccaac

SEQ ID NO: 409 - DNA, 651 bp, Gossypium hirsutum
acataaaaacttcaatttaatctctaaatagaaattggtacctcaaaccatcttttctgactacttcttcctgaagacgagtaaggtattttaagcttagtaagtctagaaaacatgcgctcctggttctcacgaacatccacagtgacaattgctccatttctgagtccacaaagaacaatatttccctgaaataagtcacattcaggatcaatttcaagatataagtatgctataagcttccatgcttcctttccaagctcagagcgtatatcatacattaattatcatggaacacattatgccacctgttaaaagaataagatacaacaaataacttgaaacctgaccaaaagaaagaaaggtctagaacctcaaaaaatgaatttatctgactcccagtgggtaatgggagaaacaaaattaagcacaattgaatactgatattaatgaacatatttttccccttacaaactgatatattactaaaaggttcatcgattaaagtaaagaggaatttcacatcattagccaaaaccttgaaggatataattcttactgtctgatcaaattgtacagccaaaacatcacttttgctacgacacacccatttcgttgctcctctttcgacattgaccaaagctactccaa

SEQ ID NO: 410 - DNA, 778 bp, Gossypium hirsutum
tttttatctcacatttcttaatgcagtgtagtataagatagccgaaacctagagattaagctttgactgtttgaatttgctgatgtgaagggagtgaagatgccagtgattgatgtaaggaaagcagatgaggaagcttgcaatatacttgtggttgaactgagatattgaggcagtgcttgttgacaacatattagccttgttgaagtcatccaacttcggttcaacgcgttctggtttttggagctttagaggaaccatatgctactcttgccaatttagccttcctgtagaggtagattacctttgtttcattgtgatttttttgcatcctcatggccttgtttttacctgatttatcaatattaatgcagaatttgacagttgctcgtatctcagaactcatggaatgaacacatggagatggatgttattttcaaaggccacccatcacagtttcattctcaagatggactgatgagcttatgcgtatcccatggaggaacccaacataaacactggaagaagtattaacaagagttggttttgttggggattttggaggaggagcagagcagaggaagaaatacaggacagaacaagacagtatttttacttgctcacaaatgtgcagcaagggagctatgacttcagctcatttagctcaatttttcaataagaaaaacaaaacatttatagtcaactacatcacctaaacatccacttaacaccactaagttacattggaattatgaaaacattacttgcccacataggg

SEQ ID NO: 411 - DNA, 559 bp, Gossypium hirsutum
  misc_feature (50)..(52): n is a, c, g, or t
gaaccccaaaacattacaagtcctaatgaaactgttgtggttgttgattnnntcctgtggttttagaggatgctcctaagaaatcatatgcttcaattgtgagttaatattgatgaatttttctttttcattcatgttttgctggttctttgtatctttattaagcttactgaaattcatattaggtcaaagtaatgaaaactaataccgcatctgctccggtctatgttcctatcaataacgtgagggtggcacctaaagaacctcactccattgtttctgcaaaacctgctccagcaaccgaggtagcattgcctaacagtgacaatacacctgaaagtagcaatgacaatgaggaaggtaattgccaacttcatttatgcacgcttgcatagtaagagaagcacatttttcttgttgttaatggaattagatcagtaacttttttcaatttcaatgaatcaagatatcaattaaggatttacagtacttgattggcatggtttatgttatatgatatgtgtttttctctttgatgtcttggttaatgttctttttt

SEQ ID NO: 412 - DNA, 744 bp, Gossypium hirsutum
  misc_feature (469)..(469): n is a, c, g, or t
  misc_feature (475)..(475): n is a, c, g, or t
  misc_feature (477)..(477): n is a, c, g, or t
  misc_feature (480)..(480): n is a, c, g, or t
  misc_feature (484)..(484): n is a, c, g, or t
tgaatctgaaggtgaagtcttttatcaattcaactttcattagtctagaatatttaccagggaatgctttatgcttagtccggtttgcacttcatttttcttttccaacttttaggttttctcttgggaaccgataagatgttatgatggtgtggatgtgggatggtctagattgtcagatcttaatgttcatgaaggaaagcttcttggctgctcatataatcaaagctgtgtaggagtatgggttgtagacatctcggtattgctcaactttctacacttcaaaatatttaattggtccatctttctttaatggcagtcattgtgttaacattttaatattgaattttgatcactggcacagcgcatagaaccatatgcagttggtaatgctaaacgtgtaaatggtcattctgaacctaaatctcattcaggtggaaacctctctgtattgaatgagaataacacnaaagcnantangggnagtatacctgtttcacaaaatcctgatcctttagtgaaggaaacaaaatcccttggaaggttgtccatttcacaaaactcagatcctgcgaaggagtcaaaaagtacgttatattttatcctagtttttcgttgtttgcatttctactagactttctctttcttgctattagtccagaaaggtcttaggagagacaagtcaaatccatcagtctgaactactcaacttttgaccaataaacaacaaaagtagaagcaaaa

SEQ ID NO: 413 - DNA, 756 bp, Gossypium hirsutum
  misc_feature (53)..(57): n is a, c, g, or t
tcgactgttcaaatttctagggttttaattgttttattatcgcatgctcttannnnnaatttttaagtaggcaagcatgtttgggcaattttagcaacagagaacaaaatacaatggcttgattgtttgattaaattaaactaaatgtaggatacatatgctatactaatagcagtgggcaaataacaaaatcccgcacatatcatacctcgagacatctcagactgcatctgcaacagtcagtaattactaatattttatcagtcagaaataataaagagtgacttaattttagcaacaaattaatttcggcatggttgtaaaggcattttaggtgttattttctatgtttctgtttcagttcaggaagggtagagcctttaataaatttgttccctgattgagaaaggaagaaaaagtaccagaaaccactttataaatcttgatttgatttgaatagaaagaactaactggttaacccgagcagccggcgtttagcagcagccgccattcctttccaaaatatcagaccagatcagctgttgatcagatcgaggcccacctttggaaaacacaaccccctcccccccttttctcattcatttttaaggtatcaaactgcatcaactgcccccaccaccgaaacaatcatacctccacgaactggaaaaaacaaatattaatgtagcataaatcataaggacctaaaactaagctcaactccaggaattaattaatgcgacataaagccttgaa

SEQ ID NO: 414 - DNA, 570 bp, Gossypium hirsutum
gtttgatgcctcatgctctcatttataatactagttccttaagcaagcagaagcgacaggcaataccttacgtatattaacagggtgagggttttaaagaaaacgattggaagggagggagagtgcataattgcaatttgctttgattttattctacagaagtcagcacacagacaagttttgtttgagggctagggagccaaaaactttaataatttaaaatagtaataaaacctatatatttcaacgcattgcatctcttaaggcaaaaacgtacagccagttgctatggagaaataggatggtacttggatcacttcttttttctttttgaaaattaatactttaacttcaatgcagaccgtctttgaaaacagtttgatgcaacatcatgttgccctgcctcctgatgcaatgggaaagataacttacattgctcctcctggtcaatattctttgaaggtttggctgtttaactcttttatcatgacatctatatcctttaatgtgggacaaaactttctttttgctataactgacccttttacttcattgcaggatactgagctg

SEQ ID NO: 415 - DNA, 526 bp, Gossypium hirsutum
gaatctcttgcagaccgcatgattgaaaaagtgcgaaattcttttccagcttatgaaggaaatgggatccatttgagtcctcaatcagaagctgccaaattaggctttgatttcgatggggagatacctgatgaagttagaattgttattgtaaattgtctcaaaaatcctcctcaattacttcaggcaattagcacatacacttcaaggcttaaaactttgatttctagagaaatagaggaagtcgacgttagagctgacgctgaagccttaaggtatgcttatacttttgtgtttttcttgttggtggttacaggatttcaaataagcttcctttggttttccactttttcttctacttatcagggttgtctaggctatatggttacaaataattaactgcttttgtctgctaagtacagttttttagaatcttagagctgcaatttgtttcttagctactatttgtttgtgttcacagaaattactgcaatttgctaagttattcctttgatttgatcccaca

SEQ ID NO: 416 - DNA, 719 bp, Gossypium hirsutum
  misc_feature (711)..(713): n is a, c, g, or t
tcatctttttcgtactaaataacaattgaatattttcaggagcttatgatgaagaagaagctgctgctagagcttatgatttagctgcacttaagtattgggggacttccactttcaccaattttcctgtatgtataatatataatctcctttttttatgtatacataaatatgattatgagcatttcaaccactaaaaatcctccaaatatttgaaaaactaatttttttaatataatcatgttaaacatatagacttatcccatatttcgagtggaactaacttagtaaagtattatataaacaactgatctaactcgctggataatttctgcagatatcagattacggaaaagagattgaaataatgcagactctcacaaaagaggagtacttggcctcattaagaaggtaaggaagctttatctaccaatcacaaaatggtacatccatctaggagttcatctttgataaggttgtttaagaacaatcatatatatatatattatatttctaaattagttgttttattactcaaggtatttttactgaataacctgttggaatttatttgttacagaaagagcagtgggttttcaagaggtgtatccaagtataggggagttgcaaggtatttttcttcattgtctagattttagggtttattttttctttttagtgccaaaactcaaagaactgaagattcttggnnnaaacag

SEQ ID NO: 417 - DNA, 740 bp, Gossypium hirsutum
gtctgtattttatggatacactgcttctggttatggatatgttcaagacatgccttatgcttacattcatgagttcaccagaacttcaatggccgggaaaatacgacgttttaaaggtggatacacaagtttttgggagaagatcagtaaaaatcttccggttaaagtcctttgtaacactgaagttttggcaataaggcataatgatagtgctgatggtgttagcattaatgtgaaaaacattaaaggagaatccgaagttatggagttcgataagattatcatctcgggtgccttccctttcaaaaatgggaaaacatatagatctccagcttcaaatcatacaggtttgtcaacttctgtagactttcttaaaatttttctctattcccttcccataagatgctaatactgcgtacttttgtcacagaacatgaaactcaagcaatggatttgaatgatcttgaaaaggagctcttcagtaaagtaatgacaatcgactactacacaacggtcttgaaaattaaagggctagaagatatgcctgttggtttttattactttggtgaatacatggacgatcctgcatcaatcggacatcctgttgcaatgcagagattctatgctgattccgatattttcttgttctggtcatatggtaactccctggatattcaaggatcaactgtctgtgagcttgcaataaaagcagttgaacccatgggaggacaagtcgagca

SEQ ID NO: 418 - DNA, 663 bp, Gossypium hirsutum
ttgatgtttgcactgcaagtagatgaattgattcaatctctatcatcggcaaaagatatacttccccttcatataacttttatgatctttcaactatttatctatgtttttatatgggatgatgaatatatcacatgcttcagaaaaggataaacgtggtgaaaaatatcaattcactataaaattgatttgagaattggcgttttcttcatttgtatgttgtttctatgttggaatggatgaatggtgggacgcttggcctctatcctatagtaaaagtatatgtttttttacatttatttattagcaaacaacagtgatattaatctttgttttgttgtcttcttgtcagttgcatttattgttgttagtaaaataggattctcttcttaggatcttagtttcttcacttgtattagacttaacaatggcttgcattgcattggtgttgattttacctaaatttcgaggtttacaatttttaatttttattaattatttacgttttctcacttttattaattattattatttaagcttcctttatttgccttcttttatcatttttttcatgttgtttttagcttcgaagatctagtctaccaatctggacctagttcttggccttcttccgtctatgctcaatcagcaatttatcccatg

SEQ ID NO: 419 - DNA, 772 bp, Gossypium hirsutum
tcttcttcttccccctcctcctcttctactcatcctaatgaagacaaaaccaccagaactagtctcaatcttaaagaaactgagttgagacttggcttgccaggttctcagtcccctgagagaaaatgaaagaagtaatggttttgctgtaagccctttgaagaacttgatgtctggagcaaaaaggggtttctcagatgccattgatggacctaatgggaaatgggtttttcccatgcatggtaaatctgatgtagagttggctaaaggtgccgtcttggcctctcctagggctgttttggagggtaaaaacaatctaccttccatgagagaggttggtggccttcctcagtctccaaacccagttcaagacaagaacattcttgttccttcttcaaatgagcattccaatcctcctgcttcaaagtatgtttatcatcaaacctgtttgctttttcttattaaattgcaagttgaagtttcagttatctgcattgattttatctagtgttgtagactcaaattgtgttcttcatactgctgatatcaccacaatgtttgaagcgaatatcaaacttgcatcagattatctgcattttaatccgctcactctttcatttttgaagtttgtttgaaaatttctgaagccgaaagggacttttcctagagctttttaacttccgaatgtgttcttcatgcacctttgtaatattcattgcttagttctttaattgttgccttgttggaaattttaatctctttggtctaccgg

SEQ ID NO: 420 - DNA, 667 bp, Gossypium hirsutum
gatgtacagttacggaggttgaactttgggacatcttggataggttaacgcttatattagatagaagatttgaaaggatcttaattcaaacggatagcctcgagactgctaatgccattcaagaaggtgcctttagaatctcgaactcaactttactcaaaagaattcatcaaatcctgacaaaggtaaaacaatagaagattcaacatattcctcgggaaaataatgaaagattcaacatattccccaggaagaaaacacaatggcagatagtcttgccaaaataatttgtgttagaaagccatgtttaatactgattgaagaatctcctaagggactagttttctttaaatttgtatcttgttcttttcaccaaaaaaataataataataataataataatgtcaatgaaaatgtataggtgaatttttttgcggtgaggattgtagtttccatgaattttccatttcacataataaaacaaaaggtaatttgtaagataaacctatctctatatgcaaaacacgttgttcaacttcacgttgaacattgatattcataacaattttttatgaaaattataattaagaactccttaatagtttcccatttaatttgaaattaattaaaagactaaaatactaccggctagaataacctctttgaa

SEQ ID NO: 421 - DNA, 661 bp, Gossypium hirsutum
agccaagaagagcttctttccctgcaaaaattgataatcaggcgaatgggttaaatctcatgccaaaagtgcccagttatatggcagcaactgaatctgcaaaagctagacttaggggtcaaggctccccaatgtttaccccggaggctgttgagaaaaatgggttaaacaggcgatattctctgccatcttcaacctatagtaatacaagttcacagtccccacatggtcaaagacgggttcgagtagctggcaaaggtgctaacatcagtgacaaatctcaatcatcctctaaagatgctaatggtaagcaccactttacattgatgcctcatttggttactagtgtaataatgttttattcccttctgtttgtgtttttgttttgctaaacgagtattacccatggatatgctgcttagtttttccccattcttgaagtaggacagagaaactggcaccctctattgtataaagtcatttctacatgtgtagttaaacatggtcttatgtggtagttctatgctctccctgtatgttgcttctgcatgatgactatcccttattgttgacttgacaatttcagataaggttgtcagagctgagtggaggaggtaattcttgcatggggaattgtttcgatgaagtttccatggagttt

SEQ ID NO: 422 - DNA, 603 bp, Gossypium hirsutum
  misc_feature (58)..(60): n is a, c, g, or t
acagcggatcgatgtgcattctataattgcaaattcctgggctggcaggtgcttagcnnnctcattttagttggccttatgtaaactgtatcattatgccctcttatgttatcctgactttgttttccgatgcatattccagcatgtgtataaagatataatcctctgaagtccttctaaatacattgaaatcttggcaaaattatatctttctgcgtaaacaatgttggctacatgttaaggtctttactctttcgcctatttcatgaccaatttagtggtttaattgtgtttgtaaagttgtacggattatttatggaaccttctttaagaggtgatatttcaacaagtcttgaggttcagatttcagcatctacgatcctttcttctatccgtggacattgacctcctagaatcttactgcttgtataaccatttgcaggatactctatacttgcatcatggaagacagtacttgaaagactgctacattgaaggaagtgtagacttcatttttggaaatagcacggctcttttagagcattgtcatatacactgcaagtcagctggatttataactgcacatagccggaaaacttctca

SEQ ID NO: 423 - DNA, 792 bp, Gossypium hirsutum
ttaaaagtagttataggcaacctcttaaccaagttacttagtaaataagtgggaactaattagatcatctaaaattacttatttacataaactacaattgagcccacaaaaatacaacattgaagcatttaacaatcatgaccttttccggcattgttatccatgaatcattgcttactaggacctctcttcatttaggtttacccaacctacagctgaaaactttaatttccatgtcttccctatgacttcatcattctttcattctattatgaacagataagcatgaagaagaaagcaagtatgtattgaattatagttttgatgaactaatctgtttaagcgtgtccaagttccatcatgtgtaacattaattttgtagattcagcttcacttcatattaactttccaagggaaagactgctagaggatcatagtcaatgataacatgtgacctcaaacaaaacaatgtcaacaagagtcagacggagtgttattacgttcttgtttttctgaatgaaaggacaaaatatctacaatttcctcatttttgtcttcttcaactgcaagtatctcagtgtacccaccatagatatcgtcctcacagttaactgaggcaacctctgctggcacccagtcctcaggcctctcacctctcgttcttcacatgaacaaaagaaatcaaaaggataacagtgcacgagacaataatagggggaagaagaagaagagcatacaagggcagagatatatacggccagcgtttgtcttgagcgtatgcatgaatgacca

SEQ ID NO: 424 - DNA, 380 bp, Gossypium hirsutum
cgagggctcttttaatgatcataaaagcttggtcgacgctgttaagcaagttgatgttgttatttgcaccatgtctggtgtgcattttcgcagccacaatattttgttgcaactcaagcttgtggaagccatcaaagaagctgggaatgttaaggtatttaattttctcgctacctgcactaatgaaaagatctcgtttcacttttttttacagtttagcttttttcatgaaatagctttaaatgtcacgaacttgtgaatcaaaaattttaataaatttcttcttcgacatgcgacattgattgttagatcgacttggatcaaatgtatattcttctatttgtcgatgagtattgatttaccacactaatcatcaaatc

SEQ ID NO: 425 - DNA, 707 bp, Gossypium hirsutum
aagacttaatggtggttaacaaggaggaagacaaatctgtgccacttggtcaggcccagtcatttgcccagagtgatcatcctactcctaagtttccaactccttctggaatctctcctagcaatatggggaatcaagctgggatgccattccatcacgcaatgtctcagagttcgttaatctttgatcagcatccaaaagatttggtggggcaatcttttgatgtccaatttacaaatggctatagaaaccatgcaaatcttggaacaccaccacaatttccagctgggatgttttttgatgagcgtgtggaccgtggtttgacaacctccatggagttctacaaatatgaatgtgactataatttgccagctcaactgaacagactgaagaacaagccaggtccagcagcaacatatgatatggagaaagttgcaactctagacggccgacttaggaatggtgattctgctgtttccagtaaacaagtaattatcattgatgatgagcctgaaagtgaaacaacaaagtttgccgacattgccaaacatttcgaaggctcgagggaaagcccgctaatacctgctggcatttcaatgccattagttcctaatcatagcataaggcacaggaatccgttttctcgttatcattccgaaggagctttactaggtgacccaaccatggtacaaaataagaactttaat

SEQ ID NO: 426 - DNA, 666 bp, Gossypium hirsutum
tctgctttcattgctgtttctgttgtaatggcaacttcaactgcatccatggttggtgaatcctcatccaacaccactagggaatccttcatagtacttctactttcaaccgcgtccatggttggtgaatcctcatccaacactacttgagaatcagtcatagtactagtactttcatccagaacagggtcatttgcctcattttcacatggttcctcctccaaaccatcagtggaatcatctttagaaatcagttgcatcttctcaatctccagtagcttttgcattgcttcatttgcagcatttctagcccatccgtcaccatcaaaatctctgaagaaaagaaatgtgtttaagggattacaacttcatccagagaataactgtgtggcaaatacaaccggtgaaatggtgccgaagaaccatatttatcaaaagaagtgtgtgggggaaaatggctcatcgttacatacaaaagaagtaatagagaacaaaaataatcataaagaaaacctgaactctaaatctcttaagccaactctgtttattagcttttagaatatcattgaaattggaaataaagtcgcaagattccagacgggttgggatttgggacttcgtcaggctcttttacgaatagaaccttcaatgcctctacatgcttaa

SEQ ID NO: 427 - DNA, 474 bp, Gossypium hirsutum
  misc_feature (44)..(45): n is a, c, g, or t
gatgagtgagtgcttgtgataattgaaactttaggaggtagctnngggtgtattattttatttgatctttttgtatctctgtttctttttcttatttgtaaagtgaagaaaaaggaatagaaaagaaaagaaagaatcaaatctgtattatatacgacaacgacaagctataaggctctttcttctgtttctattgcactctcttttgtctgtttcccaagaaaccaggggagagagagagacagagattgaagcccttcgagcaaataaccattctaagtatatttgaataattatctatttattttttgtttttaaatctttcagtatttgatggttacactgaattcggactaaatctaaaagtaaaccaagtcgaaccctaaacaagaaaaataaaaaactcgcaacctattttcccgtcctgaaactatatattattgatatattcatatgcacaacagcatctaatct

SEQ ID NO: 428 - DNA, 751 bp, Gossypium hirsutum
tgaaacaatttcattctatctcctctattcgatgcccagaaaaagaagacgacgacgaaaaacccggaaactattccaccgtttccctctcaaaccaccctaaccccgatatctcttgtttctaccgaaagggtttctctcaaatcccccatgaaaccactggcaaagccttacatgcactttgcatcaagggcttaatccctttaagcttatttctgacaaatactttgatttacatgtactcaaggtttgctcttgttgattgcgctcgttacctgttcgatcaattgtctgttagaaatgctgcttcttggaacactatgatgtcggggcttgttcgcgttggtttatatggggacgtaatgcttttgtttcgtgaaacgcagaattttagtgttaggccttctgggtttcttgtttcaagcttgatagctgcttgtgataggtcgggttgtatgttcggtgaaggaattcaagttcatggttttgctattaaagttggtttgttatatgatgtgtttgtgggaagctgtttattgcatttttatggagcttacaagagagtttttgatgctcaaaggatctttgaggagatgcctgagaggaatgtagtttcttggacttcattaatgtttggatatttagataatggagatttcgagaatgttatgtatttatatcaggaaatgaggaaagaggagattagttgtaatgagaacacatttgcgactgtgatagctgcttgttcttc

SEQ ID NO: 429 - DNA, 562 bp, Gossypium hirsutum
atgaaccctgtgctacttcttctcgaagtttacaaggatgaggtattacataattccatcccttttcctttttggtagatcatgttttgaagcatatttttccatgaaactacagtttttatctttttctttttagcacataagcaggtatctaacagttaattagctctctatagaaatctgccactctgtaaatccaatttattttaatttacgggaagcaatatgtctttgttgatgtggaaacctagttattgggccaagttaatgttatttatttgcaatttacttctgaactatgttacttggacgaggtgttagtgccgtgtataggtacttgccagacatgtgcctgttcaattttttctttttcaagtttttgagggtccttggagggtcatatacccatactaatatatggatatggatctgagttgggttcatggaaaatgaagagtcggagtagcatagctttagaatgttgttagctacttaacaccacaagaagtgatttagtttttctttctaccaattttggcttctgatgacttcatttctggta

SEQ ID NO: 430 - DNA, 474 bp, Gossypium hirsutum
gacttcgtttgttgaatggttaattcttttgatggttgatttctgtgataattggttttctagggggaccaataaaaacattttgatatgttaattttgagaattttgctttaggattttcattttagtatttttttcaacctttttgcagtttttgtgagaaattgcatatttgtagaatattgatatattctccttttctttttctttttttgattgactcagtgttcagttatagaaaacatttttttagtttttaattttaggactctatattccaaggttgaaattttgtattttcttttttttaattctcgatcaccattctaatcacgtgaaacaccagatttcttgtcatcttatgttcttagttctttttaattagtgtaggaatatatttagtttgataatttggatgaaatattttttaggctgcttttctatttttttctcttaaaggaccacactctagtc

SEQ ID NO: 431 - DNA, 775 bp, Gossypium hirsutum
  misc_feature (730)..(732): n is a, c, g, or t
  misc_feature (744)..(747): n is a, c, g, or t
  misc_feature (749)..(749): n is a, c, g, or t
tggtctcttaatgtatcatgtgcaggaattaagtgaagacatgcatagtggagctccatttcttgatcttaagttcatttcagaaaataggcatccaaaagaattatttctatctagtgatgctagtgctatagttgaacatacaaaaaaggttctggtgattgaagatggtgaagtagttcaccttaaggtacctttgtaatgacttttaagtgaactctttggcatgttactgagagtgacctacaaactttttgcattgaaatcttcttactaacactagtaaaattcaggatggaggtgtttctattcttaaatttgagaatgaaaaaggaatatgtggcaatgcactttctcgaccatcatcagtgcaacgtgcattatcttttcttgagatggaggttgagcagataaataagggcaaatatgagcattatatgcagaaagaaattcacgagcaacctgaatctcttacaaccacaatgcgggggagacttaaacgtggaggttctaccaaagccaagactgtgcttttaggtggactgaaagatcacattaaatctattcgacggagcagacgtattgtttttattggatgtggtacaagctataatgctgctttagctgctagacctatcattgaagagctttctggtacttactctttgatttctgattctcctttgaaacttttttaatcttcagtttgctgattaaatttttttttttnnnttatcttctgannnnantataggggccccatttactatggaaa

SEQ ID NO: 432 - DNA, 445 bp, Gossypium hirsutum
atacttctactttatgtaaaggtttgagctttaactaatagatttgcagccaaaaatggccaaatagaccccccccccaacaatatcaaactaaacaatgaattaacaacaaattgctcagattagaaaacccaaattgtcccttaaacaatggcattatagaaaattagaaagaattaagaatacaagaaaagtagcaaacacattcattaaaaaagaaatgagaacttctcaacataccagattagctgaatgatattagaaggaaactaattaagataatttatccatgaaaataatatcagaaaaacccattgagaaaaataaaataaaacaaaataaaatgcggggtcgatacgccgcagagacgagatgagtggggaatgaggtggggaatactttaaaatggaagggaaaaaatgcaaaaaaaaagaaagaaagtaat

SEQ ID NO: 433 - DNA, 815 bp, Gossypium hirsutum
  misc_feature (794)..(794): n is a, c, g, or t
tataatgacttatatttccaaatatttcgtcaattgttttgtgtaataagggcaatggaaagttttgctgaagtcttgccaagtaatacttattttattttttcaattttaagagtgattaaatcatgtttaaatatacttgtggaagaattgatcatacacgtttttatttaagaaatgctgacttgaatgcttatgtgaaacttttttatcattttgacatgaataaataattttatttaatattttatttatagtatatatacaatgtagttagtactgcgagtcaactcgatcaaaaaaattaactaaggattgaatattagtataatgatgtttcctcttttatataatatatataaataaaacaattaaaaagtaataatatctaaagatagtttattcataaacactacccttttatctataatccagttgttgattaatttctttataaggttttctttctccccattgtaggtgtcgataatagaatcgattatgtttttcaaagcaattttttttaatcattagaaatttctgaagtttaaattcaatttaaaaatagaagagtttgctatttaaaaacagacatataggtaggttaagttagtttttaacgaagattaaaaactgttttattttatttgattccaaatttagggtaatgcctatactacctcctttaaattttaccaattcacccgatcaacaccattaatttgaaacttgaaatacgataccaatttttacttctctattatattgttatattgttcaatacgttcacggangatattattaattttatcggc

SEQ ID NO: 434 - DNA, 781 bp, Gossypium hirsutum
atttggcatgattgaaatccaaaagcaaatatactatttgattactaaatttgtcaactcacttttacatttcagtctgcaaaaatttaaaactcaaaatctttttcacaagtagtccccatactgggaatgatttgagcagagcataggcttccctggagcaagccttcaattagccattatcattttttgttttttggttattttagcaaatgtgtttatcagtatattgaattctatacaaacccctactggatctaaacacattcttaactgtcatgatagtttgatacagtctaaagtccaaaccagtatgaagtgactaatcctataaggattctcttcgatctacagtcatattttatttttaaaatgaatgtatattaagagtaattaatatctagggataatgataagcttccctttctcctcaagttgcatactgtgaaatcaatgacctaataacttgcacaatttaagaaaaagcagaagcaccttaaccatggcagcttctcatttcaatgttcacatctaaactttagattctaaactcaacttaaacttaatactcagtccagcctcattttacttgtcaactctcatttgtagcaggctcttatgtattatatttaagcatatgaaatgattaaaaagaatcattgaaacaggaggggggaaaagaagaaaacatatgtaccttgtccatcagttgtcaacattcttcgcatgattggaagcaaagttggctcaatctgaacaaaaagttgcggaagcctgctaa

SEQ ID NO: 435 - DNA, 473 bp, Gossypium hirsutum
aatatagtaaagaaattctgctacaaactcctccaggctgaaattatgtagatcacaaaggaaatgcagtaatcagtggtcctacctatctcttccatgtgctaccattcatctagaaatattaaaaataaacttatgcttattttaaattttattcagcaggaaaatgcagatatatctcatttaaaatttagggaaaagaaggaagaaaatagaatctgagaggttgaaacttgaaagtaattgtcaattccataaaaaattcttaataaaaaggaacaaaaaacactaattccctttgaaagaacttaatgcaactaaaactaagtattacctgatgcagtacacgtttcaaattataaaaatgaacagttgagtcaaatgttgcaattcccaacattgtccgaggaccttcctgcaataatagaaacatcaaaacaataggtatcccgtcttcacactgaataaacaca

SEQ ID NO: 436 - DNA, 592 bp, Gossypium hirsutum
gcaaagtgattcggagccaattttttaaccccaccgcggtacctgcatcagaaatttgcttctcaggtggatagaaggggccatagatgccatgattcgaaccctaaacctagttggtgctacttcttaagagtgattgcttagtcttctaggataagacggtattcgactttgcttgtcattgttccctaatctaacaagaggaatcatgcttatgataacatataatgttcataaatgtttgatttgatttgttagttaccaggaagaataataacggattcttctttggctagcctgaaacagaagtcgatgtcgtcgctgatgtcttccagactggaaatatttagtttaatctgtgaaatacatgaacaatataaactcaaacatgtttatgaacccgtccgagtttcaaacagagattgcaaattatattgctccattaccattgcagccattgacccctgaggcttttggggacaagtaaggcaagggatttcctttatcatatcccaacaaatatccgatgtctgcttcagtgtgttgatagttttcttgaagaaaacgttgtcagtttgctcaattatacggg

SEQ ID NO: 437 - DNA, 773 bp, Gossypium hirsutum
  misc_feature (7)..(7): n is a, c, g, or t
acttagncagctctattaattgtgtggaaagaacatttatgttcagctgatccatccaaccaagtctttgttgtatgtataatgagtcacactgaccatcaagaatatgcatggttgaggacaccatccacatctgtgatttaggtctcacagtgcccgaggatactagatggctagtaggtttcaaccatgggagtccttgaaaagggggattaacacaaactgggcaccaagcaatggttttcatttcagaccaaaaatcttcttcaggcatatcatccatcgagttgcctataacattgtcaatgtctatatcatccttacaaatggtttcctcccttttagggaagtcaacagcaactgcatcaccacatacaagatcactatttagatcaattaggtcccccggcatctcactgccattgccttctgatgctggataattttccggaagcttgttcgagatggccctctgtacatcaccttctctcacagatgaaagcttacatgcaagagcatctaaatagagaagcaacttcctaccataagttgctgcttccgggtccccagattcatgcagcgtggaaatagatctagcacaatcaagaaaaccaataaaacccaaagtccttctaagtccaaggctgactaaagtgtctaaagtttcaggacccgagaacttctcagaaggaaagaaaacttctttacagagcaacttttgtagctcagggactcggggatcataaagcctgcaaagaacatcacagagagaa

SEQ ID NO: 438 - DNA, 588 bp, Gossypium hirsutum
cttcctttgaaacaatacataaacttcaaaaagaaaaagtgtaaattgtcttctaccataaatgatcccatccaagttcaattacatcagtcttataataggaaaggataaataagatgtctacataaatgtgagtgaaagtagttgaaagttaaggtattatagaaactgaatcaaattaatataatggataatttaatttttatactattaaaaaaaattaaataaggttaaattgaaataaagttaatatttactactcagaaaatataacttttttttgtttaacaaagtttagcatttttaaaggttttatcgttttgtaaatgaaatctttttgtttaaaattgaactgcaattaaatgaataattttcaagatattttatatatagtaaatgttaactctattataatttaaatttatttgattcttttttatagtatagggactaaattaatctatttgataataaaattaataaaattaatttgatccaatctctataatacaatgacctactaggcacttcaacccaaaaaacatattttggtcttcccaatattgggttagataaggaagctatgga

SEQ ID NO: 439 - DNA, 664 bp, Gossypium hirsutum
ctctcactgtttttcacatgaaaatgaaattttattcaaacaaaataaatactttttcttcataaacattatacaattgggtaaatctaaaatttatttatatgaagtttgatgtaatataaaatttaatatatgaattttaatttagtgctatatatatatatatgatatttttattattttattattgtacataattattgtgtttaaattatttgtaatttaatttaatgtctacaaaaaattattaaatggaagactatagaatattttctagcatcggctagactacaatttctaaagaaaaatttgagagaagactaaggaaaattcaagaaagagaaaacttagaaaaatggacttcctttggatagaggaactatgaacaaaatttattatttaattgaattgatgttgtgtgattaatttaatgagaatttttataacattaaattcttatttttgtaattaaatcagatatgaaattatgaaatttaataagtttgaacggtctcatgatgtagatgtatggaattattacattttagatagctgaatggtctttcatcacaatctccactaatacaaacaaaaaagacttttgtttcttgaaagaaaaagaacagataattttgatttttcaagggaggaatactcaattgtg

SEQ ID NO: 440 - DNA, 762 bp, Gossypium hirsutum
cgctccttggcactggccctctccttgaggtggtgggttagctcgtgtttcaggcgaggctggtttagttggtttaggtttcgtcattattggcctgcaaaacctgttcaaggcaaatccgcatatcagcacctaatatagataacacatatagccatatttaagataggcatggaggtgcagggtatgaaaatcaacgaatgaaacaagaatctacatactggatacaaaatcttaagcatgtcaaatagtgtacctatctagtgcttcagccttctttctcacatcagctgacaagagaactggagtggcatatttgggaagtagatcctgctgctgctttttctctctcaaccaggcctcggcttctacacactcattcaagacctacaattacaatccaccattgacctcgtcactaacagaaagaagtggagagcggtaaagatagggaccaagcaactaccttttgcttttcagcaagttcaatgtgatcaaatttgggatcatttgacattgctgcctccctgtaactgttaatacagtaagcaagttgatcaatgacagttcccctctccatatactctttgtaacgttcttctataggatccccttgcttttcaaaatcaagacaatttgtcaggtatacaatgtgtacaacaaaacttgacaaagcaagagaagaacaagaattaccttcttaagctcttcaagcttggcaacataaacaccctttatttcatcctcaccgtcttcatatag

SEQ ID NO: 441 - DNA, 711 bp, Gossypium hirsutum
  misc_feature (683)..(684): n is a, c, g, or t
  misc_feature (696)..(697): n is a, c, g, or t
  misc_feature (702)..(706): n is a, c, g, or t
ggtttcccaggaaccaaagccacagcagtattactctgcatattggctggtacaaagagtgatctgtaattggaatataaaatcaaacccatgtttattatcataagtacacttagaaaacataaagagaaacttttttttttttttcaaaataagctgaagcttctttgattgatttatccaacaataaaagccgaaattagatgaggaaacttaatataccatctgcaagcatctgtccaaagcttccctttttcacagcaccaggttcctaaagagaaaaagaagggcacataattattagaaaggacaattcatcatattaacatgctagccagtaaatcatccgtgcccttgatgacaaccaaataatgataattacgcacatacttgttgattattctcatcgcttccatctgctgtaccctcactgccactttcaccactgttaagaaagcgactaaaattaggaaaggcatgtacaaaaaaatcaaagaaaattctttaatcaaaatccatgttgagagtgaatgtgaaaattgtttgaggaaagattggaacatcaaaagtctagtgcacctttgagagccgccatcttttccagatccggaagctgcctttccactctcttcaaccttgcttccatgaagttcccttggattttttggtggcacctcgatccnngtcatcagcacnntctcnnnnngtcag

SEQ ID NO: 442 - DNA, 620 bp, Gossypium hirsutum
ttctcatatggacaaccggaaggtgaaatttaacaatatcaatggtactattatcatttcaaagaagccaaattccccacgagaaccctaaaacttccaatctaaaagagttttgaaatcctaatctaccaagaattccatcagctctatatctactaatgcgagtttcaaataggcaaaataaatccgaagaaaaatctctactatactcccttacaaaattatggaacctaggatgaccaacacattgacagttccaaaagaacatttttaactttataagaaaataaaaagagattgtcaaacagacccagaaaaaaaaacaaaacaggttagcaatccgcctgaaagacgcccgttacctccgcatcaactccctccatttccataaaaatcccatctgacgaacaccccagttcagattcctggtcaatagtagaggcaatcccttttatcacctattctatttccaccaaattctgttgtgaatgtccatttgcaaacttcgtaggtcgaagcatttcgaggtccttcatctctgatggtcgttgaccaatattttcctcaataaaaaatgcaccattttccttacgaatacagctaggtactacatttcgccc

SEQ ID NO: 443 - DNA, 766 bp, Gossypium hirsutum
cttttctgatcagatcaggttttcttttgtcaggtacaaaactttcttttgtggtatcgccaaagtctttgggtagcattgttggatgcactagaacaaggtatagcatgtaatcagacaagatattgcttattcgacacgatgatgagcgaacaggttgtcccatttgaacagcattgtagtaaatcagcttggtagcaatatgaaaaataaagatcacgcgcgttaaacctgtgggcattccttcccttgcaccctttccaagttccagaaatggctgcaaagaagcatcctgatctattattctgagaacctgagcacttaatgaaggattgaggcgttcctttttcaagccagtgtagatgaattcctcgagataatgctccagttccacccaactgataatacggtacttgtttcgaagttcgttgttgtcaataagatttatgagcccagagaaaatcccaatcccgcgctttgagcaaaaatccttgagccaatcgtactgtgctatttttggtgttccagccatagacttaattgaacgcaacctggacgcagccagccaatggtacaacttatacagcttgccaccagcaatgccaaattcagtcatggtccaataagacaaaaggtccagaagagctcccaaaacatccagtaaaatagcccctaccaacagcaagtaggtcacggcgatgtcaactcctgttatgtctcttttgctcacaccaatatgatcctgtgttgagagaactatcagtac

SEQ ID NO: 444 - DNA, 675 bp, Gossypium hirsutum
atctttagatgaagccttttttgcatctcgaattatgatgtcctatagaggagattagacacaatagaggacgtaatatcctctatgttgttcgaaaaaaacagtttgagtaaatgcagataaacaaaataatttgtcattaacatacctcttaggaaccattaaaaaaaggatattttataatatactggcagtagagtttaaaatttacactattgggtttatatagtagccacatatattcttggagttgtattctcggatttggagctttgtaaaatttagtgctggtttatttggttataatcttttgtaaagttcatatgaaacctgcaattcgtgcattcagcttcaaaccttagtggcaaaatagctatctctagcaattaatgtttccatccatcccattcttacctgttttccttatgcattgatggagctgtaggttaaatcctgaaattcatgcatacagttcaaatctccgtggctgatggtagcagccctttcattcagacctgttatcgtacgccatactggagcagtgtgttttgcgaagttctttcctcatcaaggtacaaccacattttgttggctgtttttttctgttttgtatgattcatatttagagttcgtagtttctcctcccaacaatgttattgaatttgtgtttctctc

SEQ ID NO: 445 - DNA, 751 bp, Gossypium hirsutum
tgcttgatgagctctcgtaagagtcaactatctggccattctatctttgttttcatgcccttttcgtgtttaactaatattttatactgaattacagtctatataatatgccattatccttaaaataaatgtttcaaacttaaaatgagcatataaaaatagaagttatcaaagtctaaaaaacattttctatttcaggcgctgcacagaaactcaccaaccttctcgaaccctgaggagatgcaggcatcggactcgcatccaaaggcatcggatgacacagaggaaaccgtgactggtgaattttcaatatatcttaccttttggagtgaactattttttcttttaaatactgttcatagtggggatggactggcgtacatgaaaatatgaagtctgatatagattgttcataaatttctcctaggaataggaaaaaggttttcaacactcatccaaagtattcacttttggttgtaaggtggggacgggaggaggtggggaatgagatattacaattttcatagcacttgtaaaatttaaggctcttagatctgcacaagtttatcctttttttttcgccttgcttatgcaatcaaatgaaatcttagttggggaaaatataggctaaaagatgtgcttaatccatcctaaagttggagtccagctgattgtgggaaatttaaggctcttagttctgcacaaatttgtctttttctcttttcttatgcaatcaaatgaaatgctaatt

SEQ ID NO: 446 - DNA, 781 bp, Gossypium hirsutum
tgttgtcttgacaaccccctcagattcactttagttagaaatagccatgcataaacatactggacacatggaataaatcacccttaatcagatcaaagaattaaagtaaattagctagtaacaaaatgaaggaataatacattcttacgacatgacaaacagtgccatccgcctcacattcgcaagagatctcatgctcggaattttttggtggcactagcgttaccccaaccatttcaatttcacaggaatcaccaataaatttccagtatgtggagcccattgcggtagtaatctcttccaaagcatcaactaggagacattcatagttccataagcatcgcagcaatatatatgaatgtaaaaatgaacaaaagcatcttaattggatcagcattgtaatttgtaaacctataaactggataagaagggaaggaaaatattaggattatctgcttaaaccaaaacatctcaatcacccataacattagttcacactcagcggtcaaaaccaaaagactattcatcattgactcaatatttacgactctttgattccttgtggactatagacaattcaatacctcaggcacaagtatcacttacagataagcttttgaataaaaatggaagttttagtgtcattatgagcatgacagaagggtacctaagcggaaaaacagtagttaataccacctactttcaccataatcatatacttcgtaatgaacccaaggaatttaaagcagcaagatcctataagattccagtttagagataa

SEQ ID NO: 447 - DNA, 761 bp, Gossypium hirsutum
gcatttgggggacctggttaggttttcttatctctaacaatgttttacgttgggcttttctttttttgttttttaaatatagatttagttactatttttgtatcttttgcagatggtggaagaaccatatgggagaaagcttggcaagcatgtatggacagggtacattgtaaaaaatctcttgttagccctgaaactccgttgcagacacatataggtatctatcttgaccttacatagttgaatcattttctttgctgttatctattaactgcatacctcggtgaaatgctcaggtgctaaaactcccgatcaatcaatcaaacaaaatgcacttcagactaagactacatcctcacctgccagtctgtccaacaacaggggtacttcaacaacaattgtaaagccaatgatcccactttcctcaccactttggactattcctacaccttccagtgacgcccttcaaccagctagtattccaagaggtgcagttgcggactatcagcaggcactttctccgttgcatactccacctataaggaattttgttggacataatgctccttggatgtcccaatccccttttcgtggcccctgggttccacagagttctgcatttgataacaatacccattttcctgtacttcctatcacagaagcagttaatttaactcctgtaagagaagcatctgtgcctaattcttccatcatgaaacaggtttcaacagttcctatggtccagagtggtagtcctgcca

SEQ ID NO: 448 - DNA, 774 bp, Gossypium hirsutum
attttttaaagaataatcagatcatattttggtattaaattaataaactcactcatgtctgaatataaaaatgggtgggcataaggtttaatgagcagaccttcctctaattagcggcagtcgactgtggttcatatcatgaaaccacttagacaactctttaatcatggttaaatttttatctcataacccaaacctccgagaataataaagaagataagaatattatttaattcttacttttttgaggtgtggcagatccattttacaatttcctcagttttatgtattgtattcttatagaagttattcattctattgaaagcatattctaaaaatagacactagtgaagggaattttaccaaacagtcaaaatatacatgaactagaaaccaagagtcagtttcagtaggtgtgttgaagagattctacaaagatggccttgctgaaagtctttgacccttgtgctatttgtctcctctgtttggtattgagtgcatctgagttgtgcaatggaggaataactggtaactttctaaggaaagagtattctccagatatgccccttgacagtgatgttttccaagttcctcctggttataacgcacctcaacaggtaacgcttatttctcttattaaacttcttccaatattttaatgggttgttttaaaccttagatagctggttttctgaatcatgataggtccatataacacaagggatactgatgggaggggagtgatcatctcttggataactcctgatgaacctg

SEQ ID NO: 449 - DNA, 731 bp, Gossypium hirsutum
atgttagtcccctgttttcccattttgtttgtttatggatagcctgtattcatgctgttcatattaaacacaatttagttttactgcattcttcttgttttatttcattcgtcaatttttagtttttcttcaggagtaggtggttttggtctcgtttaatgccacagtcttcatactcccctgtcaagggactatatctttacggaggagtaggcactgggaaaactatgttgatggacctcttctttgatcaattgtaagtttcattagcatgcttattttggtaatttatcatatatcatgctgttagttacaataatggagataaaatcgtattcaactcaaaatatgggtatatgtccacataatatatggtttcttatgtgtgtaaacctgtgatatctgactcatcattgctagccgtcccaattgctcatatttgctgatccctatcatacgttctatttccactgtttcaggccctgcaattggaggaagaaaaggatacattttcacgactttatgttggatgtccacagccgcttgcaggtgagaatatgtatgatcgtatgtttctcctagttgaagaagttagtgattaagtaagtaacaccttgtattgcagacaagacttagaaatgaatatagtaatcgagctgtttcaattcaacttctgttttgctcattattcttaagtataaattggcatctggtgatattctaccttaaag

SEQ ID NO: 450 - DNA, 448 bp, Gossypium hirsutum
atgggcagcttcaaaatatcagagaagccggtttggcctttatttaggaatggctgaaagtgagaatagagagggagagacagaattgcctcaaaacctgtcaggggctgtggaatgtggatgttggatttgatgttgtttagacttttgggatatatagttgcttcctccttttagtttaattcttttgattcaatttgatatttaaagtatcatttcaaagaaaaaatggactaataaaaatgcactcttctttttaatggctagaaaaaaaatatacttttgaataactattatattctcaacgcctattgtcatccacagtcaactttacattaatttgtttgtgggtcaatttattgtgtttttgagtatttaatagctgagtttttctggtttccttgacctctaggagcgtgaaatcgtccctgttccaacaaatattcgt

SEQ ID NO: 451 - DNA, 756 bp, Gossypium hirsutum
taacttttttgctctctaactcttgataaaattttctgttgtcattcagccaccattgtgggaaaggtacgaacagcaagtgagagagtgggagctaaccatgtctaaagttagctctattccgtccaatgccgtcgagaagccacccatgtttgctttctgtctgaaaccccgtggcttgcaagttccaaacagagggtcaaaacaaagatcccagcggaaaatttcagtttctggtcaaatcaaccctgcatttggagatcatgaaggtttccattctttcggtaatgttctttacttatttcacttccatctggctttatataatgatgttatcttttaagagttggacttcatttgtgatcatttcaggccgaagatcaaacgggttcctatttggggatgaaaaggttctatatcctctgcataactatgaatctttagaagattccccactatttcaggcatcgccaagagtattttcacaactagattcaggtatcaagggatattttagggatggatttgataagcatcatcatcagaaacttcgaagaagcgagtcaaagaaaatttgcacttttctatcaccaaacgagtcccaaatgacgacttcatatagtcagagactaattggcaagcgaaatgggattcatcagcagagcatggccttttcagagtggccaagcatgcatcattacttctcagatggattacaaaggcacggccccgaacagttggataaccctgataccg

SEQ ID NO: 452 - DNA, 1178 bp, Gossypium hirsutum
  misc_feature (526)..(531): n is a, c, g, or t
  misc_feature (547)..(549): n is a, c, g, or t
  misc_feature (555)..(555): n is a, c, g, or t
  misc_feature (557)..(563): n is a, c, g, or t
  misc_feature (577)..(579): n is a, c, g, or t
  misc_feature (583)..(585): n is a, c, g, or t
  misc_feature (588)..(588): n is a, c, g, or t
  misc_feature (600)..(602): n is a, c, g, or t
  misc_feature (604)..(604): n is a, c, g, or t
  misc_feature (612)..(613): n is a, c, g, or t
  misc_feature (619)..(620): n is a, c, g, or t
  misc_feature (629)..(631): n is a, c, g, or t
  misc_feature (634)..(637): n is a, c, g, or t
  misc_feature (639)..(640): n is a, c, g, or t
  misc_feature (644)..(650): n is a, c, g, or t
  misc_feature (655)..(666): n is a, c, g, or t
  misc_feature (669)..(672): n is a, c, g, or t
  misc_feature (676)..(682): n is a, c, g, or t
  misc_feature (685)..(685): n is a, c, g, or t
  misc_feature (688)..(692): n is a, c, g, or t
  misc_feature (696)..(709): n is a, c, g, or t
  misc_feature (712)..(716): n is a, c, g, or t
  misc_feature (722)..(731): n is a, c, g, or t
  misc_feature (735)..(739): n is a, c, g, or t
  misc_feature (741)..(747): n is a, c, g, or t
  misc_feature (751)..(751): n is a, c, g, or t
  misc_feature (756)..(758): n is a, c, g, or t
  misc_feature (768)..(795): n is a, c, g, or t
  misc_feature (805)..(836): n is a, c, g, or t
  misc_feature (838)..(840): n is a, c, g, or t
  misc_feature (842)..(851): n is a, c, g, or t
  misc_feature (853)..(853): n is a, c, g, or t
  misc_feature (855)..(870): n is a, c, g, or t
  misc_feature (872)..(876): n is a, c, g, or t
  misc_feature (878)..(919): n is a, c, g, or t
  misc_feature (921)..(923): n is a, c, g, or t
  misc_feature (926)..(926): n is a, c, g, or t
  misc_feature (929)..(938): n is a, c, g, or t
  misc_feature (940)..(946): n is a, c, g, or t
  misc_feature (948)..(948): n is a, c, g, or t
  misc_feature (951)..(960): n is a, c, g, or t
  misc_feature (965)..(971): n is a, c, g, or t
  misc_feature (973)..(993): n is a, c, g, or t
  misc_feature (995)..(995): n is a, c, g, or t
  misc_feature (998)..(1011): n is a, c, g, or t
  misc_feature (1023)..(1031): n is a, c, g, or t
  misc_feature (1037)..(1039): n is a, c, g, or t
  misc_feature (1041)..(1044): n is a, c, g, or t
  misc_feature (1046)..(1047): n is a, c, g, or t
  misc_feature (1056)..(1061): n is a, c, g, or t
  misc_feature (1064)..(1074): n is a, c, g, or t
  misc_feature (1077)..(1077): n is a, c, g, or t
  misc_feature (1080)..(1092): n is a, c, g, or t
  misc_feature (1095)..(1097): n is a, c, g, or t
  misc_feature (1100)..(1100): n is a, c, g, or t
  misc_feature (1102)..(1102): n is a, c, g, or t
  misc_feature (1109)..(1122): n is a, c, g, or t
  misc_feature (1124)..(1127): n is a, c, g, or t
  misc_feature (1131)..(1136): n is a, c, g, or t
  misc_feature (1139)..(1143): n is a, c, g, or t
  misc_feature (1145)..(1147): n is a, c, g, or t
  misc_feature (1160)..(1167): n is a, c, g, or t
  misc_feature (1173)..(1173): n is a, c, g, or t
aatgatttctattttctgatagcaaagacataccaaatcaagtataagcgtgacaaggtagaaaattaataggaaaggaagaacaaagttaccaatcaaagaaaacatttttgctgccggagcctggcttgacgatgcagaaagtgctacaccacgaggatcgaacatatagaaatagccaccagagatgatagacaggagatcacaaatgaagtaacagcttagcaatcccaaaccatagtttagagtattagcacgaagtctccatggaggaatcagctgaagaccacttatctcctctctgttcaagctggccccttccagaatagctaccaaggcaggcccttgaaattcaactgcgctcgtaaagtaaaacaatattcagaataccattcggttgccaagcaaagacaaagctgggcaggttgttacaaaaaatgaactacaaaaatacagaatacgaaaaactcactgaaggagaagataatcattacttccagtagaaaaagttgcacctaccattttnnnnnntaaatgactttgtagnnncaagtntnnnnnnncatagctcctttcnnncaannnatnaattaaattttnnntntaaacctnngggttnnatgatcccnnnaannnntnnaaannnnnnnaaaannnnnnnnnnnnatnnnncaannnnnnnaanaannnnnattnnnnnnnnnnnnnntcnnnnntattannnnnnnnnncatnnnnncnnnnnnnttcncactnnnaatatactannnnnnnnnnnnnnnnnnnnnnnnnnnnagtcctaccnnnnnnnnnnnnnnnnnnnnnnnnnnnnnnnncnnntnnnnnnnnnnantnnnnnnnnnnnnnnnngnnnnncnnnnnnnnnnnnnnnnnnnnnnnnnnnnnnnnnnnnnnnnnnannnacnacnnnnnnnnnnannnnnnntncgnnnnnnnnnncatcnnnnnnncnnnnnnnnnnnnnnnnnnnnnanaannnnnnnnnnnnnnttttactctttnnnnnnnnnatttcnnntnnnnannttttcatcnnnnnntcnnnnnnnnnnntcntcnnnnnnnnnnnnnatnnnttnantcgctannnnnnnnnnnnnnannnntttnnnnnntcnnnnntnnngtctaactatctnnnnnnnnctattnctcaa

SEQ ID NO: 453 - DNA, 661 bp, Gossypium hirsutum
ctttgtattttcattcagacctagtcttttgtttttaccccttcaagttgatggccgtgtgtggtagctgttaaagcaaaaggatattttgtgggatacagttcaattttttgtttttttaactccctcccaaggattcaatcttcaagagcctcatgatcatatatatatgatacttctatgcttctcatatattgattaattgcaattttttatttctgtgctgccatagattgcagatttctggaaagaagctttgatattgagttcattacatcatccaaatgttgtttctttctatggtatagttcgtgatagtcctgacggattcttagctactgttgctgaattcatggttaatggatccttgaagcagtttttacagaagaaggacaggtaaccatgttagtaactctgtgaacaggttgccttttgggcatcctcacagtagtttgttttagaagtgttgtttgcctcttagcatgtgccttttctgtttcatagtagactaaacaagctagaatgcaatattttcttaagtgatctttgtgatataacaatgtgattgaacaggactattgatcgtcgtaagagactcatcatagctatggatgttgcatttgggatggaatacttgcatgggaagaacattgtacatttg

SEQ ID NO: 454 - DNA, 777 bp, Gossypium hirsutum
  misc_feature (762)..(766): n is a, c, g, or t
tttagaacaattttagacacaaaacaaattgcaattttagtttttcgaacaatctataaccaaaatggtaccatccgttcttttaatttcatcaagcttaatgaaaatagaattctccataaatttttgtagtgctttggtaatatctattgagctgtctcgttgtttctcaagtttgtttcacttaatttgttttcattccagggtaccaagatccttgctacctggtgctcgcagttctcgtttgagagaccgcttgaaggaagaacgagaggtgttagtaaagaaggcttttgtagaagacttgttgaccgaaaataaattgttatctcttcttcttaagagaggatcgacttatcgtgcaataatgtgggaccctttgttacttccttatacgagcagagattctgaattgcccagcagaactgctacagattctacaataatgcaagaaaatgtttctgatattcatggtgaagataaatctgatcaaaagaatctcttagatgatatgtgcttctacatggaaaatctgaactatttatattcgaatgatgatgatttgacttgcgattttcaagttgattcggggacattggtttgtgttgcttgtggaattctgggttatccttttatgtctgtggtacaaccatctgagggagcagcaatggaatttctacctgtggatcatctttctagtcaaggtccaacagtcttggtacctaagaatgcccattcttgccctattgagggctcagttcnnnnntaagggaccct

SEQ ID NO: 455 - DNA, 754 bp, Gossypium hirsutum
ttagaggcaaataaatgtgttaatacaatgagaggagggagcggaggagtagggaaaaaccaaggcaaccttgaagctctgaaggatctggtagaactgatgacccagtgtcatcagcctttttcttgatttttggcttcttggaagacgattttggcatatcctgcaattatactataaaattaagcatgttaaaatactcaggctttaataactaaattgaaacccatccatacattagcaacaacatcagtctgctgattgcgattgctgcgagtctctctttggaattgaccaataagaggagcacttgactcagatggcttcctttcaaacatagcaccaccagagttttttcccttgacaagacctgagagacttgaagaaatgcaatgaacaataagcccagataacaacgtccaagaatgtgggaaagaatacaacacagaagattgcaaacatacaaagtcaatggacagtaacaaaacagaaaggactttattatatcaagcactcccaaaacatgctttaaaatgctgtggaaagtggaaaagcatcagtggtatgaagagcaggatgataaagtatacccaaaagggaaaaataaaaaattgacttggaatttagacatacacttttgcttaaccaattcatagtaaaagtggcaaatcagcatacgagaggagctgtagcttaagtgcattcatgcatgtacaatttccagaaacacgcatgcatcataatcttcctacca

SEQ ID NO: 456 - DNA, 473 bp, Gossypium hirsutum
ttttgatgtattaagtgaaaattcgttgtcaagtacaagggctaaaagttcataagatatttagtacaccaaaagaagcaaaagattaaaaaaacaagatagagatgaatggaaatcaaatataattagaggtcaagtacaactgcaatctaaaagatgccaagccaaaaaaacgcaaaatgaaaaaggaactttactcaattaccataatgggaagaaagaaagaaatagttttgatcatatattttacttcacattaatcaaatacgccgtcttttacggtattgtatgtcaatggctccagaaattgtacaaattattacggctcaggtaaggctttacaaatagtagaaaaaataagcatattcatccaagtaatctcctacaacatgcatgtgcctaacgaaaaagttccattaaacaaataattatattttaaggaggggtaagagtaaatgaggaaaccagccact

SEQ ID NO: 457 - DNA, 495 bp, Gossypium hirsutum
ctctagaaaagggggaacactaatgatattagaaagtatgggtttctcacttaagagggggagctctgtaatatgcgggaacagtcgctgggaaaaacatttgcctaactccttctgacttgataatagggaagatgattcctgatgccccctgcaacatcattaaacccatattttataactcatcttataaaacattgccaaaagacaaattttaaaaataataataatactggcggggatcaggatctgcaccgtgatcaatctagctccaatccagattcttttgggtgaagggaatggaaccagtaaacgaccaataccatatattgccaccgcaaagaaatgcatcaccaaactcaaaggacgaggattcaaaccagagagcaaggagattggtcctgttgagaatacaccaccaaggcttagataatcgaagcaagcttggcgcatttccttccttgcttgatcaggtgaagcactgaacaccttgta

SEQ ID NO: 458 - DNA, 693 bp, Gossypium hirsutum
cccttccgatggggcatttgacggtagccatgataatgtcttgggacctttgttggacttcctggaagagaaccaatcaccttttatggtcaatttatatcctttttacgctattggagatgcttctttggatgctgttctgtttaagtcaccctcttcaattttcgtagacccgaataccggttttagttacaagaacatttttgatgctcaactagatgctgttcatttcgctttggccaaacggaaatccagaagaataccgattattgttacggaaaccggctggcctacgaaaggttcaggaggacataggttagcgatggctagtcttgacaatgttgacgactcctatgctagtattgacaatgccaagacttacaacaccaacttaattcgtcatgttacggatggctctggtactcctgctaggcctgacgaagagctagttgtgtacattttctccttgtttaatgagaacctgaagcaaggaccggaaattgagagaaactttggtttattttatcccgacatgaggagtgtttataacctggtcttccctggaaaaggaaccggaagaagctggtgcgttgcttctagccaggcttcaaattcggctttacagaatgcgctagattgggcttgtggtccgggaaaggcggattgctccgctcttcagcctgaccagcaatg

SEQ ID NO: 459 - DNA, 780 bp, Gossypium hirsutum
ggcttacctatgtcaattaaagagtttgtttcctttccaaacaaaaagtaaaaggcttctaggttcgatgctatatcagttttgattttgaaccaaagaaaactgtaatattgtggtttgtcataggttcatttatcaaataatagcttcacacttaaattcttgcttactttgcttggttttgttatttttcttcaagcaattcttctttcattcttccttgtaatcaaaacaattccatttagtttatagctttagctacctatagaacctctcatgtaagagcttatggatctggtatttgtctggagtaacaatgttactcgtgtaagaagcctcttatcaaagttgtgctgtgttgtacttcattatgttgattgtttggaacttaagtcattgcccagcagctgctgtttatgttgaggtgggctttgtttctttccagttatcagatgattatttcctttttctttcaccatatatgtgaataactcatttgattaatgagtagacaaaatttgcccctcatttgagttttccttctttccctcaaggctcaagccatcatcttgaaggcaattaggatgaagttagacatgtaaagtttatggctatatattgcattgtgagggaagtcacttatttctcttccaacgtttcttttgggttaagctagagttattatgactgacatgtcttttgcagggaaatatacaggtataaagaatcttcacaagagaaaactgtaatagattatttgctactgcttgaaaatgctga

SEQ ID NO: 460 - DNA, 604 bp, Gossypium hirsutum
ggagctttaaattttgcgccaacatacaaatatgagctaaattcagagaaatactatggagaggatcccaaggctggaaggcgaactcctgcatggtatgcttaaactagattataagattcgtcctttactgtgtgtttgtcttctgaaattttccagtatacatcatttcttaggtgtgaccgcatcctttcttatgggaagggactgaggcaactaacgtataggagaactgagcttaaactttctgatcatcgccctgttacagccatatatatggctgaggttgaggtgttttgtccaaagaaactgcaacgtgctctcaactatactgatgctgaaattgaaaatgaagaagttgtggcagaggttattgcatattgattttggaatgactcccttgagttgtaccaggtgagtggtacataatgtttctcatccaagaatataggtagcttctttttatcactaggtactaatttttatgagtctcatgactcatactaggaaaatgaagtaatgctggctaagagtgtagaattatggaataaaatatgatagacttggataattaaacataacctgtcaataagggatttggaga

SEQ ID NO: 461 - DNA, 1497 bp, Gossypium hirsutum
  misc_feature (524)..(524): n is a, c, g, or t
  misc_feature (535)..(536): n is a, c, g, or t
  misc_feature (539)..(541): n is a, c, g, or t
  misc_feature (551)..(562): n is a, c, g, or t
  misc_feature (566)..(568): n is a, c, g, or t
  misc_feature (579)..(579): n is a, c, g, or t
  misc_feature (581)..(583): n is a, c, g, or t
  misc_feature (585)..(591): n is a, c, g, or t
  misc_feature (594)..(595): n is a, c, g, or t
  misc_feature (598)..(603): n is a, c, g, or t
  misc_feature (605)..(607): n is a, c, g, or t
  misc_feature (613)..(617): n is a, c, g, or t
  misc_feature (619)..(622): n is a, c, g, or t
  misc_feature (624)..(624): n is a, c, g, or t
  misc_feature (626)..(631): n is a, c, g, or t
  misc_feature (638)..(645): n is a, c, g, or t
  misc_feature (650)..(658): n is a, c, g, or t
  misc_feature (667)..(669): n is a, c, g, or t
  misc_feature (680)..(682): n is a, c, g, or t
  misc_feature (688)..(698): n is a, c, g, or t
  misc_feature (702)..(714): n is a, c, g, or t
  misc_feature (716)..(716): n is a, c, g, or t
  misc_feature (718)..(718): n is a, c, g, or t
  misc_feature (725)..(735): n is a, c, g, or t
  misc_feature (739)..(762): n is a, c, g, or t
  misc_feature (775)..(780): n is a, c, g, or t
  misc_feature (782)..(782): n is a, c, g, or t
  misc_feature (784)..(795): n is a, c, g, or t
  misc_feature (797)..(799): n is a, c, g, or t
  misc_feature (806)..(808): n is a, c, g, or t
  misc_feature (826)..(826): n is a, c, g, or t
  misc_feature (829)..(830): n is a, c, g, or t
  misc_feature (833)..(842): n is a, c, g, or t
  misc_feature (844)..(852): n is a, c, g, or t
  misc_feature (855)..(859): n is a, c, g, or t
  misc_feature (861)..(862): n is a, c, g, or t
  misc_feature (865)..(873): n is a, c, g, or t
  misc_feature (877)..(878): n is a, c, g, or t
  misc_feature (881)..(886): n is a, c, g, or t
  misc_feature (890)..(893): n is a, c, g, or t
  misc_feature (896)..(898): n is a, c, g, or t
  misc_feature (900)..(901): n is a, c, g, or t
  misc_feature (903)..(905): n is a, c, g, or t
  misc_feature (907)..(909): n is a, c, g, or t
  misc_feature (912)..(930): n is a, c, g, or t
  misc_feature (936)..(939): n is a, c, g, or t
  misc_feature (945)..(948): n is a, c, g, or t
  misc_feature (961)..(961): n is a, c, g, or t
  misc_feature (964)..(969): n is a, c, g, or t
  misc_feature (972)..(987): n is a, c, g, or t
  misc_feature (989)..(994): n is a, c, g, or t
  misc_feature (1004)..(1005): n is a, c, g, or t
  misc_feature (1007)..(1008): n is a, c, g, or t
  misc_feature (1010)..(1010): n is a, c, g, or t
  misc_feature (1016)..(1016): n is a, c, g, or t
  misc_feature (1019)..(1028): n is a, c, g, or t
  misc_feature (1031)..(1037): n is a, c, g, or t
  misc_feature (1039)..(1041): n is a, c, g, or t
  misc_feature (1044)..(1054): n is a, c, g, or t
  misc_feature (1056)..(1060): n is a, c, g, or t
  misc_feature (1062)..(1068): n is a, c, g, or t
  misc_feature (1072)..(1074): n is a, c, g, or t
  misc_feature (1076)..(1077): n is a, c, g, or t
  misc_feature (1080)..(1087): n is a, c, g, or t
  misc_feature (1090)..(1095): n is a, c, g, or t
  misc_feature (1097)..(1100): n is a, c, g, or t
  misc_feature (1102)..(1104): n is a, c, g, or t
  misc_feature (1108)..(1125): n is a, c, g, or t
  misc_feature (1127)..(1143): n is a, c, g, or t
  misc_feature (1146)..(1148): n is a, c, g, or t
  misc_feature (1150)..(1173): n is a, c, g, or t
  misc_feature (1178)..(1203): n is a, c, g, or t
  misc_feature (1205)..(1207): n is a, c, g, or t
  misc_feature (1210)..(1215): n is a, c, g, or t
  misc_feature (1217)..(1231): n is a, c, g, or t
  misc_feature (1233)..(1235): n is a, c, g, or t
  misc_feature (1237)..(1237): n is a, c, g, or t
  misc_feature (1239)..(1257): n is a, c, g, or t
  misc_feature (1259)..(1260): n is a, c, g, or t
  misc_feature (1264)..(1266): n is a, c, g, or t
  misc_feature (1268)..(1272): n is a, c, g, or t
  misc_feature (1274)..(1281): n is a, c, g, or t
  misc_feature (1283)..(1292): n is a, c, g, or t
  misc_feature (1294)..(1302): n is a, c, g, or t
  misc_feature (1304)..(1305): n is a, c, g, or t
  misc_feature (1309)..(1315): n is a, c, g, or t
  misc_feature (1317)..(1319): n is a, c, g, or t
  misc_feature (1321)..(1322): n is a, c, g, or t
  misc_feature (1324)..(1327): n is a, c, g, or t
  misc_feature (1329)..(1336): n is a, c, g, or t
  misc_feature (1339)..(1342): n is a, c, g, or t
  misc_feature (1350)..(1356): n is a, c, g, or t
  misc_feature (1358)..(1361): n is a, c, g, or t
  misc_feature (1367)..(1370): n is a, c, g, or t
  misc_feature (1372)..(1372): n is a, c, g, or t
  misc_feature (1376)..(1402): n is a, c, g, or t
  misc_feature (1405)..(1421): n is a, c, g, or t
  misc_feature (1424)..(1431): n is a, c, g, or t
  misc_feature (1433)..(1433): n is a, c, g, or t
  misc_feature (1436)..(1440): n is a, c, g, or t
  misc_feature (1442)..(1453): n is a, c, g, or t
  misc_feature (1457)..(1469): n is a, c, g, or t
  misc_feature (1472)..(1473): n is a, c, g, or t
  misc_feature (1478)..(1478): n is a, c, g, or t
  misc_feature (1480)..(1491): n is a, c, g, or t
  misc_feature (1493)..(1493): n is a, c, g, or t
gtgtgatcagtttaattctgatgaaatagaagagttcatggccggagttgggtccatggaagtaatcagagcagtctatgagcattggcgggagaagaggcaaagagttggaatgcctttaattcggcatctccaggtatgtttttcattgatttgctgcgttataaatcgatgtactccttttattgagatatagattattggcagataatttgtggttgtgactcctatagaaccctaggtgtgaagcttatggttttcttctcttttcttcattcaacttttcatgttctcctttagaattagatcagggatttgcttttgatatcagccccttgtggcctgcagcataaggtgtatgggcctgagaattttaccacattcaccgtggcctgtttattgttcatgttatgtgtttgttttatcttaaaacattttatgctctctaactcttgataaaattttctgttgtcattcagccaccattgtgggaaaggtctgaacagcgagtgagagagtgaagngactcggatcnntgnnnacttgtttannnnnnnnnnnnaaannngaaaaagagtntnnngnnnnnnngtnngtnnnnnngnnntttacnnnnnannnngntnnnnnncttgtcnnnnnnnnggtannnnnnnnnaaaaaaaannncagagttagannnaactannnnnnnnnnntgcnnnnnnnnnnnnnanancgccctnnnnnnnnnnnattnnnnnnnnnnnnnnnnnnnnnnnnccaccgtcatatnnnnnncngnnnnnnnnnnnnannnatagtgnnnaaatttatcttttttttnctnnatnnnnnnnnnntnnnnnnnnnaannnnntnnttnnnnnnnnngctnnaannnnnnagcnnnngcnnntnncnnngnnnaannnnnnnnnnnnnnnnnnnctactnnnnacgcannnnccctttctctacncannnnnntannnnnnnnnnnnnnnntnnnnnnttctttcttnntnntncttatnaannnnnnnnnnatnnnnnnntnnnttnnnnnnnnnnnannnnnannnnnnnaccnnncnnacnnnnnnnncannnnnnannnnannnattnnnnnnnnnnnnnnnnnnannnnnnnnnnnnnnnnnatnnntnnnnnnnnnnnnnnnnnnnnnnnntaacnnnnnnnnnnnnnnnnnnnnnnnnnncnnnacnnnnnnannnnnnnnnnnnnnntnnntnannnnnnnnnnnnnnnnnnncnntttnnntnnnnnannnnnnnncnnnnnnnnnntnnnnnnnnntnnattnnnnnnntnnncnntnnnnannnnnnnncannnntatccccnnnnnnnannnntcatannnntnttannnnnnnnnnnnnnnnnnnnnnnnnnnacnnnnnnnnnnnnnnnnncannnnnnnntnctnnnnncnnnnnnnnnnnnattnnnnnnnnnnnnnttnntaaantnnnnnnnnnnnnanaatt

SEQ ID NO: 462 - DNA, 589 bp, Gossypium hirsutum
  misc_feature (103)..(103): n is a, c, g, or t
  misc_feature (111)..(111): n is a, c, g, or t
  misc_feature (130)..(130): n is a, c, g, or t
  misc_feature (137)..(137): n is a, c, g, or t
  misc_feature (141)..(141): n is a, c, g, or t
  misc_feature (229)..(229): n is a, c, g, or t
  misc_feature (290)..(291): n is a, c, g, or t
  misc_feature (325)..(325): n is a, c, g, or t
  misc_feature (340)..(342): n is a, c, g, or t
  misc_feature (394)..(394): n is a, c, g, or t
  misc_feature (434)..(434): n is a, c, g, or t
  misc_feature (467)..(467): n is a, c, g, or t
  misc_feature (507)..(507): n is a, c, g, or t
ttggaattttctgacgaaatgtttgagaagattatggacatgtttgagaaggctgcatatactcaacagtgtgatcagtttaattctgatgaaatagaagagntcatggcnggagttgggtccatggaantaatcanagcngtctatgagcattggcgggagaagaggcaaagagttggaatgcctttaattcggcatctccaggtatgtttttcattgatttgctgcnttataaatcgatgtactccttttattgagatatagattattgacagataatttgtggttgnnactcctatagaaccctaggtgtgaagcttatggntttcttctcttttcnnnattcaacttttcatgttctcctttagaattagatcagggatttgcttttganatcagccccttgtggcctgcagcataaggtgtatgggccngagaattttaccacattcaccgtggcctgtttnttgttcatgttatgtgtttgttttatcttaaaacattttntgctctctaactcttgataaaattttctgttgtcattcagccaccattgtgggaaaggtctgaacagcgagtgagagagtgt

SEQ ID NO: 463 - DNA, 761 bp, Gossypium hirsutum
ctggatgcacctcaggatctgagttaggagaagaagtaacaattatttggcagagggttagtgaagcacaggatatagccacaaaattaggtggacaagtcattggtcatacatggcttttagaatcaattgcagcatgtaagttgcagccttttgtcaactaactaaataatgatgattgaatttttttagctgaagaatgaccaataacttaatagactagtcctgttttagaaggtagaacttgctctttctctgtatatctgtattgtaatagtcatatgagctcttttgagtttggcagcaactaattgaacttggatggggcattttcatcattacatgagcaaagttatttttgacttgtacaataccattataacagccatgaactggaattacatgtgatattagtaacttgtaccagcccttaaggcttcgactttacttgaagctttgttctgtgaagcatccgtggcttcctgcaatcctgtgttggattctttcacatcagcattataaacaaaaagtttggccacagccaagaagaagaggaagtttaagaagcctagtgcagccaagaaggcaaaataatagtccaggtgagaggtgttgaggttgtccaatatccatcctctatgaccatgcctcttagtcatatcagaaactgtcgtcaaaataaaactaccaaggaaatgcccgatcccaatgctgctagtgaaataagaggttccgaggcttttcatcccctctggtgcttg

SEQ ID NO: 464 - DNA, 768 bp, Gossypium hirsutum
  misc_feature (53)..(53): n is a, c, g, or t
  misc_feature (738)..(741): n is a, c, g, or t
  misc_feature (747)..(752): n is a, c, g, or t
gactattaattttatgcatattttaagggggttctgagcagcaattttcatanttgtttttagtgaagatatttagtgatattttgaataattcaagtatgctttatttaccttatttagaaatattttagaaatatttatgatagaaagaagttgaattggtgaatatatatttttacctcttaccatattaaggatcttattttgagcgacactttatgatctaatgtaattatactagttaggattcacaagtctacaaagatttatatattgaagtattgtttattgatttttaagtgtgaattagagaactcaaatatagttctttgtgaagaacattcatgaatgtttatgtgttgtaaataatttattttatcagtttagtttaagctctcataggagaaaaacttggtaagagagttgaatctagataattgtaagggagtgaggttgcaacgagtttagtgagttaaacctaaaacatctcgtgtacttttgaattatagtgagattactctctgagcaagactttgaagatgtatgaaaaggttttgaatcacgtaaccaattactgtattccttgctttatttttctagtttaaattgtttcctaaccaacaactcaacactgagagtgtaggcgtcttctcaatagttccttaaatcactgtcaagacttataaaaaggattcaaaatcatattgcataaagctaaataagtcatttctctacttnnnnaccttnnnnnntggaaaaaactaagac

SEQ ID NO: 465 - DNA, 748 bp, Gossypium hirsutum
  misc_feature (60)..(60): n is a, c, g, or t
agtggcacccgacattattgtgttctttcccttaaatgcacatcaataaagtctatactnatggtagactaagcccaattggggataagtggaggctaaaggagatcaggggaggctgcaaggtctactttgcatctttgacaagttaaacactcctgcacccagttcttaagatccttcgatagacccttccagtaaagtaaactggagacgcggtgtcgtatggcatgtattctagagtggcctccaatggactatcatggaaattgtggaaaagatccctcctgagctctgtattactgccaacgaccacctttccctttctccgcaatactaatctatcccagctatatttaaggtgaatatggggttactattgtagctcatagattacttgctacagttttgtgtccaccagtactatgctaacagttctttccaaatttcagaccataccttgttgatctcacattggagcatctgtccatcttgcacatgggaccttctggatagagcatcgactatagtgttcagggagccttttctgtagagaatagagtaatcgtatcacaacatttttgtaacccacttttgttggtatggtgtgatggcctatccatccgagaggaatttgagaatttggtggtctgtttgaatcaagaagcgcctcccaattaaatatgcatgccatttttttttactgcaaacaaaacaactaacatttattttccatagatagatagtgttt

SEQ ID NO: 466 - DNA, 729 bp, Gossypium hirsutum
gagtttgttgtattgctcatggcttgcttctcaccagtaaatgatgcaacctggaataagatgaaacaattagtcatatattaaaaaacaacaactgtgttttatgtagaacatacggttctaattgaaccaattgtctgttcaacaatggtggcagcttgagcataagcagtttgtccacgagttgccatcttagatataatgacagccatcgttgcaccagatattacaaggagagggatagatgacaacatgacaagagttagaagccatcccttgacaaatgctataatgaaacctccaaagaatgtggacagcaattgtaaaaccttcccaacctgcaaaacaaatacgtaaacatttcgatgattggttctatatgatgatttccataggacttgttcattgattcgatatatataccttttctcccatggcatcttgtatgagaactgtgtcaccagacatacgtccaacgacctctcccgtgtttgtttcaacatcaaagaaagcaatatcttgtctcaatatggttttcaagtacaagccccttattcgagcagcttgtctctcacctgtgaccatccagcaactcacctctgaaaagcaagtccaagcttccttaatctctggttaaaatgagacataaagaactcaaaacaagagatttacttacggagaaacgccgccaccccggccccaaccgcgaggtagacaaattcaaagaaa

SEQ ID NO: 467 - DNA, 750 bp, Gossypium hirsutum
aaccccagaaatgcttatgttatatgagtctatgagacaatcagagattttcaaaacaaggttaaggtagtgtttgttatggtgaaaagataattaccttactgcatcttccttcatgaccttcgttggttgcctgtccaaaagcatgaaaagttcaccaccaggacagtaatccgtaatcaaacaaatatgtgttttggtctgaaaagtatctaagagttagaatttttatgtcatcatataaagaaatcatgtcaagaaatgatgaaagaccagctataaaagcaaaagctcaagaaattagacagtaaagtttcttcgtattgaaaaagcatctaatatttatgtcagtaaattatatttcaaactatttatttgactaacctgaaatgatgcatataatgctggaagaaaagggtggtccaacatatcaagaatttctctttctgcacaagctctatgcacctatagcaatggaaggcaagtgcatcacgtaagcaaaaatgaaggatgtccattgtacttggaccatggagggcattgaaacttgggaaattacaactaacattgaacatttaaactatcaggcttatcattagatagcaaacaaatgaaaatctgggtatttttttcaagcttaatactcataataatgcaatttcagataccttgtttcgattcagcataacacctttatccatagctttcatcgcaaagtacaggccagtgccacacagttccacccaatga

SEQ ID NO: 468 - DNA, 693 bp, Gossypium hirsutum
atgtccttttttgtgcactacaacttgcaacgattcttcacacatgtgagcatacacataggctcacttcacttcatgcatagctctgctgctcttaaacatatagcaaccctttgacatgctcgagtgaagcctgcgaatgacgaatggtcatacgtgcaaatgacaacaactcttccttcatcactggtgggggcaggattccccattctcagctatcttactgcaaagaataaagtaattagctttacaagaagtgctcattgtataatcatccatgagttaggtacagttaaaggttacacgtttggaaaaaaaccctgaataaataattaacaaatggtatatatataagtatccatatgccatctaggaacttccaagcatgttaaaataagttttctatcctttaaggttttagatggggtggaatagaatggaagcataaaaaagttccaacatcacctttctgtctctcagataagtccatatagatatcaatttgataaagaaatcattaactaaacttgttaattgatactgtcatgccaagtgtttgttcaatggaggtgacatggccagaaaagtcaagaaccaactaatttgatatctcttttagtactaattaacaccttaaaaaatgaaaaaaggcactgaaaacctgcaatatcctagagaaatttcatcagctaa

SEQ ID NO: 469 - DNA, 746 bp, Gossypium hirsutum
aagaagtccccagaagaagcaaatcaaatgcttcaggtaaatatgatgaggatgtaactttctgaactctgtcttgcaaattacatattttggtctatttccatctagccagtctagaaaataaaatgcatcttacctatttgatttcagtacctcaagtaatctactggaatgtgggtttctatatcattaagaacattctgaagtcaacagttcaaaatgcaattaatatctagttataggcacaatctgtggccattagctgttccaccaactgtaattaatgtaagaggcaatggcttaaagatggtgatgttagatgcaggcatggcaggaggaagtggagcgtgcacgccaaggtcaaagagatgctgagagcaagctctcttcattagaggcaagtattatcattgtacatttatatcaagattattctgttttcttttgctggctgatttgtggatttattttctctgacctatttgtctggctgcaggctgaagtgcagaaaatgagggttgaaatggctgccatgaagagggacgctgagcattattcacgccaggtaactgttaagattgattcaccttttaatcagaagtgtggttgtcaattgtattgatgatgtataaactgaaagcgcttattatagtgactgttaaacttagtgaagccttaaatttcattgcttatttgatttatgtagttgtatatcaactatcaagttacatggtctgttctcttga

SEQ ID NO: 470 - DNA, 590 bp, Gossypium hirsutum
  misc_feature (7)..(7): n is a, c, g, or t
atttaancattagattatttgtgcactctcggttgcaggagaaaacaaagaatacaaagtgaacattgtaccattcaagcataatggctaccatatcttaccagggggagtggtaccacagcatagacttctatcatctatgtgctcaacatcgagaccgataaaccaggatcctaaggagacatcttcattcgcatacctatgaagtatgtgcctggacagaaaacacaaatgaataagcgatctgatcatttttgaaaaaatgttgctgaataattgtttaccgattgactaagatataggtggccaagtctttggagattgcatatatttgtccggttgcatgccggaaatacttgtttccctcaccaaatttccaatattctggctcgcggtatttgatgcctctgcatgcgaaaggcaagagggtaacttggtgggaaagacaacacaaatgacactaaaaatcttgttcacaaaaagttcatccttacttctgtgccacaacaggtccagacttcatgcaaccaatataaacatggggttcgtgtctgtgacgggccagtgtagaactcaccacacctaaaaaa

SEQ ID NO: 471 - DNA, 612 bp, Gossypium hirsutum
cttctttccttgtcattatcctcagaagttatgactttctctgtaccagtgccatctttaacagtatccccaacatttttatggggagctctaatcctttgtgaaattacattttgaccatctgctgtaatgcattcaaggaaagaaatggcgagcaataaacatagaagcaaatgcttgagtctgaaccgcattgtcttttattatgaccacaaatctatcaccgataatgaaggttattgatcaaatagaattcatgtaggtggggatcaagaaaagtcgaaaacaaaaccagtccagtatgtttggaaacgcacctgagcaatataagctgcaattaaaaagcacaattttcgtgaaaacgaagcttttgtcaaccaaatggcaaacatattgagcattcaacaatgacaatgatcgaaataaaaggccaaaatcaattgaaacaaccccccccaaagagctatagtccaataaatttgagatgatcataaagaaacagcagatacaatcaaaaggataatcatttcaaacaaaccaaaaaaaaaaattcaaaaccctaattgataatataagcaattaccataggcattggcctcattgcacaaaaaa

SEQ ID NO: 472 - DNA, 780 bp, Gossypium hirsutum
aatttgatgacgttgaataactctcattttactgtttttgggctagttttctgggcttatggaaatatcagaatgggatgataattgatacacatcatcattcgttacatcctattgagagcattaatcatttattttaagtttttaaatcatttaaataaataaataaattataattttgaaacctcctaaaaaataattatataatctaaagaataagttttttaattaaaacccttgagaattttagaattttatgtcagctcccaaaataaaatttctaacttcctccatggatatagaatgtgtgtggtgaaatataataagaattttataccatttataccttttttataatgtaaatttgtctcttctttttatttttttatttaagattatctcacaatctaaatggacgaattcattagatcaaatcattatatacaaataaaaagttaatattagtatttgattgaactaagttcatgcaagttattttattatttattaaaaaaattctttaaatcaattattgaattgaacgaacaaataaactgaaattcgaattattcagtataaagaacaactcttttaaaatcatagaccctaaattgatcccataaaaagtcctaaactcataatattgaaattgaataaacaaaaaacaatatcaaaataaagtctctagtgatgctaagagcttagtcttcatgcaactaagagcaaggtctgcaataccatcatcaactctgtacctttgaaccgtagagcatgttaggg

SEQ ID NO: 473 - DNA, 730 bp, Gossypium hirsutum
tgtaataacataaaacataaaagttcagtgctaattattaaggtgcttaattgataactgtaaaacaggttaaggtattcaaattagattacaagttaatggagaaatggaggacatgctactgcaaacatgtcttcatatacacgagactcaaactcaaattaagggatcaactttaaaaatgatataaactacaaaaagagagtggttaatccaatctcttaatccctgataagtagtgaacatatgatgatctaaaccacaaggagtttagtacaaagccgagagaatatactagcaaagctagatggtaaccttaggccatgtcttttttctttcacaaccaacatttgcagcatcacgatataggatacaaagttctcaccaaaattagaaagtaattgctccgcgcaattaatgacatcatcgtctttcacctttatttaactccctaacattcttagaatcttattttcttttcaaatagggaacaaaacataattttattctatttgaaaaatgactgaataattacattcttgctcacacagttcaaaagcttgttcatttcaattttttttaacacactataaaaataccaatcaagtggtgaaacgaaaagcaagttctattctaccttgtctcatatgtctccaattaactaaacaaggatttaacttcattttccatactaacttcttctatcatagttcatggatgcacaacacaa

SEQ ID NO: 474 - DNA, 790 bp, Gossypium hirsutum
tttgattgtaagttgagttagttattgttgttgatttgattgtaggtcatttagcagtggacttcctgtagtgaaacctatgtggattctagattctgttgctgccaacaaacttttgagttgtaagttgatgcatttagttggcttgcagtttatggttatatagtagaagagataagcatagagaaatggtcgattaactattgaaccttaactccaatgaaatggtattccttgtggagctttgataattttatttatctgtcttactttctgtaatgaatagtgtcaactatcattttgccatcttattgaattattatggatcttgttttgtttgctcaaggggttccttaccagcttgaccagcttgctaacaatcaacctacattgtcagccttcttcactacaaaatgtaaacctgcggatgagggtgcttttacaaatgctatttgtgaagtaaaacatgaaaatgaggttttatgtttgaaggatgcatcaaaggatgcaagtttttctgaagcaggtaattcctttgaacggaggaagcaagctactgaagaaaatgatgagcttatgtatgaaaatactgataaaacagtaactgatgggccaagtaaaagctatagtgaagaacctgaggaagtaaaggtggtagaacagagtaatctgcaggaggaggatgaaagcatggaaaattacagacttcagtcctgtcctgaacagtccacttcatctgttagtagccattgttttgacaatcatggtataagaggatcacccacatcaa

SEQ ID NO: 475 - DNA, 553 bp, Gossypium hirsutum
ttcaatttattccccaccaaatcagttaatatccttatagtggccctacagtgcttgcttttgaccatcatatgaaccaatttcgtgttaagttgccctttgtatccagtctatcattgatttctgtttgaattcagccctcaggattttcaccttttccgcccttttcttgactccccgtctgagcaaagcatagttgtttgtgcagttagaatttcctcccttttggtctgcactatgcctaggtccattttctaagatccaaccctatttccagaactagcaaattgaattatgaaaaagtttggagcagcaagttaaatttgtatagagctatttttaccctgtagcatattggcaaattttttaaataagctaaaattcagggttctacatagtacttgagcaacctgaaagtgattccatacctgaataccctcttccaacacatccatttgcagtttgacaactctaaaaccagtttccatctaaggagcataatactgcaatggttggccacagcaaaaagctttcaccaatctagcactgtctc

SEQ ID NO: 476 - DNA, 407 bp, Gossypium hirsutum
  misc_feature (402)..(402): n is a, c, g, or t
aatggacaaggggacccttgtacatccagctggactggagttgaatgttctgatcatcaaggcaatgatggatacttacatgttaaggaactgtgtgttttctctttcccacatttacttttctcttcatttcaacattatccattttattgattatatatatatataaaagttgtagacaaagttatgtttaagtttgttctgtaaattgatgcagtcagctgcaaaatatgaatctctctggaactttagcacctgaacttggccaactttatcatctcgaaatactgtgagttgtgaaataaagtgcatgttatgttgttaaccattccggataaattccagttgtactaacaccttttctttgaatttcttgaagagatttcatgtggaatgattgancgggt

SEQ ID NO: 477 - DNA, 479 bp, Gossypium hirsutum
gagctcttgatgattttgcttattatgtttttgaactatggattctagcaagtgattttaattccatattggatggttctgagagacaagggggcaagtagcgagggcctcgattgtaagttgtttaagaaatttatctataagtttggtctccgagatatgtgttttttaggtccaatgtttacttggaacagagaacaatggttccagatttgaagctctgggcgtgaatcaaggaggatatgaggagatcagcttaaacatggtaagtgactctacagtggacaaagaaaatttgaatgactctgttaaagggaaaaccttaaattagctacaactcagatgagaaataggttgaaaaccaaatgcaaaggagttgcaattggatctgggcctagaaagagtactaatattctaaagactgtgaatagaggtaacgaacggaggtctgaaagttttaatgatgggtcagtcatcgg

SEQ ID NO: 478 - DNA, 220 bp, Gossypium hirsutum
ttttctagttgtttttatcatctccggttagtagcatgtttatatacaccaacaaacagcaaaggcatatataggcacaaggacaagtcatttctgacaattttccaacaaaccccaaatgaatctgaatagcattcatatatcagatgaaattatggagtagaatgaaatccatgtcaaactttttagtacaactaagaaggggaaagaggaggaataa

SEQ ID NO: 479 - DNA, 788 bp, Gossypium hirsutum
ggatataggtgaactcagcattggagtaagaggaggcatagcatcaaaaagatggtgaagcatggccatggagtctgatcaattcaccaaacaatgtatcttttgttttacaattttcatttcatgttctgacccaagttaattttccattaatctttggaacacgatgaccctgttatgaaattagcagttaaaataagggcaaccagagacccaacgggtaacctagtgcccatggaagaacctaggcatagtctgttaagtattttgggccttttatatctttatcttttctaaagaaactcgaataaggtagccaactatacttagacttgatgataatgtcggatttcagtatttctatacaatgtccatgcattccttaatatcacaatacacggccaattactttttttgtgaaattataaataattaaatttccgtatcgattttgctcaattttgaaattaattttttatattttaattttttacgtaatttaatatctcaatttctataaatctatatttttttttattgttaaaatgttcacatgaatttttaagaattaataacattattaaatctagttcattaagaacttttttttgctagatgtttagtgagttattttttaaaattttaaaatatcacattaataaatttattttaagaattttagcattgttaacaattagatctgattttgtaaatccgaaaatagagagactaaattcttgaaacaaaaagtataaactaaatttcaaatgtacaaaaagtaaggacac

SEQ ID NO: 480 - DNA, 761 bp, Gossypium hirsutum
attttatgttatgattgtgcgttcttcatggaaaatatagaggaaaatatttgtaggtcattcagtatgctgttgaagttgatgctgactgcaaacgttttccttgtgattggttgtttctttttcggtggggcaaaaagtctggaaaaattaagggtaagatacctctcatgaaactgataatcatgttgaaaaaattgtttttacaggttattgaaaaagcagttgaagttggggcagatagtagtcagttcccaagtaattggatatttcattctcgcgaaaagaagcctggcaaggcttttgttgacggtctggctcctgaacctatatgcgtcttctagcatcatctcccatctcctttcattgtgataaattgatacttcccttctaaatgcatgtgtcagctcttatgtgtgcacaacatgcatgtaaaactgctcattgtgttgtatttctttattgtatgttgattatgttggaagatatggtgcttcctagttttattttcatccattaaacaatgtggctgtttactgattgatatcaagttatgaatattgccattcatgtttattagccctttttttccctagaaaataatgagcttctttttaataacacggaagaaaattgattttatcaatgctggtggcagggtaggtcattctaaaatataatttatgttggtccatcaagtgccttgtttaactgttcactttctggtacagacatccgcatatgtaccggagttgcagaaa

SEQ ID NO: 481 - DNA, 734 bp, Gossypium hirsutum
  misc_feature (729)..(729): n is a, c, g, or t
gaacattaaaggaagttgaatgattctattggcacgcttgctaactctgtgatcgtaatcaatcaacatttcaggttacgggattgtacatgaacaagttccaatgcatggaaaatgtgatggataaagctagtattaatggcaacaacaataacttcataatagaatctctaaatgcagcattcaaaggaagtttctgaagaacagtaggcaatatatgattctttaatgtcccaaaacataataagtatatactgaagtgaaaccaggatctatgttcgcaccttaagtactaactgaagatgcaagtacagcagaaacgaaaccaattgacataggatcacatagaatgcaacttaaaattcagaagaatgactcttaatttcgaaaagctcattggtgattgaaccagtacctgtaacagcatataatgcacatagtgcatgaaagtcaagcgaacagtcctgtaaacaccgaaaagatatagaagatttccccagtgattaaaatccatgaaaacaaagaaaacatacagtccaaacttctaacatctgtagaaacccatagatgaaaccaagaaacagatgatcatacaaggcttcaattataacacattaagaaacattcatttcaggttacaacatatatacacaacctgaaatctgactcattataagtacaataattcattttagtaatgattcaacatttggggcatacaaacagatnatgat

SEQ ID NO: 482 - DNA, 442 bp, Gossypium hirsutum
tcgccaaaattggccctcaccaaattctctcttctacccgatcagggattaagccattaatatttctaccctaacaagcctagtgcacatcatacagcccattttgctgccatagcaattttagtatcgttttcacatgtgtcatatacatccgctacatgaaatattctttttgcctacctaagccagaagtagcacatgtcttgcacagaatttattctatcaggatagacaaacaaagaattatagtttatggagaaatcagaaatacaaccatataaaatgaaacaaaccactagattaatattgattatacacggttacaaatttcactataaaaccagatcaacaaacgtgagcttttaaagtttactaaaacatctacttcttctttcaagtgagatgttctaacattagttttgagaaagggaaaaaaaaaaaa

SEQ ID NO: 483 - DNA, 260 bp, Gossypium hirsutum
gcaatgaccatcttatatatatctctatagcaatgcttgctccaaatgcatacatttccttaaaccatagaaggataagcctcttctacattttactgctagacacaaaattccttgagaactacttacatttcttgaaactctactgtacacattttatgttcattaaatggattgaattcatttcaccatggctgtctattcagatagaagattctggaatctacaactcttcctctcttttttcccctattggtata

SEQ ID NO: 484 - DNA, 660 bp, Gossypium hirsutum
tgtattcaactttatgtcaatcttgctttattttttgtttttgtactttctgaaaattattgaatttaaaattttagtcctcatcaaacgttaattacgttaactgttaaattcatttagttaagttttattattttcaaaatttaatgcgacaaatatattatcatatgtggaatattatgttatttggttattttcatatatcactcactaaaaatttggttaatgaattaactgctactgtttggttcaggactaaaatctcaaaatttaaaaagtacaataactaaaattgaccgattcaaaaagtacaggattaaaactgatcaaattaaaatataacttttgcaatgtataaagactaatagcagaatttaacaattattgtttgatcatgaccccaaacattattttgctatcgattgaacgttttaagtgaaagttacatcaaatctgttggtttccatctttttatccttacaaggttcgtgactatcttttttaataatatcatacttaaggtttgaatctgaattctctatgtctgagtataatgtgcctaaaatgctaaaaatatgttacgtgtctactcgtgtcttgatgtgttattgcatacatatctgatatatataaaccgtgtatggacttatatgcttatca

SEQ ID NO: 485 - DNA, 736 bp, Gossypium hirsutum
agaaagggttgatcttggatttttttattgtaatatatattttctcatctcacttaaaaaaaatctcagatggggtttaatttggcatatttttctgcaaattcttctatcatatagctatatgtgttgtctttctaggttacagccatgtctatggagtctttttaaagacaaaaatcaagtatttttcccaatggtccggttgccttatttgtcaatatgttagtgtaattaatgcattatatgatccaagtacttgataatgtttaaagggttcttgacaagaaaacaaacaaacccagattaggtaattactagagttaatctcttttaatgaagagaatggggtagagattgttgaatgatggaataagaaactgctgtaatttcacctgtgatccatatggttttacaattactgctgctgcaattcatcttcatcctccttcaaagcttaaaccagtactgtgaggtaagctagggtttttatattttgacttgaaaaacaaaaggtttgcaggctttttggactcctttacgacgtcgtttcaagtcacatcgttaccaacttttcaattatttcttcatcataatcattatctgtctaacaaaagcaaaaaaatgtgattcaaataattaaaccaaattctaattgttttccatgcaaatgaaaaataattaattaagcaattaatcttttttttggcaattcaggtagatgatgatgctgaggtga

SEQ ID NO: 486 - DNA, 923 bp, Gossypium hirsutum
  misc_feature (606)..(606): n is a, c, g, or t
  misc_feature (627)..(628): n is a, c, g, or t
  misc_feature (802)..(802): n is a, c, g, or t
  misc_feature (910)..(910): n is a, c, g, or t
ttgcttggaatcttctggaagctgatgatgatgaatatacaccaaaaagaaagagaaaaaagaaagggttgatcttggatttttttattgtaatatatattttctcatctcacttaaaaaaaatctcagatggggtttaatttggcatatttttctgcaaattcttctatcatatagctatatgtgttgtctttctaggttacagccatgtctatggagtctttttaaagacaaaaatcaagtatttttcccaatggtccggttgccttatttgtcaatatgttagtgtaattaatgcattatatgatccaagtacttgataatgtttaaagggttcttgacaagaaaacaaacaaacccagattaggtaattactagagttaatctcttttaatgaagagaatggggtagagattgttgaatgatggaataagaaactgctgtaatttcacctgtgatccatatggttttacaattactgctgctgcaattcatcttcatcctccttcaaagcttaaaccagtactgtgaggtaagctagggtttttatattttgacttgaaaaacaaaaggtttgcaggctttttggactcctttacgacgtcntttcaagtcacatcgttaccnncttttcaattatttcttcatcataatcattatctgtctaacaaaagcaaaaaaatgtgattcaaataattaaaccaaattctaattgttttccatgcaaatgaaaaataattaattaagcaattaatcttttttttggcaattcaggtagatgatgatgctgaggttgactaanaaaaatgtaaatgtagctatctctttgggttccctgttgagaagctataaaaatcatgtggttggccattaatgagcaagtgtaggggttgggatggataaatttggngttgaaatggggt

SEQ ID NO: 487 - DNA, 762 bp, Gossypium hirsutum
ttgtattcctatgttactcaactcaggtgtgagtcttgaatatgggaatgtgttcaacacgtatattttcaactttttaaaatgtacttttattgggagggtcatctacatatcaatgtcctaaaatgtataggacatctcggatgcaggtacttcaagaaaaatgaagaatcagagcatgtaaaagtattcaacattgactaccctctattgttctcatcagccacattcgactagttaatatcttcaacttaacatctcagtgattaaatacttgctataatagcataatagagaggagctatattaaactcacaatttctacatttcttgaaaagttaattagatatttttttcatcatgataacggttacatccattgctactaaatagcaatcaatttatttactatcccgagtttgcaatagatctagcagaaatttaaatgcttcatcacatactcccttttgtacaacaaaaaaaagaatatctatccatagacaagcttagctaaattagagactttagatgtgaaacatttactagaagtaattcaaatatattgttttcacagttgttaattaaagctttagcaaagatccaccagcaacatctattatgatctatgttactcggactcaggtgtgagtgtcgaatatgggtatgtatctaaaacaggtataattagatttttctaagcttttccatatatttggagaatctgtggagcccatatccctagatccatgtgtcaaacataag

SEQ ID NO: 488 - DNA, 568 bp, Gossypium hirsutum
catgataatggcagtaatacgccattctagggaaaagattatattataacttgaagttggcacatgtgttggggacaatggtaaggcacattgcactctcaagtgaggacgcagattcgaactttgaagacgacattattgggaggggcagccatgaacctcgaatatcaaccgtaaaatggatgtgaaaagtaccaacaataaaaaacttgaagttggcagcattaagattttgcttggtagtgttaaattgtaaaggaaaattgaaagaacagaaaaatagaatgatacaaaatatgaattttccttttggtgtgcttggtatgaaatggaaaaattgaaagaaaaaataattttctttccatttaatacttggtagagttgaaaaatgtgagggaagaaaataaaattttgaaaactgcataattttgaaaaaatcctgcattcctttctcattttctttccttttataatttcaatttggaattatttgtttttatgcatcaggatagaaaatggccatgctactatggtactttaatatgatacagatcctagaggacgataa

SEQ ID NO: 489 - DNA, 773 bp, Gossypium hirsutum
tgtatactttttcttccagctaaatatatgaattctttgcctatatctcaaaaaggttcgaatcaagacgtggagtgatgagaacctcaagaggtgttgcttttggatttgttaacccagggctttccgtcatatctacatcttccagctctgataatttcgcaactttgaaactgtgcaagaagctgcccaagataaagtgcagcatcttgagggctagtgacaccccagggcacgatcttcgtcctgagccaaatgggatgagttcaaaagtttggccttgaaaatccgtatccttattggtggtaaaaaatctctcgggctgaaaatcacggggttctggccatacacgctcgttacgttgaatcttccaggcatttaccatcagtcgtgtaccagatggaatccggtagcctgttgagagagtgcaatcttccgatgcagcccgaaggctaatgactggctctggtgggtataagcacaatgtttccttgacaatggcttgaaggtagaccatgtttctaatatcagattcttccaacagtcagtgcttgccgacgtgcatgtctagctcatcctgggccctttttagcacgtgcggattatttaatagcaaagacaaggcccaagtgagagtgaccatggttgtgtcactccctgctaagactaaattctgccagaacaagatatagttaatagaattggattttcctaagatcccattttcacagatagatgaatgtgattaagaattataaaaaggacagctttga

SEQ ID NO: 490 - DNA, 666 bp, Gossypium hirsutum
aacccttcgtacagatgttcttcccctttgacagataatctagaaactcttgactgtattcattacttagggtctaaaagctgcactagattctggtgctgacaaggatgaagaagattcagagggaaggactgcattgcattttgcctgtggatacggtgaggtaaaataatattctaactgaatctctctctctctctctctctctctctgctgttgcatcacctgagaaatgaagtgttttcatctagataggacaaatttggtgttgaaataagatagttttaatcactaaggtagccttgatcttatctataacttttagaaaaaggttaaagaaaacacagttaactttgaattttacaatgaattttattttgataaggtaaaaacttataatataaaataattactatttcggaaggaagttctgaattcacacattaaaagggtaactattgactcattattttagaaaacacttcaccttgatgaaaagaagtgtattttggatgagaatcagttcattccccatcttagcgagttgattacctttggtgatttaagatcaatgtcaactagcactgatatctctaatagcatcgatgctgtagaatttggatccttaaagcatccttttgcttgtaagcatctcatcttgggaac

SEQ ID NO: 491 - DNA, 744 bp, Gossypium hirsutum
ctctttgtgcagcagtactcgaatatactacaaggtaagggtgatcaacagcctagaattttgcacaaaaacaccggtttaacagatcagcataaaaattttgaataccgtatttcattttcttagataaaggtctaatctggatatatttgctatgggtgataaggatgatagtgaaaggatcaacgtctgggtattatcaatgtgcacatatggcacagtgtgtagttgcggtggggagcacctcccagttccacctggacgccattcaatcactggggtccagggcagcgacaggcatccccacatctttccactgtgccatacagagaccaagtgttaatcatccctttggtagtatcaacttgaaggggtgaccatatcatcttcaaaaattcacggatatttcctcactcaataataccttttagaaaattacctacaaataataaaatatataacaaaaaaaaaattctgatccagactacaattacacatactgaaattcataaaaaaaggcaacatcaactagaattaaagcttatgaagtttggaatacaaacacataggattcatgcataagtctaatcaattgaaacaatacaaaaaagccatcggttcaagaatatgccatttattatcaagagattttatgattaaaaattattcatgctctaccgaatccaaattccaaaatatgtgcttgcatatgtaagcaaattaggaaaaggttcaacctatatg

SEQ ID NO: 492 - DNA, 573 bp, Gossypium hirsutum
atccctcttgtttgttacaaggtccatcttggagaggatattaatatgtggtacttcaagctggaccattgcagaaagtgatgccatgcatccacttacgtacttagtaacatctgtgataaactggtgcaaattcaaatagttagagatggtaaatgccataaccaattatagagacatgccaactaaatttgaatagcagacaggcatgctgaaagatgcagagctgagacaaacctgggaatcaagcaagtatacagcacacacattaaagttcttgcgcttcaagtgctctacaaagttacggagcactggtacatgtgaaaaaagttctatttggcctataaaatgactgaaggttagcaaaatttattcccatttctagtacacttcaacaaattatatcacagcagaaagcctaattcagtaacgtaagacccccagtgtaaaccgttgccaaggtaaaagctaaagaagttgaaaatacttttccagcttttgctgacaagatactaacatacgcatccaagcaaaagagatacctggacaatcaaataccagatagtcgtcatc

SEQ ID NO: 493 - DNA, 773 bp, Gossypium hirsutum
tctatctctttccaacctcgttttgagaagatccccagagttgcctataacagcacaccggccaaactgccttggaacataagggggtgtttcagggaggacaagtgaaagcttttccatgcacaaagttctattcttacagttgttcctataatacagaaagaaactccataaaactttgcgcagctacattgtatctaagtgacacggcctaataatccagcatatgaaatatatcctttttagacaagatatcaaaataatcagtattttcaaaaaattccttccttaaccttatttatgttataaatgcatacactaaataaaagcaactatttcaaatgctacattcacaaaaaccaatactcacagaagcactcctttattaatcctccgccatgcgtactcctcccaaccatttggtaaagcatcaatgaactccctagtgagtattgtagtactattcctcacctgaccaacaaactcgctaaataagaatcaacagtaaaagaaccataaaaaaaagcaacacattataccaacaaaactccaaaccgaatgcagaaacaaatagggaaatcacctgttcccatgtggcaactgcttcacaaagattaaactcaaatgataagccttcaacttctccagttttaggatccttctgtttacataaatgaatttttcaatcaagaattctactcaaaaaaatcgccatcgagtaaaatgtaaattaatagaattgttaaaacaaaaacctacccatttggagtcag

SEQ ID NO: 494 - DNA, 795 bp, Gossypium hirsutum
ggcatttcactggttttgatgtccagctgattcaggtgcaaacaaagctgaaaatgaaactatttcaaataagttaaatgggtttggtgatgccaaaagagatgggaaaaacatacgagttgaagggcaaaatagcagtgctgcaagaggggtgaagggattagattctgagtcctcttgcactgaaaacagcttaagcttagatgtaaataatgataatgatgcatgtattgatccaaaaaatgttgattctaatggaaagcccatggaacaaacatcggaaaaagaggagtcactaaacttagctgttggtgaattggcaaaagaaaagaatgagattgtggctgttgataatgttgctattatttgggatgcccaaacttccaagaaccaaaaccactctcttaccgattctattgtcaaagtggaggaagaggttagatctgaattacaaaatgaagtgagttgcccttccaacaaagaggtgcaacaaagcagtccccctgtatcagaagctgatagaaaaactaacacggtgctgggtgataattctaactccaaaaacaaaaacatttgtgctagtgggccgttgggcaccatgggcaactttatttgcgagattcctgagaggactttgttaggaagaacctcgacggctaatactgatgttcagactaatatggatgatcatgtaaaagtggtggacaaggcgcatgaagattcaatcctggaagaggctcggattatagaggtggtttgtttatatatttggtttatatatgccctctgatctct

SEQ ID NO: 495 - DNA, 756 bp, Gossypium hirsutum
gactctgtcttaaaattatctcctctgtttgaaataggcatttctcagactccaaaagatcttcttgttgattattgtttcctactttctttgtcacgagttgacagctacttatctgaagagtggaaagagagtcatggagaggcagcagatgatgttccttcaaattttttacatttacaatttgtccaactagaggtattccccttctttatatacctatcattaagttcctgcaccccataaaaaaatccttatgtttaaaaatgctcactcataaacaaaaggattttcaatataaaaattaagtccttagtttattagggaattcaagctgaggaaaagcacataaagaactgtactttacatagccttgttttttcttatttacaattagcatgttatgtcacttggttttatcagaaatcatactttcctttcacatttgctaaattggttgactgttattttttttaattttcattctgtatggttcaggtaccacaacaggagaattcatttgactgtggcctcttcttgctgcactatatggaactcttccttcttcaagcatcacccgacttctgcccttttaaggtaacaagatcttccaactttattagtgcttgcattgctttctacaatgcttgaacttgcagaacgttagccttgttgcaagaagtatatcatcgttaaatctctgacgcaacattgttacttgtactcacctggttatcatatagtacgaaagttgta

SEQ ID NO: 496 - DNA, 787 bp, Gossypium hirsutum
  misc_feature (775)..(777): n is a, c, g, or t
gggaattttttgactgcaaacactcaccatttcatcaagggcttggctaagagacataactccgaaggtagatctcatgaactgtgagaacttagtgatctcatggtcatgatctgacgagtatctgctagatatcgcagaaaacaaatgctttgtgtcattctccatttctttatcaaataagtacacagtgctgtttgaatcattcaagtcctcggcaagatacggtttacctgaggtggttatcacctgaggcttctgaaaccggggcagctccatatcttaaagccttgagctacaatttaaggatcaacccgaagggggagtaaaatatatgaacaaggacatagacagggtggtcaattaagaataatgaagtccaatctaaaggtcaagtatacacacatacacatacacacccacagccacacacaggtcaagaaacagactaggctccaatgatcctcacaccccttttatcacattcaattacctaacatgtagccctcgatggagattacagttagttttcaggttgtaatagttctcacttgaatatttagcatatctatctagacagtataatcacgattatactaaattactctgttacaatgctcagaagttagtatagaaggttgcgtggactgtgaccacataatattgctcccaaagggaaaagccaatcggttgataatgagcattttatatttcctcaaatggcacttagttttcattacgggataatgcattgaacttacttgaacttgcagtnnnagctcggaaa

SEQ ID NO: 497 - DNA, 745 bp, Gossypium hirsutum
gtttctaggtaatctatatttgtgttttattgaactaaaggttcttgtaattgacaaacaattcgtaatctctttggtttctttatgtcccttccaccaaaacaaaacatagcatgaaaactccgatttttaatagattaagtgtttcacccatttgatacatattacgagattcactgcaatttgaaactaagaaactttagaccattggtaaaaagtatgaattggagcaatagagaaagtttgtatgattattcattccggtaaatggtattttgcttcaatagtaaatggatggtttctcatatcttctcttttctcttaacaatttttcatgtatcagccttctgcaacatccaataaatcttgctcagcatcaagctaagagggtaggttctaaattatttactttgttaacaagaccagtgaattgttgctaatttctctaaatgtcaaaagcattttcattttacaggaacaaagtcaaggcattaacttggggagtaacattcttataaattcaaacacccccaataaggcactaaaaggcaagcttccagtaacttggcctcatgctgcaggttagcttggccctttttctgatttgagttcaggctgaaaaatctgatccgctcagatgatctttgcagtttttaacttatgtgaactcatccaagatgggatgaattatgtatatctgctttattttgacaagcctgagatgcacataacactgccctttggt

SEQ ID NO: 498 - DNA, 250 bp, Gossypium hirsutum
attttgtaagccaacaaagatgcaaccaggtttccgtcactgtagtttcctataataaaatctggaataccctgtaactctgctgcaatttcacttgcgacgtcctgattagatatacaaataggaaagcaagttatgaaagaagattaagaaagaaagaaagatagaccctatagagaagtacatagaaaacgtcctcctaaatttgttgtgattgttgaaaaatctaatgtttttttcttcaaaaaaa

SEQ ID NO: 499 - DNA, 695 bp, Gossypium hirsutum
  misc_feature (657)..(657): n is a, c, g, or t
cattttgagtgcctttcctcatctagaaagacccaagctttcttaagcgaaaaataaaacaaaagtacaatagcagatttgtttgaaccacacattttttttttcatctttctaagttcagtcttccacagttgcactcaatttttgcagtttttttttcacctatggatagatcaaagagaagagattcaacagccgtgtaaaaccttgttaagttgcaccaattctttttcataaagtttcagtaaataacgaagatatttacatttgattaagaacagagcaataaatgaaatagattgtttttttctgtttacatcttgctgtcctcttatggcaacacgtgatgaatccgagaccaatgctaacttggcgcatccttcacaaccacttccgtactatgaaagccatgtttaacacctcaatcccacattaaaagctcgagacacatagacttaatctcacacttgtgagacaaaaaccgcaagactttagagttgaagcaggcaacatattgtagattggtttaaggtctctacagtctgatcttaccactttccaactgtattaaatccgaagagttccgaaaagtaaatgcaaacctatgccccttcgttactcaagtttgtttcttccctttcttctttagggtccttntgaacacagctaaaacagcaatggtgaagaaaacatcc

SEQ ID NO: 500 - DNA, 667 bp, Gossypium hirsutum
ggagaggagccgtcaaagaacgagcagcagcaaatgtaactgtaaagaaggatgggaccgatatgaatgagccgaatcttacttctcatatcctgaattctcacattctgaaacacgctccgtaatagtaatgaagcttttgcaatcaagcaacaatggaagctgcatatttgacttgcagctgacaagaacacagttgaaagctttaataccacattcagtaaataagcttctggatattttggtgggtagagatgggcgggcatgtgggtcggggtcatgcttgaatagaaaaaaaaattttatttgcccaacttgaccagccaaaaatcctgttttacaatttcaaatgtattaaataattttttaatattaatatttgaagcgcttagagcttttttgtaattgaggtaagtgtttttgcatcaaaagctgttttgaaaatgcaaaaactcttttagtttcaagtttgtaaaagattaaaatcttagggttttgtcaatttctcttgagatcagactgtaaatttgctttcccacgaaaagcatattgtaaaaaattcaaaattcacacatggtggaagtacaaaagatttaatgtttcagagccatggtttaccattatgatttgatttcttttttctaaattacctataattttttgatcg

SEQ ID NO: 501 - DNA, 749 bp, Gossypium hirsutum
tcttataaagcaaacgatacagattcctctagttcacttggtgaaatggaaaacaaacctcaattcgaatatgctatgatctagacaaacattacaatagaacttcgaatacggttatctataactacatttacatagagggcaaaacatattaaaatctcctcacaatacagccggagcaatgacaatatataaagttaaacataatcaacggagaaaaggtgaaatggctaggttatcactaacatgctacatgaactcatcttcgtagaatatcatactatcatactaagtccattctgaccagaagatatcagtaaatatactaccaaaagattagaaaggacaggcaaaacgtgaactttgatggcttaccacatcaactggagaaccaatacagacggcaaaaaatccagccccaagaccagaaaggagatgagtgacaacattatcagtgaatccagggattttcaaaatcgtctgcataggaagatggacattagagaaaacaaaaaaggagcactttgaaacaggaagctaaataaccatgagcttttattactatacctgctttacttgatcgtagcttgcaagttcagcagcatttataatagcatttcgtgctatattgggtccaatcccagtccaaagagccttaactccttcctagagttggaagatcaagatacaaatagaagagtcaaaagctagtaacaaactggacgctttggtatctctttacttccaga

SEQ ID NO: 502 - DNA, 760 bp, Gossypium hirsutum
  misc_feature (54)..(57): n is a, c, g, or t
gtcaagttaagcatgaatctggattggaacaccgtgatgagattttacatcaannnncttctgaaaaatttcagcctgagttgcagaagaaccatactgaagagctctctaatcagcaggatatgcatttgtctctgccacagaattctcaacaaatgacacagatactgcatcaacatcaactgaattcagagtctcataatgattataaactttcagctggatcccagctagaatcagctgtgcggagtcagtggcaccctcattctcaagttcaggttcaaatgcctggggatatgtcacatgatcagaatgtccaagaggatttccgccagagaatatctgtgcaggatgaagctcagcgtaacaatttatctgcagatgcatctactattagtccaatggttgttcctagaagctcattggatcaatcaaattcaagggttgccatctctagatctggaaatgggagccatgatcggcaggtcagaaatcaagtgaggtggcttttgtttttgcgtcatgctcgtaggtgtaaagcctccgagggaaagtgtgatggtaattgttttactgtccgaaagttgttgagtcatatggatatgtgtcaatcatctcaatgctcatatcctcgttgccatcactccaagatattgattcgtcatcacaagacttgtacaaatacagcttgccctgtttgtgtttctgttaacaattatgtgcagtctcaaaaggcccgtgcttgtctaaactccacttc

SEQ ID NO: 503 - DNA, 725 bp, Gossypium hirsutum
ttgcaaaattaggacacccaaacttggacattcccataagtttatgtactgctacttaacttgaaattttagtttatgttttgctagttctaaggcgtgttgcatgatcaataacggatttggtatataaaaattgcaaatatttggtatccacgtttatctgctgatgaattttgtgatactgtatcctgctgcttttcaagaactatttcgtacatgtatatgaaactggattgatatgagctttctttgaatactagggtaggaaaaaaaatcatatgtaaaacacggaagaaattggttagtttagttcatatagaacttggtacttttccttttcttttatgctatggttctgaatagaaagaacttcattaaaaaatttctcttagataattttgaacctttgcatgtacctcaaatcttatgagtgccttacagaagtgtttggtttgcacaatatgatgttcttgatgtctgaatggagtttactggagtgatttagaaaaaaaaatattattttgcacaagggtcttatctcccatttttatccgataggtgattgagttggttggagttcttatttcaccagatgtatagcatgtgtcattactgtggtgctgaaattacaaagaccagtgaagacaaaaggaaactggagaatggtaatgctttaatctcttgtagtggagacccaattcggtcgtgtaaattatgtttggaaa

SEQ ID NO: 504 - DNA, 809 bp, Gossypium hirsutum
  misc_feature (160)..(160): n is a, c, g, or t
gaaatatgaagaacaccaaaaagaaagcaacattatatattagtaaacaacaaaggagtaaaagaatcagtacttacatctccttcatcaaggtggacacgtttcctcaagagttttgcagagaaaaccaccttcttgtcggcattcgggcatccaaaantagaatggcaatgttttgcataaaaaaacctcaaaattgaaatatgaagaacaccaaaaagaaagcaacattatatattaataaacaaaaaaggagtaaaagaatcaatacttacatctccttcatcaaggtggacacatttcctcaagagttttgcagagaaaaccaccttcttgtcagcattcgggcatccaaaaccaaccaaaatttgaatatcctgtctcgacaatgacctgaaatcaactttctatttcagagccaggcaaactaacactaatcaaaacaagtggttcaaaataagtccttccaaaaacaattttttcataaattgaacatattaattcagccaaagaagcagaagactgctaaagagggaccaacattgatacaagcagtttgcacagtcttgtagtccttaaaatcaattccagcatcatccttgacttcctcaacaacattagtcatatcaaatcccaagtcttccaccatcttctcatcatctcttaatgccaatcattataaaccaaataacatagctgacatacaaacctcaatatatcaaaccggtcctttccaaaattgatacaagcagtttgcacagtcttgtagtccttaaaatcaattccagcatcatccttgacttcctcaa

SEQ ID NO: 505 - DNA, 790 bp, Gossypium hirsutum
agaggctttattgaagattatgatgatgaagaagatgacgacgatgatgatggactgagttgttcgagttcggatcttttcgagttggatcatcttattggaattggaaggtacagagaggagctgccagtgtatgaaactactagactgaaaactaatcaagccattgttaatggcttcatagtgtaacctcatttctctctctctctcttttcatctttcaaattgtaattattggctttggggatttccaaattgaaaattcaagttatttgagtgactatgattctctatacctttgctaagctttgaaaatggaaaagaaaaaatcactaagatggtgaaaattactaaagcttttgaacagtggagatcaatgttattcttcacacagtgataagtgaaccgttaaagcaatacagaaagtcgaaataacaaggaaaataaagtgaaaaaggaaacaaaagcagacacaaatcttcaccccacaagagaagggagaaagtgaaaactctttgctttattttagcacatggcctcaacatcccaacataaattagttccccctttaggtcacaaaatttaaaataaaaaaaattccatcattaaaatcattttccccatttcttcacataaatgatgaatttcgatattcgaaattcagattgatcggtaaaagtattttacaggtccttgtgttataatgcagagtgtatgttagtctctatacaaaagctttggattggcatttattttaatataaagagtaacgtcattccttggctgcaaa

SEQ ID NO: 506 - DNA, 582 bp, Gossypium hirsutum
tctatagagccattggctggtcagaaatatcttgacaagatctttaacgtacaacattagaagcaggaggtataacccatcaaaagctaaaaagcacactgcctgtcatcaccattttttgtacttctggtcttaatcacgctataaatatgttcattgatattcatacacagcagcaatcagtttcttcaaggacaaacttttttatcatcaaaggtttccacaatatctgacatgagttcattattatgataaaaggcaaggagctgagtataaaacttttgtcacaaaaacatggactttccaatgaaattataccaatgcgattgttataactcgatagaaatggctcctgctgaatagaacaaaaatgattgtaggatctgtacgaaggccctaaaaacatagtattcatgttggcatcacacaggcagattccttagcagacgaagtgctcgtgaccagtgtgatctttgcgataaaacaatcttcctcaacgctggcaccgccccagcagctatgattgcagaatgattctcactgtccatactcagattatacagtattgataaggctgcttcc

SEQ ID NO: 507 - DNA, 402 bp, Gossypium hirsutum
ctttttcgcctgccagacagagacaaatgtaccagcacagatatcatgaggaaaataatactatctaattcaaatataattgtaataattgtttcacaattaagtttggacaagggatttgatccatgctttgttctccttttaagggcactatatcaagccatagatcatcaggagttcaaaatttggacaattttaaataactaaaattaaggtttcatgagaaaatttacgatacacataatgtcacaaacaaaaatcaaacgataacaccaagaaaactaacccctttttcatactatatacagttagctaaatggatcataatgcgccttttatttgctttatactatctctttgattagttcagtaaagtgaaggggaaaaaagggaaaaaaaaaa

SEQ ID NO: 508 - DNA, 518 bp, Gossypium hirsutum
aatagaatacattattattttgtatttactgagaactaataatgtttgctttggcagtcaaccggagcttacaaggccgcctcacgtctagcaagtgcgacaccccctccagctcatgttcttagtcgtggtattggttggcagggcattgggatccttttgaatgggctatttggaacactgagtgggtcaacagtctctgtgtaagtatttttgttttctatctatgaaaattatcttatgcaactatactaattccacaaaaaacaacagagaaaacgtggggctccttggaagcactcgtgttggaagccggagggtcattcaaatctcagctggctttatgatatttttttcaatattaggtgagtgacaatttacttaggccggcaatctctggaatctgtctgtcataacttcttatatcaacttctgtaacttgtgcaggaaaattcggagctctgtttgcatcaataccttttaccatatttgctgctgtgtattgtgttttgtttggt

SEQ ID NO: 509 - DNA, 672 bp, Gossypium hirsutum
atgttgatgactcggtagcacgatacaaaggctgattaatggtgaagggttatcttcaagaagttggcatcgattttcatgagacctttagccctgtggtgaagcctacgacaattagagtggtcttggcaatagcagtgtccttggagtggtctctcaggcaggtagacgtcaataacgtgttcttaaatggtgatttaagtgaggaaatatacatggtacaaccaccaggttttgaacaacaaggggtcaatggccagcagctaatatgcaggttgaggaaagccttgtatagtctaaaacaagcctctcgaacttggttccacaaattaaggaagtttcttctcgctaattagtttgaaatttcgaaggcggacaattctctttctatccacaagtctgggaatcgtttgttgtacgtcctagtttatgtagataacatcatagtcactggttctgattcgagtgctataaaccagtttgttaatgaccttaattatcatttttctctaaaggatttggggaagttaaactattttctaggcattgaagttaactacaccttaaatgaaccttttctcaatcaaaagaaatatatattggatttacttaagaaggcttctatggaaaagttgagttgttctcccacaccaatggtgcctacctgtcgcc

SEQ ID NO: 510 - DNA, 744 bp, Gossypium hirsutum
  misc_feature (641)..(643): n is a, c, g, or t
  misc_feature (663)..(665): n is a, c, g, or t
  misc_feature (672)..(674): n is a, c, g, or t
  misc_feature (676)..(680): n is a, c, g, or t
  misc_feature (682)..(683): n is a, c, g, or t
  misc_feature (685)..(686): n is a, c, g, or t
  misc_feature (695)..(698): n is a, c, g, or t
  misc_feature (703)..(703): n is a, c, g, or t
  misc_feature (708)..(708): n is a, c, g, or t
  misc_feature (710)..(714): n is a, c, g, or t
  misc_feature (721)..(726): n is a, c, g, or t
  misc_feature (738)..(738): n is a, c, g, or t
tgttagactataacttcatggcatctctactaatatatgcatcaaggaaaatattgttcatcttaccatcttatatttcttgtacagagatattaaaggagcaaacatactggtagacccaaatggtcgagttaagttggcagattttgggatggcaaagcatgtaagtctaggattaatcactttctgttagaaatgaacttaatcagattaatatgtagccagctctttggctaaaaaaaattggaataaccccaagcttgaaaatcaaattatgactaatttaatgctactttccaattcccggattaaatttttccttgaggttatttccaacttataaggcatgctttgcagattgcaggacagtcatgtccactttcatttaaaggaagcccttactggctggcacctgaggttagacatttttttttttccctggggttatttttcgttctttctaatcccttgcgaaggggaaactgagatgggttatgtgggttgagctttctcccgttctgaaaatttctttctattattttcccccattataaaaaaccctaacgggtgcgaccttgctgtggatatatggagacttggatgcgctgttttggaaatgggtaccaacaaaacctccttgnnntcaatatgaaaggggctgtnnnaaaaaannnannnnngnngnntttaatttnnnngctgnttaantnnnnnttaatannnnnnacttttttttgnattttt

SEQ ID NO: 511 - DNA, 628 bp, Gossypium hirsutum
  misc_feature (530)..(530): n is a, c, g, or t
  misc_feature (563)..(573): n is a, c, g, or t
  misc_feature (590)..(590): n is a, c, g, or t
  misc_feature (601)..(601): n is a, c, g, or t
  misc_feature (612)..(614): n is a, c, g, or t
  misc_feature (616)..(618): n is a, c, g, or t
  misc_feature (620)..(625): n is a, c, g, or t
cagttggactctatgagccactgttatgacggtgcaatttgagaactcttctcttataattctttgcaaaatggcatcagttgcagagtctattgaagcagtggcttcatccagcaccaggattcggttccgtttcaagagaactcttccaaggcaaaacagttgctgctgccccacactccaattctcaccttcatcactcactgtcaattcaacaacaacggcagaacaatcatttttggtctgtttaactgagaaaaggaaatttatcacaactaaaattcaactcaccagatgaatctagcttgtttggcagggctctgattgttgttttaagttgacacttctccaaagcctgccacaggaacataagggtaaattccaaaagctcattgttggaattttttttctgttaatatccatgattagttggttcaccttccatatttcatcatctgaatagaggcctagggggtctaagttagttcgaatgctgcctctaaatagagttggctcttgaggaatgatgntaagcttcattctcaaatctttcagtcccatannnnnnnnnnnagtccatctataagtanctcccacttgnaggctctactnnncnnnannnnnncgc

SEQ ID NO: 512 - DNA, 778 bp, Gossypium hirsutum
ctatgctctggtctatgctctatagcatcaggtctatcttttagcactaaccctaaagcagtgatggcaaccctttgcttcttccggttctggctcggctttggcatcggtggtgattatccactttccgccaccatcatgtccgaatatgccaacaaaaagactcgcggagctttcattgcggcagtgtttgcgatgcaaggattcggaattttaggaggtggcatctttgctattattatatccgctgcattcatggcctcgtttcacgcgccaccctacgaggtcgatcctgtgggctccactgttccagaagcagactatgtttggcgtattgttttgatggttggagcactcccagcggcgcttacctactactggaggctgaagatgccagaaaccgctcgttacaccgcccttgttgctaagaatgctaagcaagctgcatctgacatgtcaaaagttttgcagatggacattgaggcggagccacagaagattgagcaagagaaaatccgatatggcttgttttccaaggagtttgctaaacgccatggacttcacctgcttgggacaaccaccacttggttcttgcttgacattgcattctacagccaaaacttgttccaaaaggatatctttagcgccattggctggattccatctgccaagaccatgaatgcccttgaagaagtttacaaaattgcaagggcacaaacactgattgctctttgcagcaccgttccaggctactggttcacagtggcttttctttgat

SEQ ID NO: 513 - DNA, 722 bp, Gossypium hirsutum
  misc_feature (19)..(21): n is a, c, g, or t
ttccccgtctgcacttctnnnatggttgggttcgcaccacttacatcccgtagttcccagcagtacttttctctcactgtcccggagctgactcaacagatgtaggatgcaaagaacatgatgtgtgccgctgaccctcgccatggtcgctacctgacagcttcagctatgttccggggcaagatgagcaccaaagaagttgacgaacaaatgaccaatgtccagaacaagaattcatcatactttgtagagtggattcccaacaacgttaagtccagtgtttgtgacattccaccaaagggtctgaagatgtcatccacatttgtcggaaactcgacatcgatccacgaaatgttcagaagggtaagcgagcaattcacggcaatgttccgtcgcaaggcctttttgcattggtatactggtgagggaatggatgagatggaattcacagaagcagagagcaacatgaatgacttggtggcagagtatcagcagtaccaagatgcaactgtagaggatgagggtgagtacgaggaggagggtcttgaggagaactacgagtcataaaatgtgtggccaatcacgtttaaaccaaatgaaaattgcaacctttacctgcctatatacctacaattgtgcggctactgctgtttgttcagttctctgctctgcacttgtatttcccaagttaatattgtttgcttttctttcacctttttttt

SEQ ID NO: 514 - DNA, 753 bp, Gossypium hirsutum
aaaaaaagaatcttacatagaaaagtaaggaaaatgccaaaattgcatgtatctttctcaaagttcaaaaatcaaaagaaaacactcctccctcgaggtttctataactagatttactgcaaactagggaggttagtaacaatgactgcacttacaagttaaaagtattatttgacaatgaaatagtgaagaagtaatttcagctagagctggtcttacgtgctctaaatgctctagctccttaaacaaacagaatgaagatcaaatgttttttttaagcaaactacctgtcccagttaggaaaactgccaacaagatagagccctccacaatcccaaggttcagcaataattttgcaccttgataaggtagcatcttttgcaatagcctggttcataaagaatgagtcgacaactcacaaaaggaaacagcaacttgagagttcccccccccccttcaaccccaacaaaaagaaaaaaatggaaaaggcaaaattcttaagaataaaaaaattgagagcaaaaactttagcaatgctttcattataatcttttagaataggagaataaacctaacaaaaaatatcctcagtagatctggctgttaaaccataatagtattttgccctgttatcgtaccatgttagatcaaaagggactttaaaccactgtactttgaataatgcagatatgctgcgtgtagcaatttatagtgaaaaggcatttaagccacctaccctgataagggagagca

SEQ ID NO: 515 - DNA, 674 bp, Gossypium hirsutum
attagtgaatgaaaactatacaaggtaataaagaggcattagtgaatgaaaaagtatacaaggagcatgatgagcatgcattaagaacaaaaatgcagcaagcaccaatcatatgcagactacagagtttgcaaaggcaactagatttgtgacaacttaaactactataaaaaaaaagcccaaatcattagactccatttggtatttctattggaactgcatttgtctgcaaatgcaatgtcaaagtcaaacaaggtcacattttcagtaaaaaaagaacctgaattgcaatgagctgttagcaatcacaaaaagcaacttcctacctgcttttgcaatctacttttgccagtatgatgagttttcattttatacaatttttaaactcaatcacaaacccaaactaggccttaaaactaaaaatattttcagtaagtcatgtacacaattatggaatataactagcgcttactgtgagaccggtatccacttccatgctattcagtacatccaaacgaggttgcacctgagcaacctctacaggtacaggtaaagcgtcgaaagtattaactattccatattcaccattcttgtgaggttgccgttcatcatgtcgccattcaccatcaacaagaaacttgtactgcaagggagaaccaacacaaaacctaaaa

SEQ ID NO: 516 - DNA, 611 bp, Gossypium hirsutum
  misc_feature (19)..(21): n is a, c, g, or t
gcagcaccattctcgagtnnnagggccacacagtctttccttccatagccagctgttaatggagggcagtgttcttattcttgtccagagcatccacttttgccccagcttcaagaaggatttgagtgcatttcacctgaaataaaaccaaaaatcgtaacctaaagcttgccaaagaaaccaataatttaatctcagacaaactcatgtgaactgctagattatatcttttcttttcttgttctgttattcacttcattgtcctgatttggtaaaaccaatgtctctcagaagaaataaacctatcatttattaaaggaaatgtaataaacacgcccactacatggcaataagtactgttaaaacaagaaacaagcattgcttagtagccaacagattccatgatacactaagatcagataataataacaaagcctgatttttttgtgtctggatatgtactagcaatataaacgttttccctgtcgcaaagatcccaagatgagacactacaaacaaaaggatgttttaatacaagtcctactacatcccaaactgctatggcagtctgttatcaggttcaatatttgtgcgtcctaaaactacactca

SEQ ID NO: 517 - DNA, 465 bp, Gossypium hirsutum
acaaatgattttctcgagctgaaggatgaatcacgggaatcatgcccccaaaaggagttgttgagtattattattccgcttgttttgctgggcgtgcaaacgagtgcaactgacagacctaccaaaagttatgtcttcacttacaactgattttacatttctataagaaccaaaattcatctatatccataatggtgctgtcaagaattatgtttttttcctcccaaatttcaagataattatgtactttgatattcacactgtacaggaaaatcgtatcatgtggtatttcttcaatgtgccttatgagagatgatgaagttgaatgctgctaagtttatccttgatgtgtttatcaattccaaatatagaaatggcattttaattgtataactctatatgaagcctcagatgtctgatcaaatgcttaatgaaaaaaccagtctagcgatttgcataactgga

SEQ ID NO: 518 - DNA, 682 bp, Gossypium hirsutum
taaaggtaaccaaagtaggtgctcgctgacagaatgctctcactgaaagattcataagaaaacaaagaaaattgaacccaaaaaggaaaaagattgctgagtcacacataaggtttattgtagcagactcttaaatggtgttatcctatcttttttaggtttcgtgtggtcttatattaaagttgagcccctccgcatatgtcaaatggttctaggttttatgcttaatattgcttgaagttttcttataatataattttatatctcaattcaaaaagtacattgatttatatagacttcaagcatccttatcctagaagaaagagaagcttaactttaattcggaactactagatataaaactaaaaaacttaatacaaaacataataggataaggaaaaccgaaaccaagatccaataccctaaaataaattccaaatacagctattgtacttcaaaattacaactaagcttatatatacaaattaataaaataaaatatagtagttcaatagatcaaatatctttccatccttcctcatccacccctctcaaaaaggaaaaagatttcttcttgttttgtggactttgtttaagctttactaacattacgaagtcttcttgtctctattggtttaattactaataaatactaaacagtatggaacactactccctgaaa

SEQ ID NO: 519 - DNA, 686 bp, Gossypium hirsutum
tattgcaagcattgcttcctcgtgaacagtagagctacggcaaccaaacaccttgaggaacagaagcatgatctgatcagctgcctgaagtatgattgttttggtttcatctgtgctgctaagtttctggatgataacctgcaaaacaccacaaagagaggcttgcaagtccccttgcttttccctgtcatctgatgacacaatctgaatatccatagtctggcccaacttattcatgatgactggtagtagctgtgctataatagaagatgtttcagcaatgttagaacatctcacaacttcattcaaggtttcataagcagaagacctgagcttggagtcacccccatctgtccgatcagcagttgaaatcagacaactaattatgtcagtgagatatggtgaccaaagagaggcgctaggtcctgcatcgtcatagccttggacaaggtaatagattgccccacaaactttctcagctacattgggagcatctttaatgctctctaacaacacacccacaactcgtttgaggttctcaggggaaatgatagaaaatccactagctggactgtgcagcaactcaaaaatgcgactaagagtccaagcagttgtgtctttcacatggttgttcccatccttcatagcattgagcaaaaagtccagacccgcctgtaccaaaggaa

SEQ ID NO: 520 - DNA, 749 bp, Gossypium hirsutum
ccaaaaagatgcatttaatggatttgggaagaagtttatcgtttcctggtgtgtggttatgaacaaaacatgtgcacccgaaaaggaagaggataagaagactaactagggaagacaatgaaatgagggctttggttttgtaggacaaaagaaggctttcagttaattaaataacatgcagtaagaacatccctctaaaaacgaagagctattttgttatgaatgagcattgtgtgagcaatttctataaggtggctatttttgcgctcggttactccattttgttgaggggtataagagcatgaagtgtgatgaataatccctttagaggttgagatattttatacacttcgcaaaatttgaaaagaaataccaaactgattaaggatctcagtataattttttgaaaatttcaaacaatttagacttatttttcattaaaaataaccaagtgtaataggaatagtcatcaacataagtaacaaaataataaattcccaaagttgagtcaacacaactcggaccccatatgtcggagtgaacaagattaaacaaagaagttttattattcaaatgttttggaaaagaagtacgagtgtgtttcccaagttgacaagacttgtattctaatgatgagagctcagaaaaaccaggaactattcttttgagtttggagagactaagacgccttaagcgacaatgaagaagatcaacagaggtatcaaaagacaaagcggttggagcaacac

SEQ ID NO: 521 - DNA, 525 bp, Gossypium hirsutum
ttttgattctattggaatttgtgtctgatatgattgatactatttaaggttattattagatttgttcttccttgttcatttagcagcaataggaattctcaatatgaaatgtcatggtttgctttgtctatagtaggggtgtaaaggtgcttgcaaactacttgaagaaagactcgaactcggtcgagctatcaattgagtcaaatttgagctttgttaaataatggcatgtctggaaatcatggactgggtaatgaagttagttgctttgttaatttatggattaatggttttataggaacttaagttagtttctttgttaatttgggtaatgaactttgtctggaaatcaaggactggttaatgaagttagttgatttgtagctttatttttgtttttgtatggtctaatgcaaatccttttttttattatgccatgtcgtcgttgataatcgcgagttgtgtaattttatgttgttctttctcctcctccttcagatggaaaaattgggagccttaaaatgg

SEQ ID NO: 522 - DNA, 762 bp, Gossypium hirsutum
tgctatataccgaatcactgtaccgagtgaatactcatcctctaacaatgttgagcagctagaccagtagagtgggtgaatgtgagtgcataattcatgaaagccaatccatattccaaatatatactaaacctggcaagaaaaccttatctcaaggatttgatcagattggaaaaacaaaatttaatgtgataaagtagccgccattgattatatttaatgtgatgaaggagccgccattgacaattattctatgaaagctattgagtgttaaaagctaaatgacatggaagataaacaagttgtcattttcatatagagagagaaggaaagtaacgtgaagggagttagatttgaggggaagaagtaaaaggattgaagatacacttggatctaaatgaatattgttgtagtaatttactttaaaaatataaaaatataaaaaaatgtcagttaatggttgcttgttggactcgcaattgaatctttctactattgaatattcgtatatatcctccacattctgggaagacatttcatcaatttttgactattgcctattcaagttttgagttcatcaaactgctgcaatagtcatattttggtaagatatgtttgtgcgtgtttttatggtgctcatgaattttcaacaatggaaagaaacaattgttatatggggatacaatcttgtggttttttttctttttttagtatcattattatttgttttacaaacgagattttcatttgcagaaataggag

SEQ ID NO: 523 - DNA, 1178 bp, Gossypium hirsutum
  misc_feature (658)..(661): n is a, c, g, or t
  misc_feature (664)..(672): n is a, c, g, or t
  misc_feature (678)..(680): n is a, c, g, or t
  misc_feature (682)..(687): n is a, c, g, or t
  misc_feature (689)..(693): n is a, c, g, or t
  misc_feature (696)..(705): n is a, c, g, or t
  misc_feature (709)..(715): n is a, c, g, or t
  misc_feature (737)..(737): n is a, c, g, or t
  misc_feature (739)..(753): n is a, c, g, or t
  misc_feature (755)..(759): n is a, c, g, or t
  misc_feature (765)..(776): n is a, c, g, or t
  misc_feature (778)..(780): n is a, c, g, or t
  misc_feature (788)..(789): n is a, c, g, or t
  misc_feature (798)..(800): n is a, c, g, or t
  misc_feature (802)..(802): n is a, c, g, or t
  misc_feature (804)..(806): n is a, c, g, or t
  misc_feature (808)..(813): n is a, c, g, or t
  misc_feature (816)..(825): n is a, c, g, or t
  misc_feature (827)..(827): n is a, c, g, or t
  misc_feature (829)..(829): n is a, c, g, or t
  misc_feature (834)..(836): n is a, c, g, or t
  misc_feature (839)..(842): n is a, c, g, or t
  misc_feature (844)..(844): n is a, c, g, or t
  misc_feature (849)..(851): n is a, c, g, or t
  misc_feature (853)..(855): n is a, c, g, or t
  misc_feature (860)..(870): n is a, c, g, or t
  misc_feature (876)..(885): n is a, c, g, or t
  misc_feature (888)..(901): n is a, c, g, or t
  misc_feature (904)..(905): n is a, c, g, or t
  misc_feature (907)..(907): n is a, c, g, or t
  misc_feature (909)..(913): n is a, c, g, or t
  misc_feature (915)..(918): n is a, c, g, or t
  misc_feature (920)..(920): n is a, c, g, or t
  misc_feature (924)..(932): n is a, c, g, or t
  misc_feature (936)..(941): n is a, c, g, or t
  misc_feature (944)..(944): n is a, c, g, or t
  misc_feature (948)..(956): n is a, c, g, or t
  misc_feature (958)..(995): n is a, c, g, or t
  misc_feature (998)..(1005): n is a, c, g, or t
  misc_feature (1007)..(1008): n is a, c, g, or t
  misc_feature (1010)..(1013): n is a, c, g, or t
  misc_feature (1015)..(1017): n is a, c, g, or t
  misc_feature (1019)..(1020): n is a, c, g, or t
  misc_feature (1023)..(1048): n is a, c, g, or t
  misc_feature (1050)..(1052): n is a, c, g, or t
  misc_feature (1054)..(1055): n is a, c, g, or t
  misc_feature (1061)..(1067): n is a, c, g, or t
  misc_feature (1069)..(1076): n is a, c, g, or t
  misc_feature (1080)..(1092): n is a, c, g, or t
  misc_feature (1095)..(1109): n is a, c, g, or t
  misc_feature (1116)..(1120): n is a, c, g, or t
  misc_feature (1124)..(1126): n is a, c, g, or t
  misc_feature (1131)..(1132): n is a, c, g, or t
  misc_feature (1136)..(1140): n is a, c, g, or t
  misc_feature (1147)..(1153): n is a, c, g, or t
  misc_feature (1155)..(1162): n is a, c, g, or t
  misc_feature (1172)..(1175): n is a, c, g, or t
tctgcttgattcaacaaaattgggctgttaatctagggcattttcagtctgtattttcttgttttttggttcgtggtaacaaagacaatgagtatctccgattcaatcaccgatttcaatcatccactttacttgcatccttctgacactccgggcactttgttggtagcacatcagttgcttggtgttgagaactacaacgtctggagtagaacgatgaaaattgcattactagcgaaaaacaaattgggatttatggacggtacttgttccaaagatatgtggccggaagaaatgggttatcaatgggagcggtgcaatgcgattgtgctatcttggattctgaatatggttagcaaagaactctccgcaaggattatatttgcgtccagtgcagtggcagtgtggagtgatcttagtgagaggtttcacaaaatcgatggttcaagaatttatttcttgcatcgtgaaattacctcgtcttctcaaggtactatttctatctctgcctactttaccaagttaagattactctgggatgagtatgatgtcctcgtacctctgtttgcttgtgggtgtcctcaatctaggcagaatgttaagcatgtgaacaacagcatttgtttcaatttcttatgggtttgaatgactcggatannnncgnnnnnnnnnaaaatnnnannnnnngnnnnncannnnnnnnnnttcnnnnnnntaagggtttaaaagacccctanannnnnnnnnnnnnnnannnnnacctcnnnnnnnnnnnntnnnataactanntaaaattcnnncncnnncnnnnnncannnnnnnnnntnanataannntannnnanaatannncnnncccannnnnnnnnnncccttnnnnnnnnnntannnnnnnnnnnnnnctnncntnnnnntnnnntntctnnnnnnnnncacnnnnnnctnaccnnnnnnnnncnnnnnnnnnnnnnnnnnnnnnnnnnnnnnnnnnnnnnnctnnnnnnnnanncnnnntnnncnntcnnnnnnnnnnnnnnnnnnnnnnnnnnannncnnattctnnnnnnntnnnnnnnntaannnnnnnnnnnnntcnnnnnnnnnnnnnnncatcctnnnnnacannnaaacnnatcnnnnnacaaacnnnnnnntnnnnnnnnaactttcatnnnnctt

SEQ ID NO: 524 - DNA, 677 bp, Gossypium hirsutum
tatgggtgtgcggggctcttctgaccaaggatttgagtttataacacctttatcttcctaatcggtctcgtcagtgcctgttaatgatgcttgttcttcatcgacaatgaagtcccataactgttagtttgttatgtaatagttctattttcttgaacactcgaggttgaacttgattagcgaaaccaagactttaatactcttccaatagactacacgggttgcaataacaaattgatttgttttcttactagtgttaatgatctgtggcatttggatcatgcctgaaacacaaatttgtgctaatatacgtgtattaatgtcttgtttccgcaaaatgatcttataattttcagtggctaactctaatttatcgttatttgaataaacaatcccgacgaagcagaaaattagaaaattgatctaaattaagattaagccattttattttaatttactgttaatttgtttcctacaattgtgatcgaatctcgctaacttgctcaaaaaatatttaaaaaaaaattgttgagcgtccaattttttagttttggcagtgaatcggattctcaacaatggttggcattgttcccgggttgtgctgggatttttttctctcacctctaccaaaaatcagcatatcatgagtaattttgtttacagagggagaatgcctc

SEQ ID NO: 525 - DNA, 463 bp, Gossypium hirsutum
ctgtagctttaacaaacgcaagtgccagtgctatgaaaaataacttggtacgttaatgttttagggtgctctttgctcgtaaatgttttttaaaaataatactggcactgtatggttaacatattagatctgttttgcattatctactcgtgcagaagaaaaagattgaccttcattttgatgcaattggtatttcaaggattatctgattagttaatatcttgttctgaagttattggtgctaaattatggacgaacagaaatgagttttatcttcataaaattagaagtcttaaaaaaatcagtttccaaatgattgtcttcgtatatcatctaagcttttggtatagtggttaatagttttgcaacttacagagatacgtggaattaaatcatccaactaaggttggtttaagtaatccacgaagttcttcaccaagcaaagcagtgagagagctgaatt

SEQ ID NO: 526 - DNA, 498 bp, Gossypium hirsutum
gggagaatatgattaaactctcccttgatagcaatgatttcgttgggggaatcccatcttcattaggaaacctttcgtccttggattatctccaacttggggataatcacttggaaggagatataccctttgatataggaagattatacaacttgaaaatactcgttcttagacaaaataatctgtcaggaaccataccttcttccatttacaacctttccgccatgagatatcttgcgataggctcaaataagttacatggtagtcttgaatctcacctgggctttgcttttccggaacttgaaatactgcatttcgcggacaaccatttcagtggaagaattccagcatcagtaactaatatctctggcttgaaagactttgacatccattcaaatgcttttagtggattagttcctgaaaatatgggaaagcttcagaatcttgtgttcttttacattgattataaccatctcgggattgggaaaggaggagact

SEQ ID NO: 527 - DNA, 685 bp, Gossypium hirsutum
acacaacctactttagcaattccagaaaagacaatgcttattgcaaatcactccctaaacaataacataaaataatataacattgaaaccctagagtaataaaatttgtaatatgtaacttacaggcaagaagatcctttgagacgacattcgacattgtgggagcatggaactgattgactgcttacatttgcaccagtcaagccaaaaatattctccatgagacacttcgagcttgaaaagtttggtaccaaggtatttagtatatctttggaatattaaggttaccttaaagaaaattgccggataaaactagaaatgcatgacaatgactaccttaaagaaaattgaaggaaaaagtacgactctctatctctcaaaatctatcaaggatacgtccttctggaagaacagatgaagaacattccatgttatagaacatagattgcctgctaatctcaattgaattcgagactttgcggggagcttttagcatcaagtaacaggaacatggaactgttgcctgcataagaaaataaatgaaactgtgaaggccatatgcaaatgtcagtcgaggcaatatattttgttttatatatttattttgatttaataagatgtcttacgatatatttgttttatatgtttattatgatttaataagatgtcttcgtaattctcgaag

SEQ ID NO: 528 - DNA, 1163 bp, Gossypium hirsutum
  misc_feature (807)..(814): n is a, c, g, or t
  misc_feature (816)..(817): n is a, c, g, or t
  misc_feature (819)..(839): n is a, c, g, or t
  misc_feature (847)..(847): n is a, c, g, or t
  misc_feature (849)..(858): n is a, c, g, or t
  misc_feature (866)..(868): n is a, c, g, or t
  misc_feature (871)..(881): n is a, c, g, or t
  misc_feature (886)..(893): n is a, c, g, or t
  misc_feature (895)..(895): n is a, c, g, or t
  misc_feature (901)..(903): n is a, c, g, or t
  misc_feature (905)..(907): n is a, c, g, or t
  misc_feature (910)..(918): n is a, c, g, or t
  misc_feature (924)..(924): n is a, c, g, or t
  misc_feature (928)..(932): n is a, c, g, or t
  misc_feature (936)..(945): n is a, c, g, or t
  misc_feature (947)..(951): n is a, c, g, or t
  misc_feature (953)..(956): n is a, c, g, or t
  misc_feature (958)..(960): n is a, c, g, or t
  misc_feature (962)..(962): n is a, c, g, or t
  misc_feature (964)..(968): n is a, c, g, or t
  misc_feature (971)..(972): n is a, c, g, or t
  misc_feature (974)..(984): n is a, c, g, or t
  misc_feature (989)..(992): n is a, c, g, or t
  misc_feature (995)..(1012): n is a, c, g, or t
  misc_feature (1016)..(1016): n is a, c, g, or t
  misc_feature (1018)..(1019): n is a, c, g, or t
  misc_feature (1024)..(1038): n is a, c, g, or t
  misc_feature (1042)..(1042): n is a, c, g, or t
  misc_feature (1053)..(1055): n is a, c, g, or t
  misc_feature (1061)..(1065): n is a, c, g, or t
  misc_feature (1068)..(1070): n is a, c, g, or t
  misc_feature (1072)..(1077): n is a, c, g, or t
  misc_feature (1082)..(1087): n is a, c, g, or t
  misc_feature (1089)..(1093): n is a, c, g, or t
  misc_feature (1097)..(1097): n is a, c, g, or t
  misc_feature (1099)..(1099): n is a, c, g, or t
  misc_feature (1101)..(1113): n is a, c, g, or t
  misc_feature (1119)..(1122): n is a, c, g, or t
  misc_feature (1124)..(1128): n is a, c, g, or t
  misc_feature (1136)..(1160): n is a, c, g, or t
agtttctagatttgaaatctgggtatgttcagtttttaagttagatcaattttggaccctagtatttatgctttctgtttcttatgtcagctgagaagctttgagtattgaccttggagggtatcattccaaattccagttttgtgtttttgttaaaaatggagatgaatgacaatttgctaccttcaattttacagtttgcttgcatgaatgtttagcctacctgttcttctgaaattttattttaagctgaataagaagatgtaacaatggtgtctggggaaataatagaaagttggttgtttcaagtgtacttttgttcttaatagcaaattttgtttcaaactgagtgattatgttggggttaacagcacagaaggaaaaatgaactgatctctatggaacttttcttctacaatacataatgcagtgatgatggtttacaatatagtgacagcctttaacacagccgttcatttgtgttaatgacatttgagacagaaatataatataggtttgaatgaacttgagtgaatagttgactaaaagtatgtaatctctttatgagtattctgtttttcatgtctgatccttcaaatatgcaactccgttggaacttgttcttgttcatttttgaagtctcacgaagtgtgggtttctgttgtgaaaatgttgaaaacagctgttttgacatgtaaaatagcatttaagcttatcttgtgtggaatcttatagttctatatattcctgtgaaaggggggaaatgtttaggtttgatggggtggaaaggatgggttaaagtagaannnnnnnncnncnnnnnnnnnnnnnnnnnnnnntttttttntnnnnnnnnnnttttcgtnnnttnnnnnnnnnnnttttnnnnnnnntncctctnnncnnnccnnnnnnnnncttcantttnnnnnttcnnnnnnnnnntnnnnncnnnntnnntncnnnnntcnntnnnnnnnnnnntcctnnnntcnnnnnnnnnnnnnnnnnncttncnncttcnnnnnnnnnnnnnnntttntttctttttcnnntttttnnnnntcnnntnnnnnncttcnnnnnntnnnnnttcncntnnnnnnnnnnnnnttttcnnnntnnnnntcctttcnnnnnnnnnnnnnnnnnnnnnnnnncct

SEQ ID NO: 529 - DNA, 667 bp, Gossypium hirsutum
atgcttcctaatcctcctaaagaagcactttgcttatgtcttttctttgacattacctgaaatcatacagctagagcaataaattaatggtgctcatctcaacatcttcaatatcttatgtttattttaaggaactataataaatatcctatagagttgatcgtgtagagagtaaaagagcaccttagaagatggagggagcaatggtgcctgtggtagagccttccccgattcggttaattgtcgtctatctcgaagctgagttgcaatatcttccattatttgcaactcaacttgttcccttcccttgtggcccgcagggaagttgagcttctctcttcccagttggacaatctttagcctttctctgagccacccaacttcattgtcaatctttaacctttcataatcaaaagccgacttcgattttctatgcaaatatttcggtcgtgaaggatgaattggtggtaatccttccgatctctccgaactgtttcctttcctgccaggctcaatttctaccccaccgatggtttgattatcacatgttttaggcgagtttgaggaaacaccgatcaacttcttctcgattcttttttcaccctctttgttcttcacatttgaagcgttgttaatgacatgaacatcgaatacacggaaatcagaa

SEQ ID NO: 530 - DNA, 737 bp, Gossypium hirsutum
  misc_feature (724)..(724): n is a, c, g, or t
tcatttcattatcattgcataatctcaagcacccagatatgtcccagttttcatcaacacccccccttcttattacctatctccttttacatttccattgtatctacaactactttttaatatttatattttctgaaattttttattttaataatgtattctatttctatttatattctaaactcttaaataaaaaaataatatttatttaagtgttcttaaactcacatttttctatttattatagcatcaatcatgtcaattaaactaaggttaaatcgacattttattggtataattattgtaaactttaaatttttactatataatttaaacaagaaataaataaataatccaacccgagtgaaaactaaactactccaatacccatttagttggtatgttaatataattatataaattcaaatattacaaaattgattcatatcttaatataataatataaatttaaatattacagaaaacataaacatcctacctgacctaaaaacacggaaaatttttcatagggctgcgaagttttttaatgtttctcttttctgagccacaaaattcctttgtttttgaaaagaaatcagaaatcacataatccatccaagtgtttattgtcaaagcttcaaactctagctttgtggatatgtgtcatctgaaggtaatttatggcttcaaatcattgattagaccctcaataaaatatgggttnaaaaatcactgat

SEQ ID NO: 531 - DNA, 727 bp, Gossypium hirsutum
gtttttgggatatggaggagagccattaacaaagtccattcaagtgcaaattgttgatgcccttcgcttaggtgagagaagtagagcttctagcctgcttttagactttggtaacggaaaccagtctttaaaagccaatgacttcgtttacattcttaactactgtgcaaggtcaccggatcctttggtaagctgttcaacatggaattttagctagctgcatgcaactgtgtaaacctcaatgtgtttctcttctctagatttaagcttaggacatagataatgtggatatttataatatttgacaaactggaaaaggaagaaaagatagcatcaatggttatacttggcagtaacagttgtgatttttttcctgtcctgtacagttcgttatggaaacatggagattaatggaggagaaggagattgacttgaataatacatgctatttgcttatggtccgagctctttgtagaggaggttacttggaggaggtatgccttttatctactggttttgttagatgttctgtttgtttaactattaaacactgatcttctaaatgtattacctcagtgtatctttgggtgttgatccatttaacttaactagaacaacctacaaccttttctcttgtgtaattgtgaacaatcttttgtcattgctgcattgttgtacttatagttgttctgtgtagtcattaatgttattatgtcctgaatcacat

SEQ ID NO: 532 - DNA, 576 bp, Gossypium hirsutum
gaagaagggataaactgaataggcattttgtaatacaatatgattcttgtatataacatgtatttttttcatatcaaagtttgatcatttcacataaaaaaatttacagttttttttactattcatatgaaaatttgtatgtaacgagattgtatttattattattggatgattggatcaattttattcaatttgaaatcttctttttttgttctccagttcatcagaaccagcacttacattttgcaaatctttaatttcctttcttttgttttttttcctttcccaattagttccacagattttccgctgtcacccaattttcattttaaaaaatcccaaagcttgagaactcgtgttgggatggtagggactcgaaattgataggtttcgacttcccccaactttgtgggaatgaatacttttcccaatttatgggatggtaggcatggtaaaataacccgaaccttgtcgaaattgaaattgattggtttcgacgtcccccaaccttgtcgtatgtccatcctcctctatcagcatagtgaaagaaatatccctctaccttacccacaatcc

SEQ ID NO: 533 - DNA, 385 bp, Gossypium hirsutum
caaacaaaggatttggtcctgcaaatataaattatatgtcaacattgaccgctaagtttttaatggttttcctcttgctgatgacaatatatatgtatatatatgtaaaacatttcccattccatgtgacgtctcaagcaccgaaaccttacgtttgactttttgttttcaacaaaatacaccttctcaataatatcattcaactattgcaaacagaataatcttaaactacataaacaatatagcagaacaccaaaacaaagtgaaatttatatcataatcaaccattgataacatatgatatatatgataaaaaaaaaagctcatgctgtgctatgtcaaaccaaccttttcttatgtagactccttgtggaaattcaaatgg

SEQ ID NO: 534 - DNA, 422 bp, Gossypium hirsutum
atttactgcattttcttagtacatatcaagcctcaactccgagattctttttaacttaaaagagaggaacatgcccacatcagatgcataccgtatccaacacttagacccgagtctgaataataccagttttgacaaccacaagccctaaagttacttgatttgcccatcagttttagcatctagatttaaaaataatgaaagaaaaacactatgagaaatatgaatatatgaaaaacaaacctgtttatcatggagataactgctagggaaattggtggacggaatgcttgaatttgcatgaggcaacgatactccatcaacatcaacattgcccacgcatttgagtggtggatcttctattgatgagaagtcagagccgtcaaatgttgatagtgatacacactcatcgaaataggcaa

SEQ ID NO: 535 - DNA, 669 bp, Gossypium hirsutum
aatgatatcttgtctgagtatggtgatccgaacaatattggtaaccatttcggcagtgaccttgctgctggtaataaatttagttttttgcatttatcacattggtttatcttgtttaatgtattttctttaaatcagccctccaattggcaaagaaattaattacatgtttttactttttatcatgctaaaaaattttcacttttagagctgttttacagaatttaatcaattagagggcatttggttagtggaagataagattttgttatttggttgatggaatgtaaagacataaattaccaacttttatattattaaaacatagtattaactatggtttaaaggtaaatttgaccaaaatgataaataaataaataagggaaagacatttctatcccattttttgacagttgtttaactgttgggaatgtgaattgagattatcggctaagataatatttgaaatccagatatgagaatcctattttggtatctcatattaccctgaaaatgttccatttcttagccatctctccaggacatctagttttgttagattgtaaccttttctcaccttactaaaagaatcctttacagtgttattttattgacttttaacatgttttcaggcctggactacacaagcattgttgcctctagtactgc

SEQ ID NO: 536 - DNA, 724 bp, Gossypium hirsutum
ccgtgagctcaacttaccaagcaagttattgtctttggttcttgctctttcaccttcatacacttgaatcaaaacccctggttgattatcagaataagtagagaatatctgttctttttttgtcggaatcgttgtgtttctcggaatcaacacagtcatcacaccgccggcggtttcaataccaagactaagaggtgtaacatcaagaagaagcaaatcttgaaccttatcatccccttcaccactcaaaatagccgcttgtacagcagcaccataagcgactgcctcgtcaggatttatgctcttacaaagttccttgccattgaagaaatcttgcaagagctgctgaactttgggaatccttgtcgacccaccgacaagaacaacctcgttaacttgactcttatccagcttggaatctcgaagacatttctcaacaggttccatacatttcctaaacaaatccatgttcaattcttcaaacctagcccttgtaatggtggaatagaaatcaataccttcaaataacgaatcaatctcaatggtggtttgagcagtagatgacaatgtcctcttcgccctctcacaagcagtcctcagccgtctcaacgcccttgcattactactaatatccttcttgtgcttcctcttgaactcttgtacgaaatgattcaccaacctgttatcgaaatccccgccgccgagatgagtatcaccggcggtg

SEQ ID NO: 537 - DNA, 738 bp, Gossypium hirsutum
ttcgtatttacacatatcaatatcagacactcatccaacagcaaaaaaagtaaattttagaaatgaaagttaaaattattacccaatcaccaataacaaacaagcttactaagacaggattgtgtaggtttgtctttgacctcaaagcatggaaatcgagacatgcaagtccaaagctccataaaacttgaatccccattgacgcaatcaaatagctgaaaccaacaaagaaatgcacaaccaaatgaaaaataaaaaaaaaaacatcacaaaccaacatgccatttcaagtatctaagctacacagactcgggtgtaattgtcatacatgagagccttgaggggttatgtctttatactcatgttagtatatatgtaggatacagatattaaacacgaatatacgaaaaaagaaaaattttaaatccaaaaatctataatagttagtctttcaaatgaagaaaacaaagaaatgcaatatggtaatattttgatttttaatttttcttgaagtactcgatatctagatggtaaaagtattatgacaatctctatattaagagttgagttacattttgttccctctattaaaaaaatagataaattagtcgttttattaaagagtaaattaattttttgttgttaaaaacttcatctatttttatggttaaaaactggtgtagctaacagaatcaccagatagttacacctggcatctatcgtgtatctcgttatgag

SEQ ID NO: 538 - DNA, 715 bp, Gossypium hirsutum
  misc_feature (540)..(540): n is a, c, g, or t
  misc_feature (687)..(689): n is a, c, g, or t
  misc_feature (699)..(701): n is a, c, g, or t
atatgtttagtgcctagttgttagtgacataaaactgcatgtccttgttttgtagtttaatagtttccatgatgcctgttatggactaaatttggtgataactttaaagtgaaaaaattaaaacggatatgctttaaaagttacgatgcagctttttatattttcatgaaagaacacaattccaagtgctctgctgtttttgctttcacgaaaatagattttgatgatactgttgaaggattatattttgcctgcaatgagaatgaaataatctatttgatttctttctacatttaggactactgcagagcactattttagagagtgtaggatgtatttggtttaaccgtactgaggcaaaagatcgggaaactgtaacaaagaagtaagttcaatcagaatagggaaattatttatatcaatatattttcccgttcatgaacacgtgttaatatcaagttaagggaacagaaacaaggtgttgacgataatcctcttctcatatttccagaagggacctgtgtaagcgatcaatacagngatatggttaagaaggtatagctgttagtatttggggagaggtgctctcagtgttcctttcttactcatccttcgtctttaacttcttggtttctctgatgatgtttagggtgcattcgaacttggttgcacaatttgcccgattgnnnataaagtacnnntaaaattttgttga

SEQ ID NO: 539 - DNA, 480 bp, Gossypium hirsutum
cagacctgccattctaaatgacaaaaatatgttagtctgaaggggaagagtggaaagaagctacaaagatagtgtaataaatcaaaagggaatctcttgcataaattctccgaaatatgcagagagagcaaaaagttagtgggtctgctggttgttccagtgtactgtatagatacaagtatagaataccaagaaaaagaaaatacaaaattcaagtttccctcctcaaaacatcaagtattaaattatgtcaaagcttcaagcaaccataactaccaataaactactccctaagcttagcacccggtaaagaagaaagtccaagtgggtgattgacctagtatgtagaagagctttcctattacaagagcagaagctaggtgcttgtatctcataatttttgaagaagtaacttatattggaagttcatttaggctttagacgaagctaaaaccaaacttcttcaaaagcgtactgatg

SEQ ID NO: 540 - DNA, 655 bp, Gossypium hirsutum
cagtttcaccaaagaacttccacctacacacacaagagaccttaatcacacttcgaggactgagacgactaaataaatcaaatgcagccacctagaagactgaagaatttaaaccaggaacaaggcattgtagaatagatatgaaatcaagcctaatccactataaagaatcttaaatcctgcaacttgcacacatcttggttgaaggtagcaaatgaccacacatgatgatcaaattcacccactctacattatcttccagaaattttaatcatccacttaaaggcttttcaaatgcgttaaaatgttaaataaaatggaaatcatgtgttaggttgttactgaaatttacattttattcttacctttactggtacggaaaatcatgttgttaagatgaatagtcatgaggcctctcccatgcagcatccttccaggtgtaaagacaaagtcatgcatgtaggtcattggattttcagataactgtttgaaagaagaaaaaatgaggttaatttcctgacaaatctgcctaaaacttgagagagggacagaactgcacggtcattgggtttagggtttgaaagaagaaaaaatgaggttaattaatcaaaatgtttgcctgaattcacattgactattgacattaagggaatac

SEQ ID NO: 541 - DNA, 750 bp, Gossypium hirsutum
tcatatttcctgctccactgcagtatggaaggagttgaaaataaggcaatcgaaaagatataatgactgcaaaacaggaaacaatagaatggaaattggaaactggaaactggaaaagcaacattttctattaactaaaaataaattttgagataataaaacgaaaacaaattatgaaagaaattagtattcatatattattttaacaaattatgcaacgggattctctttatctatttcaatatatacactaattagttctttaataacttgatatagaagaaaagaagtaaactacctgtttataagtcatggtagaaggtggatcatgatatggatccaccactgctactcgatcgccatgcttttctgctgaagacctccaaatgtcggggactgctttccattcatcagaggcaagtgcaccattacttggcagtgatgctttttctagtaaaggtgaacatcttctaatttggccctcctgtgtctaacagataaaaataacatagatagatggtaagaacaccatctaactccgtaggaacaagtatgaaagactaaaaagttcacagcatatattttaaaagctttagaaaaaggtattttgacatccatttaaaaaaataaataaacaaaattaaattgcaataacatcagcaagctcggttaagtataagagtatggtataggatctacatgaaattgaaaatattaaagtttcaaggagcaaattttaaatcaggtaaa

SEQ ID NO: 542 - DNA, 748 bp, Gossypium hirsutum
  misc_feature (738)..(738): n is a, c, g, or t
cgcatgtgataactcaaagcatgcaaacgcttcacaattctttcaatgcattctttgccttcagcatcatgtttcaacattgataaagcacacctcaatgccataaagaaaagtgcttgaatttcaataggataaccataaataccctggcaatgccgaagaaagttcacaccattactaaaacatgtacttaagtctcctcagtcctagagatgaagagatagtggcgataaaaaacatatagatatatatgaattaagtggaacactcatacttgtgagctgcctttcatggcaaaactgttaaaacaatttggtcaaacaaacgaaacctcataggttggattgccacaatagaatacaaaaagaacaagtgtgctctcacacattgcagaataaatacacatagtttaccaaatatttcctccatcaacgagaactaaggtggaccttcactaataattcacttacaattaacatatgaatgaatctgctcatccaaaagaaccatttggggaaatggctttcatttctgaaacagataattcagccttattaaagaatcaaatctgcattgctttaaccacttaaaacggcatcagattcattaataaaaatggacaaattaactagatcctacggttcttagtaataacagaatagggatatatttggttcacttttatagagggagaaggataagttgatgcggaccatgttttctctgttattagctagncatggtccca

SEQ ID NO: 543 - DNA, 713 bp, Gossypium hirsutum
ttatagcttctttgccatttatcccctttttctaatttttgtttggtttgatctgcaggtggaaacttttggtgccatggcaaaaactgagaaaattgccttcattcttgaacaagtatgggcatcttattttgatcattgcccctattgttttaaatattactgtatcttttagattaagattgaaataataattgcgtctatgtgccaataattaaactatgcaggttcgcctctgcttagatcgccaggattatgtccgtgctcaaattctgtcaaggaagattagtcctagagtatttgaggtcgatacctccaaggaaaagaagaaacccaaagaaggtgacaatgttgtggaggagcctcctgctgatataccttcactattggagttgaagcgtatctactatgaactgatgattaggtacttggcttctttgctctctggcttccatatttttatgctcgactagctttgcatagtaactgtaaaaaataaaaaccagaaccaatgtaagaatgaggatcatagttcctggaaaaatgttaaccattatagctacagttctcaaattttcattgaatgtaagaatgagaatcatagttcctgctttggcttttatagttaaactgacttaccattataaccaagcaacttaagaagacatatgaaccatctttacttcactgtaaaaacccaaataaccgcaaag

SEQ ID NO: 544 - DNA, 706 bp, Gossypium hirsutum
  misc_feature (651)..(652): n is a, c, g, or t
  misc_feature (654)..(654): n is a, c, g, or t
  misc_feature (660)..(661): n is a, c, g, or t
catgttgtatgcaattggtgcttcccctaccttctcttgagcacttacctttacggtcaaaataagttctttgtagattgcataaaattgaatttattcgtttcagaataaaaataccatatactagacatgggttccattaatgcatgactagataagtgctagtaaaaaagggcaggccagtgcgcaaggctttgtccgggaatatatagatatacacccctactatgctatgtagggaggctgcatgttgtcccccattttgttacatcgcacgcaactggcaccattttgcgtatcatgaaattgtttggtaaaaaggcatctccagtgcctctcaatttcgatattgagcaaattggtccatctcaaaaaaattacagcaatttagtcctttcaattttgaaagtgtgcaaataaggacaattgatcatgacgttaatgtttttggtcaattgtacataattttgattgatataataacaaatttagccctcaaagtttatccattctattaatttggtcttcatttaacaaatttaacctgcaacatttgtgtaaatgtgtaaaacatgaggttaaatttgttgatttttttttagatctaaggccaaattgacaaaatgtaaacattgagggctaaatttgttnntntaaagnncaaaattatgtataattgatgtaagaaattagtgtcgtgataatg

SEQ ID NO: 545 - DNA, 792 bp, Gossypium hirsutum
gacaaattctaaaaatggaagtacaaaaattaaattctaaatttgtgaagaatacaaagacttatgatatattttaactcttaagcttataaattataataacctaaatagaaaaaaaaatccaatattcaaatatgaatgatttgatacaaatagaagattaaattataatttcgataaatccaattcaaattagtccaatctaaaatcaaaccatttaaaaatttctggttcttatactaccaaatgctcatgggtcgttcgggttcgagtcaagcccatgcaaaatatctaaactaatttttcaaactttgggccaacccaactcaaaaaatacacttactattttgcctaagcctaactcaatttaagaaaagtaaacttggacctgacctaatcggctcatatttgattttttctacattagtttttattttaaaataaatttttagaaaaatataatatactaaatgctctaaaaatactaaaataaaaattttctaacacattaaaaagtatttatacttaaaattttatattttgagttaattttaggttttaagtatttgttattagattagtattttaatataaatataaatataaatatatataataattatttaacgtatatattaatataataattttttttgtaacataatatatttagggctgaatcacttgcccttgaaattttatctaatcctattttttaaaccttgtattttaaccggtaagcaaatctacatactattttttttcttttttactttacacgtccgtactaaa

SEQ ID NO: 546 - DNA, 563 bp, Gossypium hirsutum
actcctgcaaggttggctgcaaactgtatactattctctgtttctttctgcccttttattctttctagaacaatttaatttctaacttttttccacgcacagtaatctagaatgcatctttgataacattagattatagtcggagtaatctcattgagtacatgggactatcgattaatttttgcttgagtcgaatcttttaatgtcatgtcaattacttaagaagtttgaaatgcacgactaatggaagataaaagcacggattatggatataaacgtttaaacatgcagcagtgtatctactttaccctgtaggaactcttttcttgagactcgttcgtagccaaaaccttttgtgagttgaattgctgatggttgttgtaataaacaacagtattgcatcatttacttactaaacatgtttagatttgtaagatagtattgtttaggctttgtacccaaaaagaactctggctacgcttcttttagatttttctagtcgaggtgtagagttggcaaaagctaagcaaacccgtttactcacaatcagtgacacccagtag

SEQ ID NO: 547 - DNA, 412 bp, Gossypium hirsutum
ggggatgacctgtatgcttgatttttcataggatcctgttctctctgcagattagatgcgcttttcagcagctcctgctctacttgagggaagtctgcaacaattaaatttgccaacccccctttagaatcatcaagtttctcaggctgatgggcaacaggtagagaagaatcaggcactgggattgcaactgtatcattatttttaacatccaagtcctttgtactcttagaagtacagttttcttgctcagaaactttggttgcattttcatattctaaggttccagcttctgatctatcaggtgaatcaagagtggaagtaatagaaagctcagttccacattcggagccaccatgttgaaccctccaattgttgaggactggattttctgagatgcttggctccttta

SEQ ID NO: 548 - DNA, 486 bp, Gossypium hirsutum
ctctctaggagatggcttttgttagaccaaatgcctgatgcatccttgttcaataatgttgaagtatggcttgagaagtcctataccgatcgtaggctactttttggctatatcagtgaagtcattttggagatagatcaatgttattttggatgctccccatggatttcgcttctctatccacgacttcaaccggctatgttatcaaaaaatctggttcatgaagtgttgagacatgtcgattggcaactccttttggagttgccccaacagacatcacaacaacttgtagaaaaggatgggcagaaatttggaatatggatggataaccgactcgatatggaggaagttttcacagagttaattgacagcattttagaggatttggtaattgatgctgctattcaactgcaaacgtaaaagaagagcaaagacatggagtttcaatggtaaaaaatcaaaccccgccaatttaggtaaataaga

SEQ ID NO: 549 - DNA, 331 bp, Gossypium hirsutum
  misc_feature (29)..(29): n is a, c, g, or t
  misc_feature (43)..(44): n is a, c, g, or t
  misc_feature (52)..(54): n is a, c, g, or t
  misc_feature (82)..(82): n is a, c, g, or t
  misc_feature (92)..(92): n is a, c, g, or t
  misc_feature (116)..(116): n is a, c, g, or t
ataaaaatctgcatatatatgacattaanagtttgctcatganntgccctcnnngttgttgactaaaacaacaatagctaanttttaataanaattatatctctctttacttcttnttgttgttgttgttgttgttgttgttattattattattgttccttttctgacaatagtgcacttcatataggcaatcaacaattacacaagggccagtaacatgaaacctggtgatcctattattcttggtaacagaagtgctgcctacatgaggttaggttttttcaatggttattatcactgtgttccagagaagtctacataaatagataca

SEQ ID NO: 550 - DNA, 745 bp, Gossypium hirsutum
  misc_feature (682)..(685): n is a, c, g, or t
gctggaggatacgtatcagaatacaagcgcctgacataagtatgttcaacttttgaagccttttttggtaactcatgtttggaaaataatgaggagtcaaagagccggaatttcagcatggtataactaagcttcatgaatgttcacaaaaacatgggaaaaacctcagcaactgactcttttaaggaaaatatgaaggacatggcacaagaaccagaaaaacataccaagtgtagccatgacagcagcaaagatgatgatgccaacgggctgcactcgtagtttcccgataggatacttatacatgtttatggttttcattgacaaatttgtgaaccatagtataccccctgctaaaagatctagcaaagaatctagtgttgatgcagcaacggctagggatccactgttgatggttgcatatatctgtaggtgcatataatttgttaaaggcttttgaaggcataaaaattaaataccctaactggttaaaaaacaaacaaatttatgttactcagatttgtgtgcaagtgttacgaaaatgtatctgacatgagcatgatctttatgagtttttttcatctattttgagagtccttgtcggatcatatggctgaaaatttatcggacacatagaaatgatgaatcgaagccatgtaagaacacatccatagataacctnnnnaatcgtgtgtgtcacaaaacattatcatatttattatgaacataacataacagagcagta

SEQ ID NO: 551 - DNA, 689 bp, Gossypium hirsutum
  misc_feature (576)..(576): n is a, c, g, or t
cttctcttgcttctgttcctgttgagactataaaacttgttgcagagcgtcttcgagacaaatctgtatgttcatttttcttgtgttcatttgattgcttttgttacccattgtgtacccagtgatcattatccatggcttttaactctttctttgatttggaaattacagctgcttgttaaaaaatttactatggaaaggctggctgagatattcaaagtttactgtgctagctgcactgatggctcaatcactacaaatgaatatgattggatacctgggaagatttttaggtgtttctatgacaaagattttaggcaagtcattttagatatcttgcagccgaggattactttcacaccttatcttttatttcattatttatcttttattttttcttattatttgaagttcaatgtctggttaagtaataaatttagatctctgcattattaggaaaggtgatgcaagaagaaattatataaattagcatcagaagtatgctgtattttcaactctccattaatcttaatatcttcaattggtgacattagaagaagttgaaaatacttttgnataagttgccttatcataatcatttagtgttcttttgtgaatgtgcaagtagttattagaatgattagcaatccattaaattatttttattagtacctcagtgacaatttttt

SEQ ID NO: 552 - DNA, 676 bp, Gossypium hirsutum
ttcgtaccctaggaactaaagaaacaacattccctgataaagtagaggaaagttaatgcaagggagatacactaaatatttgaagggaaaagactgaaaaatgacagaaaacagaccgtgaacaacacgttcaccctgcacaaaatttaagattcttgtcttgcaagtattcatgcttccaccaacaagtgactttgatagtgaattcaagtcatctttaaaatcctcattactggaaagactgactagacagcttgatactagttgaggagaatgtgtgcggggttttccggcatgatactcatcaaccttgtttttgatgttgagtttatgcctgggatcaaaactataacatgaatattgccatctatttgaacttattaacaggaaaaagtgagacatgaatgctattgcctgagcactatgatttttttctaatataaccaagcaggtgtcttttatataacaatcctcctaaataacatcatgttttggaatctcacgatgacagaaacaaacatctagggtataattcacaagaagaaggggcactagcatcctagaaagtcatcttgatatgaaactgaagtttttttctaatataaccaagcaggagtctagatataaaaatcctcctaactaacatcatgttttggcatctcacaatgacaaacaa

SEQ ID NO: 553 - DNA, 662 bp, Gossypium hirsutum
atatatgtattatgtaatttgcacacttgcctttttagtgtttgtttttggtcattttgttgatatccttcctcaaatatttgcaaatccttgttcaatcttaggggccaacagacaaacagcaggttgagaatgggacaacacttcatgaaggaaaggcctccaacaactttgaacagcagatgctccagtggcctgatttaaggcaattgtaaatgaactaagcctcattgactgcttcctgcattaaatagttgcgatggcaatcctttcccttgaattgcatcatcatgtactgccttattttttttctttcattcagattgtcagtcttggaattaggagaaaatccatcatcttccttgaatatgcagtctgttgcagctgatactgaggagattatgaatgttgaaccaagtactatattggcccttgctaagaatgctttgtcggcttctaaacaagctttagcattagctgaggacctcaaattagaccttgatgattcactttctaataggttagcttcgatcttttcttcctggttgcactagtgttctagactaattatactcttcaaagactgataactaatgctattgcagtttggggtcggctaattcatctacattgccagttgaggaggaggaagcacctacagt

SEQ ID NO: 554 - DNA, 736 bp, Gossypium hirsutum
  misc_feature (706)..(706): n is a, c, g, or t
  misc_feature (727)..(730): n is a, c, g, or t
atatatattggtccaatccttaatacagaaaataaatatttacaaggtaaccatgtccattaattttttttcccttttctcctttttttttctatcacaccaaacactaaggtcccatttcgccatggcggtgcttctgaattttccggggacatatccaaaaataatggtgccacttttaaggaaaaagggtggcaaaaatcaggttgcccgtggcggacgatgaagagaggaaatgatttattgggatctgatttttctcactattgctctttgaccagctcgcgaactttattatatagctcgagagtatcggcgtggttgggttcaagacatagggctgcttcacagtctctaacagtagatgcataatcacccatcgagtcatggaaagcagctcgaagatgtagtagttgcaggtctggcttgaaagctagtgctcttgtgagctccgcaatagcttcgttttctttgtgatcgtccattagaactgcaaaggcagaaacttcatgttcaggaccgactttataataacagaaataacagtaaagaacaaataacgagcaattattgtactccgaacttaaattatatgcaaccgaggtgaaggaatttacctgctgctctgtatctgtatggatatgtcctcaagggatctaattgagtagccatagcgagatcactctttgccatgtcccgatcaaantattctgaacgcttctcaaannnnaaaaaa

SEQ ID NO: 555 - DNA, 1406 bp, Gossypium hirsutum
  misc_feature (757)..(762): n is a, c, g, or t
  misc_feature (766)..(776): n is a, c, g, or t
  misc_feature (782)..(808): n is a, c, g, or t
  misc_feature (815)..(815): n is a, c, g, or t
  misc_feature (817)..(841): n is a, c, g, or t
  misc_feature (844)..(854): n is a, c, g, or t
  misc_feature (856)..(856): n is a, c, g, or t
  misc_feature (858)..(888): n is a, c, g, or t
  misc_feature (890)..(896): n is a, c, g, or t
  misc_feature (898)..(931): n is a, c, g, or t
  misc_feature (934)..(962): n is a, c, g, or t
  misc_feature (964)..(977): n is a, c, g, or t
  misc_feature (980)..(1093): n is a, c, g, or t
  misc_feature (1097)..(1102): n is a, c, g, or t
  misc_feature (1104)..(1159): n is a, c, g, or t
  misc_feature (1162)..(1163): n is a, c, g, or t
  misc_feature (1166)..(1209): n is a, c, g, or t
  misc_feature (1212)..(1212): n is a, c, g, or t
  misc_feature (1217)..(1220): n is a, c, g, or t
  misc_feature (1224)..(1230): n is a, c, g, or t
  misc_feature (1235)..(1238): n is a, c, g, or t
  misc_feature (1241)..(1242): n is a, c, g, or t
  misc_feature (1245)..(1246): n is a, c, g, or t
  misc_feature (1248)..(1255): n is a, c, g, or t
  misc_feature (1257)..(1266): n is a, c, g, or t
  misc_feature (1268)..(1270): n is a, c, g, or t
  misc_feature (1274)..(1281): n is a, c, g, or t
  misc_feature (1283)..(1285): n is a, c, g, or t
  misc_feature (1287)..(1289): n is a, c, g, or t
  misc_feature (1293)..(1302): n is a, c, g, or t
  misc_feature (1309)..(1309): n is a, c, g, or t
  misc_feature (1311)..(1313): n is a, c, g, or t
  misc_feature (1316)..(1319): n is a, c, g, or t
  misc_feature (1321)..(1327): n is a, c, g, or t
  misc_feature (1332)..(1340): n is a, c, g, or t
  misc_feature (1342)..(1344): n is a, c, g, or t
  misc_feature (1346)..(1348): n is a, c, g, or t
  misc_feature (1352)..(1364): n is a, c, g, or t
  misc_feature (1367)..(1382): n is a, c, g, or t
  misc_feature (1384)..(1388): n is a, c, g, or t
  misc_feature (1390)..(1392): n is a, c, g, or t
  misc_feature (1394)..(1398): n is a, c, g, or t
  misc_feature (1402)..(1402): n is a, c, g, or t
actgtacgtccactgcatttaattaaattgcaatgtctacccccccccttttttttctattaaacaaatgaagatatagtaaatcgattcaagaactgcttaaaacgaccattttcttcttctttttcttatatcaaatccacgatagtggttagaataagtgaagaaaaactagttgacaaagcaaagaaaaactcaacatgcagatcaaagaacaaagagatttaagggctaatgggggttgatcatttatcattgcatgatcaacttgccgtcactctccttccccttctgttgtggccgaagacatgtaactcatagcaagtgaggtctcatcatctggaccagcagctgttgatgtttggaactgatgcttgcaagtttgacaagtgatctgcatgattgtagcacttatcttctttgtggcttgatctttcaaggcttgagctttctccagttcaccttgcgcttgttgccttatcctctttgcactagcgaactcaagctcagccatctcgatctgcctcttagcttcttgtctagccttttcggcgtaggccttctcggccatggccaactttagctgcccacttgcgaactctttcaacctagtagcttccaatgtcgtttcacttgcattcttttcaccaccgtcgttggaccctatcgatagcttcaaatgtgtagcgtactcctcatctgaatccctcgagttagcggttgatgaaggtagaagttgaagttcagaatgtgttgnnnnnngttnnnnnnnnnnncccccnnnnnnnnnnnnnnnnnnnnnnnnnnnccccccncnnnnnnnnnnnnnnnnnnnnnnnnnccnnnnnnnnnnncncnnnnnnnnnnnnnnnnnnnnnnnnnnnnnnncnnnnnnncnnnnnnnnnnnnnnnnnnnnnnnnnnnnnnnnnnccnnnnnnnnnnnnnnnnnnnnnnnnnnnnncnnnnnnnnnnnnnnccnnnnnnnnnnnnnnnnnnnnnnnnnnnnnnnnnnnnnnnnnnnnnnnnnnnnnnnnnnnnnnnnnnnnnnnnnnnnnnnnnnnnnnnnnnnnnnnnnnnnnnnnnnnnnnnnnncccnnnnnncnnnnnnnnnnnnnnnnnnnnnnnnnnnnnnnnnnnnnnnnnnnnnnnnnnnnnnnnccnnccnnnnnnnnnnnnnnnnnnnnnnnnnnnnnnnnnnnnnnnnnnnnaanacacnnnnacannnnnnnacacnnnnccnncanncnnnnnnnncnnnnnnnnnncnnnaacnnnnnnnncnnnannnaccnnnnnnnnnnccacaancnnnccnnnncnnnnnnnacccnnnnnnnnnannnannnccannnnnnnnnnnnntannnnnnnnnnnnnnnnannnnncnnnannnnntttnatca

SEQ ID NO: 556 - DNA, 260 bp, Gossypium hirsutum
  misc_feature (28)..(30): n is a, c, g, or t
tttttcttttttttggggtctgatgctnnnggtgtccaatagttatatcaactcctgacatcgagccaaatcagatccctaaaggagagatagtgttgttttctctatccacaaaactagaatctgatagctttactcaaaaggacattaaattccatattactcgactcaacaggcataagtgaactctattacacttgcctaaagctatgcaaataaacggacgtcgtagcaagtatatcaattgtctttttggtttc

SEQ ID NO: 557 - DNA, 750 bp, Gossypium hirsutum
tcctcatcttcatgactggccaagatgagattgaggcggcttgttatgcccttgcagaacgaatagagcaactcatctcctccaccaggaaaggtgttcctaaactactcatacttccaatatactcccagttgcctgctgatttgcaggcaaagatattccagaaggctgaagatggagctcgcaaatgcattgttgccactaacatagctgagacatccttgactgtagatggaattttttacgttatcgatactggttatggtaaaatgaaagtctataaccctaagatgggtatggatgctcttcaagttttccctgttagtcgtgctgctgctgaccagcgtgcaggtcgtgctggtagaactgggccaggcacatgttataggttgtatacagagagtgcatacttaaatgagatgctgccagctcctgtgcccgagatacaaaggaccaaccttggcaatgtggtgttgctgctcaagtctcttaaaatagagaacttgctagattttgatttcatggatccaccaccacaggaaaatatccttaattctatgtaccagctatgggtcctgggtgcgcttaataatgttgggggcttgactgacattggatggaaaatggtggagttcccattggatccgccgcttgccaagatgcttttgatgggtgaacagctagaatgcttagatgaggttttgaccattgtttcaatgctttcagtcccatctgtattttttcgaccca

SEQ ID NO: 558 - DNA, 420 bp, Gossypium hirsutum
  misc_feature (373)..(373): n is a, c, g, or t
ttgttcttttggatgccaggccgatgttcttgccgctcggctcgagaaacgagctgcagaagggaagcatttcatgccggccacacttctgcaatcacaactagagtcgcttcacatagatgaaggtgaggggatatttaaagttgatgccaccttaagccctttaatcattgtaagcaaaatacaaacatttttgttctctgattttgaacaagccactgggaatagggattgttaaagcaatttatgatttctcgaattgcaatcgcttcagtgttttatcaaatgtaatgtatttgagtagtaataatccatggtatttatgttcaaggaagaccatcttaacgttgaggaagatcaaaccctatagagntgaaaggttccctctccattcacaatacttgtaaaaacattgaatct

SEQ ID NO: 559 - DNA, 510 bp, Gossypium hirsutum
gctagcaggaagctttataaacttgaatctcaactgagatccctataaataattaagcaacagttaggttaatatgaatcactctgatagcttgggaaaacatgaaaacaatcattttcactcttttataaggctaaaatcttaggatagcatgcgaattccttgttgttatagaagatgatttcacattagtattagagtatatggagctttatctaaagaaaagagataaaggaagattcaataaacttacgccattcgagaatgtcacttggggatggacgagcaacaacatgagaaactggttcctataagttcatagaataactgttaaaattatctgaaaaaaaaaatagaattaagttaaactaataacaatttcacattctcgcatcaacatattttcttatcgaatttattaatgaagggagtgaaaagatatccaactttcttttttgaaaaaaaaaattcaaagttagttaagcataaggctgaactgctgattgatat

SEQ ID NO: 560 - DNA, 668 bp, Gossypium hirsutum
gtcaagagtttcgtcgcgaaagtacggcctagaatgtgctatttgtttgggggagttcgtagatgacgatatgcttcgacttttgacgatttgtttccatgttttccataaagaatgtgttgatctttggcttgaatcgaataaaacatgcccggtttgtcgtggcgagctagacgtgcctaggaaatcgttagagaaatctcctgtactgcttcagagtaattccatgcatgaaattggggcaaatcaaagtcctctacaaaatgctgtttgcattgagattaaagaagataacaaggagaaagctgatgaagctcaaagctcttcaaccacaaaagaacatcacaagaaacgtgaaggagtggaaagattttttaggtcaaattccacaggccactccatatttagaactagagaagaagatgataaatatactctaagattgcttgaccatgtcaaaataaaaattttaaggggacataaagctgcaataagttgtatatcatttagagattttacaagccccttgaattccaaaaatgcagcttcaggtgaaacatcagagtcacttcaaggtgacttagataaagtataagttgatgtaggctcctttcttcaattatcttaggatattctaaatagaatttgaactcatgccttcctatttc

SEQ ID NO: 561 - DNA, 749 bp, Gossypium hirsutum
  misc_feature (8)..(8): n is a, c, g, or t
tggaaacnagatgtacaggtcataggtatatatctatcctagctcagtcttcatgtggctaccactaaattagaacttcaattgttttggttgtttttccagggcaaacagatatcttagaaaataacattaataaggagattccgaaatatgctggaatagaagttattgctagccttatgaagcaagcacttcgtttagatgaaaaaggtatgtctaccatgagtaaaagaccatataaataaacttaagcattttcctgcattgcaactgaaactggaacaacagtagctgcaataacactgtttcttatttctgcaacagtggcgtctctgcaacatcataatcccaatttagaagataatgaagttgctggtgtcaagcttcctgaatcaaatgtggagcatgcagttaaggatgccactgaaatacgtcaaacaggaaaatctgcctgtgatcaacagatggagttggtaaaaggttgtggatcccatggaatagcaagtacagttcatagggttcctgatactttcaagattcatacagatggacattcttctttggaattagatgattgtgattacgcatcatctgatagtgatgaggtattgcctggaactgcatctggcagcgtgcatcgaagaaaaaatcgtaaggtgcgtctgctgaccgaattgttgggtaaaaacaaagatgaaaaaactaatctcacgagtacagaggattctccttctaataccaatcctgat

SEQ ID NO: 562 - DNA, 721 bp, Gossypium hirsutum
  misc_feature (671)..(671): n is a, c, g, or t
  misc_feature (673)..(673): n is a, c, g, or t
  misc_feature (675)..(675): n is a, c, g, or t
tttccattatgaagtgttgcctgatcagccagggctgaggaaaaaatccaactgattcaaactgtaatggttggatcagtttcaaatcggataattatgtattccgatttgatttttggtttgcaagcatgtttgagagaaaccgctccatttcatgcttctttaaggccaagccaacttcaattgccctacttcctcccatctctgctttcagccatggaaatagcttcattcttatcaatggaaacaaccaccactttccagggcctttctaatccaaatcgaggcgatccagcaactgttataatttgtacagatcctgctggctccttgaatcgaacaaagtccctcaaaaatccatttctctgttaatcccttcaccgtattgttgtagcaaatgcaaaccccgttttcgaaatccttaaaatctcttaacaaatatacctttcccctcattttattgaaatcttctggagtaattgtaactgcggctcgaactagattaggagacgctccttcgtctgttgaaagctttcaagcttttattaccaatagtaattgttagccactggttcaaatacagcacatcaaggtcaatcaaaccctttaggatcttcgatgatgtcatgtccctaaaaaaaaagtggagttacttctggtagcaacctttnantnttctttagtccctttgcttgcacgtgtaagcccaggatttcataaa

SEQ ID NO: 563 - DNA, 555 bp, Gossypium hirsutum
tgaccagctccctcattggaatcccgaactgcccaaacccaaaacgatcttgcaagctcttcgaatacgcaggctacgacagtatgtgcaagcctccatttctctgagaataaaaatgatgccattcaagtgcacgcccctctagattcaatattaccagacgaaccttattagcatctggtgtaccttctgcctcaaaatattgtttcagcttagtccaccgccccctgaaatcaataccatcaaacttgaggcattctaacctgctacatttccccgaaactcccgatgcaactggttgctctctcacgtgtacactaccctcatccgtaacaaacggttccggctgagcatggggtggatcagaatatttaggtaaaaacccaggagaactcccaaaaccccttttcctttgtccgctataacatttgccgatgaacttgtcggcggtggtctaaaatactaacccaacaatgcttgtaaatctccacggaactcagttttgaactcctgcagtcgagtttccattttggtctcccaatgagctatttcctc

SEQ ID NO: 564 - DNA, 468 bp, Gossypium hirsutum
taggtcgagcttgtgaatgggagttcaattgtagatatgagaaaatgtaagaggaagatgattcaatgaacgtaatgagcagggcttatttggatatagatttttttttgaacaatttttctagttttatatattttgattttttatattattatatattttaaatttttaaatttattttttttaaattctgacatcatcattgccatgtgtcttcattttagagtaccaagtgtcctaaatttaacgttagacccaaatatcaattttcttaacaggaaaaaaatttgggtaccaatcaagaataaaaaaattataaatatcaattttggagaaataaataagtttgagtactaattttatatttaatccatatttttattacataaactctttccatctatattatggttatgctataatctaatacgatataatgtaactaatagatttggtttcatgagtccc

SEQ ID NO: 565 - DNA, 640 bp, Gossypium hirsutum
cagtggaaggtgttcctcttgctttatgccaatttcagggaagattacttgctgggataggatcagtgctccgattatatgacctggggaaaaggagactgcttaggaaatgtgagaataagcttttccctaacactattatctctatccaaacttatcgtgatagaatatatgttggggacatccaagaggtatggtttttttaattttccttgattctgatatctttcactcatttctttgagaattatttgtattactcgtatgcatgtcttctcttttgctgcttgacctgtatgtggattttgtgaaaattatcaactaatttaatttagaatttggctgaaagtaaggaacttttgcaaggtctttttaatgctcccttggttcttaaattatagcccactttgattttattcattcctctgtttgctttctttgtcaattattcttgaatgataataaaggtggtcctctattgcagtcattccatttttgcaagtataggagggatgaaaatcaactgtatatattcgctgatgatgttgttccgagatggcttactgcatcataccatatagattttgacaccatggctggtgcagacaagttcggtaatgtctattttgtgcggctacca

SEQ ID NO: 566 - DNA, 681 bp, Gossypium hirsutum
atctctcatacttaaaaaattacataagtacacttcctaggagagatcatgattttcttcctccgcttcaaagggcatctaacatctaattgaacccgaacacgtaaataatttttcattcccctactcagttgtttcatatcatattccaagaatctaccaataaatttccaagtcgtttcattacattctccgaaaaaaacctcgacggtagatcatgcacttaaacccagaatgatgagaaaattaaagacacttgcataaggtctttgttctcctcgagtcgatgcataattaataaatgattattgaaagtccacagagcctcatttatcactcgttcaatgtccatcttataaaaaaacttaaacaaatatctcatttccctcagatttgagatctaaacaccccctaaaggagccaaaggttcgccttcttactcttcattgctggaaaatagactacgcttgttgtaaggaaacaatgcaataacatcacctcttctttcccatctaacttcaacccctccatctcattctccatgactatcaccttataccacccgaacaccaaaataaaccccggcagaagaaaataaccgactgactactcaaaacaaaacagaacaaaaaaaaacaaagaacacaaaaagtctgagacgtgccaccagtagcataccaa

SEQ ID NO: 567 - DNA, 681 bp, Gossypium hirsutum
atcatccaaagaatggaaacgccaacttgagcttgaaatattactgattaaaattgctattagtccatgtacttctccaaaatttaagatttagtccctgtacaagtaaaaaattcaatccccttctttttcaatctcaatcattattgctgttcgtaattttttcaaaattagtcaacttaacatatttagtttttgtcaatcacatgcaatgtcagatgatgacaatctaatcaatatgccaagttgacatattcggtataatcttgatcaccaaaatttacgaaaaacaaaataagctaaatgctcaatttatattagatattataattattgaagtttattttttacctaattattatttagatactacttatccttaaacatggcagttattaaactttatttttaccaaattaatatttagatactactttataatttatatcaatttacctaattaaactaaaaatattactaaagttatcataaaaaattataaattctataaaagaaataaaattaaaaaaaaagaattttgaaaaactttgggggccaaacacaaatatatctcttcttagacactaattataatatcaaaataaaaaaaaatttaaaactcaaaaacacctaagatttttttttacaatacttagagggttagggtcactgctaactttg

SEQ ID NO: 568 - DNA, 454 bp, Gossypium hirsutum
ggcgctgatgatgttccaaaagacaaggaagtgggttttgacacagcagagccagacaatgtgggtgcaggtgttgatgatgaagctgcattgccaaatccatatgcaggttgagaagctgaaggcgaggcaaatgagaagcttgaagagcttgatgaagcagcagctgctaaagaaggtgctgtagtataggtggatgttggtgttgaactagcagtgctcttcaaaaatggtgaactacccccaaaagagaatcccgtagaagaagctgtgctcgatgatgataagcttggaaaagatggagtagtagctgtagcagtagaaggtgaacataaagaaccaaaagagctcatagcagcagtagtggtagtagtggtagccggtgcttgtgaagatgaaaatagaggggaaccactactggctccaaatggggatgaagatgtcccaaatgtcc

SEQ ID NO: 569 - DNA, 658 bp, Gossypium hirsutum
  misc_feature (505)..(508): n is a, c, g, or t
  misc_feature (583)..(586): n is a, c, g, or t
  misc_feature (593)..(602): n is a, c, g, or t
  misc_feature (605)..(605): n is a, c, g, or t
  misc_feature (608)..(610): n is a, c, g, or t
  misc_feature (613)..(617): n is a, c, g, or t
tgctgaaaccttctccagaagcagacaaggccaatgcttctgttcaaacattaccaaatgacaaaccatctcctgatggctcttctactcctttgttttgttcatcttgccaaaggaagtttgaaaataaccaccctgatgaggttcgggatagcttgaagacatggattgtaacggttgataaccaacagagagatggcgggaacacagtatgttcaaggaaacattttctcttttatggtttgcttgttccatacttattagttttttgttgcttccatttcaggtggaagaagcctccataaaagagaaaacacttgaaagtgtttgtaaggagcaagcagccaaaattgagcagttaacccagctggtaataattttattgacctctttagtctttagaaataagaacatgcataactggattaaatctgatggtttaaaactactacaggtggaaaaatacaaacttgaaagagaaatttctggcattgaacatgctcannnnaaaaaatgaggtataatttcctgacaaatctgcctaaaacttgaaagagggacagaactgcacggtcattgggannnnggattgnnnnnnnnnnaantgnnnttnnnnnttcccaatgtttgcctgaattcacattgactattgacatta

SEQ ID NO: 570 - DNA, 727 bp, Gossypium hirsutum
  misc_feature (616)..(616): n is a, c, g, or t
  misc_feature (703)..(703): n is a, c, g, or t
catatcacctggtttttgtacaactaaaatatcaaaatgttgcattaccagtgtgatctcggatagcaaatttgcttagataccattcaaatatgtggagaatgaaccagataagcaaagcaaaaagatttacataagcagcattccgataaacaaacctcaacgaagaataagaagccgaaggtacatgcacgaacaatatcaactctttcgatctgaggatggtgccttaagacaggatacgtaagcttctgcaatacttcagggggagcagattgtccaaccaaggaaactataggaaaagatgcaagtgtggttatgtaccctattggactctccaacttacaagctaacttttgatgtttttttttttttggccctggggaatttttgaaaggggggggccgggggggtttcaaaaccccaaacaaatttaaattaaaaaaaaattttcccgggggggggggccccccaaaattggaaaaaaaaaaaaaaaaattggccccggtttttccccccaatttcccaaaactttttttttttttaaagggggggggggaaaacccccccggggggcccccccccccaaaaatttttcccccaaaaacggcggaanccaaccccattaatttggcccccccccaaaaaagggggcccggcaaattcccacccccccccaaaaagggggtttaaaccccccccncccccttcaaaaagggggggaaaa

SEQ ID NO: 571 - DNA, 579 bp, Gossypium hirsutum
aataaacatgcataatatcaattttttattaaattcattaatatgatatttttagataaaaaatacccactcaatagccatacaatagaaaaataatactataaacttaaatttaatataaaaattttaaagatattaactgttatagttatatttttatatctgaaaaataaaaaaaatttaaattccattctaaatgaataaaatgtgtaaattttcatgattttcttaagtatacgtaccagccataaaggtatttctccttgcacaactagctccccttcccaccgttcttgtctcacactcgtccatgcaacgtggttccgatcacgacggtctacggtttcgttatctagcgatggaacaatcaccggccgacgcaacggactcgccacttgagtgattgttaaccctcccttctccggtttcctaacaaaaccagccttttctattctatgattggattgattgaaatccaacatggttatgggtgaaaactggtgcctgcaaatacctgaaagtgatagggaatccatctgagagggagataaagaataggctcaggtatatgcagctgaa

SEQ ID NO: 572 - DNA, 681 bp, Gossypium hirsutum
  misc_feature (673)..(674): n is a, c, g, or t
  misc_feature (676)..(676): n is a, c, g, or t
cctaatgaagaaaagaatcatgatcttttctttttccaggatcaaagagcttctaataagttaaaccaataaacacaatcataaaggtttgaagttgcatgcaattactactgtaagatcccttttaattcatgactatcatggtttttaacgcagagggttgattttgagaatattagcacacatatcgtaatgggtcataacatcttacagaggaatgtagaatacatcctatcttacagaaagtaaaatgactataatggtaagtttcaaagaataaactgctcaaaaggtttgtttgtcactgctttaactgaccggtctgttattctcaattatttctggcttaggaagtatcagattttgataactgaatttgccagagcttccaggaaaagtaggtgtcaggtttctaggcataagtgacagccccttatctgatttctctggttgacatttcaatatctgaaatggttgctgatagtttagtgcctgaaagagtaaatttcaattatatcccaaaacaggtaagctagctcaactacagaactgctagtggaactttaagcacacttctattttacacttggcaggacttaatctatgataccaaaaagaataaaagattggtgcttgcaagactccaacaaatattaattaacatgccacttanntncaaag

SEQ ID NO: 573 - DNA, 716 bp, Gossypium hirsutum
  misc_feature (685)..(687): n is a, c, g, or t
  misc_feature (700)..(707): n is a, c, g, or t
  misc_feature (709)..(709): n is a, c, g, or t
  misc_feature (711)..(713): n is a, c, g, or t
aagatgaagtggcataaacatcatagaagctttccccaaaaaattgtaagatttgatccaagtaaaattcatccacaagggacaagctttgctaattataacaggcttacaaggcaaatgcctgtaaatcaacaaaggtaaacaactcaataaattcagggataattaaggcttccaacagttctagtttctgatgattttaaaataaagttaagaaaaatttgttgcagttcacgagttcatcttcatgcgttcacaacaattgtcaagaaattaataatcaataacatcataattcctcaagaaaaccagttcatatttcttttttctggatgcatattcagtttagacagttcactgaaattctcagttctctaagttgatgcagtgtttcagcaaaattcgtctaaatttcaacttggggtcctctaaaaacatctgtccagtaaattaataagttcctgagcaattttaacataattttctgaactttttctttgtttccctctggggttttagttttagctcagtttttcttttcttaatactgggtttttgttgaagttgtaagggcaaattggtgggtgggggctataccttgttgtttctgatacattcagagtgcaaaagatgaagccgaggcatatcttcagaagcagagtagctgctgtcctttggtggttcnnnttttgaagcaaannnnnnnntncnnngta

SEQ ID NO: 574 - DNA, 683 bp, Gossypium hirsutum
  misc_feature (19)..(19): n is a, c, g, or t
  misc_feature (575)..(576): n is a, c, g, or t
  misc_feature (587)..(589): n is a, c, g, or t
  misc_feature (591)..(591): n is a, c, g, or t
  misc_feature (602)..(603): n is a, c, g, or t
  misc_feature (621)..(626): n is a, c, g, or t
  misc_feature (632)..(634): n is a, c, g, or t
  misc_feature (636)..(636): n is a, c, g, or t
  misc_feature (662)..(663): n is a, c, g, or t
  misc_feature (666)..(670): n is a, c, g, or t
caattttacctcaactggnacaagtcccaacatcaataacaactgcacccggcttcagccaactgctacgaatcagactaggtaccccagctgctgtgactactatgtcagcttcgcatgtgatcctttcgggattcttcgtgcaagcatgtactatggtgacggttgcatggtgcctctgcccaacaatttcagtaaaatatgcttacttagtaagataacaagtggatacagttaaacagaaccagttcttaaacctatgagaattataggaaaataacttagaaagaattaaaatacaaatattctcaataaacttttggaatataaagatttacacatatcatcaacatggacactggagaaatgtgtgaatatagaatataaagatctattttatcttctcattggtcaaaactatttttatttattgctcaagtagtggatactacgtatctagttaatacatagatcgatccctgaccattctaagataacaacaaagtaatatcaacgaaagaaaagcaaggcaaacaaataaatttaggagtaaaaaaaaaaaaaaaaaaaagganncccccattttnnncnaaaaggggttnncttgaaaaaaaaagggtnnnnnntggggnnnangggagggaaaaaaaaaaaaaaagggnnttnnnnnggaaaaaaaaaaa

SEQ ID NO: 575 - DNA, 667 bp, Gossypium hirsutum
  misc_feature (581)..(581): n is a, c, g, or t
  misc_feature (583)..(595): n is a, c, g, or t
  misc_feature (597)..(600): n is a, c, g, or t
  misc_feature (603)..(606): n is a, c, g, or t
  misc_feature (608)..(608): n is a, c, g, or t
  misc_feature (610)..(614): n is a, c, g, or t
  misc_feature (619)..(620): n is a, c, g, or t
  misc_feature (622)..(625): n is a, c, g, or t
  misc_feature (634)..(640): n is a, c, g, or t
  misc_feature (643)..(646): n is a, c, g, or t
  misc_feature (656)..(657): n is a, c, g, or t
cgattggctcaagtgagtatggaactggctaggattgaagccagttttagtggtctgtcacctggaaaacacggttggtcaattaatgaatttggtgatctgacaagaggtgctgcaagtacagggaaagtgtttaatccatcaaatgaaggaactgctaaacaggttattttcccaacttctgcaatcccggatttcatatttttctttttcacataaatcatgaagtgacctcacatgcgaccctttgcctgtgtatttttatatttcattttctaactgtgagttcgcgcgcatgtcagtttaatttcatttagtaagtataaagtgcaagtttgagattcaaagtagcacttgtgttaaagatgcaacttactggttgatggacctatctcaatgctatctgaagggcacaactataatgaagggcatggtttactgctgccttaagattttttcaaatgatttacttgatagcgaatttgttctgttcataattttagagttctgtaatgactgaatatatgcttaaagacccaagtgtttttaatcttgctttgcagacttctttgttgagaatncnnnnnnnnnnnnngnnnntannnntncnnnnngccgnngnnnnccttttctnnnnnnnccnnnntatttttctnnaaggaaagac

SEQ ID NO: 576 - DNA, 646 bp, Gossypium hirsutum
cattatcgtaccctgcaagaagataccagcttcatatattactggtattttgtggtacatctccaggaccaaaatagtagcctatttgttgtgattaaatatcccagattcataagcaaacaaagcatttctttatttttaatctccctatgccttcaaacctttgtattctgcattcaaacgcctatatattaacctttttacgagagtaatccttcaactccaagcctacatcacagcagcaatggactcttctaagcttctcattgcccttttcgttttccaggtttttttcccttaccatatgtcaatccaagcagctcccgagaactcggaccttttccgagaatacataggagctgaattcaacaacgtgaaattcactgatgttcccattgattcaaacgttgaattccacttcattctttcatttgccatagactatgacagcacctcaggttctccttctccaacaaatgggaagttcaatgtcttttgggactctgataacctcagtccttcccaagtttcttccatcaagagcacccattcaaatgttaaagtagctttgagcttaggaggggacagtgtgggagatagctatgcttacttcgacccttcctctgtagattcttgggtttctaac

SEQ ID NO: 577 - DNA, 772 bp, Gossypium hirsutum
atctctttccagctttcctctatcgaaggtttatttgagtgttaggctgttgttgctttcataagagtcgagtatgatcctgtgcatttattttatgtttgtaattcagtggagatatgtaatatagagagacaaaatcagagttcaatttcaacattgagaagttcatataagacaaagcctttcgacatcatctctccacttctatttccccctattgctgcttcttgttgtaagttgtaaccatttatgatgtcaagatcattggttttcttactccaaataaagaggatttggctatggaagcgtggccataatgtgacgttttccttgaatttagtttaaccttttttataattaattcaataagccaaaaagtagaacctgatagaacttatagcatagcaatcttctatgatctgatgtcagatatacaaactgaaagcatcctcaatcttctggcaagtcttcacttggaaatggagtaaaaaggctttaaatcctttaaacttgcattgtggaaacgatgataaacataaaagtatggcagatggattccaattgttacatttaccaacaaggtcgaaaaaggaggaagaaaatttagcagcttttatcctgaacagctagacttcgaaatggagagcaactacatatgttaataccaagaacagtatgaaaaattagtgcgcagaaatcaactatctttatctacaaccgcctttgctaactaaactttctgcagagaagcaaacagtgtcgaagcaaatag

SEQ ID NO: 578 - DNA, 615 bp, Gossypium hirsutum
  misc_feature (40)..(40): n is a, c, g, or t
  misc_feature (45)..(46): n is a, c, g, or t
  misc_feature (48)..(48): n is a, c, g, or t
  misc_feature (551)..(557): n is a, c, g, or t
attcccctggcttcaactccaagccaaatagaagatgagnccttnnantcagaacatcatatggttataatgttgattgcaagcattgggggatccttgtttgttttggttttgttccttggcatattcctcttccgaagcagtaaggtggttactgtcaaaccttgggccacagaattgagtggtcagctgcggaaggcatttgtcacaggtatctttcctttttagcagactactctccatgcatttcttttttctttcttctataatctctctccatgctttctaagtgtctgtggacctagtaaaaatttctgaaactttctgtagatcaacatagcattcttgtaagcaatttatattgaaatcttatgcaaaaagaaactaatattttcaccttttggtacaaaattttggattggacttctcctttggtgaaacaaggttggagttttccaacatctctctatcagcatagtctatagatctgcatttctcttgtattaacgtctgtatttcaggtgtgccgaaactgaagcgatcagaacttnnnnnnncttgtgaggattttagcaatataattggtaccttttctgacggtacagtctacaaggg

SEQ ID NO: 579 - DNA, 761 bp, Gossypium hirsutum
gagagccaaacagcaaaaggagcctcgccatttaaatggctgaacaaagaaacatcatttgtgttactactaacagcattgctttggtccatcatagacccacttgcagaaacccgggagtccacatggctgtatgaattatttaggccagctttgcagagcacgtcagccctagaatcccccaaaaatgctgaacttgccattgaagaaagagcaatacaaccgttacttggggaagagttcctccaagggatgctttcttgcagattattactcggcagctgctcattacttggtgggaaattggataattgaacagtgccctgccagttctcactgcatctaccatgttcaagacaattagaagaaccacgaacactcaggtcattagattcccgattcagtgatgtcataccaaaagagggtagattttcaaatgcagcactacattgcacctgttgcgtgtttccttgtaacaccaaagcgttgcctgaggcagttgacagagaattgcttgagctaccaaccaccactctagcatctgggaagctagaggaaatacgaaaaacattccgctcatcaacacaattgtatttaccaaagtgattagtggacttggtctgcgacagttggttgagctctatagaagccgtgatcccttgaaacaaaactccattttgattctggtttgcaggaaataccacaggctgaatctttcgaagaccattaacagaatttccgggttgaatcacaccagaaga

SEQ ID NO: 580 - DNA, 782 bp, Gossypium hirsutum
gcataattaagttaaaaggactacctcatctcatctctccttcaaaatcaatataatgaaacaaagacaaatataagtttttatatatatatatttctcaaaccatgaattatccattatgttcaaacaaatgcaaaccatatacatcaaccaaccttgtttaccaaactaaaacaaggaaaaataaaataaaaacacaactgagatgagatacatgccaaccaaataaaagaatgttgacctgccaagtccaactctccttgactactacatgtgatacattacaaaagccagtgacgctaggaggtgtggaacctaaaaaatcactctttcaaacaatcagatattaaccacgacatgaaaaaaggcaaatgagataaggcaatccaagctataccaagaaaaccacaattttcgagcggaagtgaagatcaaattcaatgaaggcattagaatgcaaaagaacaacatacatgcattcattctctagaataaatcaactttcttcttcagcatgtcttgtttccactttggcagtttataaaatgcttctttttccatcccaaatacggcctggaactcttcatccgacaaataagcctgagaagttgatgagtgagaacaagaatatattgaggaaaagttaagagtgaacttaaaaatataaatggtaagacaaacctctctccgtttgaagtcaattccagttacaggattttcggatttcgccttcagttgctcataactgaaagtactttgagtgcttccattcccattctcat

SEQ ID NO: 581 - DNA, 842 bp, Gossypium hirsutum
  misc_feature (766)..(766): n is a, c, g, or t
  misc_feature (780)..(780): n is a, c, g, or t
  misc_feature (793)..(803): n is a, c, g, or t
  misc_feature (809)..(811): n is a, c, g, or t
  misc_feature (815)..(824): n is a, c, g, or t
  misc_feature (833)..(835): n is a, c, g, or t
gtttgggatggttattggtaatgacacttaagccatatttctgaacacaaaatgatgttttcatatgaagaaattctaatcctgaaatagccatgtaattaagtggatgatacgaagattaaagttgaaaatttttaacaaattttattggtttgggatggttattggtaatgacacttaagccatatttctgaacacaaaatgatgttttcatatgaagaaattctaatcctgaaatagccatgtaattaagtggatgatacgaagattaaagttgaaaatttttaacaaattttattgttctggatggtcaatgcagatcatgctctgaccttcagattcacttctagtttccacttttctcccaaacatagtttggtcctctactatgctgctgaaaggccagtgaggaaagattctttactggaaaagtttgcagatggaacggatcaatttcgtgatgcaagatttaaactgataccaagcattgttgaggtatgaaattgtatattgtaaacatctcacctagttgttatctattgctctaatgctagtgaaaagctcagttgtttctaaatgttcaaaggggtattgcatggtcaagcgtgcatgatgcaagatttaaactgataccaagcattgttgaggtatgaaattgtatattgtaaacatctcacctagttgttatctattgctctaatgctagtgaaaagctcagttgtttctaaatgttcaaaggggtattgcatggtcaagcgtgcagcanattttcaataaaanatatttctcactnnnnnnnnnnnctagcnnnggannnnnnnnnnttgggagannngaggaaa

SEQ ID NO: 582 - DNA, 371 bp, Gossypium hirsutum
gaacaaaaaacaatccaaaaggcctcacatccggatctgagatcaatactcatctagtaaatcgggtaactttttgtgagattcctaggagtcaacaacacaattcccacgaatctaagagtgggtttcccagcaaggaagcttatatcaagaggattgttcattggatccctgcttctcaattttctgccaaccaaacaaagtcaaattcagatctcagtttaaagaacttcggttctgcacgatagcatgacactgtttcggtagctaaaaagattatcactaatagcatgcacttattcacaagcaaattaattttttgttaagaccaatttggttaaaactgaaacttggagctgataacatacggg

SEQ ID NO: 583 - DNA, 662 bp, Gossypium hirsutum
  misc_feature (65)..(65): n is a, c, g, or t
  misc_feature (594)..(594): n is a, c, g, or t
gcttatttcactcggttttttgagcaccatatgctccagtaacatcaatacatctgcaattttcngatgcatattttgttaccctctagtattgcacgtgtccttccagtggtcaaaataatcttgtaaaaataaaccaataaaacaattaaaaatttaatcacccgggatcttacacattgagatagtctggaggtatggatgaaagtccatcattcataatcacacgcaggctctatatagtaaaagaaaaagttaggtcgaacttactttatagaaccaaccataatatcagcgtgtgtgtgcttgtgtaacaaaggaaagacaatttcacaaaattaatatgaatttccccaacatttctcaggcaaagattcacaaacctggaaacccagagtgacaagatccttttcagatgcgtctgcgactgacctaaatgagagaaaaagaagagatgagtgacaaaacagaaccagataaaatgaagtaaattatcacaaatctcacaaagcgtaacaaccccccccccccaaaacaaaaaaaaaaaagggaaaaaaaacccaaaaaaaaagggaaaccccccaaatttaaganatttcgggcaaaaaattcccaattttttcccccccccttgggaaaaattttttaatttaaaaaaaaag

SEQ ID NO: 584 - DNA, 789 bp, Gossypium hirsutum
  misc_feature (767)..(770): n is a, c, g, or t
  misc_feature (772)..(783): n is a, c, g, or t
ctatataataatttagtggtttacaccctttgtcttgttactagtgttattacctgattttttttaccatatcgaagagctgttgtagcaatatagtgagtgagtaggagagtatactgttattagcgtgtaacattgtgatatttgacattttaacgctggttttctattcatgttgtcccatgagctgatacagtaaaccctatttataataataacattcccttttcatctataatagcaacaattctttactaaattaattcttatatcaactccttgtcccaatacaatataaatctcactaactaatatcattaatgtgttataatttgaatcacaaatactattatagatctctaacaaccacttcaatgagaacgtattttgcattttcaagctgattcttgactcatgcttcatcatcatcgctttagccagatttgtaaagagtccaggaaaaaagggataaaaacaatgtttctggcagaaggtagaaggtagggattagtctattagatataaaaactcccaacccagaatccaaatttgatcgatggcagtaggtgagacaaaccccccatcttttattgccttaagactcttgacactgtattttaataagaaacaaatcatttttacttctcccaatctctttgaaattcacaaaccgaaaaagctaaaaagcttcaacttgagtataaactatgtaccatgtaatatacttttggggctttcacttgtacatgattttaggtatacaacannnngnnnnnnnnnnnncccccc

SEQ ID NO: 585 - DNA, 764 bp, Gossypium hirsutum
gagggaacaatctacagagctctggcagctgttgagcgactaggggctgatgccacaatgtcaatggcttccttatttgaaaggacgtcccaaacctgcaccaaagttaaaattgagttcttgaatttatatgaacttcaaggggaaaaaaaggtaaatatatacatacatatgtataaatgtccttacaatggcgggtattttcaacccttatctaacacaaaataaaacttgccaactgctttgcctatctaagaacattgccacatggtggcaacataaagataatatgtcgaaacaaaggaagagcatttataaatggactcccccgtaggctataatgaaccaggaaaaaaaaaaggtttcagagttctacacaattttcaagcaaacttgattgatgtactacaaagatgaatataccccatcagtggcaagaatgacaaattcgtctctttcagtaaggcggcgatagaaaacatctgggacagaaatcaacccaaaatccttcagacagaagtccccaaaagctctagccattgccaaaccaggtgagtcattattgggcaaccatacacgtgcaacctcaggctcatcttgcaaggcaaagacccttcccctgcattgctgaattctagcagcttcccctaaacataagtgttgcaacaacttattagttcaagagagagaggggagagagaggagataaagaaagagagagaaggacttggcagatcaggcttcaggtcaacagtcaatgacag

SEQ ID NO: 586 - DNA, 679 bp, Gossypium hirsutum
  misc_feature (524)..(526): n is a, c, g, or t
gcgattcgaaaccttgttgtttcaggtactctacttgcatttcttcattttcttggagttgtatattttctgtcactgatgtcaacaattggaatagctccgttcgctagagcatacagcctgtaggtgttaaccacaataataatagaaaaaagaaagggaaaaaaaaatccttcagtgatcattgcattctacaagctttcatgcgttaagctggcgtctttatatatctagttcccgcaaagtaacctgttctatcagagtatttgattcttgtctttatctttttctttgtttttgtaacagtgggcgaacagtctttgccaaggagctaatctgcctcttccagtgcctttgaaggtttgtcattgcttcattggtattcttattaccttgaagttgttttctttttttaccgctaattgggcaagcacacatgttaaatatgattttttgtattcgttactaggcataggcccatccatatccatcacaaccctgtactctaaatagataatatcaannnaaggtgatacaggacattagttaaaattttatgttgtttccataagtcgatgaaataattgatatattaatgcagtctactcataatgctaagaggacttgtcttcaactctgtttcagaggaacattaaatgtgtgcatcactaataaaaga

SEQ ID NO: 587 - DNA, 717 bp, Gossypium hirsutum
  misc_feature (713)..(714): n is a, c, g, or t
ctggcgaatcccttggtaattgtttcagctgctattgtttgtatcatcttactggtatcaaaacgtaagcaaaagtaagggtaaggttatgtgaagttagtgtgcgactgtgatcggtcaattcgtcaataaatcagtgttgcagtgttatatttgtaattagcaaatgtgagtttgagaattgtgttacatcaattcatctttattgaatctaacaataataaggttgtataaataatgagatcctctcttctgagtattagagttatattttctcagctgttcctttcctttctttctatcgtaactcacttgatttcttcatcatttcaacacaaatctgtcatagaatcactctactgtcaatttaatgctgcaatattttttaggaaaatctcgccaggacgcttgaagacctcaaagatcaataataaccacaagtaacaaatcaaatgggatggattctttttatgtgaaaaactcctttaaaagcacaaggtaaaaatcacatgaccataaatccactcaaaagcttcatttatcacacaaaaccacaatgaagaggagcatataactccaacaaagctatatcaaaagtaatcaagcaaattgtaaagcagacttttaaactgaaaccccaaaactacacacccacaagaaaatctaaccatatgcaatcaagatcttccgagtatactattcctgcctaaaanncac

SEQ ID NO: 588 - DNA, 679 bp, Gossypium hirsutum
tcctgaagaggacagttcatctgccaaatacattgaaaatataacaattccatctgcccttatcgagaaaacttttggtgaaactctaaccctgatgatcgtgacgagtacgagttatggaccaactgcaatgatgaacgtggagttaaatgtgatatgctgatggcatttgtgaaggatttcaagggtgcttctcagattctcgaaaaagctggctatacgcagttcacaccccattatataacttggtactgccctcaagctttcaccctaagccgacagtgcaaatctcaatgcatcaaccgcggaagatactgtgcaccggatcctgaacaaggttttagctcaggttatgaagggaaagatgtagttattgagaccttaaggcagctttttgttttcaaagtggcaaatgatactggtcgatcgtggaggtactcttttttctgttttctttttttttcaaaattttcgccttataagaaaaattaatttgtggttttgtttatttgagctataatttgtttgttgtagggttgaccgatgaggaatttttgtgttgttttagctaatttgagtaattccaaattggggaatttttaatattaggtttaaagttcaatttgttggatttggtttatttatggggcaataatttatttgttagtttgggatttga

SEQ ID NO: 589 - DNA, 426 bp, Gossypium hirsutum
ggtgaagaggctctcgaaaagctcgaatcaagggttcgaggagttcaagaatgaggtcactcttacagctaggcttcaacatgtgaatctagttcgagttctgggaatttgtactgagaaggaagaaaaattgctggtttacgagttcatgccaaacaaaagcttggatttctacctctatggtaaacaatgcttaattttttcaacttagtatgagtgttaagacatttttatggcatgttatttcataaacttcttcagcaaaacacattgttcatgcacttaaccgatgcagatccatttaaaaggcatctgttagattggagaagacgagtctcgataatcgaaggcattacacaagggcttctatatctccaagaatactcaaattacactataattcatcgtgacataaaggcgagcaat

SEQ ID NO: 590 - DNA, 587 bp, Gossypium hirsutum
tatattattcatgtctataaagtttgtaaaatgattcactttagtttatgaaatttaccccttttttaggtcaagattgtatattaatgaactggaatgtacttttccagccatctcgtttcctcttgatgtctaagtcgttactcttccatatccaagtctcttctatgagaccatttctccattttgctggtttttcttatagattatattccagcctttattatctttacagatatgctgatgttctgccattcagttgagacaacttactatttttgacataacattttgttaaaaactccgtaggattagcttctttttaccttttcttcttttcctctgttatacaaatcattttttaatgctttgaaactgataggttgaggaggagattggtattcgattgaaactagaagacatggttgacctcactgcgttccttgatccatctactggattcaaagtttttccttctccagtatgttggcagggctgatgagtgttctttccgtacttaactgcgtataattttgattatctaattatggatccatgatgtgcactatttgcttggaatctttgca

SEQ ID NO: 591 - DNA, 673 bp, Gossypium hirsutum
  misc_feature (64)..(64): n is a, c, g, or t
  misc_feature (614)..(614): n is a, c, g, or t
gaactcaatgataaaacagagtctgaaccaagccaaaaaaaatactctccagttgaaatacaangtatattcttgacaaatacttccaagtagtctctgctgccccccaacccccattttaaaactaaaaagaaaaagcatgcaaacactacggaagctcaactttcttgacaccatggaccctacttccctattaccttttgtagtccttcaccctttcatcctgttgtcagtcaatcttgtccacctcccactacttaacacccaaactctctagccctgactgaaaccttagaggcaaaagaaatttactacgggtaaaacaaaaactggtaggacttatctaagcctcttccctccatcatctacataataggacttatctgaaccaatatcttaacaataagaaggttcaacattgcaaaaacagaaaatagcagaacttacataaattcaaaaagaaagagagaaaatacttctgcaattttcagtagattctcttacctcttttttcctatcacgttttctttttacttcgcgaaaaggatctgaaagacaatataaaaatgtcatatatttgggagcaattaaaatggtgcagtgttcacaaaaantggcaccaattaaaatggtaatgtatcagcaaaatgtagttagacataaacaagagagt

SEQ ID NO: 592 - DNA, 742 bp, Gossypium hirsutum
attttgcattgaatgatagctttcgaaagctgataagttgttcattgctttagaggcttctctagatcatcaaggtttctaattgtgctattgatgtcggttcctatacatgacctgatctgtgtccaaatgcattagttttgccaatcccgactggtacagccatttacatgttacaatcttgtgcattttaaatgcaggtctcctggatatgctgtacttcccaaggcttatgggcaaccagatgactccacgaagggcgaatctagtggggaaatgacatccaccggagaacaatttgtcattcctggtggacaagtcaacttgtcctttccacggttcccacattgtacttttgttcctttccaattgcctcgtgttaatggaaacatgggagaggcatcgagtagtaatctgcacattccagattctcagttggaagctcagaagaagatcattcagcagcagattgaggtatcatttatgtgtcataaggttgctattgttgctttctccatctaattatgcgtttcaatttttttcttttaaaaagaagaatcgtcttctatatcttgtcccctaccgtgggatacacgtactttttcttgctcaagacaacgacaactggtatataccccccctcccccaccacacacatacataaaattgtgggatctgctgcatggcatgagattaccaatgtcatattcatgaccttttgaggacagcctcctaatagcat

SEQ ID NO: 593 - DNA, 792 bp, Gossypium hirsutum
  misc_feature (27)..(27): n is a, c, g, or t
  misc_feature (29)..(30): n is a, c, g, or t
tagccttaggcttttactccaagaacngnnggtaaataaatgtatataccatctaagaaggatggaactgatagattattacgaaaggatcttgctaacgagtgacctaagtgcactcttacagattaccttattaggtaagctactattgccaacaccatcggagttcaagaagttagctattacctaaggcacttgatatataatattgctattaatagtaacttaactaatcttaacaaaagcctaaagtcactcgtcagcaacatccataataaaatgtactagaaaacaacggtgaaatatatagcataatgattattgacataaccattcctagctgcagaaaagattcattcttctgaatatcatggtttttggtggcttcaggcaatgcagcagctttatttatcactgcaaagaaaggatcgcgtccatagagtttcccatcttgaaccaatagaagctgttcaacaatattcacatggttaagaatctgaaaacatgatgcttaagaacaagtagttcaaatagaacaagaaacataatcagaccaaaaacattgaatttcaaactgtttatcctcaatttcaaccataaaccagtaatatagagtcatttttgtaatgtgtagtaaaacaacagcactgcattcttcaagaactgtgggtaaaacaacgggtacaatagtcaattggacttatgtcttagtctttggtcagctatatatgtcctcttgatgcagaaataatgcttaatgggtgaatctttccatgtttggatgagtaacgc

SEQ ID NO: 594 - DNA, 965 bp, Gossypium hirsutum
  misc_feature (116)..(116): n is a, c, g, or t
  misc_feature (118)..(119): n is a, c, g, or t
  misc_feature (173)..(180): n is a, c, g, or t
  misc_feature (363)..(363): n is a, c, g, or t
  misc_feature (412)..(412): n is a, c, g, or t
  misc_feature (470)..(470): n is a, c, g, or t
  misc_feature (479)..(479): n is a, c, g, or t
  misc_feature (574)..(574): n is a, c, g, or t
taatagcattgcacatatattagatgaaacaccacattttcaaagtttagcatatgtaacactcaagcttagcattctgatcaaaacagtagccttaggcttttactccaagaacngnnggtaaataaatgtatataccatctaagaaggatggaactgatagattattacgnnnnnnnnttgctaacgagtgacctaagtgcactcttacagattaccttattaggtaagctactattgccaacaccatcggagttcaagattagctattacctaaggcacttgatatataatattactattaatagtaacttaactaatcttaacaaaagcctaaagtcactcgtcagcaacatccataanaaaatgtactagaaaacaacggtgaaatatatagcataatgattattgncataaccattcctagctgcagaaaagattcattcttctgaatatcatggtttttggtngcttcaggnaatgcagcagctttatttatcactgcaaagaaaggatcgcgtccatagagtttcccatcttgaaccaatagaagctgttcaacaatattcacatngttaagaatctgaaaacatgatgcttaagaacaagtagttcaaatagaacaagaaacataatcagaccaaaaacattgaatttcaaactgtttatcctcaatttcaaccataaaccagtaatatagagtcatttttgtaatgtgtagtaaaacaacagcactgcattcttcaagaactgtgggtaaaacaacgggtacaatagtcaattggacttatgtcttagtctttggtcagctatatatgtcctcttgatgcagaaataatgcttaatgggtgaatctttccatgtttggatgagtaacgccttgccttaaatatttatggagaaatctcttacatgaaggaatggggaaaaatgaggcacaagaatggaactacgccacaaacaga

SEQ ID NO: 595 - DNA, 764 bp, Gossypium hirsutum
gacttggtgtacctgggtttgatcctacattccaagctataagtaaagtattctggaaactccacaagctctttgaccggcctccccatctcacttttgaagtaataatagcttttcttcatgagctcaactcgtagtgcaaccaattggggacatttcataaccataattgccacatcctctaatggcagtccccgccccaaaagaaactctataggcttcataataacatgttgatttaggcttgcaatctgtggcatcttctctataatacaagcaaacccatctgggtcaatcttgagcttcagattgaagaaatactgctgtgaagacaacttagctttcagaggtaacccaagaatttgtggatactgtgcaataactgaagcaattgcttccctccgaattccaaaactaatcaagcaatcaacattcagcttaacagtttcttcaagatcataaccaactatatatgcccgtttctccaacattctagccaaaatcttttttggcaatcccaaggaaaccaagtaatcaacaagcggcttaataacagtcccaactctcatacctagaaaatatggatattgtgtcaccataggaccaatatctctcggactaactcctatgctcaccaagtaagcaaccgaagtactcatagtaccttcaagtttaaaccccaacagttctggatacttctgtagaacatatccaatatcttgcttctcaacatcgagccccctaagaaacttaataacaggagc

SEQ ID NO: 596 - DNA, 760 bp, Gossypium hirsutum
aaagccctacacaaaccaacagttggttcgagaaaatcttccatatccttagcatatacgaactccaagagatttccgatcttcctaactactttcagctgtgaaagtaacttagaatccatttccggagctgaagccaaagctagacacaacttgacattgtttacattggcatttgtcagatcgccaagcaaaaattcaaaacattttgagaccattttgagatctaaaatgtcagagattttaatataatcaaactcgattaacatcactaaaagcttctgtgcatacatgggaatgggatcttcatcttcaatcaaggtggggtagagagcaagaaaatgagagttagatatcaatttcagatcctctgacctttgatcttttaatgaagattcattcaagatgatgtccatcacatcaaacataattttgaggcacaaaaatctggcattaccatctctattgcccttgtaaagaacagcaaggctagggagaattccacggataaaaatgttaggattttcaaggattactggagactcctcaggtatggattccagaatccgtaacaatgttatttggaagtcatcccatccctagtcaatgaaaagagtagtcaatgctggtatttcaattgattagtgaagaggccaatttaaatataagattacatgaaatttaagtcctatcatgtgtaaactgaagatgaaatgacctaccagtgacaaattcaaaagaaacagaacaacaataacca

SEQ ID NO: 597 - DNA, 677 bp, Gossypium hirsutum
attttcagtgcattcaagctacttttacttggaataacttgcatatacttcaggtgagcaacaaatgatcatgaattaagttggatatgttaacagttacagaggttcaattgttgaatgcttcaggaatgccgtgaagcttgtggaggacaagggttaaggaccgagaatcatgtcggtcaatggaaagctgaatttgatgttcaatccacttttgagggagacaacaatattttgatgcagcaagtacatttgtttttcgtttcatattctattcatctaaatcatacacatcaagtttataaatattgaaattattgcaaactatggtcgaaacaatgacacttacggattgaacatgttgactcagataagcaaggctctactcgctgaatatgtggcagctaagaaaagaaaaaaggctttcaagggtctggggttagagcacatgaataagccctgccctgtcattccatcacagcttactagcactgctctccgttccagtcaattccaggtaatataatcagctgtgccattcttaatgttccatattaaaatttgtagctatctctgaccattggcatttatcagatgaaggccttgtgcttaagggagagagatcttttaaatcgtttcgcagctgagatctcacactatcaagccaagggactagt

SEQ ID NO: 598 - DNA, 707 bp, Gossypium hirsutum
gttgaagcccctatatgtacatgacataattcaatagacagatttttgcttatatatgttcttcatgtacttgatttaatgttatcatatttaatatatataaaaggctattaagtttaaacttctaatctgatcacttacagaaaaataattttaatataaaaaactcaatatcaaaattttttttaattaaattttatgctgatttttttatcattcaatatcaattcttaatttaaccagttaatgtagttcgatttttctttaccaactgaaatgtaaatatcaaaataattgatgtcaaatgtttgagggcatgtgtgatacttgctcttttcttttcctttttgacatgctcttgattgaatttaagtcctcagtccaccggcagtctttatgggcaatgtttttgtaatacccaattattgcccggggcccaaaatcctaaagcccaatgacccaatacaccaaattaaaaaccaacagcccaaatacatttggcccaattggcccaaaattagccatagcccacaacgtgttttcagcagcaatggaagcagaaaccgcagatcctcgcacgttctccatctgcagcaacgaccccatcaccccacgtcacaatcacccacgttcagcgatccctcgcattctacctgcaataaaaccacaaagaacagcaaataaaagggagggctagaatagaaatg

SEQ ID NO: 599 - DNA, 720 bp, Gossypium hirsutum
  misc_feature (59)..(64): n is a, c, g, or t
  misc_feature (664)..(666): n is a, c, g, or t
  misc_feature (668)..(670): n is a, c, g, or t
ttcgccagcacaccaggtggacgccaactcaggcttccactagtatttctcaatggacnnnnnnggaaccccggacaagtaatggtgacatatgtgactggctgtctgcaaaagatgcaatctgggcagttgcaggcccctgagagaactccaaaataaaatttccattggcatcggccctgtttccacttggccgaattggttcaatgctatcttccagcatccgctgtgacaactgataaactagatggtcaattgtccgctgtggacatatacgtgctagatacaaacttactcgcttagcaactgagaaatatgtggcaaaagcaccacttatttcagtagaggcatttgaatcacaatcctcaattcctttggtgatcaagaaatctaaaattgggctaatgttccggggcttgctggcaactgtgctccagagtttctcaatttcatcaggaaactgatctccatgcctccacgtcacataataaagactttttaataatctttcactccaacctgagtccttgagtttccaaaaatttagattttcaatccatggagccatacaggttaacacctgatgctgagcaattatatcaacagcatcaagttgtctttgcatgatctcctcacagaggagttggctcaactcagggtgatnnngnnnaattgcaagagagcttgtactggaactgttggtatgaatcagggagatta

SEQ ID NO: 600 - DNA, 753 bp, Gossypium hirsutum
gtcttaaacccctttttgacttaattggtgaaaaagggccagaatattgcttgctttggtctgatagagaaacataaattcagtattttactcaactctacatgcaacattcacttatcatgatcaatcaactaattttacgcattaaatggaccagatgttcataaaaggagaaatatagaacattggggggaaaaaaaggaagcaaagtattcataataattctaaaagtaatgcattgaaaattttcactggtcaaccgcttacacaaaccatgctgacaaatcatcattaactacagatactaattacagtttaacataatcatcaataatcaatacactcaaatccattatcactttgaagtgagacattatgatcgattgatcaataagacatggggcactttgggctttggcacacattaagccttgagaaacaaaaggttatgatcagtttaaactctgttgcaacatttaaactacacaagccttgaaaggccaggaaacacaaaagaacgtgaactttacaagataagttttagatagaaattcttactgacctgtaacacctgaaacagcaacttcaacttccccacgtcctccaggacctttcatgtaaagtctgtctgttttcccagaggaatgaccaactgacagaagacttccaaatcgggaatgcccatctgagaaagaaaaacaatatagggcgagggctaaataagcatgaagaggaattaatgtctcgtttggt

SEQ ID NO: 601 - DNA, 504 bp, Gossypium hirsutum
ctgacgcatgggactacaggggctgccccgccgagcggtccaagtccggtggttggaccagtgcagccatgattctaggttatttatatacccctctccttgatttgaataatattcttttgattcgttttcaggctttggtctgaaaatacgtatgtggtgttctttcttttcctatgtatttaattttatcaggggttgaggcatgtgagaggctaacaacgttaggtatcgctgttaatatggtgacatatttaaccggcaccatgcatttgggaaatgcttcctcagccaccaccgtcaccaacttccttggcacatctttcatgctttgtcttctcggtggttttatcgccgacacttttcttggcaggtttggtttggtttgttccctttgtaacggtttcccatgcactgctctcactgaattaaacgagttccttatattcacaggtatctcacaattggaatcttcgccaccgttcaggcaactgtaagattcat

SEQ ID NO: 602 - DNA, 684 bp, Gossypium hirsutum
agtactcaaagaaatttaagctcataaataatccccaagcccccaattattagtgaaatcctatatactagcatgtagtgaactacatatgaagcacaaagaaccacaaatgtttcactattaaaagatagaaggaagaattttgcagtttagctatccaaaagtacaaggatgtatattgtagcttaaccatccagcatgtattgtatggctaaattcatcaattctgctatcttggagaagcttaatactagatttcatccagaaggctattagttggtcattatgctagacatataaaacaaaagttttaaattaaataatgtaacaaacaaatgaaacaatatgctttcagaaaaatacgggatatagttcagaagtatctattgaaaactaagataatcaaaaacagaatcaagttgcagaaaggaaaaaatgacatacaatgccaaagcgttgatgcacagcatgtgatgcccaattataatggtgtgaatcctgatcccagagtggttgcataggcggcatcctgggtgaaggaagggtgagtggaggagtctcagcatccccgtggccatcattctgatccccactttgctgttctaggtcttgctcaagagatccaggagacggagatgttccttccaactcccagtcaacaggagcatgatttgccttccacat

SEQ ID NO: 603 - DNA, 672 bp, Gossypium hirsutum
  misc_feature (662)..(663): n is a, c, g, or t
  misc_feature (667)..(669): n is a, c, g, or t
gctgtccttctgacctcctaccaggttggagccaattctccacctgcaccaactggttctgccaatgtaccccgacctcctggacctctgtcaccatctaaacctcccacttctcctcataagccacctccaccagtgcccccaggtcccaaggtgcctaaaccgccaggtggaccacaacattcaaatgctaaatctggtgatggatcgagtgcagcaggaaatgatgccaatacttctaaagccaaactaaagccctttttctgggataaagttgcagccaagccaaacagtgcaatggtctgggatcagatcaaagctggatcattccagtatgtatcaaattccctacttgttttttgcttttgacttttaatgccgatacatcagtatggaatagactcaatactgcttttgcaggttcagtgaggagctgattgaaactctgttcggggcgtcagttcaaaaaaacaagaaaactgataagaaagagccatctgcacaggatcagggacctcagtatgttcaactcattgaacccaagaaagcacaaaatttagcaatccttttgcgggcattgaatgtaaccactaaagaagtatgtgatgcacttcgtgaaggtgatttctcctttatacatcctttcaaaaatgagcttccgnncaannntgt

SEQ ID NO: 604 - DNA, 760 bp, Gossypium hirsutum
cttaatcaaatgaatccaaaaatagaagaattttttattttaagaaaacacaacaccttatacacaacttgagagccatggaagaatagcaagtctaaattaaaatggatatactatcactgtttatgacaaagactacttaatgctcatatataggcacaacaatgtaatcaaaacaaaaggttttcttttagtacagttaaggtatcctctaggttagttttaaggttcatgaagactctttcaaagttcatggatgctcctccttataatgtcatccttaatgtttaaatttgagtttttctcctgagagcacaatgtgttttaccattgcataaaggcttgttgcataaaaattaaagtttctgtagaatatgtaatgcccatcgaacttatataagattcagttaattaaaatgcattatcatggcatatatacggacttgagatgcatgtggcagtggtttaaatcaggaaaagaaatatatttgtaataatatacgtacctcctcaaccagcaaaactggctgcccatttccatttgtctcttggattaatctaagatgttctgaagccactatctttcgcaaagtagaagaatctgttctcatttttttcaacatgggccagactattgtatgttgccctttatagaaacatttgagcttttctaagtctgtaacctcaagtgaagacactttgggaaacttaaacctcacaggctgctcctccactccttcccctgccgatacaatctcct

SEQ ID NO: 605 - DNA, 539 bp, Gossypium hirsutum
  misc_feature (433)..(433): n is a, c, g, or t
  misc_feature (503)..(503): n is a, c, g, or t
  misc_feature (505)..(506): n is a, c, g, or t
aataagaaaaggtgaattatcattgttgttattctgatacctaccaagcctcatcaagaaaagctatgatgccaccaggtttctgtaagcaggaaagaaaaacattagaagataaaaaagttctatacatcatgacaatttagtcccccttctcggtttcaaaaagttcctctctggcattgtttcaaaaaacaattagtagtttaaatcattttagtgaaaagaaaaaaaaaacccttcaaccttaaaatcttcttccaaactctacaggatcctttttttctgtccttccaaagttgatatttgattaaaagaaagttcaaaaagggcagcgtctaacatattgacatggatggagtgttacttccaatgcaattaataaatttccaatacatgaatgaaaagataaaagaaaatatgtacaggtgtagangtaagacaagaaacaagtgtgtgtgtgtgtgtatgtgtatgtctgcacatatattggcagagttagtcanannatagaaagtgagatacgggcatgaaaacagcaa

SEQ ID NO: 606 - DNA, 777 bp, Gossypium hirsutum
acttgaaacattcataccatttgatgggaggacaattatattgtgttcacaataaaaaatatttatgttaatcagacttgagtgtgactgttgatataggtatgtgtgtttaatctttttgaagtttttctttgatcatattttcatacataccgatatctaatgggacaaatactttttagaaaaatgaggagtcttcgtaacatagaaattatttgtagcttcaatcagggttttatcagaattgtcatgctatggatctgagtcaccgggtgattctcgaaaagctaactttgattgaggtagccttttccatgttgcggtttcaaccgcatgaataacctatgattaatatatagaactcatagaaatgactttagaactcgtcaaaaggacttcctaaccttatacttgttaggaagggtgaaatggaataatttgtcttatttatagactaaagtacaagtttagtcacttatgtttgtttaaaattagtgttggtcatcgaactttgaaaaattattttataaccaatggtatcatcatttcatacgaattgtacagccaatccttgtactttttcttaattctttttttctgttgtttctttattttccttctcttgcaacgtaaaacaggtgtacaatttgcttatgtcaaaattattttttttgatggttcctttgagcccattttccaaataatcccagaagcctctcaaatgcaagtgctgagaagatagcatccatccaaagaagctctttaccaacccagtac

SEQ ID NO: 607 - DNA, 535 bp, Gossypium hirsutum
tatgtttttcatttgcagatcggtatccaaatttggcctttgtcatacattttagtctttttaaaattgaatgatgtggaccaattaggtttagacatgtggcaagtacatcagctgatgttggtccacatcatgcaattttaagagagttacaaatatggattaaaacgtgggacgaaagccataattggatactaatctgaaaaagaaagcataggtacactcaaattaccaaaaagaaagtgtattttacccattaaaataatacaccgaaaaactttctgtcggccttttttgtggtcactgattttatattcttttggaggtgcctggcctaaacttcagattttgtcttcctttgatattaaaggaatctggtttacccaaaaaagctgcttcaaaaagataaagcataatttttaatctgtacaaaatcaaagtattgcttttagattttatattgaaagaggtgcatgcttccaagcactactgctgtctaacaatttttgaattactatttggcaacccaagatcg

SEQ ID NO: 608 - DNA, 450 bp, Gossypium hirsutum
tctctagtttgttaccttcaccaagggagtcgtttaccatggacagctcacctacatccagtgcaccagctgatactcttgcacagttacctcctcctgttaattgttatctaatgcgaacttggtcgaagaatggcatttttaagccaaaatttttttccactatcttgaacgagaatgagccatctaccattgttgaggcatttaaaatttctacctggactgtagctacacgaggcgaatatgaagccttattagctaataacacatgggatcttgtaccattacccgaagatcgtcgggctgttggttgcaagtggattttcaaggtgaaacgacatgcagatggattcgtagctcgctacaagggaaggttagttgttaagggctatttacaagaggcaggtatcgattttctggagacttttagcccagtggtcaagccaacgg

SEQ ID NO: 609 - DNA, 663 bp, Gossypium hirsutum
agtttgggtccattatataaatttttagatccacctccacttatttatgacaaaaacgattgatttccagaatcaatggtcaagtgtgttttgcggtattgtttcaagggctatgactttagaagtcctatcaactggagttgcaggaaactacaatggagccttgcaagtggtactaagtacatctatatgcttttcttttcaataccaatctaataaaattttctggcatgcatgctctttccctaagctctgaaagcatgcctaacatcttgcattttcagatgacggctgagttccaagtcccttcaccacttgtaccaactcgggaaaattatttcgtgaggtactgtaagcagcatattgatggaacttgggcagtggttgatgtttccttggataatttacgccctaacccaatgtccaagtgtagaagaaggccctcaggttgcttgatccaagaattgccaaatggatactctaaggtaacttactctttatttcaacgagtatatatttgttgggctgcattttatgttgccgcttaacgtgtacacaatgtcatgttttcattatactttcaggttatatgggtcgagcatgtagaagtggatgatagagctgtccacaacatatacagaccagtagttaattccggactag

SEQ ID NO: 610 - DNA, 723 bp, Gossypium hirsutum
  misc_feature (272)..(272): n is a, c, g, or t
  misc_feature (683)..(689): n is a, c, g, or t
tgcaagcacaggtaatgtaatgaaggaaataattaagtactggatatcgcacgaatcacataacaaagggtgaaagtgacctgacactttaccgggatttccaccatttaagactgcactttcaacgggttccacgccatatacctatatgtcgacaaaagaagaatacgttcttattagcataacaacaaggacattggctccttgtctgaatttgggtctcaaatggggaacaaatgatctttgagtttttctctttgaggaatctcccngcacctgttaccgtcccaccagtccctattccagcaaccaatacatcaactttcccttttgagtctttccatatttctggaccagtggtttcgtaatggatcttaaacaaagaattcattacttcgtttaaacatcacctgatgaaccactggaaatgttataacaataaagatattacctttggattggaagggttttcaaattgccgaagcatgtaaccattacgtgtgttctttagtatctccaaagccttgtctaatggccctttaaagcccttggctgggtctgtgagtcgtacttcagctccaaaagctcgaagaacgattctcctctcgatgctcatataagctggcattgtgacaataactttataacccctggctgccccaatgaaagccattgcaatcccnnnnnnncactggtagtgtcgatgagaacactctatagccg

SEQ ID NO: 611 - DNA, 720 bp, Gossypium hirsutum
tttatttctgttctcctgtttgtgttaccaaagggaaaaattgcttgttgctccttatggctttgataattctacctgggatccatccacagataaatttcttccagtaaattatagtacagagaacatgagaggaaaatatgcgtgcaaagttgcattacaacagcaggctggcatatcaacacatgcttcttctattctggtatatgttccacaagaatgctgtgtataccgacttctttttcgtaattatagggttaattacagaaaactccttggtgatatagcccactaaaaccatcctgctaagtttctttctctaaatatatctgcccccatgaaatgtagttctttgttgatttctttcttataaataatttcttcttagccttgtggaggaggggtaagtcattatttatataacttcaagaagtatcatggggtaagtcgttaattatataacttcaagaagtatcatggggtaagtttaagtgttcaggaaaaagaaatggggagcacagtcagttgaaattatgcttttgtgcctagtgttttgtactttaatgtatttagatcttgatgctctacctaatccaacgtaaggatataccctaaacctatatcttgtcaactatttttagatatgaacataaatttactaattttggcttcatgcattcgaatcagtgtggtattcctttgagatgtgctaaatataaa

SEQ ID NO: 612 - DNA, 678 bp, Gossypium hirsutum
  misc_feature (657)..(657): n is a, c, g, or t
ttctttgaaagagtaaaaaggtataccatcatatgcatcccgaaccatttgatagctgacaaatccagaaaaaagtgttagctgccataataattagcagcatgtcaagttgtacacaaactgagctttgtagcatataaagaattcctaagcagcttttcacagaataaatccatattaattttgaaaactcaagcatcggtctatttgatgctaaccacaatgttatttataacttaaacttcaaaactaattcatgataataaaatattcatagttggtgtagagaaaatcattttcttctcatgcatatctccccctttcatggtcaatgttaatttaatttgaatgcttacaggacaacataaagcaagattcattctgcaccaaaatggacaattgttaaaacaccaaagcagcccattttaagtcctagtcaacaatgccacctcacttgctccttgctgaatgcttgatcaattcattgttctaaggaacaacaaataatttgaccatcataaagtgacataaaaaacctagcagttctatgtaactatttcagatgtgaagaccctggttgatcatgggctaatacaaataaattattacaaaggacctgacagaggacccaaaccttacaattttttgtcctcgtanaattagtatctactcccaatg

SEQ ID NO: 613 - DNA, 760 bp, Gossypium hirsutum
  misc_feature (555)..(555): n is a, c, g, or t
  misc_feature (584)..(588): n is a, c, g, or t
  misc_feature (628)..(632): n is a, c, g, or t
  misc_feature (686)..(688): n is a, c, g, or t
  misc_feature (696)..(700): n is a, c, g, or t
  misc_feature (703)..(707): n is a, c, g, or t
  misc_feature (709)..(714): n is a, c, g, or t
ttgctatatagtattaaactcccttattacaacatgaagcttaacacaattgatcaatgcagtgatccttcaaacatacattaaataatcttaaattcgtactctaatatcagtagaatttcatgattgggttcttcatcgttttaatcctgtataatcatgggtatttgatgaaaagtccatctgtatctttacggtgatgaataagaaattcatcctacttgtaaatacattcaaatcttaagtcagcaatatttcagctcttttgggccaagttaatggcccaaaagaaaaaaaaaacagcaatcaattccaaatcacaaactcgcattaccgctgagtcaaacaaaaaaaaaatgaaaggttgaccctttttcttaaaagtagcctcttttgttgttcttgacactgaaaaaaacttgggtttgctctgaaagctctaattgtagtagttcttacttaatttagggttttagggttctcacttctcttattgttcttagttttttttttttttttgaaattctttttgccttgggaaaaaaaatttaaaantttgaaagggagggaaagaatttaacaannnnnaaaactgttttttataaaaggaaaattaggtttggggggnnnnnggcccaaaaaaggtatttttttttttttttttgaccgggccttttttttttttnnntctttaannnnnttnnnnncnnnnnnatttttttttttttttttttttctttttttttttaaaaaaaaaaaa

SEQ ID NO: 614 - DNA, 718 bp, Gossypium hirsutum
cattctttctaccatgccaaagcaatacaaggtactggtaaacacacagtttattgatcctttatccttaaaatatacagccaaatttcagagtctactagacaaggcatgtaaaaaaatagtaataaacaataactgaataaaaccaaaaatggtatataagaaaataggttatcatgtaacctttactatttaggagaagaaaatttctaccaacaatgttgtagcaaaggtagggcaaaatccaaatactaattaaaaaaaaaattgatataggaagcaaaaagcatacacacctgcaagcatggaaggatagcaggtctacgttgctgtaagaaatgaatgcacatcaaaacatacctgcaaagaaaatactagctaaaaataataattgataaaaataaataaataaataagaagaacaggtgattttattgctgcaagttaaattaagcaataactgaaatgtgccctaccctctctctagatacatgaatcctacctaaattggcatcatcacagcttatacttttatctatgtttttattcatttcaaagcaaaccaaatagactaaccacaaacaccattgaaatatgctgctcaggaatgatgttgctagctatgggaatagcattatagttgcaaacaactcacgcgtagctagatagagttccttggtaagttgcattcactcctctggactggcccagtgtcaca

SEQ ID NO: 615 - DNA, 650 bp, Gossypium hirsutum
  misc_feature (62)..(65): n is a, c, g, or t
  misc_feature (594)..(596): n is a, c, g, or t
tttagtgacatgttattattcaaagagaacaggaaataaggacacaaaagattgtaggccannnnggagaatttcccatacgcagcgtcaatatggttcggccaagctctaaaagaacggaacctaagtgctgcattgtaagacctgcttgtgctgattctgtttgaatttgccccctcactgtaggatcagaagaatccctctcttgctctaaacgttctgcaatgtgctacaaaagtagcagcatattaaagatgcaaagaatcagatgataaaatttcaaacttttaaggtagaaataaaaaaatggggaatccatttggagtaaatatataatactttttcttcatgaaaaccactgcaacttaaactatgcctatcaaatcatataacagaaagaattctcctttatcttcctcaatctacacgtacttaaggaatttcataacatacaaaattttcatcatagaaagcccgtaattatacatgagaaaaagaattcacagagattttagcacaactctaatacagtttaaaaattatagaaggaaactagtattccacataccatatcaacctcaacatgaatttggnnnaacatttaataacaatcaaaagcctaaaagtttccagaaaatgaaatacagaaa

SEQ ID NO: 616 - DNA, 570 bp, Gossypium hirsutum
agtttcgtctaagttaacaaactgtcagaataggtgacataagcttctgaaatgagttttaatttggggtctcgaatttcaagaaatgtaattaatctttactaccaattcattactgcctaagaaatgagttttatggggtttgaaatgagttttatggggtttttgtaagtttaaaaaaaaatgttatcgtctcaaaaactgagaactaggaagaatctgaagtctgaactttgtttaacaacagatctcgaggtatctatttgaaaaattattttccaacacttaacgtacttcaataatgttgaaaaatcttctttaataatatgttactctgttaagttgaactcacaacaactggtcattattgatatatctactttaatgaaatattatttttatgatcattaatcaaccatatttcaccatgcatgtttctgagaatttagtctaatgacttgtcttcctcatttagtaaggtaagtgaacagaaaaggatctaaatttcgtggaaagcttgggtttagtgcaaatcaataattgaacccccaaagaagcttatggatttgt

SEQ ID NO: 617 - DNA, 784 bp, Gossypium hirsutum
gggtcacttctaagttctaattatttgatagaactcaaagccataaaacaaaagcaaatactttatatagagaagaaacaaaccttgtcgacactgtgacccaatcgcttcagctgatctatacggcttcttgcctggacatatggattatacctggaatcattatagatcacgttttcctcagaatttaatccaacagaactgaacaaatgcaagactctcttctctctctctcaccaatgatcatgaagcataactactgcaaattttggcatgacatttggattctcaaaagccggttcacgcaaaaaccaaaatgccagaataatttgaggtaaaataaatgagtgctttttcacccctgggggtgtaaacaagacacttataattgcaagttattcgggtttgatctaaaataactcaaacttgggctcaaccattttcaagttgagctcaagcagctcgatctatcaagtgagctgaattgagtatcttagtgcttgattgaagtaatttacaagcctcatcaagcttcttatttctaattagcattgaaaattttcaattggagctcaaacacaaataatcaagcttaaagtcaagcatagaattgagttcattttactaggtaaacagcttaatcaagcaagctcaagctttaaaactaaaacttgaacaagcatgagtcaagctccaagctttgaatttcaagtggagtttgaagcttctcacagcttgacctcaactcggttcgattacacccgcattcaccctaacattcaaa

SEQ ID NO: 618 - DNA, 580 bp, Gossypium hirsutum
cttgtaagaaactgcaaatagaactgtgaatttgcagctcctggaacatttgatcgctcagttgatgacagatcaaataataccgtcaaggaagtactcttgttgaggccacacattttccatgctgtagtgttcccctccccaatgactgtgtcagcaacattaggtcctttctgaaacactcaaaagtaatcatctcaaatccccaaagtacaacaaaatttactctactgtttggagtaaataagaaatcttgctaaattgttaaatggtccaaccttctccaaagatgtgcaaggcccaattaccccttgaattttgatgtcctttgaacagttaatctcaagcatgccactaaaaaggggaaaaaaggaagcttataatgagtaagattaatactgtaactgatactgatagtggatatttctgagggctcaaaaccatgccatagccaatcatatgcacagacaatgcatgtgtatcaaaagagagagaagctaaagctagaccagataaattaacttcattaaactttgaaggagagatttcatttctggtaataaaaattaaatctgaaatc

SEQ ID NO: 619 - DNA, 799 bp, Gossypium hirsutum
tatactcattataagtgaaaaatgaaaccaaagggcttaggcaacacaatacctattaataacatcattagagctttcaacaaattggagaatggcattaacaagactacatgtttcagagcccagggaaccagacaaaggttcatttgttgtctgcttcacaccaccaatattagccagttgaacagctgtatcctcctttgtgtcaaaaatagcaagaaggaaagcaggctgcacaaagaaaccactaacataagatggtcttggtaaactagatcagtaatattagaacattgtggtagatcacttgcaaacccctagaacctggatcatggttctggtgcatcaagaattgatcaaggacataggtatatatccagattgtgaaaaaagtaattaaatctttgcaagaccacattcacatgccatctaactgaatttttggtatccatgaaaagttacaagcttggaagagttccaaaaacagatataatcaacctcaaaaaaaacacttcaaataaccagcagaaggaaaatggtagccttcagaagtagtaaatgaatgatccatgactaacctggaaacgagctgcagaagcaagcaaattcagtacggcaataaaaagatcatcattcagtatccggtgttcaagtagaatgctattaatagaaagccttaaatctgccatctaaaaaaggtggttaatcaaaatagattagaagaaaaagatatttatttagaagccacataacaaattagcaaattaataactttaaaacacgaaataaattgccaacc

SEQ ID NO: 620 - DNA, 716 bp, Gossypium hirsutum
  misc_feature (688)..(689): n is a, c, g, or t
gtatttttgacaagctcacttccaataacacgaatgaagcaagcatcagttctgtttgcaacagccctcgcaagaagtgtcttaccagttccaggaggaccatagcaaagaacacccttaggaggatcaatcccgagcttgacaaatttctcaggatgaagcatcggtagctcaacaacctaaaagaacaaaattcatcaacatatgcgcgttagcctcaaatcttaacttactataaccggacaaggaatagtagaaaggcttcagtttttcggtgtgtgcatgtacaaattaaaaggtgtcatacatacttcacgcatcttttcaatctgctccttgcatccaccaacatcattatatgtcacgtctggtttctcctccacggtcatcatggtgacacttgggtcaatttttggaggcaaaggaatctgtatctgatatttgttgcgatcaaccctgcaaatgcagaacaatgatgaagagataagaagctaattcacaataaaagaaaagaacatacaaggatgtaaaaacatgattggcttccatgaaaaaataaataaaggaaagaatgaaaaatatcataacacattccaatgccactactatttctagtaaaacctacactcgtccattctacaaaatgatgtggatgtatcacaaagtcgaccaaacaaccaaacagttnnccaggtgacaacaaactgactgatcat

SEQ ID NO: 621 - DNA, 726 bp, Gossypium hirsutum
  misc_feature (58)..(59): n is a, c, g, or t
cagtgaaggcagttccttccaaagcaccgcaacaatgcggtttgaacagggtgctctnntttctcctgcggattaggccaacttgcttcgaagagcttcgacatcgtttcagccctatgctctggcgaaagagttggaacttcatccattttgagaggggatttatagccttttttcaacagaggattcaaccagagccaaaatgcctttgatactactggagctgaagcaaagccggtgacattggatttgctcaaaagcggctcattgaactttgtctcttcatccattgccggttcggattctccggtcactgatataccagttgaaccactaatggcaacaacaacaagaagaactgataatgggaaagaagcaaaggaaactatatcatccaacctcaaataccaatcctgatttgtttgaaccacacgaatgatcccagttactgtaaacaacgaaacgatgataaaattcgccgtccaataaattcggagaaagacaggatggttaactacatgaaatctcttctcacagatgattaagacagcaatcacagcatgagttatggcttgaattaaccaaaatgttccatttatttgcttccaaggctcttggttactgctattatatgcaagaacgcaaacaatagtgtaacaaaccgccagcacaaccgttacaatgacagagagcttgaaccatgtagtcgtgctggagtggaccctg

SEQ ID NO: 622 - DNA, 550 bp, Gossypium hirsutum
atgtgtttgtttgtttgtttgttgctatacgagtatgagataaatattagttttaggatgtcaaggtaagggtggattgatcagctctgaaattatcttttccagcgattctacaacaattttctattattgttcaaataattaggtgaggatatctaagacatggtttgggaaggattttaacttttcgtatgttttgggactgaatgaaacttccatttgagagctgaaatatgagggaagtcatactggattagagtttataattgtactttttagagcatttttgcatttagccagagttgactccagcgtctctgattattttgggctatcttggtaatatgttttcacttaatggttgtatagatattttttacatttagattggcactgtgattgttttcttatttatatctcgagtgttagaatttttaactacaagcatctagttatctgactctaggggttctattaattggagttctttgcagtttgattaacatagagactcacttttgggatgatcagagtattccctccattattt

SEQ ID NO: 623 - DNA, 660 bp, Gossypium hirsutum
gtcagctaatatcataaaccatcaggttttcttttgtctttttcacatgcatcttctttccccatatattcctggaaatatgctgaacaattgttactgaaaaatgatttgaccatcttttaaaaactcgaaaccaggtcaaatgaggacttattatgtaattgcatgatgttattcagagaaaaactggaacaaaggaaaacccaaattggcatgcctctttctctgaaactatgaacttatatatgccttaaattgaaagattctttgagaagctcgacatctgtattctgctgcttggccagcaaacctgtctttggcttctgcttcttagttgaaatttacttttgctcttggttcgcatatctgttacacccgtgtatatactaggtttctgtggtgggagatttgatagatttggtgttatatatcgaagctctatattgggatgccagtgtctctttagcttccccaacaagtaccttttataattaatataagattatgtgattgtgatggatgttggaaaatgcacctactagatatttggagcttccaccgaaaattgatacccctaggacatcctaaacattctatttttttcataccttagatttgtattgtagatgaacttattttcaagctgctttgcagttgaaa

SEQ ID NO: 624 - DNA, 620 bp, Gossypium hirsutum
  misc_feature (58)..(59): n is a, c, g, or t
ttacatatctgcatatgattgagagatggcattgaaggtgcccctgataaagaatatnncgactttgtaagttttgtaagtctgccgggacaagtgctgatttggatgccattgctcgggaaacgaaagccagcatcaacagaatatttgcctcatcctgaaagaaaagagagagagataatgaaacaaatgagagatctgttaatctttaatttgatattgttggtaagccatagagaaaataaatgaacgagagcaaaaagttcggtctattgtcaggcaaagttcgggatggaagcatgaacacgactgagttttcatcaatgtataaaaccacaaaaaaaaaaagcctaaacttttcttcttttgtagcaaagactatgaaaagcttctaaaacatgaaacgcaacaccataacttacagtttgagaactatgtgacccccatcctcatcgcattcaagcaatcttcaacagcagagctaccattcaaacataaatctgaagattttgtcttaccttcatgcctctttatcgaatgttaactcaagttgtctttccacagacttcagaacagcagttctgttagatcttaaccggtgcggaggagatacataaaca

SEQ ID NO: 625 - DNA, 680 bp, Gossypium hirsutum
tatgacaaacttgatttcaaacattggctttcttatatttttaagctaaaacatcattttgggtttatgcttgcagaggagcaaaaatccacttagctatgcctacatacaggtacgatatagaatagcatgttccacggtggtaaaaatatcctacttaaataaggttacattaatccccacatattatagtaaagagtaaattggtccttttaattaaacatttcattcatctgtattgttaaaaactaatgtgactgatggaataataagatacaaacatgtagcatgtcacgtgtacctcatgctaacgtataaggattagtttttaacagcaacaatggatgaaaattttaatagaatgtcaaatttactctttgatctaaagtgctaggactattttatttattttttgagtaaagggggaaaatgcaattcaacttctagtacaaggtcctcatgatgccacattaagtaggaagaaatatcatatcaaacccacttgtatataataagtctatatttagggaataatatattattgtaactctcaaggtaagctaagtataataactttgaagatggtatagaatctgggacgtacattaagcaatataatgtagtgaatgcatgtttgtggatggctatggtagattaacacactactttcggctactccc

SEQ ID NO: 626 - DNA, 718 bp, Gossypium hirsutum
  misc_feature (699)..(700): n is a, c, g, or t
attgactaaagtaggcatatagttccatgatgctctccaaactgtaatcgtaatctttgagggtagctgtaaattccatagctgtttttagaaaattttcaaatcgacctatattaataagttgttatgatccgagctagtgttttgtaatagtttgtagccacttctgaccgaaaactcaccagaaagctctcccttccacacctgaaaatcaacgtctagggtttccgctagagggatttgcaaaatcctttaagcaatatctactggaaaggtgcttttcactagatctgtcttccacaaattatttgtagcatcaattaaatcagaaactaacttaacttaattatcgtttctgtggcttcaatcatctgtatcctttcctggtatccaatgatcatcccaaactgaaattctagttccccgtcttactctccaactcatcccacttcgtaacaaaccttttgcagcccagacactctttcaggtaagtgaaggtaagttacctaattgtgcattaaaaaagtctgaatgtggataatacttggctttaagaactcttgccaataaggaatttggataagtaatgaggcgtcatctttgcttagctaacatagcgatgttaaacaggctaatatttcgaaattcgagacctccattttccttaaaaatataaaggttcctccacgcacattagtnnataccctttttttcgtgt

SEQ ID NO: 627 - DNA, 759 bp, Gossypium hirsutum
gttcgcatcaaaaaacccaacgagatccaagttggcagcagtcgtaaaatgaaggccatattccacagcagtgataaaagcatgagaccagagatgcatgggaacatttgcttgagccaacaaagtcagccaacatccacaatatgtctatgttttctttcaactaaaccattctgctccgaggtatacgggcaagaaaagcgatgatgaatgcccaattaagatagaacttaagtaaagggccgaaacccccccaatcagtttaaagtaccttcaccttactaccaaattgaacttcaacaaacttttgaaaatgtagaaactttgcaagagcctcaaatttatgtttaagaaaataaacccaagtaaatatggagtaagcatcaacaaatgaaatatagtacgaatgtccctcagagggtacagaagcgggaccctaaagatcagctacaatgagctcaaaaggagctgaatacacagttgtagatggggaaaatggagcttatgaaattttccaagctggcacgcagaacacactgagcttagccgagatttctttgcaactatattacatttctgaagtactgtagtaacagttctattacaagggtggccaagtctttgatgccacaattcaaaaacacgatcactggaagtagaaggcactagactagtaacatgagcagtggcaagagaggaaccaacggtgcaagacttctggatagcaaacatatcaaacttgtacaggccattatgcat

SEQ ID NO: 628 - DNA, 756 bp, Gossypium hirsutum
gtagctgattttgggtgcagtggttttggcttttggctctaaaaagtcaagtaagtaatgaaggactgtactctatacggatttggaggtggcgtggacatctaattcaggtttgtcatcaacaactgagtcatacttttgacatttaaatctgtaatgtagtttacaggataagggactttatgcaaccttgatgtactcgagtactttatatgtcttggttatagatctctgtaaatattccagtatacagtagttgggcttgaaggtcctgctattctacttgtgcatggttttggagcctttttggagcactaccgtgacaatataaatgccatagctgaacatgggaaccatgtttggggcatcacactgttgggatttggccaatcagaaaagccaaacatagtgtatactgaactcctatgggctgaaatgctgagagattttatcattgaagttgtgggtgagcctgtgcatctagtgggaaactcaattggtggtatgttatcaatcctaacctattttttacctttcctaaggtgactactacaatttcttactctctagctgaaaatagcttatcagtttgactcaacaatttgtcattcttttctttacccatccacattttctatctccaggttattttgtctctattgttgctagcctctggccttctttggtcaagtctgtcatccttatgaacactgctggcaatgtcattcccgaattttcttcccacccgtttaccag

SEQ ID NO: 629 - DNA, 768 bp, Gossypium hirsutum
gcatgcttgccttttcttctattttttattggttgaatgtatggtgtttgtgtatttatagtttcttccttttatcacgggacacttaaatgttgacatattccatttccatgaaccagttattgtatgcgtgtgaagatggacagtgttcccaaaggtgattggatgtgtgaggaatgtgtgctcagtaaagaaactgagaggcgaaaacaagacaaaatggagggaggagttaagatttttaacaaaacacatgcttcagaatcagaaaccaaacctttggaggtcgaggaaagtgaagcacataaagttagttcaactccttcgtttacttcaaagagaccttctggcagtttacaagcagttagaaataaggcttttggagcagatttgaaatcacctacgacatcgagttgcagcagcaaagtttcgatgcatcaatctggaggccactcgtctagcactactccgggaactgtgtgctcacctactgaattaaggagtaaatcacttaaattgccatcacaacatcaggtgtcaaagggtatatttcacatacaccttaatggcagaagctgtgctttattaattataatgtcaacctagcacatttactaactgaattattttttatgctggtgatgtaggattactttccaagtccaaatcattctctaataggagcttaaaagaagatgtccaactgctgaaggaaggcagttgtggcaatgaaggcttggctaaaggaactactgctaaatgagagtg

SEQ ID NO: 630 - DNA, 784 bp, Gossypium hirsutum
  misc_feature (778)..(778): n is a, c, g, or t
gggttgtggaccgaacatgccatctcgtttgtccatttcaatcttatgttgtgtctgtaatcaaaaatgttgttaagaaatggttcaaaataaggatataacaaaatgtcattttgcatgtattagaaactcttcatacctgcatacatgcacagaccctgcaaaaggttaaaataaacgggtcgtcagtgtattctgaatgcaaaattaactagaagatggatagggcagaatggaacagatcactttacgtgcaataaaccatatcagccaaacagttcagcaactgtgcagcatcttgaagctcatcacttccaacaatcattgcaactatggaaaatatgcaggcaacttgttgcaggcaaaacatgaaaccctgtatattaagtggcaatatgtttaatcattggccaagaacatcagatggaattacagatactgatatacattaggtgtagaaagggttagtttacaatgatgcagttgtcacattttgttgtttgaatgttgaattcatcttgcagcagaaaccgggttgaagccacggagttacaacagcagaggaaaacctggaaatgaaaaacacattatatgaaaatgataacaagatacgaatggaagctcactgcaactggcacaccaacttacaaattatcttgaaagaaaaccacacaaaaagttataagcctatcacaaaaaagtaggttctttagacgattttaagattgcgctttataaaataatacaatgtcccttccaccctctctttcacagattngacgtg

SEQ ID NO: 631 - DNA, 212 bp, Gossypium hirsutum
  misc_feature (36)..(39): n is a, c, g, or t
tatatagagaatgttaatgacagaaacaaaatcaannnnactgattcaagtatgctaatgaagttgagcttcttaccagtgttgatgtaagaggttttttatttgctagaacaacacagcaacccaagttgaccccttcctttagcactccaatcgtctcagaactggccgagcaatctacaagggctaaacctgtggcaaaattacaaaaa

SEQ ID NO: 632 - DNA, 734 bp, Gossypium hirsutum
  misc_feature (59)..(59): n is a, c, g, or t
caaaagcatattatatattcacaatttattattcacctcataatctgcctcagaacttngttcatcaatacagaacaagaagaattacctcagacaaatgaggataaagaccattaatgcaaccttcaccaactgcgccaagagccaaaacagcagcttccctatctttccaggcttcatcaccagtagcagctaacttggcctgaaaaaaatcaacataaatattagatatagatacaatttccatgctctaactttaatatacccaacaggtaagttacctgaataataggcatcaaagttggaagaatttcatccccgaacacatttgatagaacatcaagagctgctgcactgcatttccttaagttccatacattgaatgagtcatcatcctgtaccaaaatgatcacttaagaaaaagttccacgggaaaacagatctttctaaaacaaaaagggctatagaacttatctacgatatctgattgactggcacaacaggaggaaaaaaatacttacatcatcttctgcatcctcagaaccatgaaatcgtgacgtatgaaatcgaggttttaggtcctgaagggaaaatattagagagaaccacattcagcaaaatgctgatggtgaatacattacagaaagctaagagcagaatgattaaaaacaaattatatcaacctgatctctgtctggaagagactcatcttcctacaagaacgaattaatcca

SEQ ID NO: 633 - DNA, 770 bp, Gossypium hirsutum
  misc_feature (693)..(693): n is a, c, g, or t
  misc_feature (696)..(696): n is a, c, g, or t
  misc_feature (757)..(767): n is a, c, g, or t
acctgtacattaaattcagcttagacacaattttagacttcattaaatttgtctaaactttggacataattaaaacgtctgaatctaggacacattaaaaagctgtactaattagaacatattaaaacgatgtaatgaactgaacacatttatgctatgtaataaataagacaaaattaaaaaacatgcataaaacatatttaacacacataattaaatttgtccagattttaaaaaattaaataccttaaactaattaattaatttaactagcagcaatttatttatttattccagcatattaacgcaaactaaaaataagctaaagatgagcttctcgagctatgtttgacctaattgggcttgaaggagattgcatgatttgcttggttcactgttccaaaagctttcaagttgtccacaaacggcgttggcccaaattccatctataagagctagaacgccacccttgaatctcttggtacgagcacgagtgattggacccgttggagactcaaaaggttctcgagctatggtcgtatcagggggtttcttttctacttgactgcattgatgcgcatatggttaagtgactgggtgtaagttcattagtcggtattttgtctgattgacttaacatgtgtgactgattttgcgtgtatcgaggtgttagcataacgacgttttggaaanccnatgtttgtgatgataagtgttttggcactgacccattgacaggttattggtgagttctatnnnnnnnnnnnccc

SEQ ID NO: 634 - DNA, 397 bp, Gossypium hirsutum
tggattcatctgggaagcacaacaagttttgcatcaccaaggcgtaagtttggatccccattttgcttgaattatttgacataagtatggttcttcatttcccttgaactaataaagtcttgttattgtggcgaatcaattttctcattcatcaagtaaattccctaaaatgggctaaggccaactttgggaattcaacgctgttaattaaaacactcagataaaaattggatgttcggtctcagttgttagacaagctattttagatgcagttttactaatatagtgatggtgtgttcctgcagtagcactggaaggaaagttgaagaaccggaactgctcgaggcaatacgtttgacgattataaacaacttacttgagtttcatccggtaacca

SEQ ID NO: 635 - DNA, 776 bp, Gossypium hirsutum
gtttgtgctactttggattggtggcctcctgagaaatgtgattatggaacatgcagttggggtcttgctggactcctcaatctagtaagccttttctttttcagtttcatttgctcttttgaacactacacctagttttgtacagaaaatgtgatctcattttgtacaaaatcaaggatttctgctaaagaagaatctgcattttctattttaattatatatgaatttcaattatgaatttaactactttatctcttgatggctttcatgcctagtaaatgtattcctgttcaaattttttttaaaaagcctatttcccagtttataatgcttgctgagatgtgtttcactttcatccatcttttcctattgcaggatcttaacaataatatattcttaaatgccgtgaaaggtaagttattctttccattcggatagatattgtaaataacaaaaaatatatttttttttaattatttattagtccctatatttttcagctttttcaccattgaagattagattgggaggctcattgcaagataaggtcatatatggtacagatgacaatcaggaaccctgtacttcatttgttaaagacccttctgagatgtttggttttactaaaggatgtttacccatgaaaagatgggatgaacttaatgccttctttgcaaaagcagggtaaatcaaataattacgtccttttttgttcttgtattccttgtatgaatattttgaccattagcttaactcaagtttcataattcagggta

SEQ ID NO: 636 - DNA, 678 bp, Gossypium hirsutum
ccgctttggtgatgtctgagtatggtttcaagtaagggatcaaattcaaatttttaagtctggaaaagtcctactgatcttttttgtcgcatatatcttatattatttggaatgctatatatctgaattggtgctagaaaagttctgtcattggaagagtttgcttcttactttgagagcattgatcctgtatctcaatataagagatggacaactatgccgcagtcagataggaaggaaccggcaatgccaagatataatgttctctcagagaggattaaggcagcatttgttgtcagtgatcctgtagactggggcagggacattcaggtttgtattctacttttgaattaaatcgtaattctatatgtgtttgaatctcattgaaaaatctctgaatgatcttaatagaaatgatcttgccataccacatctcaaaaattgattaatgaattgcgtcaggtgctatgtgatgttttaagatctggaggccttcctggaggtgcaaataataaccaaccgccgttatattttgccgctgatgatcttgaatatcaggtccgttattgtgcttatttatgcctaatggagtttcatggaattcattgcatacatttcatggggactctgcactgaactacattatgcagataaaaagaacagccctgctatgttgct

SEQ ID NO: 637 - DNA, 512 bp, Gossypium hirsutum
tagcattgatcaataagtcactgatgaataattacaacaaagatgaagaatacctttccttcttattgaggaaaactacaatagtggatgctttccttacaacaaagatgaagaatacctttccttcttattgaggaaaactacaatagtgaatgctttcctctactccatcacaaactttccgcatgttagaataattacagcctttatgcttgtctatcgaaccaataaagacaacaccaagtcctaaactacagaatataatgctattcgctctaccagttcaacaaccttatcagacggtggaggccttgggccatatggatcataaacttgagggtatttgaaccttttagacttagcattgggatctctaggaacgaaatcatgctgaaatgcctggacctgcaaaggccccattatttcacgaatggaggggcgggcacaaactgctttcagaagtctgaccaagttcattattctgcaccagataacacaatgacgtgtggaca

SEQ ID NO: 638 - DNA, 482 bp, Gossypium hirsutum
agcttctgtaacaatgagaattatgcaggctcttcaaacaaatttggatggaaaatccaagcagtatagagatcctgctttgactcacttatttctcatgaataacattcactatatggtgagatctgtgcgcaggtctgtcataaatctgaattctgtactttataagttgcttgttcgtcttacgtgtatttattgatagtttctgatttcttgtttaggtctgaagccaaagacctgttaggggatgattgggtccaaatacacaggaggattgtgcaacagcatgcaaatcaatataaaaggaatgcttggcaaaaggtagttttctgatgatctaattgacatattgcaaaacaggacaaatttggcattgttcttctcattgatgtttctttccaagtcattcaaaaaaagaaatcgctcatttatctaatagacgtatgataagctactagttttgtactgctgcgcgtgaaaga

SEQ ID NO: 639 - DNA, 553 bp, Gossypium hirsutum
acaagaaatttggaaacttgtgctatgttattggcgctttacaagcctttattggccaccataatcaggaccttagaatcaaggtatgcatttttagggtttagcagtgtattccatttctaaaagttattttattgaccagtacattagcctatgctttagccctagtcatgcttattttcacaagacggtgtttagacttttgaccatgaatgtaattttacatgcaggtgaatgagggtgagtggcaaacattgtctcaagtgacagccctctgtgttggaaatgcaaagtactttggtggtggcatgaaaatcacaccaaatgctgatcctcaaagtggaagttttgaggtggaatagtttttctattcatctcactacatgattactagtatttgttaattctgaagtgcgctgatggtttgtttaagttttgcacttcactttgcaggttgtcattcttcaggacttcaagtggtatgacttcattctaaaactacacaagctctacaacggcacacatttgtcactgaataatgtgacctcaagaa

SEQ ID NO: 640 - DNA, 731 bp, Gossypium hirsutum
  misc_feature (62)..(63): n is a, c, g, or t
  misc_feature (655)..(659): n is a, c, g, or t
  misc_feature (712)..(727): n is a, c, g, or t
tgataggcctcttcctgcttatacccttgatcttagcaacaacaagttacaagggcaatttnncgcctttgtttgaactccgtggtctagaaaccctacatctttcttcaaacaacttcaacggtttgataccaatgaatgcctttcagaacttggggaatcttttgtctcttgatctctcacataacaggttgtctattgatgccactgctactaatatttccttgctttctttccccacatttaccggattggggctggcatcttgcaacttaacagagttccctggtttcttgaaaaatcagtccagcttaatgtatcttgacctttccaacaaccatattcatgggaaaatacccgattggatttggaaaccaatagatcttgcgcgcctaaatctttctgataactttcttgttgggttcgaaagacctttgaagaacataacttctagtgttcagattattgacctgcatgtcaaccaattacaaggggaaatcccaattcctacattagatgccacctatctggattactcagacaacaatttcagctctgttttaccagctcacattggtgactccctccagcatgtttctttcttttccatctcaaataacaacattcatgggagtatccctccatcgatatgcannnnnacatctcttagagtactcgattgtctaataattcatgaggggccaatcctcannnnnnnnnnnnnnnncccc

SEQ ID NO: 641 - DNA, 693 bp, Gossypium hirsutum
ttgcaagatttgtttttttaaaacttttcacttacagtgccccattttttgtggggggttgccatatactccacattacaaaagggaagaagaggaagggttaataactatatgcctaagagggttatccacatcaccaccacctgcatgcttcacaaactctgctggagaaaaaaaattgccatggcatacacacattatcctcacttcctctcccttcccatacttgtataaaatcccatctactcttttcccattaggaccttctccctttgtgaacacatgaggcatatcttccatcgcctttccccctcctttctccttattttcgactgtctcacctaccagtcccagagttctttcactcctgctcgtctttgtccctgaagaaccggtagctgcctctgagtcaccttgttcttgcaaggatgaagcactaccagagcttcttgcttcaccagaatttctagctcctgaagtgattgtaatcatgagaaccattaaaaccagctgcgagtaatcactgtttttatcataaatggaaatttaacattgaaactttccatgtcttgacaattttgaatcaaataattcacaagaaataacacatcattttgcatccagatcccattaccaccataattgctatttaaaatgcattatattggatccacatatctccatttggtttcc

SEQ ID NO: 642 - DNA, 846 bp, Gossypium hirsutum
  misc_feature (722)..(724): n is a, c, g, or t
  misc_feature (736)..(739): n is a, c, g, or t
  misc_feature (775)..(776): n is a, c, g, or t
  misc_feature (795)..(795): n is a, c, g, or t
  misc_feature (800)..(800): n is a, c, g, or t
  misc_feature (802)..(802): n is a, c, g, or t
  misc_feature (806)..(813): n is a, c, g, or t
  misc_feature (831)..(831): n is a, c, g, or t
  misc_feature (833)..(835): n is a, c, g, or t
cagtcatcaaagcatcatcatccttattccacgaaatcacgtatatattatataaattttaaaaaggcagtgtatttcaattatttgtagtgcgtgtgtaaacttgtcaatccaacaaatgccagaacaaaatcgaaaattttatcagtactcgtaaaagtatggttaacttgttgacaaatgtacatgtaaagttttacataatatttacaaaccagaagctaactatcaaaaaagaaattgtgacagtcatcaaagcatcatcatccttattgtacgaaattacgtatatattatataaatttttaaaaggcagtgtatttcaattatttgtagtgcgtgtgtaaacttgtcaatccagcaaatgcaagaacaaaatcgaaaattttatcagtactcgtaaaagtatggttaacttgttgacaaatgtacatgtgaggttttacataatctttacaaaccagaagctaactatcaaaaaagaaactgaccatttggatactatgggtaaagaaggaagaagaagaagctcagttaatgaacataaagagaaggaaaataggcaactccgagaatgcaatcatgcactccgagtaggaagaagaagaagctcactaaaacaatcatgtctgccatatgaatgcaaaatatcacgtacacatgggagccctggactaaaaaatggatctagcatatgcttgcttactggatatccatttcannncaatactcccannnnggtaacactccaatttacttcagcctcgtgctctgnnctgactgcaaatttcccgnaatanangaannnnnnnnaaagagttgcacaccctngnnncagtgaatttc

SEQ ID NO: 643 - DNA, 644 bp, Gossypium hirsutum
  misc_feature (15)..(16): n is a, c, g, or t
  misc_feature (627)..(628): n is a, c, g, or t
cgtgattggcttctnnacacaagcagcctctacgcaaagcatatgtttatactcctcatcaccgaaatcagccattgctttcgctttcttgtcccagggattccacacgactgaaataaggaatgaggaaccaagctgtaatcgacaaatctcaccaataatttacatgcttatccaataaagcatgggttgtaaaagatgttacggttcgtcgagcttaaaatggaactttgactgtcaactaattcatatctcctacccatggtgctgtaaattaggatggaagcttataaagacaataaactcaccagcatcgggaagtccatcctttcgcaactcaaatgttcgcttcctttcgtggtccaggatggcaatttttgttggtgtactaagatatatcttatccaccttttcatcaacaagaacggtaaacataaaaaaatgtatacaaattagaattgaaaagacagaaaacataagcctgctttaaaaattttagactaacttctgattcaaatgttattgcatccccttgttcagtgaaccgctctctgttctgcaggttatccaaataatccagtgtctctagtccttctactcgcacttcactgaataaaagtaaatacnnattgaatcgtacagaa

SEQ ID NO: 644 - DNA, 763 bp, Gossypium hirsutum
tgtattgtaatgctaacaagaactttgttcagtgtcagaacaaagtgttaaatctgtaatgacaggaattcttctgtaactcattaagagttttactagtatttgaattctaatttttaaagattgagagaaaattcagatttatgattggactcccattaataattcttatttttaaagattaaaacacctctagcatttgtattttgaaagctgtcttccagattacatactacagcaggctcattcaatggtgtattgcattaatcttagttaaatgaatgattcaagttccctatactagatatagtaataccaccctgcaattaaaataataataaaagttaatgcttaggtaccacaatattaaaacataagtggaaggtaaaaagagcaaaaactaatagcttacagtgagcattattcacatcaaactaatccaaagacttaagtatgacagattgaggtgactaaccttttacataaataggtttatcaacaacaatcttatctttcgacgccatttggagacgcaaagcttccttgtgaagcaaactgttattatgctcttccaatgcactcatttgcatgtttctacttccttcattgccgtaagggttccttctatgctttctaccatattctttacaaacagagcagaatatccttgctgttccttccttcacatcaacatatgcccacttgtatgtatcagcccattcctctctccatcttttcacaaccttcttcttcctttttgcgg

SEQ ID NO: 645 - DNA, 556 bp, Gossypium hirsutum
  misc_feature (28)..(30): n is a, c, g, or t
  misc_feature (54)..(56): n is a, c, g, or t
agcttccagtcgagccatatatgttgannnttcggggtacgtttaactttaccnnnttctacatgtggaaggatgggcatctctcattgcctgcattaatgtgggcttttccacatattactctgaaaatttaatagtgcttttgccgggttttggtttttcttcttgcattgctgtcaataatacatggcattttgatccttgcaaagtttatgattcttttttcttcacctggataataacttttgttattggtcccaaccttatgtttctcaataggtggtgtcactgatcgcccctgcccttacaagtgcatatctgaaagatatcatatgccacactgttacaccgcacttgaagagttggtatatacctttggtgggccatggttttttggtcttattcttttaggcctcctcatccttttagcactagttcttagtgttgcaaggatgaaatatgttggtggagatgaattaccagctctcatgcctgctcatcgtggctctcaaatagatcactcattccctttcctagagtcattgaatgaggtttt

SEQ ID NO: 646 - DNA, 666 bp, Gossypium hirsutum
caattttttattctttatattttttctaatgataatgttggtgtttgacactctttatccgaatgaaatatgaacttcaatttggatcttaaacaacagagtaatatatccggatgaagaatgaggaaaacttgagaatcaggtctggagtttttaagcaaaacaaaaacagaattgaaaagcaaagaaaatatgtaaaggaaatggagaggatattgaatgaaaaagatgatgatttttcattaatttgacattggcaaattgccattacatatatcaaacatgagatgatcattataagtcaaaatgctacctaaacatttacctaacatcacttaaaacattgaaaattgctaaactagcttgcacaagttgctttgctgaactttcagtcaatcaacatctaaaatacatcaagaagtttaccaactaagttctaaaagaactaagttacaaactatgaatttaaggtaaccaaaatgagttgaaattggacagcatcagtaagcttctgcttctgtctattggtctcaagctgcatgtctaccttttctggttcaatatgcatacttcaccctgtaatagtacgacagtttgatctctttttttacagctgcatgcatggctcgggctgcttcttgacactttagcttcttcacatgctgc

SEQ ID NO: 647 - DNA, 653 bp, Gossypium hirsutum
tcatcttacacagcatcaatttcgttccaggtcatcgtttctaggttaagtatatgtagatcattcaagagtgttctttttgcatcctgtccaccaaatatcactagggttgttccaacaagggtcacagattgaccagcacgagagacctgaaaggcactcaaattagggggaaaagttcataagatattgggaaagaaaattcaaaataaaataaaaaaagagactaccaagcacacatacacgattgacctttatcctccacaaattttacctccagcctttgttcaagtttacaaatgtgtttacgtaataagttttgagctaaacattacccagcgatcaacattactatacattcagttttcactttctaatataccatattcagttaagcaagaatggctaatcccctcagtggccagtattccagagacaccaaaaaactaaaggctagtctaattatttgtgcagagcaaaacaaaccatgcaagctgctaaatttctaatcttaaagctgaaacttgagtacatagagagaacgagatgtaattaagaggaagaatagataaataccggtgctttgccataagtattcaacactgaccatgtaccagtttgcagatcaaatgccttccctgccataagaattc

SEQ ID NO: 648 - DNA, 661 bp, Gossypium hirsutum
  misc_feature (60)..(61): n is a, c, g, or t
  misc_feature (630)..(630): n is a, c, g, or t
cgattgaattggtggtactgtggataatataagatttatatattactttgaaaagataannttttatataatgataaatttaatcttgatatttatttattttatctctttgattttttttatcacctcgtcttgtaaactttaaattatagttaatttgatttttttgaggtagaaaattttattgaaatgttaaaattttaatggtagtgatattataatctatatggcatggtagtctatatatacttcacaaaaataaaaaaattaaattttcaaaaaaaaaattaaattttcaaataaaaataaggaataataataaatttagctctcaatgtttatattttttttatcaatttggcccttatttttttaaactaaatttaaccatcaagctttttaaaaaaatcgaatttgaccatcaacctttcaaaaagggtcgaattattatttttttaacaggaatgcttactaaaacgttaaaatttttaacatagtagcatgtatggaaacctacgtgtacttcatactaattttctaaaaatttttatgaactttttatatattttttgaactttgaatattattataaattataaattatttattgacgtgatatataaaataaanggggccccatatacgtggattggtaccccaa

SEQ ID NO: 649 - DNA, 760 bp, Gossypium hirsutum
cagtacttctctttgactgaatgaagttttgccgtgagtgtgggcaagtaagaatcaaatccgggtatgaagctgagaatccagatcaattcattctctatccagtcaaggagttgattattacagacagagatgataaataccgtctgcaaagaaggaaccaatagattcttctaagaattcaagaaaatctagcttcattttggacaatgccattaccagtgaggtcaattgaggctctgcttgtatgtaaaacataaagagaacatcactatttgcaaacctgtatgtgagttttaatgattgccttcccaatcaatgtagcgagaaagaacttccagaatggtatcccaaattgtccacacatgatgccagcaaggtcaaatagaggatttgggacctgaaacatgattcagtccatcagcaggaggttataaatcaataaaaaaacggcacaaataaatagcgtttataatccgctgtcaacttatattatcttcaaaagaatataattaacaagggctagcgctcaaacaccattcaagtttctctaccttgctctaacaacataatacaacacttcataaatgaagtagaaatttgcacattaaatttatcttagcaacgcatgtttctagcttgaaatttttaccggattgatatagtttaagtcctaaacaaggatttcctctggagaaaatgcatcagaacatgcatttgttcatgcacatacaaaacagggataacagtcagccaacca

SEQ ID NO: 650 - DNA, 330 bp, Gossypium hirsutum
agatggacgcttcatggctgcattagcactggcatacatgtttgatgggaggtaaatatttctgtcttaattgcataaactttaacccaacactcctttgtcgatttttatatatctaaatattttgtcgggaccttgtcacattaagtttactgtattcttattctgtaatatttagttggtctataacgttttagcatgccttatcatgatgaaatctctggttaaagacaatttttaccaatgtctgaaaagtcaaacatgtataatctctatcctgaaaaaaaaaagaggttaaatatcaccaagcaactaatgatttatcatgca

SEQ ID NO: 651 - DNA, 470 bp, Gossypium hirsutum
cgactgctagaaacagcagctcgcctcgaagatccacttgaacgcaagaaattagaactagacaactgcacaagtcaagggaaagggcattcaacatcagctaccatcatacaacaatttttgttggaaaagtagagaaaggaaagatggagggtgggattcttctagtagcacaaagatgcaggattatttttagagaaaccaatttttctaaatcataatgtcaaaaacggtattacacaatgagaaacaggcaaaacctatgggagatctacccaagaggagaaataatactaattattaccataggatctttagcagcagaaagatcattagctactggacttttttgtttagctaaacttccagaatttgcaatcaggccagaatgcctcctgcgtgtaggatctgctgaagaccaaccagaaggtctggtctcttcacctgtgaaaaatccaccatatcatcat

SEQ ID NO: 652 - DNA, 530 bp, Gossypium hirsutum
ttgagaagtttatagataaaagacacttacaaagagaaactagaagttgtgaaatcatgattcggttcttacaattagggaatgaaaatattttggcttaaacaaatccaacattcctccccctgacaatcgtttgagtgaatccgcatagtcctgaaaaggatctgatcttatttcttttcttcaagcaacattgtacctgttttcttacagaagttatgcatatgatgttgaaatgttacttttatagaagctgcttcctcaaaaacattggctttctttcccctgagggaccgcagcacggtttcaaactcctcttctcgaccaacatttacctacagagaaatcaaaagttaaagcaaaactacattatttcaggcattgttttgcaacacaaagaaatcaaatcttaaaatctgactcaccagccatctaggagactctggaatgtagaatagaagagggagttgtacaagactcggaattatacctacgcataaaataaccccccccccccaaaaaaaaaaaaa

SEQ ID NO: 653 - DNA, 629 bp, Gossypium hirsutum
  misc_feature (601)..(603): n is a, c, g, or t
gcagggttattgtctttgtcttcttgaggattcaaaattgtaagaaattagcctctttatctgagggggtgctatatctgacttcactccgagacttgcttatcaatggatgtccagagttaacctcattgccagagagtatccaacatctgtcttctcttcaatctctgcgtatttggagttgtgtgagattaatttctcttccgaatgagatacaacacctcaacttgctttcacagttggagattaagtattgctgtaatttgatgtcattgccccaaggggtatggagcctcacggcactggaaacgctggagattgaaggatgccctcatctgaaaaagcaatgtaagaaagaggagaggattgacccaacataacccacattccgttcattgaagttatgtctaaagaagaacgctttggaacctgtctatcggctatctcttaagtcttgcaattatcaaataacattcaagaattatgagaaaggattttagcattgcatttttgtgaataagacatctgcagtatcattcattcatccatttctgttaataatgttccctactatccagagttcattggacattcgcaaatnnntttgatttgatgaatttaggatttgg

SEQ ID NO: 654 - DNA, 512 bp, Gossypium hirsutum
acaagattctgaattttgagagatttgagctttctttaattgttttctgaaggagttaaagagcgagcgaaatgaacgaaaaagaaatgcttatttgaatttagtttttccttttttcattgttttgaagattttcagttcatttatgtgttctctttagcttatatcagctggttgagtgtatgatagagagaaaactaagggtcaacgaagtggaactaagcataaatttaatgatttatgtttaacttgtgttgcatattattgttttgttttctctgatccgttttttgtttgagaagaatggcattgattagaaatttgtcatttttccctggaaagggcttggtagaattgtccttggaatcgcagctcatggctagagatattcgtagttttttttctagaaggtttaactgttgtttgttgctaattattaatgcatatgatttaatttaatttagtttaattaagttaaagtgatagtcgggtttagattctgctcattccat

SEQ ID NO: 655 - DNA, 410 bp, Gossypium hirsutum
  misc_feature (10)..(10): n is a, c, g, or t
acttactccnactctgaatgggatcctccggttcagcatattggggatcaacaccaattcaattgcttcagctaagtacactacttggaatttcagtttgtacgatggaaaaactgccgatgcatggatttcttacaatgccactgctcagattttgagcgtgacattgaactacaagaacacaagtatttctaaaagggatttcactctttcccatcatgttgatctcaaggaaatcttaccagagagggtcaaggttggaatttcagctgctacgagtcataagtcagagcggcatcgacttctatcatgggaattcagctcaagtttagaaataaagacaactgatgagggaaagaagagaaagaggaacaaaatgatagtagtacttggagctctgctgaccattt

SEQ ID NO: 656 - DNA, 563 bp, Gossypium hirsutum
  misc_feature (152)..(152): n is a, c, g, or t
  misc_feature (406)..(406): n is a, c, g, or t
  misc_feature (441)..(441): n is a, c, g, or t
  misc_feature (450)..(450): n is a, c, g, or t
  misc_feature (517)..(525): n is a, c, g, or t
  misc_feature (528)..(532): n is a, c, g, or t
  misc_feature (537)..(545): n is a, c, g, or t
ttgttgaggatcttcttcctcctttgaacatttcctacaacttaaatcacaaagcaccattatagggttgatcttggtgtgttttaacattgaatgaaacctgagcaaattcatgtgctaaaattaattaaaaataactttaaaaaaaaatngcaaaaaacatgaatttcctccttggaaaaaaccaaaaaattccaaaaacacattgactggaagaaggttcccccggcccccaacacttaaaatattaaatccaacctcaccttaacgaaaccggaaaggaaaaggaaaaaaaaaatataaaaaggagacggcgccatcaccatcaccatcaccctcctcctcctcccctcccctccacgccaaggaaaatcatccccttccgaatacgggctcttatgttaangtgaaaaggaattgcatttacccttccccttcgcncattaaaancaaaaaccacttgctcataaaaacaaaaccgcaactgcatgacaataacaaacacaaacctatatcnnnnnnnnngcnnnnnagccnnnnnnnnnttgctcttgctgcttgct

SEQ ID NO: 657 - DNA, 653 bp, Gossypium hirsutum
gctataagtttgtaagctaagggtaaatcaaactgtatacactttaattttatttcataggaagagtcacaactctttctattaatattggttggttcgtgaacctataaataatacccagacaacattaaaaagagaaaataaaacaaaaattttcattttctcacaatccaaacaaatgtctgagtttccaatagtcaacatcaaatgcctctctcccaattcccaacccaatctttgctttttccaatttcaataacccaaaaatataaaccaagactttgaaatttaaaaaaaaaacaatttttttcttaaggtaacaaaaagaggcagagaggaaaactaaaggaacaacagaatagataaaaaggtttacctgaaggaggcttcgataaaggggaggagtgctagtggctagaggcaaaggaagcaaggaagagcgattagagatgaaacaaaatagaaatgccctctagtccctgcataagcccataatggaatacaatagtaataggcatcccactaaacccaacaatagtttgtgctgggcccgcaaaattgagttgtaatggcatagccattatattgatccaaactgtaacacctcaaatcctgcttagacgttatgaccagattattgaggagttgtcacg

SEQ ID NO: 658 - DNA, 588 bp, Gossypium hirsutum
cctttatgtatgttgacatccttaaggacatgtccagaactgtcttttgtcttttttttatcacccctcttatatttaattattgcatttcttttttcagtgctgtctcttgatccggttattggagctattgcagctggtaatgctatagtcttaaagccatcagaaatttctccagccactgcatcattgcttgcaaagctggtagcgaattacatggatagctcttgcataaaggttgttgaaggggctgttcctgaaacaacagcactgctcgagcaaaagtgggacaaaataatgtatacaggtatcttgttcatttcattaccatccttttaccttctcctctagcttgatcttttatgtcaaaatgatgcacacttggacaattggattatagggttatagggttcatatgtgcatcatgcttcaagaagttttctttcaaagatggtgcaagattgtagctttctaatacttattaccaaacagttgggaaggattggatttgaattcttaaattgtgctagtgaagaagagatagatggcgacaattgatgagttataatgattcccctttgtcatgaa

SEQ ID NO: 659 - DNA, 453 bp, Gossypium hirsutum
atccgtgaagcagattgtttcttaatttaagtgttgtctgcatgaaaaatgactttagcttgatgctaggtgggatgacaccttggagcctgttgaaagaaagatttaagtagcctaaattgggaagattgaacagccaagaaggaattgtccctgataggctgttattggacaaacttaaaaatactagtttggtcaggtttgatataaaatctgggattttgcctcctatgttacatgaatcaagggacaacaactgtggttgaaaccttggtggaaatggttgttggtctactttcacagttagcccactaaatcccagaattaacatatatggagctgagtttctgaaaaaagatgacaatgaagggattgatccattcatcttgttggaactaacctcaaggtagctgagctcattgagctggcctatgcaatttggaatgtttccgg

SEQ ID NO: 660 - DNA, 618 bp, Gossypium hirsutum
aactcactgtaaaatatcagaagaaaatcacgaagaagtcgattgattatgcatctgatacaaaggaaagcacaaattcgcttctagaacatcaaaaacctcgcaccaatacagaatgttcgggtactaaaactagttccttcatgtttaaggtaccaaaattttaatacaaaaccttatcaatgcattccttacatacaaatgtgaccttaagacagcctaaaacccgatgaaatcctacacaaaactcgaaaattcgaagttgaactgatgctcattttacgtaaacgagaatttataaatgtaactcaagaaccagcttcaacacgtgtagatttttgcccacatggatttccacggcagaagaatccccggaaagtatcatgatcaaggtccatttagtataacatagggaatgaaatgtaaagaaccattagtagtataatttctgacacaaagcacaagtttgcttctaaaacatcaaaagcttcacacaaatacggagttttcgggtactaaaactagttccttcatgtttctgattccaaaatcttaatacaaaaccttatcaatgcattccttgcatacaaacattaccttaagatggcctaatacctg

SEQ ID NO: 661 - DNA, 603 bp, Gossypium hirsutum
ataatatacatcaaaacaagaaccaaccaggttaagtatttcaaatgaagaaaaacaaggaactgacctttataggagcatcgaaagacttcgcgacactaaccatcacaggagtgaaaaagacccagaaaatatcatatacaaaaagcccagcctgcaatgtataacgatggaaaaggaaattcatacaaaaggaaacatagttgaaaatgagaaaacaagtgaattaagtggacaaacagcagcctaacaaaaaagtaatttgtctaatcagcaaggaaaaaaaacctttgaaatttggctaaacagagcaaacgaataataagctcaaaaaaaacagagcaaaatgtaagatagaagccacaaggatcaattcttgtcaaagcagatagcacataaaggaaacagggtctatggataaaaatctcaagaataagcaaccataggaaagttgtttgattcatatcttgaccagctaaactcatgcaaaacattgctacataaaaaataaaaaaaatcagactaggaagttgtctcagtaacagggaataataaacacaaaaaaaaaaaaccccctttttttttttccaaaaaaagggcccc

SEQ ID NO: 662 - DNA, 403 bp, Gossypium hirsutum
tgtcttggtgcacatcggcagctcaaagacagataggcgagacttctttgaacgagacaagctctagatcccatcaaattttgagagtggtaatgttttctgtttcattgcgaaacttcaagatattgttcacttgacaatgattatattctattttagttattaatctttattcatgtggttatgtcactcatcagatgatagaaagttctgcacgagaatttttaggcaatggaaaatcaagtacccttgcagccactgtggtatgaacaatatatacttttcagtcaaggatttgttgttacaacagatattgggaaagaaactgatgttctcattcttttattgtctagaattttgttgatcttgcaggaagtgagcgtgcatctcagactttaccaac

SEQ ID NO: 663 - DNA, 612 bp, Gossypium hirsutum
gtctggaagtgccttgaccagcttgaatagctggtccataagttcctctgttccttcgtaaaaacctttgatgtgtcaacggagttccaaccagtttcacctcacacttgtcacggttgaaaccagagccaagtgctcgttcaacagctttccacattacctggtttatgaagcattaacttttgagctttgagttttcaagctatggctttgtcaaaagcattagaaagcaaatataatttacctctgatcgttcagctttaagctttttgtattctgcacttctacgatcgagcccctcccacaattcaaatggttcagttcctggtgtataagcgtgcaaaacatgcttccctggtggtgcaagattaggactaagtacactaggtacagatattaaaacaacattctgatcagcatcaactcctctttcccattcattaacaacaatatgatgaatccccaaatcctcacgtacatcctgctcattatggtgcttgaaaagacgtcaataacatatatagatgcacaacatttgagtaattagaaaactgagttaccagttactaatattttggtacctcagcatcaaagcctagatggagatgcatg

SEQ ID NO: 664 - DNA, 628 bp, Gossypium hirsutum
agttgagtcactttgatgctcagactcgagagttgagttgctgatgttaagtttttcctgaacatcataatcctcagagtgattgtgcaccagagaagctataaagtcaattaaagccacacagaatgcttctggttcactgatctcaaagtcaggttgatcattataaaccctcaaataaacattgccaacaaaaagttcctttgacagtgcttcataggcaaagacatgagaatctttcaggtcatacgaaccatctgggccttggctagatctttgctggtccacaaatttcagcaattctgctcgagttgaagagttccagattatctatgacaaagaagaagttagacttcaaccaataccaaggtaattgaaatgaaacaacagaaaaagtacactgttcacctctggtgactctaggtttgtattcaacttcgacagtaggtcttttggtacatgatctctcaacatgctggcaagtttcggagttagcaaagctctgagtacattgactacagattcattataaggtgttccgttttcatcacagcataacccactaagcctagataatgcctgggctgctcgtacagcatgcatatttttcgcaatttgaacactagca

SEQ ID NO: 665 - DNA, 635 bp, Gossypium hirsutum
  misc_feature (60)..(60): n is a, c, g, or t
  misc_feature (62)..(62): n is a, c, g, or t
  misc_feature (474)..(479): n is a, c, g, or t
  misc_feature (484)..(486): n is a, c, g, or t
  misc_feature (509)..(513): n is a, c, g, or t
  misc_feature (573)..(573): n is a, c, g, or t
  misc_feature (590)..(591): n is a, c, g, or t
  misc_feature (599)..(600): n is a, c, g, or t
tcccttggtcctgcatggcaaataatggtgctgaaatggatgttagaaagaaaacccctnanttaccatttggataaatcaaatcgaatgtggtctttgcccccatgcatataggattatacttgcatttaagaataaagtttatttatgttgttgctaaaaaccagcagtcaggttatgctgcaagtacccttccatgtctccaatgaaatcgaggcaaacttccatggtcatggtcgaaggacgcatcagatttccaaggaattatactgatgctgaaaattccgaaccatagatatgggaatctaaggatgtaggagaaaagatgcaagatcatctaactcatcatttttcttatcatagcgcgcagatctcttttagggagaaaaccagactctcacacaatctcatagtgaagacaagaaaaaaaaaactaccttattaccaggaggacatccaaagcattctactttnnnnnnggagnnnagctcatccttctactatgattnnnnncaatcataccacaccaacaaccccttgtggaataaacagcaacatgtcaaatgaaaatanatgtgttaaaagcaaannaatgatanncaatgaaattcccactaaacaatgagattcccact

SEQ ID NO: 666 - DNA, 466 bp, Gossypium hirsutum
aaactagaaaaatcccagctttcttcagctctacgccctgtacgtagggcgggtttcgcctggtcactttaatcttaaaaccatccttcaacatggaaaccaagggacgatatgcgggatatcgacacaagtgaacattgtcttggttggttctaggtaccccaattaagttcaatgcagtggtcattattgcctcctcgccattgaagatctgtgcttgaatgtccggcacggcaggcagttggtatctcagttcatctggaatatgatggttaatggaaacaacaaccgcgattatcaccccagtgagatcacgggttttgtggcttgaaaaggtaaccatatcttgtgtaaaccaatctggaattctacttccaggcatgcttagatttctctagattcttgagataaacctgcaaaattagttgcatcaatattcaaaagctccatcccaaacgtgatttat

SEQ ID NO: 667 - DNA, 629 bp, Gossypium hirsutum
ctctatatctcagtgcgtttcttcttccagtcattcacctcagcttctaatgttgagatctttgaatcaatgtaatgaagcaatttgcaccctcgttgaccaatgtaagcaaagacaactttcttcaaatgctccatggcaaatgccacattgaaaccaaggcgtaaagcatccttgatcacatctctccacttcagaattatgtcctcagtaacttcctcaagccgtagatgttccatatctctgatcacagcacaaaataaaacatagactgtggtagaaacactgggacttactagacttgttgcagaaatatcaccgtagacactgtttattctctcaacagttggaatcagagacaatgggaaactgaatctcccaaatcttctctgctccccgtctaagcctgtgaagtctgagaggtctacattgctcgcaacttctgtatgaaattctgtaaggaacataggcaacttgatcttagccacttcagcagaacatgaaccactctgagcactctctggatgttcagtagcaggctcattgacagcagctcttgcatttggagtcctctctttattatttgtaagattctgactgacagccacacctccatcatttgaactaaa

SEQ ID NO: 668 - DNA, 635 bp, Gossypium hirsutum
gaggtgcagcaggggcggctagcacttccacctcctagtgttgaggcctcagtttctgattcaccaaatcggccagcaaagcatgcaaggagaaccccatcagaacatatgtacccaagtaatcaagtgcctaataagcatggtagcaaggtagaaatgggcagtgagttacgaaataccaattatggcgactgagacttggtggatgaaattgtttctttttctctatgttttcttcccttttttgtgtaatttttttggctctagaacgctaaacagaagtcagaaaggttggatggtagctttcgttttgcaaggaggaacggaatctagagcatgtttgacgggaaatatgtatttaaaaattattatcattattattatgacattgtattttgtataagatgtaagaggaactaaacgtaaaactacatatgtatgaagtcgccttcaaacattttgatcattcattggttcattttttatatacagaagaagaaagtaaacaaggcaaacaagtcagtttgggtggccggccttcgtatatttagctttatcaattttcccaaattcggacatatgtatgtgcgcgcgtgtcaaactgttattgaaacgccaattgtaaggtctctacg

SEQ ID NO: 669 - DNA, 585 bp, Gossypium hirsutum
  misc_feature (374)..(374): n is a, c, g, or t
  misc_feature (384)..(384): n is a, c, g, or t
  misc_feature (393)..(393): n is a, c, g, or t
  misc_feature (401)..(401): n is a, c, g, or t
agtgatttccttgcaggatttatagggaagtggtgctacccttaaatattttgaatgaagtggcttctcttatgacttgatctgcccttgcacttgttggcctgaaagttgtcatattctgacaagcattttgaacccttgtgcctctctttagttgcatactctgaaaccccagaactaacgagaccaaaagcctgcatttttatgcttgtaattcatgcctatatttgcctgttattttgattatcgaacaggtgattttggagtagcggcacagcttactaggaccatgtcaaagcgcaatacagtatgtagtattcccactgctttgctatgtgtgcaactgtttctcttctttcaagtataagttatantgactttgangaagttcantcattccncaattttgggttggattccttcgggaggagtttttaatgtcataacagaaataagtgtcatcttacaatttcttatcaatgtcaaagtgatcagctggaaaaattgtttacagggtcagcgctttagatataatgttaaataaccaaacaaggaaaactctgcatctagttactcatcagccaa

SEQ ID NO: 670 - DNA, 557 bp, Gossypium hirsutum
aagaaaaagaaaaaagtcagtttaaaaacttagaaagaaatgaatgcttgttttggtgttttagggttatttatagggttatgtaaagagatattttctacataattccttctacgtcctaccttttgcagaaaaggatcgccgaatggactaattgtagttctcattcctctgcctttgatttctcctcgattttgaaattttaggcaaattaattgccaaataggtcctctgcttcttacatttttttatcctattaatttggatttctctatttttatggtgttttagggttatttatagggttatgtgtcacggaaagaatctaaacagaaaatatatagaagagaagagaacccaaaatagaaaaaagaagaaagattgatagaagcataagagagaatagtggaaattttgtgttaaacttttcataaccgtttttctgttccttttgtcaagtatatattgaaaccaaataacatctcacacaaaccatagaatagaccaaaacacatcgtttaactaatacaaaaatcgtaccgtttcaccagaataga

SEQ ID NO: 671 - DNA, 632 bp, Gossypium hirsutum
ggactggaccaacctattgaagagagaactggttggtctggcagttcaatcatataggttgaaccgaaaaactaatgaaatggctagaaaccagaaaaaccagttttgctttgatggttctattggggtttgaacaatggctggcaacaagatgcttgttttaaaatttcatgcgatgattgcagatgatagatgcttcccaatgcatagaagatgtggagaaacaagtggaggagatcgtattggaacatgtcgtgacttgtcagaaagggaagcctctttcatccctctggtcttgctagtttatctattatcattctctcttcccttcttttccaactgaagagatgcaaaacttgcatgtggcaagcttggcaaagaacttaatactgtataaccttaaattgctgcttgtgtcttaagtgttgtagatttcagttcagtatcttactatgtcttcaaaaaatgtacctctcaactcttgttttagagtagtgtgttcttatttatgctttggttattgtttggtgttgtgtgatcaaaacaattatattgctaatttatgaatgttgatttgttaaattatgtagaccatgtacaaatcttagttttacacatgttttaacttctag

SEQ ID NO: 672 - DNA, 661 bp, Gossypium hirsutum
tttaatcactagtaatatacccctatagtcctctagctttgataaagaataagcacgaccgtgaccatgcaagataattgtgcccatcaagttttattggatggatttgtaatgaggggttatcataaataactttttttgtgtcggccatttttttctcttaaaaaaagtatcactagagccaataactgcaagggatatcgaagaaacaccaacaaaaccaatagtggtggctgaagaatcaaagtcgacggaggtgggctgcacgcgctggcgcgtgggcaaggatgccgaaggtatgagtggcacgtgagggccacgtgtagggggtttggacatcggattttgaggtttcgccggagactggactacaactctgttgaaggtggcgatgaaaaaatactggtcggaagaagaagagtacaaaattgaattttctaaggtttgggaattttgaaaaagataggcttctaaatattgattctcaagctcttgataacatgttgaaaataaaaattccttttccttgtccattaacttaagtatttacatggatatatatatacaactatgttgaactacttaaaggaaatacaatcttcacaataaatagaataaataaaatcccaatactttagccttaagaaatcagatcagcctt

SEQ ID NO: 673 - DNA, 699 bp, Gossypium hirsutum
ggattgcccttctctttggacttaggagatgcaagatcgttcgtttcagcattatcttcagctatcatctgatctagtagagatgatctttggctcatcaacttcttccttggtggaattgggattgcagtcgaagttggactagagacgatgttgtcgagaaggactgcttcctttgtagatgccaatgctttcaattgctttcccaagtttaatatagtctcttggcactcggccaacttttctgaagcagctgcgatctcccagtcctgccagattaatcaagagtcaaaatatcaaaactaccagagtaatgatgtgaaacgaaattatgttacatgcatacgtgtgatatgaacttactgttcgaaactggttctcatggtgcttgatttcaggatttcgtatttccttttctgtcacactgaagacaacaaaatatcaattgcacaaattctagatgctgcagacagaattgatcatgatattaggttcagaaggtaaaactgatattacctgtcaagacgtgtgacctccaattcttcatggccgtaatttttattctcagatttcagatcttgaggagactttggacaagcctcatttagttcaactatggttgatgagagctcatcatcagggttttcattcattggttcatgcttttcaacttgaccttcaaccatttcctcagttctt

SEQ ID NO: 674 - DNA, 613 bp, Gossypium hirsutum
  misc_feature (566)..(566): n is a, c, g, or t
attacttttgtacactgtagggcttaaactttgctagtagatgaaactgaattttccttttacattattttttatgaaatatttacaatttcagttctatatgcatgtttaggttctgacagaagtattaacatgtagctttacctatgctggtgaactttgttaccataatgagttttatgctttccaatggttggaaaattatctgagggcaatgttttgttcatattgcctaaaaacatggaagtggtcccaaatttgtggatatgctgctctaagttttcatttttcttgaaatgccctgtccaacctccaaggactctccaaatacatgggatcttggaaaaaaatgaacatgagtctgacacatacccatgttagacatacactttataatcaatgtaaaactcgtttcaatttgttagattttaaggctattaggattgggtgataatatagctcatagtgtaataatattttttttatcaatcaatttcaagttctattttagaaaataacggaggattgagttttttttttcccaaggcttttactaattgtaaagnaaaaaatttaggttcatgctgggaaggcttgacaaatttctataaag

SEQ ID NO: 675 - DNA, 562 bp, Gossypium hirsutum
aacaattcggtcagacgaataccttctttcaggtacctcttcaccctcaaatctcattttgaacctcatcccaactgatagcttatggctttgagcttcaagatatttgtttacactcactatgaactcagacaaacttgttctagtaaatagaatggttgttagaacaaatttcctctttcaacaaatacatacagaacacaataattactcaatttcatttaatcagggctataaatttcaagaaatctttacaaacggggacttaaaaaagaactttggtttattggaccccactaaaaatgccagaaaatatgaagagaaagaaaaaaacagaaatgtacaggcatagagcaagagcatgcatatcataccctaaaccctatcaccttcttaaagtatcgcatctgaatagatataccaaaatctaatgcagctcactcttcaagaagagtatatttaatacacagtgaaggaagaataaataatgaccttagaagagaaaaagatgcctacaactttaatccacaaataatcaaaattcagggccaaacaagaatga

SEQ ID NO: 676 - DNA, 418 bp, Gossypium hirsutum
gaagcctcgatctttaagtaaactttgtgttatctagatgccctaaagtagctcttgaatagtattagaaccagccatgttaagtaaatatgtcttcttaaattgtgcaaagcaattcctataaacttgtttaacctcaatagcactcccatgcattactgattttctgtaatatcgtctttaaattgttcttcatactatcaaagcataacattttatcggatgcatcttataattttcttcgtcaaaagaaattgggggtcctgctatgaaataagcttggctgccaacaaccatgcagtctgcaatgctggttgaggattcctgtttctccatgtaaaagagagttgagctgaccaagcaggcctagagtagttgctaactgtttatctatcgtattaatattgttacgtctttt

SEQ ID NO: 677 - DNA, 627 bp, Gossypium hirsutum
acgtgcacatcatggctttgaaccttgttagaggtgttccactgaccccaaaggagaaggaaactatgctagacttgctcacacctcctcctccacaaggtgttacaccttcctccttgtggagtcggtggcgaggttggtgatgggtttttttcctatcttttccttgatggaccttgaagtttctttcattgatgaataatctcatatattgacgagagtctcatatatagttgattattggaattatattatgtttgcatctgttccgattatctcaccctgacgtctctcatatgaagttgttttggtaaaaataaaaaataaaaaggcctgacttgtataactttttatgttaattttacgatgcatgtatacgataccctacctcgttcttgctctggttttgcttctgtttcttggatcttctaacaactccgtttcttggatcttcgaatttgaaacttctttgggttggtttatcgaacgctattatttggttcttagatttcacaggccattgcggctccaataattacatttgtttggtgacagacctttgttcagtcagttccagcaccacaaaattagatttttgcctattcaagtaccagactagttgaccgg

SEQ ID NO: 678 - DNA, 390 bp, Gossypium hirsutum
acacttccaccttgttggcccagctttgccatatcccaaacctggggtgcagaaatcaaattagcaaccaatatgtttcctagaaaaatgaaaaagaaagcaataaagcagaatcatatatcagccaagctatgatttaagatacgaccttcagtgacaagtctgagaaccccccagcaaccaaagatccatcatgggatattgatgaacaattcaaactgatgcaggttaaataaaacacaataagtacctcaaagcattagaaaatcaagatgaccattaaatcacccaattcacggacattacccattatacgtgttgaggaaagtataaaagctgacagatggtagtgcaacactactcaattgtacacggtttcttaaatcctca

SEQ ID NO: 679 - DNA, 645 bp, Gossypium hirsutum
ttttggagaatcatgaaaatcatgcatctgatgaaactggtgaccactgtgacgtggaagagagaagttgtaagggtgagaaaagtagtaagggcaagaagccagcttcaaaagtcactgtcaattcgaaaccccaagggaacaataattctaagaaaaaacaagagtggaggccaaaaaccagagtagataagcattcctgaaattctagagggcatatcacctatctatatttacagtggttgcatataacatacttttgcttgatcttttattagttgaaagttatggtagaacttctggtatggggcgaaatcaatattctgaattgggtttaaaatgtactttttgaactgcaacctctcagtagattctcaattttattgccttaaacaaaagcaagaaacctttaccctaataccattatgtaaataatatattatataaagcccaaacaaatgacaatcatgctaaccaactgttccaattaaagagaccaaaaaacaagaaataatagtaaaatcaagcaacttgagaatatcattgaagcctaaaactgccaaaacaactaattcctttaataaaaaaaaggtttcatctctttatttctgttaagtatcctctgacacttgcaaagaaagtcca

SEQ ID NO: 680 - DNA, 658 bp, Gossypium hirsutum
  misc_feature (619)..(622): n is a, c, g, or t
  misc_feature (626)..(627): n is a, c, g, or t
ttttttttttatctagatattaaaaatcatttttcaacagaaagcatctaaaccatgcttatgactaaattcattaaagcatcctttctcccagtttatatatgattgcatcaactttaattttttttttctttaaagtcattctcattctatcttttttttggggtatttttgcttatatccgtttcaatgtttccatttggatcacaagctacgtgtgcacattttctccacctaaacacaaaaggcactgttactattaatctaaagaaagtatttaaccaatttgtagtactaaccaatggtttttcgtagtactaaacgtttcctctatgaattttaaaacacctaaagcagagaccaaacctgaaatctatgcctttcaaaaagtggtctctgcacaaactgattcctctactaacaatggggaaactttcttctaatggatctaaaattttaatgttctcaccccatttcacaagcctgtccaaaaattctgctgcaatactttcctgtcaaacaaataacaagctttgcctcgtcatgaattggaaatagaaaaaaaatataacaaaatcaacaaaaacatgctacaggcatagttcaaaaactcggggannnnaaannaatggaaaatatatatttaacaaaaccgaaa

SEQ ID NO: 681 - DNA, 1296 bp, Gossypium hirsutum
  misc_feature (615)..(621): n is a, c, g, or t
  misc_feature (624)..(628): n is a, c, g, or t
  misc_feature (631)..(636): n is a, c, g, or t
  misc_feature (638)..(643): n is a, c, g, or t
  misc_feature (651)..(661): n is a, c, g, or t
  misc_feature (665)..(665): n is a, c, g, or t
  misc_feature (675)..(676): n is a, c, g, or t
  misc_feature (678)..(678): n is a, c, g, or t
  misc_feature (682)..(687): n is a, c, g, or t
  misc_feature (693)..(695): n is a, c, g, or t
  misc_feature (705)..(705): n is a, c, g, or t
  misc_feature (709)..(712): n is a, c, g, or t
  misc_feature (717)..(722): n is a, c, g, or t
  misc_feature (724)..(729): n is a, c, g, or t
  misc_feature (732)..(739): n is a, c, g, or t
  misc_feature (742)..(756): n is a, c, g, or t
  misc_feature (758)..(766): n is a, c, g, or t
  misc_feature (769)..(776): n is a, c, g, or t
  misc_feature (779)..(790): n is a, c, g, or t
  misc_feature (794)..(794): n is a, c, g, or t
  misc_feature (796)..(797): n is a, c, g, or t
  misc_feature (809)..(814): n is a, c, g, or t
  misc_feature (819)..(824): n is a, c, g, or t
  misc_feature (832)..(837): n is a, c, g, or t
  misc_feature (840)..(855): n is a, c, g, or t
  misc_feature (860)..(865): n is a, c, g, or t
  misc_feature (870)..(899): n is a, c, g, or t
  misc_feature (901)..(906): n is a, c, g, or t
  misc_feature (909)..(919): n is a, c, g, or t
  misc_feature (923)..(945): n is a, c, g, or t
  misc_feature (948)..(960): n is a, c, g, or t
  misc_feature (965)..(980): n is a, c, g, or t
  misc_feature (990)..(1005): n is a, c, g, or t
  misc_feature (1016)..(1016): n is a, c, g, or t
  misc_feature (1018)..(1024): n is a, c, g, or t
  misc_feature (1029)..(1043): n is a, c, g, or t
  misc_feature (1045)..(1045): n is a, c, g, or t
  misc_feature (1049)..(1061): n is a, c, g, or t
  misc_feature (1066)..(1067): n is a, c, g, or t
  misc_feature (1085)..(1086): n is a, c, g, or t
  misc_feature (1088)..(1090): n is a, c, g, or t
  misc_feature (1092)..(1097): n is a, c, g, or t
  misc_feature (1100)..(1110): n is a, c, g, or t
  misc_feature (1113)..(1117): n is a, c, g, or t
  misc_feature (1119)..(1123): n is a, c, g, or t
  misc_feature (1125)..(1125): n is a, c, g, or t
  misc_feature (1132)..(1136): n is a, c, g, or t
  misc_feature (1138)..(1146): n is a, c, g, or t
  misc_feature (1152)..(1159): n is a, c, g, or t
  misc_feature (1161)..(1184): n is a, c, g, or t
  misc_feature (1193)..(1193): n is a, c, g, or t
  misc_feature (1215)..(1216): n is a, c, g, or t
  misc_feature (1218)..(1221): n is a, c, g, or t
  misc_feature (1223)..(1236): n is a, c, g, or t
  misc_feature (1242)..(1242): n is a, c, g, or t
  misc_feature (1248)..(1253): n is a, c, g, or t
  misc_feature (1257)..(1268): n is a, c, g, or t
  misc_feature (1270)..(1276): n is a, c, g, or t
  misc_feature (1279)..(1286): n is a, c, g, or t
cacataaaataaagatattagaaattactgattaattataactgaaaacattaaaatatattttgagtgattaatagcgccaagggatgtaaagttgaagaaggcatgcagacacaaattaatttcatacagttaacaaaggcgtaaaatggttgtgaaattatgtgcatgcaccaccgactagatgaaaggtaaatttacaacaaaagcttaggtggaggcacaaatgcaaaccccaaatagagctaaagtgaaataaaaacacccatgtataataaggaaaaacacgggaattatagcagctgatggaaggtccaacctgtcatcttcacatcgaaataagctttcttcatactggtttttgcgcatgtgtttgaaagagtagtcctcactcccagaagtgacagaaacccaatgatcattgagaacttcagaacctagctctgttctctggcttgcagaaggtattgggtactgcaaggcattggacaatcatagtaagtaataacagaatcaacatatcttcctgatcaagataacaaagttgagtataaagcaaaaactgcatacattctttggaagaagtcgataactaggagtgcaccgttcacaacnnnnnnnctnnnnnctnnnnnncnnnnnnttcaaccnnnnnnnnnnncccncttcaataannanttannnnnncccccnnntttaaccccntttnnnntcttnnnnnncnnnnnnccnnnnnnnnccnnnnnnnnnnnnnnntnnnnnnnnnccnnnnnnnnctnnnnnnnnnnnntccncnnatctttccacannnnnnctctnnnnnncttccatnnnnnnatnnnnnnnnnnnnnnnnccctnnnnnncctcnnnnnnnnnnnnnnnnnnnnnnnnnnnnnnannnnnntannnnnnnnnnnccgnnnnnnnnnnnnnnnnnnnnnnnctnnnnnnnnnnnnncatannnnnnnnnnnnnnnnatatataatnnnnnnnnnnnnnnnntatccatctgncnnnnnnnctctnnnnnnnnnnnnnnntncttnnnnnnnnnnnnnttatnntcttattcacccatatanncnnntnnnnnnttnnnnnnnnnnnctnnnnntnnnnnantatccannnnncnnnnnnnnntattcnnnnnnnncnnnnnnnnnnnnnnnnnnnnnnnntcccctacntaaaaccctctccttaccccannannnncnnnnnnnnnnnnnntcctcnccccannnnnncttnnnnnnnnnnnncnnnnnnntannnnnnnnaccactctat

SEQ ID NO: 682 - DNA, 606 bp, Gossypium hirsutum
gccaatagtgagaaaggtcattcatatgatgaaatctctcctaagaaacctggttcacacataacttcaatgttagttttcctttcatatataagtcttgtgttgtcaaaatgcaactaactgtagttttatataaacatcttctcatgcagcaatatcctgtgcaacctctccctattttcttccgttggccttatgccttaaaaaaagttgaaagctgatgtagacattattaagaaagtgcaattagtttctctaactgccaatttaattcaaaacaataactaatttaccttgattactgtaatggaattaaaaccttggtggtattaggatgccaacatcgtgatacctaccatttagatggaatttggcatttgagttacagtcttggtgtctttttaagtccttaagcttttgaatatgcatccatgctttatgtacttcatgtgcctggagctaaatatgatttctaaaagttttatgccttatctttttgctcagaaacacatcttcagtttcatcacgacgtgatctgctctctgatagaggttcggatcgatatgacgaatggcatgctgatttgcttggttgtgctcagaacca

SEQ ID NO: 683 - DNA, 633 bp, Gossypium hirsutum
ttttaaaggttcgggagtggctatggatagttctaaacattgtatcaaaaaacaaaggctagaaatcgtaatattacactcatataaaatgaaataaataaaaaatattactagaaatattaaataatttttcaataataatatcaatatatatatgatttctcgtaaattttgaggaaatagcttatatgaaataaaataaaaatatttattttttcaacttttttataaaagtgatcccataatgtatgagaagaagaaattatttttggatttttttgaagttatttagaaattatatacattttattttttctaaaaatatatataatttcagaaaatgaattatgacattttagaattttttattttttaaaaattccttttagaactattattaattttttaatagattatttagttatggtttagaagtcaaattaaatattaatatgttaacgaatttcgagatacgaatacgtacggatccttaacaaattgaaacgattaccgttattaatattaaaccaatatcaattcatataagctaaatattttaatcgataattggattaaagaaatttatttaactaatcggttaagacaacaacgtcaattatttttgcggcgagt

SEQ ID NO: 684 - DNA, 662 bp, Gossypium hirsutum
aggagcctcttggatatttaaagatgcaagctgtttctgaatagaagatactctctgatctccaactgtttggacgtaaaattttccaccattcaatacttcagtaataacaacctgaaaataacaagaagaataagttatttctagttaagttcatgattaagtcagataggtattatttttagttaagttcctagagcacctccagcaattccttttgtttgttctctacaggggcagatccattggaaacttcctccccttcaacatagttctcccaaatctgcatttagaagttcaaagataataaagccaaaaagttctattaagcaccaaaagaatatgtgtgataaagataagtccatcagctacttactttcagtttctgcctcttggcagattgttcagcctgttcgagaagatgagcatcaggaatccagtcagcaccaaatgaagtttgtagctttgccaggccagcttcaactagtgtcacagccatattggttctggactcccacaaagaccccaaaaatgttccagttctatcgacagtttccacttcaatctatgtagaaaaacatacatttgtaaaaagggaaaaacaagatcaaggcagacaagcaattaaaacagaatccatacctccacatctctctgcatga

SEQ ID NO: 685 - DNA, 657 bp, Gossypium hirsutum
gatgaaagaagaggccaaaaatttgcgtgaggtgattgacactctacatttgaagcataaagagtatgctgatgggattcaaacatatataagcagccatgcaactgatcaatctgaagttaaacgtcttcaaggtctctgctagttcttttagaagatatttgtattttatacactatttatcagatatagatgcttgcaataacttcctaacatttataaatgcaattctcagtagcaagtttagtaccaactgattggcaatctggttgtttgttagccattgcctagattttattatttttgtcttatcaagattgtatgttaaagctgtagtttatttattctggaaggtgagctggaggaaatcatggctgaacttgaagaaagcagaagaaaactagttgatctgaaaatgcagaagaatatagcatctgggatgcatgcatcaactccagttgtagcaaatggaagcttgtcaccagaaaagcctggagataagacaatgggcttgcgggagataaaggatttgattgaggagacaaaggtattgatttacgtaactgcgtttttctcaagctctctccctcttttggtgactaatcttatatgatatgttactaaacaagtgttgcagatagtggcaggagatcgact

SEQ ID NO: 686 - DNA, 413 bp, Gossypium hirsutum
gatttgtcctccttcgctacaccgttgatgaattgcaaatgctagttgaagccctagagggaggattagatgctgttaaactatgggcatccaaagatctcgggttggtttctggtattgattgcgatgtttatttatctaagtgggttcaggacagtgaggtattaaaatttgagcctgctcgggaaagtttctcttgttcctcaagagtggaagaaaaggtggatattaatactccttacttgtatggtcatttttcttcggaggtatcgccatcagagtgccagcctgcgactaaattaaaagcctctcatgtcaccttggatggtcataataacgtcgtaaatgttggagttcttgtcatggaaaacagaacgaactcggagcaggaagaccgcattgacttaaatctt

SEQ ID NO: 687 - DNA, 616 bp, Gossypium hirsutum
cttgcaaatttaacccaatatttacgactgactggacttacaaatgccaatttgaccgctctgctctcatttttatcaagtagaaaaagagactccgttttctcggtctctcagatccaattctccgtttcttcctctttcttagatctccgaattccagcatttggatcttctctttcacattctttaagcttgctaaaagagaaaaaaaagaaaaacagtacggtttaattctgaatagtgctattttggtgatcgatttaattgcagcatttggtttagtttctattccatctgtttcgacctctctactagagtttcctaccttaatacgatcatgaatcctttttcttccggtacttgtctaaggtgagcaccaattcctactgttacccgtttcttattttacttctcctttttccttttaattggaagatcagatcaacaactcatgagtttgtttatttgagtggactggagttgtgactaaaatttaaaagagctgtattttttaataccgtgattagaatttcgggagttcagttgtggttcgtgcaacttaaaagatgattgggtatgtatttagagctaagtgtaatctgttagcctgtttggg

SEQ ID NO: 688 - DNA, 538 bp, Gossypium hirsutum
atgttattttcgtatttgtactcacaaccgaagcatgtatcttgatgaagtgagcccaccgacacccaaaacaacaccgacacccgagcctaactccaaggagaattccatgagtagcaaactagaatccctcactatacaagaagatgctaaagagggtgaagctgaagacgaggaaggccttccaatatacccttacgaacgtctcaaaataacctcaaccgatcctgtttctgaaatagatgtgaccaaacgagaggtatgatttaagactatgattttaagatggtattacatttgttcttcaagactcttataaccggaaaaaaatgcagacatacctgtcatctgaggagttcaaggagaaattcgggatgaaaaaagatgcattctataaattgccgaagtggaaacaaaacaaactaaaaatggctcttcaactgttctaagtcccccctttgattcatctgtgctatttattcaaaaccccctttcaaatgagagtgcaggtggaacaaaacatgcttccaaatccgta

SEQ ID NO: 689 - DNA, 625 bp, Gossypium hirsutum
catccatgacgatccgttgccgccgaacaaaacaatggtcttgacatgaagaactattcatggtcgcaaactctaggagacgtcatggttcaggtcccagttcctctcggaaccaaaaagaaactcgtaatatgcgatatcaaaaacacgtctctacgagtgggggttaagggtcagccgttgttgatcgacgacgagttattccaggcggtgaaagtttgtgagagttattggacactggaagataatgaaacggttaccattctgttatcaaagtgtaatccatgggaatggtggaaatcagtggtgaaaggtgatcgagggattgatactagccgatgcgaaccgggactgagacggttggatggcttgggctacgaagcggaacgtcacatgagaaagctgttgtttgattatgggcagaagtgtaagggactcccaacaagcgataattgtccggaggtgctccagaaattcattgttcaccatccatatttgaaccttcctcctcaaagtaaatgagatgattcatttcaacagccaactttttactttctgcaacttcttcagcttttaattcaattgttctgataatagactgatttcaattcttagattgtattga

SEQ ID NO: 690 - DNA, 655 bp, Gossypium hirsutum
  misc_feature (650)..(650): n is a, c, g, or t
acctaatgcctatatttatggtgaggtgatatttgatttttctgcagaattattgttgctgtgcttctgaaattgaataaaaccaacgcattcttgtttcaagtgaattattaatctccttttgttctcaggtcaaacttcactaggctaaactacggtggtttttactctgcaattctagaaaggggggatgagattatatgtgcagcatccatcaggtagtacttttgttcttagttcttagttctttgtgaattatagtatagaatatgtggaaatgtcttcacatttgaagagtgattataagatagcatccataagtggaaaaactcttggtcaccatccttttgttcctctgctgttcatttctagtacgtgtttaaattttaagctattttgttcagttattccccaatccaaaatgcgggaagcccatttatgtgtgaatacactgagattgaagatttaacacattacagtttgtttcaatacaactaatggtacataatcaccattactgtaggtttgcctatcattaactgataaacctgcccactcacctaactgttgcacttgtttccttaattcctaatgattactattatttacttattgggttaataggatccatgggaaccagttagctgagnagcct

SEQ ID NO: 691 - DNA, 660 bp, Gossypium hirsutum
attctttgtcggtcaagaccaacccaagacagggcagtgacactactgtcgaactgcggtaaagttaaaagtggcttaaccgaagatgttttctccacaccccagatcttcactgtcttgtccctagaacctgtcgcaaattcatgaccaaaagggttccacgaacatgcccatattattcttttatgagcctcctgccgagctacaagcttgtaatcaatttcatcattgcctacggatagaaacgagatgatttaatctgaaaatttaaccagatataaacatgatcgaggaattcaatcaatgcaaaaaccttctgccttaaatttctaattccccgaaagtatgcaaaaagatgtaggttaacagttttctcctgcctccccatttaatgattagtttgctcgaaaagtaaacaagctaaagaagtcatttctgggacaactttagcaacagttgccttttacaagacaacaaatatacttacatggacttctttcgaaattagaccaactagatcaagtacttaaatgaaacagtattataacacaattagtagattcctgagtacctgctctattgattttgaaagtggagaactggcgatcccttgagactgccaaaagaaggttgtcatcatgagagaactccatctgcgtg

SEQ ID NO: 692 - DNA, 643 bp, Gossypium hirsutum
gctgacttgcctaatttagaaaccttggggctatggatgaacaactttactggtgtgatacctgagaatctcggtcgaaacaggaggctgcaagtgctcgatttatcgtccaacaagctaactggtacgatccctccacacttgtgtgcttcgaatgagttaaggatattggtcctgatgaaaaatttccttttcgggtccattcctgaagaactggggagatgttacagtctcactagagtaaggttggggcagaattacttgaatggtaccattccaaatggcttcatttacttgccccaactaaacttagcagagttgcacaacaattacctttcgggaacattggctgaaaatggtaacatgtcgtctaaacctgttaagttaggccagctcaatttgtcaaacaatctcctttcaggtccattgccatcttcactttccaacttgtcttctcttgaaatccttctacttagcggaaaccaattctcgggtcctataccaccttctataggagaactcatgcaagttttgaagcttgatgttagtagaaattcactttctggtattatcccaccagagattgggaactgttttcatctcacataccttgatatgagcctaaataacctctctggctcaa

SEQ ID NO: 693 - DNA, 641 bp, Gossypium hirsutum
atttttagcttcttgatgcatcaactgttttcctttttaggtccaatagagtcaagacatgactagcatattttattttttatttactaaaaagcagaaaaaaaaacttaagcagattattgtggaattgaagaatcaaactcctattaccttatttctagcacttcttagacttttcccgtacctcatccatagctttattgaaaccctcaatatctactatcaaacctctttcctctgccatcaactgcaaaaggaaaaacattaggatgcagagccaaatagatcaatatatagaaaagagaaccaagtccatccgtctacctaagttaaatctaatggaaacccatatgtgtcccacaggataaatgtatcccgaaaaagccacaacaaagctgtaagatagccaatggtaggtagaaaggaggtcatggctcttaccgcataaccaaattcattcctttcaagtccactaggccagaataaataaaaaataagttcagaaattcagacggattatacacacagataatgtgtgcataaatacatatgtatatatcatcaactacttctaaagcaagattttaaaattttagttctgcttttcaagataacacgccaaattcctcagagttccagta

SEQ ID NO: 694 - DNA, 615 bp, Gossypium hirsutum
ggtcggagaagaaaacggaaaggcaaagacggccccgatgaagatgaaagtccagtttatgctccaggtaccacaagatgacattaaatcatcggcgttaatgtttcgtgttaaaaagaggtgggatatattgtagtttcatacatactcttttaaatgacatggtttttagaacactttgtaacgatgatgctaattgctatataatgacgatattgcatcactgggttaatcaagttactctttgaataatttcttcttatccatgttactattaaccctttattattttttgaatctatgtatttagacatgggcccatatctgtctatttgatggatcaaattaatttgaatttggtcatttcgggtttcataatggggaccaaacaatgcttggtttccatcagttgtcatctgtgaacctagccttgttgaatacacatactatttgatattcacactcgagtctgaataaaaagaaactcgaatttgggtgcttgaacacacccttttcctctgccgttttggccttttttttcgtctcccttttggcaaaataatctttgggtggcactttttttgccgtcggctttcccacctctcttcacttgag

SEQ ID NO: 695 - DNA, 421 bp, Gossypium hirsutum
catcctattacagtgaattatgctgcatcatatcccgaaagggcttcatgatcattgtactttatttataagaaagaaaaaaaagtgaatttcttttattcaaggaaaaaaaaaaggttaaaagtttgatgtaaccagcaagagaaaggtgttaagatcatggtatgtctatgtccatgtctattcctcaattatttatagatattattatatgaatttatcatcgttattttgtttttatttattggggagtctaaatgttcttttatttatttatcagattttacacgcaaacacttgctcttttaaactattttggtttaaaaacccacgacatgaaagcttccgagatataaatttctacttctctcctgcacctttgggtttcattcggggggtttctaaaagaaaaaaaaaaaaa

SEQ ID NO: 696 - DNA, 653 bp, Gossypium hirsutum
cttcctaaaaggccatattccatcaccataccaccggcaaaagggtttagaaagtgggggaaagggtcagagcggtgcttgcctgaatttcttgtcagttccaataatcccaatttcaatgtttttccctgagatttgtccttcaaatctgcaaaattgagagaacgggttgtaagattattaatgacacaatagtaaagacaacctaataccattttttttccgaggttctttgatataagggatcttcctgcgcggtaacatttaaagataaccaggtgggagaaattttagcattgaaattacccctctttgagagtcaaaatagcagtatgcacagcatcatcaagctccatatcatcagtgtatctacaaggaaagaacaaatcaactgcaatttcagtaacagagaaacagaatgtaggagaatgtccatctcaattctggaaataatgggcatttaatttatataattttaagctaaataaattgatatcctaacataatcagtataacatatcatataaatttttggtagatttagaattgaattctataagaaccagattctaggcaaataccttttctcaagaaatgtttttgcatttgagacatttttccccattgctgaggctttccatgagaaataggaa

SEQ ID NO: 697 - DNA, 643 bp, Gossypium hirsutum
aaccttcttcatatttttcacaatgaataagaggcaggggttatttgaatcctatttcttctactatgcaatgaattatccgcttagtaaacaagattctggcatttgaatcacacaggtcagtcgttcttgtttgcacttgggaggtcgcagttcatgtatgtagctgacacttatctcgtcagagaaatcaactgtttcacgtcgttggatatggggaaacctgattacctacaaaaagatcgaggagcttcgctggggaagggccttatcaccacaaatggctcagtttggtaccatcagagaaaaactattgccccctatctttttatggacaaggtcaaggtacatgttaattaaagttcaacggtttcgtttcttttattttattttttgtttatacaaagatattatccactcattgtatgtaggatagggtagagctaatcgtggagtccgttggggaattggtgaaatcatgggggaatctaattgaagctaatggtggaactgcagacatcagagtcgatgactatgtaagaagattcacttcttatgtcatttcgaatgtggtgttcggagatgagtggcaaatgggcatggaaatatttccaaaatctctggatctcatcaatgccagaat

SEQ ID NO: 698 - DNA, 636 bp, Gossypium hirsutum
ttgatttgagtagaaagttgcattataggagattgcttgctgattcccaatagcttgtgtcggtttcagacaagatcgcctagcaaagcggctggcatgttttccgggacacaagacaaatgtgctacctgtgggaaaactgcttatccactcgagaaggtaaaatttgaagatctcattaagtcattgtgttgaaaatgcatctttttttaagcgattgtaaggtggccatagggaagaacagaaatgatcataggtattaatcgcagcatggggggaacacgcaggatgaccaatgatcaacctccttaagtttatactagtcatcatcgatttttaactttatgaggtttatcccaatgaaatatactttgtttccctcttgcataagttaggtgatctcagggtgtccttgtttcgttagccaagttctcgaactaatcaaatccagaaagcataaagcctgtagtagtttctttagacatgcagggttagtgcagcttggtttgccttctacattatgctttatttcatgctaaaacgggggcacctctcggaaacgagaggtatgaatcggtttagaatcatgcacattccattcagaataaccaattgctctcgtaaaattggtcgatg

SEQ ID NO: 699 - DNA, 562 bp, Gossypium hirsutum
aaaggctagatggcactcctttctccatggggaaagagccaacaacacttgctggataagtaaaagctctgagctattcagatattgcagcggtgggtcttaaggtctgaatttataataagagtaagagatggtattacatttacacaaaatgtttcacccttcaaataaaacatacacacatttggcaaaagcagaattgagaactaaagaggcacatcgataaattcccagttcttgaggataaccagtgtctgatcagtcagataaacaacacttcaatttgacttttctccatccaaaaacccaaagggcagataaaccattagcatttagctggacataattcttcgtaaattaacagcagagatatgaagcatgggtagcatccgatacgcccaaataaaacaattaaaagcattcttaatacagataaactgaaactaaggctccgtttgtatgccagtaaaatgtttttcggaaaataatttctggaaaataatttacttttctggtgtttgaataaatctgtataattttctgttatttggcagattacctg

SEQ ID NO: 700 - DNA, 793 bp, Gossypium hirsutum
  misc_feature (536)..(536): n is a, c, g, or t
tccttctgttgttgaagctgtttaaacctctccataaaggaaccataattaacaaaaaggctagatggcactcctttctccatggggaaagagccaacaacacttgctggataagtaaaagctctgagctattcagatattgcagcggtgggtcttaaggtctgaatttataataagagtaagagatggtattacatttacacaaaatgtttcacccttcaaataaaacatacacacatttggcaaaagcagaattgagaactaaagaggcacatcgataaattcccagttcttgaggataaccagtgtctgatcagtcagataaacaacacttcaatttgacttttctccatccaaaaacccaaagggcagataaaccattagcatttagctggacataattcttcgtaaattaacagcagagatatgaagcatgggtagcatccgatacgcccaaataaaacaattaaaagcattcttaatacagataaactgaaactaaggctccgtttgtatgccagtaaaatgtttttcgnaaaataatttctggaaaataatttacttttctggtgtttgaataaatctgtataattttctgttatttggcagattacctgaaaatattttccgaaaaagatatttttacatatattaataaatttatattttaaattgtttttatataaattacgatgataaataaatcaaattaaatatataataatattcaattattaagctagaatatacattataaaataaaaaggagaagaacaatgcaaaatgtgaaata

SEQ ID NO: 701 - DNA, 655 bp, Gossypium hirsutum
atgctttgattgaattaatggaatataaatataattaggttaaattatgttcaagtcctttaattcttagtacatttggaatttaatcattttacttttatttttaagaatttagtatttctattttttcagatttaaacatgcaagtcgttagcatggttaaaagccttctattaaatttttgtttattattacatcattttattagttagagttttttttaatttatattttaaagtgtcacatcaacgattttagtaaaataattttaatggagttaaaaattaaatctgaatttttaaatttaaaaagtagatggactaaatttttaaaaataaaagtaaaaataggatgactaagtttgaaattgtaaagagtacaaggacttgaagcatattttaaccatataactattatctatttaacttataaaatgctgagttggtgtgaaaaattaattaaacagttgaaaaaaaattaaaatttaaaaacaaaaagtctgtaattttgaataattttatttatgtaattaaattatagagttgttaaaataaatgagtgattaagttgagatttataggaattgacattggttttcaccaatcacgagaatgtttgttcatatttacgtgacacaagtgagatgacatcacca

SEQ ID NO: 702 - DNA, 666 bp, Gossypium hirsutum
atgttaatacagctataggatcatgtttctctaatgacaaagcatggcttcctgtgtatttaagaaaactaccaagtagtcccttgaccaactcaagcgatagttagcacaatttaaaatgataaaagatcctattctcacagtgctacgtactatttactaataactaaaggcagtttatgtgctaccgtacagaaccctgagtatgcattttactctctcgactttaatttcatgcagtttatgcgtagtacttcatgatggtacaaaaaagaaacccacctttcaagtctgttcaaacataaatccattgaacaggaaagtgaccgatacttggtagagaactctatcaaccacccaacaagaagaccaaatgctccgattcccatcacaaggataatattggatgacctgcacagcttagcttaggcaaacaccttccattgttgctagaactgggtcatatattgcaattaaaacaaatgtcaccagatccatatacctggttgccttagttatggccatcagggcagtaaggatagccacagctgtgtggattgcccttttaaagacttcatcaattgttgtgaggtatataaaagtgctcactacagccatgaaagagagagaggtatataaaagtgctcactacagccatgaaagaga

SEQ ID NO: 703 - DNA, 617 bp, Gossypium hirsutum
gacacctaagaaatagaaatatatagagttaaaagacactatgatactgcaagatggcaaaatcgcttaagaaatactgtagtatcactgtatcagcatgtcaacatgcagatacacgttaaacttgtaacaaactggagaatttgataaggaacatggaatatcataaaagaatgtaacaaaatttaaaacctgggattctatcatttcctctgtgtaatacccatcaaagtagtcatcaataattcccaccaaggtcctgagaatacatcgaaaggaatcaacctttaaagcggacctagctattcttgaataataagtatggatgtgtccatatatgcctttgtacaatttgcagaagagaataagatagcaaaaatcattttatagaaatcaaccttttgtgaaaagttacctgaacctaccaaaaggcattttcctctggcataagaagaagcaataatccagcaaagaaattcattgcctgcatgtgttcgatgtcaaataaaagacaagaataagtacaagggtaactaattactaaaataattaatgcggtacaaaggatggtcattaagatctatttagaacatcagagatgttcttccggtagcaaa

SEQ ID NO: 704 - DNA, 565 bp, Gossypium hirsutum
caaagtgtggtttagtttatctacaaaacatgcaatgtttttattagtcaatgtatggttccttatggtacatccatatatatgtataaagcataagacatacaataagctctaaagtgtggtctaatttatttacaaaacatgcaatgtttttattagtcaatatgtacggttccttatggtccatctataattgtatactcaaatattgaaaagtagagagcacttcttcaatccaacattcaattcaagctcgttcgtgatatgcaaattaatatgaagaagttcatctatctcaatgacctagctgccggtcatagcaagcacaaaatcatccaagaggttgttcggcttcaaataggaaatcatgcttttttgtgagccgtcatttgggtgtatttcttcttttccttgtgtatccttctgaccactgaattgtgatttacaagatcgtgattgtgggaaacttcatcttattgcttatctttctgaataggcatgcgtgatttgtctggattcgtggacaaaattcatgaagttgttcctatggatcaacagcctgagt

SEQ ID NO: 705 - DNA, 619 bp, Gossypium hirsutum
attgcatttgaataaccaagtaacaagacataccctgttctcttgagaggaggtcgtggcaccatccacccttcctcaaatcccttgtctatgatagcacattcaatgcttttgatggacacaggattctcaataataccaagcacacaagacccttcacatggtgcagggcacactcggccagtgaactctgggaagttatttgtctctagaagacgatctagtgcttcacgccacctattttggtaaaccagttcattgaattcaggtattttgtttccgagaggacatccagagttctcctgcatttataaaaaagattagatataagcagttgtttcagcaaattcatatccaaaatgccggaaaaaagagtaaaaagtgtaatcaatacctgatggcagaaaggagtaccacagtccatgcagcgagcagactgtgtctttaaaagtgggccaggttttgattcctccatgacctccttccagtcatgcatccgaacattaggatctctatattgaacaccttcacgctcataagcaacaaaaccacgatgtttcacagcatcagaaacctgagtaggcctcttgactggttcagcttcgactgtctacaattc

SEQ ID NO: 706 - DNA, 639 bp, Gossypium hirsutum
tatcttacgtggatgatattgaaaaatggtacaaaacaattttatcgtaaatgctatgcttcagttcattgttgtgttcaatttttcaaaaaagtttaacgtatttggaagatccttgaacagtcatatcctcgtacccatatgaaaatgtattgaatatggattttgaacatgaatacttcaaattaaaatacaattttcaaatgggaagatgtttgaaataactcacaaacatgttagctgaaagtactgacctatagttatgccctgggaagcaaccatggggatgtgagaaaaaggcttcctaattgctgatatgtatcgtatgccacctaatgcggaaacaggataaatctgtttaaccatattaatgtaaaaaaccgcataagaatctatgcatacatgaatatatctacacatatgcattaaatggttacatctatatatacacatgcgtatggagagttactagagggtcatagcttcttatgaaggaatatatgttggacacgagtattttgaagacaatgaagaatcaaagtaaaatggggactggtattagatggccataataccttcaatcaatattaagatcctaaatatcagtaaatatcaagtagactcaccttgacaatcttg

SEQ ID NO: 707 - DNA, 669 bp, Gossypium hirsutum
  misc_feature (7)..(7): n is a, c, g, or t
catagtntattcccgagagctggatcaacgagctcgttgatcttattttctgcaatcaatggttttgcctgcaagttgaatcatgggattattcaacaacggtggtgatgtgagtgcaaattcacttatggtaaactagatctacccagataacaaggcttttttgtgaactatcaacagctcgcctcccggtgattagttccaacagcagtacgccgaaagcatagacatccgttttttcatcgactatgccgtgcatgaaaagctcaggagcaaggtaactgcaatgacatgaattcaggttaaattttgtatacaataaaaagaacttttagatgtacagaaatcaagtgagttttcaagtatgaacccaaatgtgccttcgactttatagacggtatgatgtgtccaattatcgggtaaccactttgaaaggccaaaatcagaaatctggaatcacattggaatgtcaacattaagcaaaaggtacatctttagaacgataatgattttcgagttcaagttttacctgagcatcaaagttctcggaaagcaatacgtttgctgccttgatatctttatggataattctccgctggcaaccttcatgaagatagctaaggccttcggcagtcccgacagcaatcttgaatctgattctccaagtca

SEQ ID NO: 708 - DNA, 447 bp, Gossypium hirsutum
tagaggttaattgaaatgtttgagattttgagtacaatttcatgtcaagaaaagtgtgtaaaatttgaactcacaacttaattttaatatttatacatatcttggttaagataatgggaaattaaatttcgtgataaatctttaaaatggaattttatcatttaatagtttatatctttataatttttagatgattaaattaaaattttatcatttttaaaaggttaaaatataattttaccaattttattttttattttattttaaagggctgaggtgtgactaacttttctaacaacgttgattcccatatttgaacctatttttcctttaagaatacaataaatcataatttataccttcactttctacttaattaaataatattaataaatacaaatcaaagttcttgcacgacagactatcaatgtcataattatcttaaaa

SEQ ID NO: 709 - DNA, 630 bp, Gossypium hirsutum
atttgcagaaattctttaattccttttttcccttaaaaggttggtatctgttgttcatttggtggttttggagttctttctgctctgacgtaccattgcttccaactattattacttcttttgcagcatatatacttgtaccataaacatatctctatatgattctcattctggaaaatggcaagtgcttttgtttgtgggagagaccattggttctatcatctccaagttcggcatcttaatgctgataggtaaaaactctcggtggtcaattttgttcttttattgaattgcgattctcctctcttctaaatgtcttgcaaaaaatgtagttgaacttaggaggcggcgaataattttaactaaccctcaacatagtggactaagaaagcccattgcaagtaattgttatcagagtttgtaccatctgcaaatagttggccttccttttaggactgtttgcaagtgctacattatcaagttcgagcagtatctgatctacatttaggcatttaccatggacattgtgttaataagtcagcgattcagttttaggaggcatgagcaattgagcatcatgttcctagtttgtatgttcatattctagaaagctcaccctttaaaccatgt

SEQ ID NO: 710 - DNA, 635 bp, Gossypium hirsutum
caggcaccattttgcttcaaatcgaaaaggcttgacccccataaatgtaccacatttcagattgtcaatcgtattcataaggattggacaatggtccgagaatgagtgacctaggtgcgtaagagagtagtttggaaaaagagacatccaactcagactcgcagtaccccgatcaagcctctatgggatgttagtagaccgaaaacgtcctctttcccaagtgaaccatcgaccaacaaaccctaaatcaataaaactacattactctaagatatttttaaaattgcccatttgtcgctcagactgtagatgacccccttttttctcaaatgaacttgtaatctcattgaagtcacccatcactagccagggtgtagtttggtcagtacccagttggtgaagaagctctcatgacttccatcgaaatcgctcatccggatttccataaaaacccgtgaatctccaagtgtcaccattttcataatcgtggatgtcaacatccacatggaactgtgagtaactccgaagagaaaccaacgaactacctgtccaacccagagataatcatcattttgacccaatagcaccaatatcaataccgttaataaaaccacacttcaatctaaccgattcca

SEQ ID NO: 711 - DNA, 655 bp, Gossypium hirsutum
tgttagtttccctgcaagtgagcacaataaggctgttgtattgtgtagctaactactgaactttgctgcaggactctgcccctccaattcttcaagtgaattcatcaatcccatcatgtaaactcgtccagaaaacttgtgaaaggaattctggaatgcactttgactactgcacaacttttaggaatattattctggtgggtaagttttttgtaagggttgcgtttgcttattaaattttgtgagtgggaagcagtgaatgagagtgataaatgcgcaaagaatgtgtaagccgagtcatggcatcatgggttgtaattggaccaaatgcactgcttctgcttcctcgaacactaggggtgacttcaactgatcatgtattttttttatgagttttgacttgaggagaatccactcttctatatcgtttacttcattttctgttggcttttaacttcagagttccacaattattaaacttttgttatgtattattaacacaaacataacaaaacaacaaaagcatgattcagtattcacggaaaataacagatgtcagatggtcctgattataagaagcagatatactatctcgacaggaaaaaaaaacaaaaaaaatacagtggccgggctggcagggcagcaacaagtcata

SEQ ID NO: 712 - DNA, 617 bp, Gossypium hirsutum
tcgaacttgctattataccatgtttctggcatttaatcctcatattttcttgcagtcagctaccctaagtggaatttcatggtatgacttgtcttcggttgaagttggtctcattgtgagtgcctaattgtctctcattatttattgacattaccaatcattagtgcaaactttctgtttcttgttgaagcacatgtttgtaagtagcaatgcaaagaacttaccatgcaaattattatttttgttgctttccacagactagtggctcattatatggggccttaattggctcagtcttggcttttaatattgccgactttctaggtcagtttctttttttcataacttgtgatgggaaccgtatctttgaactcaattataaggctttttctgatgaaattgcaatgacttatctgaattataggacgacgaagggagttgattatggcttccatcatgtaccttgtaggagcgcttgtgacagcatttgcacctaacttagtagttatggtgattggacgttttgtgtatggcatagggattggactggtaatatactagatactcaggcattagcttatgaatcttctggatgaccatgttgtagcgtacacttc

SEQ ID NO: 713 - DNA, 618 bp, Gossypium hirsutum
actggaggaggttagcatgatcctgttggatgttctgttgtgtttactcgtgttttaactaaaaaattacttgaattttacttcatgaattcgttactatttcatccccaggttgagctcagatatgagaaatactaccagcaaatggaagaagtggtttcatcattcgagtcgctagctggtttaggagcagcaaagtcgtacactgctttggcactccaagcaatgtccaggcattttggaaatctaagggatgccataatatctcatattaatgttatcagaagaaagttttcgcacgatttaccgagaatcaaccggggattgtcgcagcttagcctgttcgatagagattctaggcagaaccgacagtcccttcaacaacaacttggaatgatcccaaggcaaaggcaagcttggaggcctattagaggattgccagaaacctccgtagccatccttcgtacctggcttttcgaacacttccttcacccgtaagtgcataatttgagttcaaccactttctgcatttgagtcgatgtaacacaaaattcttaccattttgttgcatggttcttaacagttatccaacagactcggagaagctaatgttagcaa

SEQ ID NO: 714 - DNA, 607 bp, Gossypium hirsutum
aaaacatcatcgtttgctgctagtgtcggatatagaggtgtcccgaattcctcagacttacagtttattacatgtactaactccgagtctaatgtgaaaaacactttcttttgcttcggattgaaaccgcaacctatcactttccctggtttcccccagtcttctttctcggattcgaaaataagcttaattcctgaaaattagtgtaaaccatgagttaaagttgcataaacaagcaacttagaattaagaaattgaaccctggagctcatctggtaagttggacactcttcgcctaagactatttacctataacccctcaaccaaggacaagtgagcccacctgtcatttgacactcatgtctaacgacatacataggaccacggaacacttactataacaacaatcaacctacaatagcagtgccccgttttacacctgacttctgatcactaacctctgacttgtctgtataatcatacggctcatcacgtggcattatcttacaaaattaaaatccctatataagcccaagtgcacaaaagagaccgagtcactctccccttctcctcactccctttcttccttattgactctctgccctgt

SEQ ID NO: 715 - DNA, 631 bp, Gossypium hirsutum
  misc_feature (465)..(465): n is a, c, g, or t
  misc_feature (467)..(467): n is a, c, g, or t
  misc_feature (573)..(573): n is a, c, g, or t
  misc_feature (613)..(613): n is a, c, g, or t
  misc_feature (624)..(626): n is a, c, g, or t
caaccagataagattaccaatatgatggatctgtctataagatgtcaatactttcaatagatgaatgacgaaacaaactttaagatagctaaccacttatttcaatattttacataatagacaagctctgaaggggaagacaggaaacctagtaatacaaatctacaataaaaagaaaaaaaaaattcaagatcaacactgtttctacacaccttgagaagcactgaatatgtaatttcatttttcccaaccctttgcagctccatcaaatctaaacattgattagcatggattacgcttttcatctttgcacaggctcctaagaaacagttatatacgggaagaagaggataggtgccatgattctccctaaggaatttcatgaacttgcatgcctgatggaaataaaacaagaagaaatgataaaacttataatggaaattgaggaaaagaaactgcataacnanggctgccgtaacttctggttatacttctggaaatcagaactaagtgcatcatgtgaggccttctcgagggcagtgatagcaggaacagcagcatctggccatgtanaagatttgccactctgcaaagcaagagagacaataaatantgtgcaacctnnnatacc

SEQ ID NO: 716 - DNA, 645 bp, Gossypium hirsutum
cccacctccaacaggcctttgaaacagacaaacagtcctaatagcaattaaatacatcaagcaatattcacacttaagagttttagagattttcagctgattattacaatcatgaactgaagaagggacactcacccgcaaggcagtgttttctgctatttctatagcagcatcaccagcattagcaaatcggtttacccaacctgttaaaaatttgtaagaacaagcatgccaatgtgagttgaaatgaaaccaacaaaaaagaaaccgtatacactcttatagatcacattttatctcatcaaaatacagccagacaagggcctgcataacaagtgaagcaaaagtaatatgattgcccctagctttacaacctaataccaagaatatgcaggtagccaaagccagaacttaaaatagttgatattcagatttatcaccaaaacacatagataatagaacaggacaagcaaagcactaagctgttagttagcatccacaacttagccattttcattaagcacaatgttctccaccaatttacatcaagcaataggccagacttaagttacataaggctatattaaagaacttgcccatctgcaggtgcactataaagttatagagataggccaagcagtgacc

SEQ ID NO: 717 - DNA, 617 bp, Gossypium hirsutum
acccttttacgtaaaaatcaagctcttgaatgatgtcaagaaaggtcatgtttaaaatgaactttattgacaaaagagtgatcatccaaatctaataatatatcatcaataaactagactccattgtggtgtgttttctaaacatgatatgtttatgtattgattgtataaatataattctttctttagacaactcttcatagtttcagcaacaagctgttcaaacatggatatcgcaggccttaagatcatagccaaaggggggacaaagaaaaatgactgacctagggttggtttagtgggaaactaccaaactctcaccattctgatttccatgtagacgcagacaaaccatttgtcacatgattctcattcaaagtacttagcttatagtttcaaccttgtgcccctccctctctaacaataacctgtcatgtccaagtagcttgaatcagcaaatcagagagagaatgtattgagaatcaaagtttccacattaatcttatgtaatatttctttttgatgtgaacgaaagctattagtaaagagacgaaaatattttcaatatggaatttgtttgctctgcattatattaggattcgatctagagtaatcga

SEQ ID NO: 718 - DNA, 467 bp, Gossypium hirsutum
attgagcagttttaccttactctgtgtagttaaaaagcagtgcaatttaagatatttaaaacaaggcctatgtacagtcatcgagtcttgtagttgttcatcttcattatcgttgttaaaaaggaaattttgtcacggttttttgagtagacatttgtatgccccaggccaaaccactttgaatttagtcaaacccaattgatttaattataaaaaccatatttaaatattgttataaattataaattataaaatcgttttatcggaacttaaataaaataaattaaaaaagaattggaccgtcaaccggcccgggccataatttcattttgtgcatagggcacggcacgtgtccattcatatcgatgtttccacgctgataacgagtggcacaaagttgacaccttacccccgccatttccatttctcgtcaaagcttcgattgctcccactgtaattgaggaaaa

SEQ ID NO: 719 - DNA, 414 bp, Gossypium hirsutum
ttgctattatttgacaaaacacttatggaagtatatctaaatctctacaggaccagatgatgtaaaactaaccatggcaacagctatagctgaaatggagttaactgaccataataaagtggtattgttagaaagaggtgcattgcgtccacttcttaactgggtctctcatggtggtattcatatgaaaagtgtagctgttaaagctcttcgaaacctctcaagtgtaccaaaaaatggcttgcagatgatcaaagaaggtgcatcccgcccattacttgacctcctccaacttggctcatcatcctcggcattacgagaacaagtcgccgcaacggttatgcaccttgcagtatccactatgagaggagacccagttaagaagtggacgcaatgcacctctttctaacaata

SEQ ID NO: 720 - DNA, 618 bp, Gossypium hirsutum
tgtttgctagttatataaatcacattggaagtgaaagtttagatgtcgaatcaacacattaatgcctcgtttggttattagtgtaataatataaggaaaaagcttatttattacatatgtattacaatagttagacataatataaagaatagtttatacaaatttaaacttgtaattagaaagatgaataataactcttgtaaaaaataagacctcttcaaagtaagcgaaaatttttccttctctttgctaaaagcaagtcatgtgaatggctaaatattaccaattgcattagtttatagccaacccatatgctaaaaataagtcaagtgagtgaataaatgatacgcaagaaacattggaaacctggattgcatttaaacagcttggttaccaacataatgtcctatcctttggaatgttttcttgtttaggcgaaactattaatcatttcttatgcaatataaagcaagcacagcaatatcaattaagggcaagatagggaagtttttgtttctaataggtaatagcatatgcttacagacctgcaaattaaaacattaacagttcaaagctgagtgaactctcacctacatataagcttgactgtctctgcaa

SEQ ID NO: 721 - DNA, 691 bp, Gossypium hirsutum
  misc_feature (636)..(636): n is a, c, g, or t
  misc_feature (641)..(641): n is a, c, g, or t
  misc_feature (644)..(644): n is a, c, g, or t
  misc_feature (648)..(653): n is a, c, g, or t
  misc_feature (656)..(669): n is a, c, g, or t
  misc_feature (671)..(672): n is a, c, g, or t
  misc_feature (674)..(678): n is a, c, g, or t
atattaagttaagcccaaaaatagctccaagtagaaaatatgtcgattatggttaataatttggacttcaagaagatttagttatgaatgataataaaccagtctcggtccttgatcatgcagatgagcctatatccatgtcatcaggaatgaaacagttcacagtttgattgtaaagctcaaatctggcaagagtaatttaagaacagaatatccaatattcctactagaagacaccaatcctaaactcgagatttcctcgggggcacaacaacagcgtactgaaatgcaatctgcactataggtagttcagaagaatgtctgcaaaggaaaaaggagattaaaatatctaaataatataacagtaacgctccacaaattgctatcaacaaaaaaaggtagcacaaccacaaaacacttaaagggagcatgtttcaagcatttaggtgggcccatctggtgcaggcaagaaactagtacaatgagaaaaaaatatataataataataacattgtataatctgtaacaatttacatattacaaatctgtgcataatgaatatattttattgaatcaagagaactcaaagaaagtagaatactaagctataagattctatgccagacgaagtccaanttttnagngggnnnnnncgnnnnnnnnnnnnnncnnannnnntgggaaaaaaaaa

SEQ ID NO: 722 - DNA, 535 bp, Gossypium hirsutum
agtccacgaaagcacccatctgggtgccggaccccaatctttcactctagagtccaaatttttcgatgcatcagtattatatgatatattgcctccgaaaagttcataatcaaaaaaaagaacctgaagaaaaagtgcaactagatcagtatctgttgttatccattttaagaatgtttctattaatttagatcttgtttcatttaggggctgggggtggggattccaagtgtattacctcagaaaatccacttatatttggtacaatgcttttaacaaaagatggggtatcagatactacaaccaccctgggtcttgaccccagctgtaagttgcttgttgcttgtttgaggcagtataatgcagcctgtgcggctcttatagacctgacaagaaccattatcattaaataccctccagatgcttaattataatcttcgagatggtcaagtgtgattttaaagaacaagcaatttaatatcaccagcatacctattcataaccatcgggatgtgcaaagtaatgtcatgttccc

SEQ ID NO: 723 - DNA, 347 bp, Gossypium hirsutum
aatgtaaaaaatatattgatgactgtaaaaagaatgcaagtcaagtaaaaccaaagaagtttcaaacaactaaaagtaccctcgccaaagtttgaaccctatgcctaatttcatatttaacaatcaagtgaccgaagtttccaaggaagatcaattaacaaattcagttaggtcatattgcctataatgttaaataccatgtcaatcaacaacctagcataatcatatttgcttctgtttgcatttcctttctggtttcaatgttgctttcctttttgctttctaagttttattctctcttatgtgaatacaaatttatctttatttttatataagatgtttctatt

SEQ ID NO: 724 - DNA, 614 bp, Gossypium hirsutum
gtaagagaattctctgtctgagataggaaacatatttggattatctaaggaacgggtgaggcagctagagagccgggcattgtacaagctaaagcaatgcctagtcaaacaaggacttggtgcatatgccgatttgcttgtttaggcgtagagacacagacatattcgttagattttacatgtaaattcgagggcaagagtgaaaatctgttgttagctaaagaacgaggcctaagcctatgaccctgattgaaatgctccagcactgtaatttaacaatgcttttgttttgctttttgtttttatatgatagggataaatacttttatcaaatgtttttggtgaattttgatttcttttactcaattatacatataaaattttgattttaaattaattatatatatttaaaaataaattcaattattttgtgtttggcatgtataaagagtaaacataaaataatattaaataaaatgagatcaaattaaaattttcatattaacatttgatatattgataatattcttttttatttcacacaatatatcctttattcaatattaattttttaatattttattatcatcctacttgacggttgtcaatgatta

SEQ ID NO: 725 - DNA, 667 bp, Gossypium hirsutum
tttttttctattctttttgtatgatcttctcaatgttttctgcaaatgttcaggaaaaaaacagtttcaacattatgaaaatcattggtaaaaataccatggaggtccttgtactaagtattgtttgcattttttgtcccttctactcaaaaaatatggacaatttaatcctaagaagcaaactgatccttttttttataaatatttcgtccaaaaactgatataaatgacaagagtaaccaaatagtatcattcatgtacaaagatcagtttttaacagtaaaataaatgaaacctttaatagaaagaccgatttactctttgatctagcattcaggggctaatttgctcattttttaagtatagagggaaaaatgcaattcggctcttagtacaagggcctccatcgtacttttactaaaattcactaaatttgggcaaaattttccaacaatgttaatatatgtgtcttaccatgtctacttgttagaagagagtttcagttcctttaagctccttgccctgatgaaaacctgtaatggcagccaaatggaatgttcttagttagctctgggtgttcgtattcgaaggaatggggttattgtcgtcttctcatgtacggaatgttttacctggggagttgtaggaaacatgatttgagagaagc

SEQ ID NO: 726 - DNA, 463 bp, Gossypium hirsutum
gcttcacatcttatgacaattaatgtatgtatcaagtttctgccttttgatactccattctaggtggtagctgtaaagttgctgtgagaactaatacagtcttatttagtctcttaaagtgagttgaagaacgtttcaaagatgaattgtgctttggatggttcgttaacatcaattttgcaccaagaagcagtgtaaaattttaacttagattcttagagttgattaagctgtaaatccttcttattttctcaaagttaaaataggagcatggaaacagtttatctaccaatcattcgatttaaaagtctttatcttgcaagaaacaaattttctactcaagcataattaattgacttaatcaacataatgcaatgcctgatgtgtaattatgaaacaacaatgactagattgtacttttttgtttttaaatcaatcaaagtgaaattgcaagaagagctca

SEQ ID NO: 727 - DNA, 664 bp, Gossypium hirsutum
  misc_feature (655)..(655): n is a, c, g, or t
aattactaacaagtcaacgtaaaactattaataagattatgtgtataaaagaagacttctatagccacgggccaccacgtctatgcagacaagatcatgtcaaaattctactctcccacaaaaggtatattttatcacattctccattctaaatttaatgagaacacaactcctaatagatgaccaatttatatttcatgtgttcaagagtcatcagattcaacacattagacatttcaacctacataaggtttctatcactctcaaacaagcaggaaagaagcctactcctaacagactcagactgtacctttaactcatttggcgacatgttcagtattgttgaaggttctaattctccatttagtaaacgacgagctagcaatgcattgttctgccaaaaagaaacaaaaattaacatcatcctaaatgcaaataaggcaacagctctagagatttataagcagaaagccctctaccttcagattgaactcaagctgccgtaacttctggttatacttctggaaatcagaacaaagtgcatcatgtgaggccttctcgagggcagtgatagcaggaacagcagcatctggccatgtaaaagatttgccactctgcaaagcaagagagacaataaatattgtgcaaaccatanaatctcatc

SEQ ID NO: 728 - DNA, 664 bp, Gossypium hirsutum
gcgctgtcgagtattcctttctccttgacaggtgagcttatttctcactaattgtcccccatggttcaaacttcttgtttgttgaactataacttatattattcgatttttccatggattactttctgcaccggtaacttcttcataatcaatgcatgttttaactttacgatatttgatgaaacctttgggttgcacctggcttaccacgttctacatcaaagcatttgccatgattttcttgttcttcgaagaacatagctttggtctccatgtaatgagttgcagctgttgcctaacctctgccatttcaatgtccttgaaacttattgtcgaatattcgctaatgtttatctacaggcataaaggaactgtatacaccatagctgctatgcattttgagattgagaagttcaggagatagtgcaggcattggattatttattctatggaagaagcctttcaaaatcaccactcccaatttctttgacattgatcacttcattgggattttgtatttgtaccagctgcttgcttgattatgtttttgttttgagttctgctaatagatggctaattagggtttgtactttcagtttttttttactttagttggaatcaaaaattgtctactatagcacagtttgtctttgtggataaaggg

SEQ ID NO: 729 - DNA, 628 bp, Gossypium hirsutum
atcaaagaaactaaatgaaatgggctatcagcaattagaacaatccattatattaagtgcaccggcaaatctgctagaacaatccaaaacttcaatactttaatctttgtaatggaagagttaaagaatcgaaatgtgagcttcaacaggaatgatctatcagaaaactcctctcaaaaccagcaactgcattactatgttgtttttcccaccccactctatataagaaggatttcaaaaaaagaccaaaaaactttttcacatataatatataggattataattaaatacactagcagtgggtttttcatcatcggaagcgggatgaaatggcagacaagcattcatttacaatatatattttttttaaaaatcaattgctcaattattaaatagacatattgcaaccatagaagtctgtttgcagatttataagtaactccgcctccaaaatattggagaacgatactaatatttgtgagtctatatgaaaacacattctcattattttaagttgcccggaaatagcatcagcaaacaagctagatacaaatgagaaggggaaacttttaccagttcttgccagtgtctgtcctcgataagaggcccaaaaacgaagttcaaggat

SEQ ID NO: 730 - DNA, 670 bp, Gossypium hirsutum
cacatgttcatttgcgatcccaatttcctttctagtcaacctcttccttgcatgcatctccgaccctgatctacgagaacaataacactaggcttcttgttccatgactcaattcgcaccttacaattagcctctattatcgtgtccttttatctttcattctttctaccaaatgccaaattcacttcacgagatcactgccatgtttgcacaattgccagacacgaagagaaccgagagtaagccttttttatttttctagtcattttcattttaattgaatattgacaggtatgtacttggtttgtccaccttgggcttgagattgcagcttattctacaatggtcaactggaatcctcgtacttatctgctgtttcgttgaccggaagcagttttctttggatatttcaacgaagttaggaagcagtttctctttggttccgttcattattgtggttgtaagtattcatgttaatcctcatttccccccttggcattgaaacaagtccgttacttactagtgtagttttttatgtccgcaggtattgtgcacaattttggctatggtagcgacgttaccgcttgcacagctattcttctttcacattctactcataaaaaaggtacggctacaattagtaaaatcccaaggagtgttagagggtaaa

SEQ ID NO: 731 - DNA, 645 bp, Gossypium hirsutum
actgaagctaaaccatctccgtggtgacatgagcaaggctgcgatattcggcctcagcagtagaatgcaaaaccacctgctgctttttagagctacaggagacgggattacctccaaggaaaacacagtaaccggagatagagcgacgatcatcactgtcagagccccaactagcatcggagaacccttcaagcagaagctttggactcttagtgaacttgacgccatagtccaaagttccttgtagatagcgcaatatacgcttaacagctttaaaatggagttctgatggtttatgcataaaatggcaaaccctgctgactaaaaatacgatatcaggccttgtaatgacgacatgttgcaaggcaccaacaatgcttcgaaacaaagtcgcatccgtaacaaaaggtccttcagcagttgtcaaacgataagtggttgtcatgggtgtaggggagtcgttcgacttgtccatggaagcccgtttaagaagatccaagatatacttccactgactaagaaaaatcccattaggagtataactgagctcaataccgagaaagtaacacaacctaccaagatctttaagagaaaactggacatcaagctccttcaaaaactaatctatagcctgagaatctgtcc

SEQ ID NO: 732 - DNA, 616 bp, Gossypium hirsutum
  misc_feature (562)..(563): n is a, c, g, or t
agggcacaggtctctgagaagaacgaatccagatggtgccaacttcacaggcacatatcgactgtcttctaaaaacttgatgaacttctcctgcgcaggaaccactcttgctgggttggtcaaaatctcaaatgatggctcagggtcggatttcttctctggagggctatcaacctgtccaatattaaagaatcaatgacagaaggttagcatacagaagtttcggtttattgtcacctggtctgatatcaaactagcatcataatattagcaacaatgcacttgatatttcatcccttgttcttagagttgtaacgaaatttaggtccaactgcaacagaatctaattacgagttacagtaaatcctaatcttctgaaactataaattaaatccccaagtaactgaaatgacggccagtccactatagtatagatatagccacagaattaaggataacttcacaaatcttacctgcatggcttctccatccttctcactagatgatttcccttttccagtattagcagcagcagaagactctgctccagttgatttctcanntcccttttccagtattagcagcagcagaagactctgctccagttgatttctca

SEQ ID NO: 733 - DNA, 631 bp, Gossypium hirsutum
gttggtacagaacatttgtaatcataatataagtcctaacatcacatctggaaaagaactggcacaaaattacctggtgcatcatagtactctggtggatcatagaaaaccatggcctcccgcagccgatgacgcttcccttcagtaccaccatactggaatgtagtgtgcaatgcatatggctccagcctaagttgttcatacatggcctgccaatagcattaaggcttaagacaagcttaatatacaacatatgctgctatttactaacaggtacaagcaagataaattaaagctcaagggtataaacacaaaaaggcatataagtgcaaaaactggaatttcaacaaccatcagtaaaataaaaacataagactatcaaattcaccgtgaacaagcatacagatcccacctgaacaaaataagtgtgtccactacaaaatatactttctggtagaattcccagcttgagagttccatcaaacgcataaaaaagtccactatcatcatcaacggctggccctgtctgcttgcgtgcaagttcattaaatccattctgatcccatatcttgtcatcagctaaaagcatatctttccattcttttgccagttttatggcaggctctgtcgg

SEQ ID NO: 734 - DNA, 616 bp, Gossypium hirsutum
tctgcattcagaatactatctgcctgcaaggtcaacaagggtatagtttctgtatatcttgcctgattgttgttcaatattactttaccaactgttctggtcgtttatgtgttacccaagtcttctttgcaaacttgcttgggtgtgtattttaccttgtgacagttcaagtcaagatgattctatattgtatggagccatcatttggtgaaagaattgaaagtagaggcagtgtgggcagtctgaatggatggtagatttttgtttaaatcaccttcatcatttgtgttttacatgatatattttttcttctttattgttggttcctatgttgttccagctcttttttaagtacccgtgtccaacacatttccagatgtggggtttttggatttgattcttcattttttcatgttggtccattaggcattatcctgaacttcttattccttctctgaattcgcatagttattttccatttgttttgcaagatattgtagcatttgtttttgtattatttgccagttttttatgttgcctacaacaggataattattttttgaatttgcagtttgccctttggaatttaaccagccatcagaagtaattaaggcaa

SEQ ID NO: 735 - DNA, 563 bp, Gossypium hirsutum
ataagactagaagggatgatttaattcattaaccaagcagcccttatatatatgtctcaagtaacaaactcaaccaattttgaatttccaactcttattaacaagctaacaacatctagctttctactcctaacaagctaacaactcctactaacaaactaacagatctccctagaacttagtcattataatgatacaaaaattttgcagcccttgagacactaacagttcttagtgcaaggctcgaatcatgaaatattgctgcaaagttatattatactcaatttctacagaaaatgactataatgcatcttcccgtctccaacaaagaaactatgcttttggaaaaccatgaaaaatgctgagtgatcttaaacagctataaacttcgaaacaaaggaagcaataatgtctcccatagttcatagagtcatactctctaaaagtctttgacatgtgagcctgtgaaaaactgtcctggactagatttcttggttcagttttgattttgttgataaacgaaaaaggcaatcatagaaatctctattattagaaataacgtc

SEQ ID NO: 736 - DNA, 630 bp, Gossypium hirsutum
  misc_feature (464)..(465): n is a, c, g, or t
  misc_feature (485)..(492): n is a, c, g, or t
  misc_feature (496)..(507): n is a, c, g, or t
  misc_feature (512)..(512): n is a, c, g, or t
  misc_feature (514)..(514): n is a, c, g, or t
  misc_feature (521)..(521): n is a, c, g, or t
  misc_feature (525)..(527): n is a, c, g, or t
  misc_feature (538)..(539): n is a, c, g, or t
  misc_feature (541)..(571): n is a, c, g, or t
  misc_feature (606)..(606): n is a, c, g, or t
  misc_feature (612)..(616): n is a, c, g, or t
  misc_feature (621)..(622): n is a, c, g, or t
tctttagtaatgtccttcctactcctgatgttccaatcaacactgtcggcttggttccctgtcaaataagacaaaacaacaaataatctaagaaacagcttatacatttttggtactttagatgggggttcacagaaagagagatttcacacattaacagcatcaacaagtttcttgatgggctcatgatcatgagcccagggcttcttgaaatgctgaagagagtcaatgcgggatttaacaatcagtccctgcaaaaagacaaaaaatcaatgcgacatttgatcactagaaaggaagagagagggaaaatgaagaataatctgctttgtacaaaagaaatggattagaatcttactaccttggagtccacaagcgaaatcttcttgcgagcctcttcaagtggcatatttgtctgcatgtataatcaaggaagaatccggtttcctcacatattttaaatnntctataaaacattttagaannnnnnnnatannnnnnnnnnnngtatncngtgtttngaannnccaggggttgnnannnnnnnnnnnnnnnnnnnnnnnnnnnnnnnccaaaaaaaaagggttaaaaaaaacaaaaaatttngccccnnnnnggaannaaaaaaaa

SEQ ID NO: 737 - DNA, 565 bp, Gossypium hirsutum
aatatactcgagtctgatgctctacgcccatatccaaacaatggttcagaaaaatcggaaacataacctcaaactctataaggctggaaaaataaccagctttagaatcacttatcgatcaaacacattaaaataagtggtttattgaagacaatgaccctaaaaatttgttgaaaagatgttataggttccaacatgcctacattgtttgggtattcaaccaagttaatacaaaatgagacactgcaatacaactaacaaaaaggcaagtaaaaatcaagcacttcaacaaatcattttgattttttaccttgttttttcttgataacttcatcagtgtacattatacctttgcctttgtaaacttctggaggcttgcaacttcgaactgtagcggcaaattgatgcaccctttgcttgtcgagtccagtgcagcaaacaacattgtttttgaagcagaaaacgcggacggcaggaggaacggtgagttcaacctcatgactgtatcctagtttcagaaataagagtcttccctcggcttcagctctggctatgtaaccaactg

SEQ ID NO: 738 - DNA, 562 bp, Gossypium hirsutum
ggtggtgagaggatcggcattagatggagcacatgtcgaatttctccggggtatttccaatcctctcggcataaaggtacatcttgcttattctgttttagagtctaaagtcattgccaattgctcgtataagatttgtttagatgatgatttcattcctatcaagtatgaactaagttgattagtaaggattgtttaggtaatgacaatagttgtaagatttgtttaggtaatcattgcattcctatttactgtacctagtatgattagtaagcatgcgaattgatgcgttagaatagttaaacacggttagacaatcaatgactcttgcttgttttgacatctgagactcatagcggcatcaatctttactttggttcttcattgtaggtttaagttttcgaaatcaaaccagtgttttctttttctttttccttttagttagtggctggaaggagataaggtttgatgtagatttagttgttatgtttgaatggtactttttggttgctgatatctccattgcatcatataggtcagtgataaaatggacccgaaggac

SEQ ID NO: 739 - DNA, 662 bp, Gossypium hirsutum
gcagccttccgtgcatcacgtctgcaatatcagattagaggcatcaagaatcatagcattcaagagaaagtgaaaaactgaaactgaaaaacaaacaattataccttggtattctttctaaaagaaggatatatccatcggcagtggtaacatgaatggcttcgtatgggtacctaaaacaggaagatgagtacgcaactaacaaaagatatgcagaatttcaaggtaatagaagggaaaaagggaaagaaaaagataaaaaataagactgcacttacccaagctctgttatgatatccttacaagttctagcatcagtgttaagagcatggtgaagagtaggattcctttctgtaggagctggatctttatcttcaagagtcactgggggaattgaagcattcaagacatcattgtcaacatccttaacaccagcacttgcagatgataacaattttccgaagattctaaaagctgaagatggggagaccacacaatgcacagtcttgtgaagcaaatcaaatatagcttcaatgaaaatctcaattgctagatgaagatcctgattgtcatcgcatcacaaaaagtaagtaaaagctatgaaaaaataatggcaaaaatgaggcaatgcaaagcagaaaataatgatataagggaaatag

SEQ ID NO: 740 - DNA, 628 bp, Gossypium hirsutum
  misc_feature (559)..(559): n is a, c, g, or t
  misc_feature (561)..(565): n is a, c, g, or t
gcagcaaggcagctgaagggcattttgacaagctaacccctcaaaattttgagaaactctttgagcaagtaaaagctgttaacattgacaatgcaggtacactcactggtgtcatctcacagatctttgacaaagctttaatggagcctactttttgtgaaatgtatgcaaacttctgccagtgtctggctggggagttgcctgattttatcgaaaacaatgaaaagataactttcaagagattgctgctgaacaagtgccaggaggaatttgagagaggggagagagagcaagaagaagcaaataaaatagaggaagagggtgaggctaagctgtctgaggaagaaagagaggagaagagaatcaaggctcgaagacgaatgttaggtaacattagacttattggggagttgtacaagaagaaaatgttaactgagagaataatgcatgaatgcatcaagaaactacttggtgaatacgagaatcctgatgaggaagatgtcgaggcattgtgcaaattaatgagtacgattgggagaaatgattgaccatccctagncnnnnntgcatatggatgcttattttgagatgatggcgaagttgtcaaacaatatgaaattgtcttcta

SEQ ID NO: 741 - DNA, 647 bp, Gossypium hirsutum
attgcctttgcccgacactaaagttttccccagcctctgaaacctggacaaaacccaggataagtggtcaatagttgtcatcgaagaaccatactgatttcagcacctatggacacttccaaaaaattgaccaactgatcatctctcttttccaagcattggaagaaattgattagcaaactgtcaataaaattcccatcaattttttttttaataaatacctcagcatacagaccaagagaattcctccgaatgacatctttcaggtgtgctctctctaaagcttcccaaaggtcagcatcattgtgttcactgaaaggatcaagattaaatctcacagttcctggcccaaataaaaacaaaattgacataaatattatatatttgaattggaacaaaataagaaagatgaaatccaatagacataaacgttacatgttagattatctccactttagaagttaacagatattagggaaagaaaacttatgataatgctagtaaaacagaaaaaaggaattctatgtcaaatcatgggagatgcccagaaaagttttcactaagctattatgtaaatataatctagatcattggtggggggtaccagagaaaagaacaggtgcttgcggtatgatcccaagtacttt

SEQ ID NO: 742 - DNA, 635 bp, Gossypium hirsutum
aaagacatacgaagcatccaattccttaaaaaccaatcactaaaatgatcacgattgtgatagtttttccctggaggttcccaaagaaacatcagaaccagcttttaaaagttgacaacgaattgaattccgagcaaatatcagaaacaaagaggcatgggtattgaagattaaaagccaaagagaggaagaaagataaaatatgaccaaataaatggaagaatcttaaaacgttttcagttacctgaaagaagtatagctatagaattcaacatccaaacacataaagagaagtgaagcagcggagaaaacagtttgtcccaaacgaagagccaagctggcgcttgttcccaacgcccctggcactgcttccatcgtccctcatgtcatcttatctttctgtttcttcttctttagtgtattcccctaaaacccaataaaaaagcagaggccaaacactaggagaagggattgaaacaatagaattcatggcagatttgcctgagaaagagagaaagagaggaaacgaaacagaatatgctgagaagagaagatatacgacgaacttttacctggaagagaagatgaagaacggaagaaggaaaatgaacgaagaacggaagaacgagaaaaaa

SEQ ID NO: 743 - DNA, 650 bp, Gossypium hirsutum
  misc_feature (631)..(631): n is a, c, g, or t
tacttaaaacttctgcatttgaccatatccttatagcattggcttcttaactgataggaatatagaaacataccaccaaaggtatcagggtgaagttagaaaatttattgagcgaataaaattaaattgtaatttttataataatagaaatataattttaataatttaataatttaataatttaataatttataatttttaaaaaattaaatacaaatatttgataattaaatttaccattatatcaaaataaattgttgaataactaattgagcccggctgtgatcgggactacgataccagttccttgtgtttttgccgtctaacaatctttaagactgtctaatgtgaattatttgtaaataatgttattttattaaatataatcattaatatatattgatattagcttcattgacttctctatatttatactaatataaagatatttttatattaagaaattattaaaatatcattttatttaatatttatccttttacatttttatatataatcaatgaattttaacacaagacataatacattttaaataccatttcaaaatttttatttaactttttaataatatattattacaaattttttcatccaacaattagtttggcantccaacaattagtttggca

SEQ ID NO: 744 - DNA, 584 bp, Gossypium hirsutum
tatctggtttaaaaacagtcctaaactttcttattgatcctaacaaaataaatgaagtattatcttatggattaaagaatataaaggatgaatcaatggaatacttactcaatggaattatcaatctcctttgatcaccttgattgattatttgacgacaaccggtcccatttaccattccatccccttcaaacccttctggacatgagcaaaaaacacctcctggaaagttgttacatttcccactgcagggatttgaagctttacactctatcaatatctgggagaaaatggagccaatcacaattccaatccatagaatatgcatatagcataagatttctttttacacttttggttaatgaataaacttatgagaaaagtaaacatagtactaccatatgtaggaaggtaccttgacagccatcaacaagataagcgtttccttgaaaacctgtcttgcacctgcagcggtaccccggtccattgtttgaatccaagcattcgatgttcgcggcctcgcatgcataggtagttaaatccttttgagcttcttggcatgttatattcctaccagtcccaat

SEQ ID NO: 745 - DNA, 633 bp, Gossypium hirsutum
  misc_feature (561)..(562): n is a, c, g, or t
  misc_feature (603)..(603): n is a, c, g, or t
  misc_feature (605)..(613): n is a, c, g, or t
  misc_feature (616)..(626): n is a, c, g, or t
acgtatattttataattcctaaatatacatttttttatgttttatcgttttaaaatatgtacatacatacatacatacatacatttttatataatattgacatatattttatgatatacatatatacacattttttttattttataaaaattgtccacataaatatacatatgtcttttcacatcttttaattttattcatcttctttattgttattattatttatttacttatttacgtgtttattatcatttcaaaaggatattttaattctattcgtttctttacttgttgttatgtgattgattcgtctcttatatttatttatttcatttttgttgattatttatattgtttatgcttaacttgtcgtattcattatcgttttgttatgcatattaacaccatacatcaaaaaatgaatttttctaaataaggcaatattttgcgtttggaaaatcgagaaaacgtgccctaacgtgctgggtttcgatttctcgtttgaccaaaatagccaaataccctttttaaactttcaaaaaaagaccatatttcgcgtgnngaaattcgagaaaacgtcgccctagcgtgctgggttttcgnannnnnnnnnctnnnnnnnnnnnttttcat

SEQ ID NO: 746 - DNA, 675 bp, Gossypium hirsutum
caacagaaggcgtaaatatatacttatatacaattttcataataataacacaaggggcaagtattactccgtactgataaataacacataatgtatatcactcttgacaaatctctagaaaatgcaaacatgtatagattggcagaaacccatcttctcaaccgatttttggcttcaagcatttctcattatggacctaattatgtgaaactatatacgcataatatattcttctaaaattaaaacaaacaaagatatccaattgatcagtaagatattgtagcatataaaaacctgtgcttcagcttcttgtcgcattctgtcataacgttgagcaagatgccgtgcatcctccaaaggagctcccattaccattgctcttagtggctcggcaacctaacaatcaaattaatcaaaatattaaccaaaagcatatacacaagaaaagaaaaaaataagctatccaaacatacaccaccaaacagcttatattaacttacatagaagtcttcttccatggattcatgaacttaccaacttaacattctagtattttatgttctagtaatgaaaacattaaacaaacctgtgtgccaagagccttcaacagattcccgcgttccttctccatttgagcacgagcacgtccataccctagagctgctttcgataatg

SEQ ID NO: 747 - DNA, 915 bp, Gossypium hirsutum
  misc_feature (820)..(820): n is a, c, g, or t
  misc_feature (874)..(874): n is a, c, g, or t
  misc_feature (899)..(899): n is a, c, g, or t
acgatctcaggatttcccgatgtttcccttactctagcttggcgtttcgaaacttctattgcctgtttaggtccaacagaaggcgtaaatatatacttatatacaattttcataataacaacacaaggggcaagtattactccgtactgataaataacacataatgtatatcactcttgacaaatctctagaaaatgcaaacatgtatagattggcagaaacccatcttctcaaccgatttttggcttcaagcatttctcattatggacctaattatgtgaaactatatacgcataatatattcttctaaaattaaaacaaacaaagatatccaattgatcagtaagatattgtagcatataaaaacctgtgcttcagcttcttgtcgcattctgtcataacgttgagcaagatgccgtgcatcctccaaaggagctcccattaccattgctcttagtggctcggcaacctaacaatcaaattaatcaaaatattaaccaaaagcatatacacaagaaaagaaaaaaataagctatccaaacatacaccaccaaacagcttatattaacttacatagaagtcttcttccatggattcatgaacttaccaacttaacattctagtattttatgttctagtaatgaaaacattaaacaaacctgtgtgccaagagccttcaacagattcccgcgttccttctccatttgagcacgagcacgtccataccctagagctgctttcgataatgtattgccactggtacaagtattttcagcaccatatttcctgctatcctcagacaacttcgttcctgtcgaanaagaccgattatatacaaaatgggattctaaaaatcaagtagtaaatgctgacnatatatcattcaactcacctatttncacttgtttggaccca

SEQ ID NO: 748 - DNA, 511 bp, Gossypium hirsutum
gggcttttgagaaatataaatatgtgctgaaagttctaagttggtgttgagcatcaaggtgctactgattttatttatatattttcaaaagctttacgaaattctatttcttcagtttcaattcaaattccaattcagtttgataaggttgttttggtgcagcaaaaaagatctatgtttttgttccacttgtttgtagaacaatggaagactattgattaacatttattccaaagaaatatgaagattgtaaaatattaattttcttttatcattcataaaaataaagccagacatgtgcatggttaataggtgtcaaactgcaataagacttgcttggtttatcctcgttttagatgggatttatagtatacttgattgttccatggaaccttatactgggatggtctctacaagagtgatatagatgcttcagagctaattataatgtagaatatgtctactttagctgcttaccttttggggtccgaacttctgtcaggtcctttgt

SEQ ID NO: 749 - DNA, 352 bp, Gossypium hirsutum
gaattattgaaagaattaattaacttatttctttccttctgttgttcgtccttcctcactatcttcattgcttgcttgtttgtgtgagtgcacgatgacttttctccacatttttgggaatggattaaaatgttttggatattctagttataaattaatgcattagctgaggtattttattctttatcaatatattgtttgagatagaatggaatgttgagaccatatctccaacaaatatgaaagtatagtaaacatctaatttatgtaatggcatctaataaagggattacagttataaattgaggtaaacttattgcaagatttgatatctattctgggtatctgctga

SEQ ID NO: 750 - DNA, 623 bp, Gossypium hirsutum
accccacttacctttgtatacattgcaacaaccattggcattttctaaacatagaaaggaaatagtgagaaagctaagagcaataagagagtctgatcttcttgtccttgaaatccccattagagaggagaaaaaatattgcttgagtttgcatttactagtccacttgtttgatggataaatagacagacaggcatcaaagtttcagctattttagtaatgcaagcaatttggttcacatgtgttgtgagtgctggaagttacattttctttaacctaattcctaaaaaagaaattgtccacactactcctaaaacttaacaatttttcccaattttagacgtggaattaaaaatatatacatttaaatcacaatcaaattttaaatgttaaacaaatatatctatttaaaaatattaagaaaatattgagtgtaaactaaattaagacgagaaaacttatacgtggagaattacctacttttcacatacaacacacgacaaacaacccgtcattgtaagtggaaacaatgaacaacattgtatacatacacatgtatatacacaataatgttgtggaaaaagcaaacatttttggcatccatgcatcccatgtgtatctac

SEQ ID NO: 751 - DNA, 628 bp, Gossypium hirsutum
tatttttcatcttctttccctctgtccataattaaggtctatataaacaaatgacctttattctaattgaaaatacacaaatgggtcgcaaatgcaaaaaaatttccattatgacaaacaagagaaatatagtagatataataatgaagaacttccttgactaatatcagcaattaaaaaccaattatgctggaccattgcagccataattctttcagctattaattccaaagaatatccagaagcttcagtctccattcttcactgtgtcaagcagcaatatataaggtgcttatgccctaagataataccttatatttcttaatttgagaattgaaaccagtctcaaacaatttacagctgaacacataatacaaactattaaagaagatgggtagtctcaacatgtaatcttaacaaccaaaacaattgctagcaacgcatcacaaaactcaaatcaaacagccaaggataaggcccttgactagaaagatggaagtgtactttttactcacagggattccttaataataaataaataaataaaggggaagagagaaagggaataagaaaaacaccctataagtgggtggatcaatgtgatagtttaccttgcaaatccaaagtc

SEQ ID NO: 752 - DNA, 601 bp, Gossypium hirsutum
gagacttctttaacttaagtccaaaagctaccaaggaaattttcacacggcgataaattatggtacgccaaatttcacagttgatatttatccaatagaaaggtgaagaaggttatcaaggagctcaatctcagaagttcacatctaacaacagggtacctgctgaaacctcctgacacgagttaatccagtcagtgccccactagcctcatttcgatgcaagaccccgaaatcagccatgcgaagaggtagttctgcatgaatgagaatacaacaaagccagataggaacctctttcagaaaaacataatttaaataagcacattgtaagctacagaagaaaaataaataaactacattgacaaaattatatatcttggtaaagactgggccatatagcaattacattagaggctaaaaaaagaatcaaagggaaaaaagatgcagaatggaatacatgaaaatgtattcaagctaatatggtttcagaagattttataattagaacaaactcattcactaatatataatggtaactcattaccatgaagtatgaaacaaaagggagcaaagaaaagtttatccaacatttaaagctgta

SEQ ID NO: 753 - DNA, 411 bp, Gossypium hirsutum
gttcagcatgttatttgactaggaatttaacaatctcatgaggatacaccttcctcgtactggaaataattaagagaggaaactgtgatagatggagtgactactaaagtgcttcaagtttgtactttgatcaaataccagtcagggaaaaagtctttaaaagttgaaaggcctttgtattttgcatgtgaaacatcatgattggccgaaaccacaatttatgaaagggcattaccctagaaagcatcaaaagagaggtccttttctagaaaccatttgctgcaatgatattggggaaaacctgacatgatcgtataaacaatgatgatgacagtaccagataaccagtgaagttgagttcaaaggtggaagaataagtagactgccggtaggaccagggttgtctggtta

SEQ ID NO: 754 - DNA, 613 bp, Gossypium hirsutum
aggctcatttaaagacactaataacaattcgaactctgaaaggaaataggtttccgtgtcaaaacttgttcttctctaaattgcaatattagagccaatcgatacacttaattgtacgttcaaataaattaatatctgataggctgaacttcatcagttatcacaagataattagatgaaataacttgactgaaataaataaaagttcaatgccagattcccactttggaaaaatcagtcaccaattacacttgataaatcttggaaatctcggtttcaacttgacagaacaaaatcatttttgcaatggtgttacttgtttagttgggggccacggcctatgtccgtgaggcaacaattatcttaggtaaaatttttgaatgcaaaaagagaaagggcaagtgtttgttcaatgcataaagctaacaaacacggctatgttcaagtcaaccaagataaataagttaaactgtaaatgcaactagataatcatttagaaggcattgagtaatactaaatttattggactaatgaaccaaaggtgggttccataaacagaatattttctgcttaagacagtatggtacagacaccctatgttgttccgacttta

SEQ ID NO: 755 - DNA, 345 bp, Gossypium hirsutum
gtgaaatccaggtacttcacatcaaccttttctttttcatattaggtagggttacggaaagtttcaagaaatattcttttactcagtgaggttgttaatgatgtctcttgaataagttttccaagctgctttttgtgttttcctttcttttggtaagttcattctggttatccttaatttcaggcccatgtgaggggacatcaagttcgcaaacaatacacaaagcttgtttggtctgtcggtttagttgaaaagataatcctacgatggaggcgtaaaggtgctggtctacgaggatttcgggtgcaaactgcaaccaataagacagtagcagggactgagata

SEQ ID NO: 756 - DNA, 633 bp, Gossypium hirsutum
atccgaaaagctggtgtgagtccatgctatgggtttgacatcagctttccaactgaatgaagagatctcagaaaatttataggcagcttaggacaggattgtcaaccactttttcaaaactataagaaacttcaacactataatagaagttatgccttcaaaaacaaaattgacctgcaaaatgaaaaaaatgcaaggaacagttaagttattgctcacagttgtgcagatggcaaacaaaagttaaagagaaagagagagagcagtccaaattgaagagctaaacccatgtgcataaatatattctatgccaagaacctagatactaagaatcaaatcataatttcttggtggacaatctattgtaaatagtaaacagtaatctcttaggttgatgaccacatgcatggtcaaaaaaatctttatgattaatttatgatttcttggtcggtaatactatatcaacacaataaaaaatagttcgatcaacattcaacaatgtaaaaactctgtccagatatataaaacgcataacaaagacatactgatcatatacaataaatttctcgatcataaacagctaaactatcacccgcaagaaaagaaattgacgcaaagggaaatcttggactt

SEQ ID NO: 757 - DNA, 653 bp, Gossypium hirsutum
atgaaggaaaacaactaatactgacctgttgcagtgcccgttttaaattataaaaatggattgttgagtcaaatgttgctattccgacctgtgtacgagtaccttcctgcaataagcaattagcacatcaagcaactgaacttccattgccttgtatatgttgagaagaaaccaatggacagaatggaaaaggaaagatgcaagcccatgtatcaacctccaactcaactaacagtatcaggcatcaattattgcagacaaagaagtagaacttgcattatctttagaaagcattgcaaaggacattagccaagccagatatgcaaccatcataagttgtcttggctaaaatcacacaatgtcatgatttaccaccacactcaacggaaatactctaacataatcccaaatccaattttaacaaagacaaacaattgaaacaaattggtctatcatgaccaaaactaagcacatggcaaagccattttttgttattttcttataaacttttctcctaaagccatcgaaaaaaaaagataatcatttgaatacaagaaataaaattgagccaaattaataatccatattagatttctcaactaaaaatgtacttagaataaagcattaaacccttaactgtgaacaccaaactg

SEQ ID NO: 758 - DNA, 647 bp, Gossypium hirsutum
tttcgaaaaggctcataatatcatcttttatgtctttttgtggcttctctgtgacttggttggttgttattggaggcgaatcattaaataacttctcaattccagtagcagaccgagtattcttctcaccagcttttggtggatcattttggccagttgcagaagtgtctccagcagctacaaaaattatcatttgtcaaaaccagcagcaataataaaatgataccaccataactttcaataccaaggtggttggcacttggtagaaagatgttaacataataaagataaaaggtaaggcaattccaataaccaaaaactatggggaaattcaggacatacactggaaacctgcccaatcattatcatcagtggaagctgccccagaaccagaagcattttcacttgaagcatcatccatggacatcatgttgaagaggtccatagcatactcaaatttaggaggcgtgacagggggaggagttgttgcctcaactggtaccgcaacaaccgtttcaggctcccggacaggtgtaaccttttagatcagcacaacagtacaaaagtaaaatacttgttagaacattaaagagagtaaattaccagaagaaatatgatataacgagaagaagaaagcgagttgaaca

SEQ ID NO: 759 - DNA, 646 bp, Gossypium hirsutum
aaaactcgagatttggctgcagatttgaaaaacacaacatcacaacatatatttatttttgaatacctctttactaaggttcagcagaattacagagaatcacatctaatcaaagtcttcattcaacactccaaatacaacttataccaaaacttgattattcagatcccacaaactgaaatctatcctagttgatcaaattatgtttttttcccttgagaagctcttagggttcctgaaaatttctataggtcggcctcagtttactagagctcgttaaaacgtttctccatactaatttggtgcagaaacttgttcctgtaagttaaccctctaaggagatctgaaagcttcaccagcatagcagacatttccgagttcgtcttcaatgcgaagaagctgcaatcagagtgggagaatgtgagatgattccttcatataaccaattacagaaatatgttactcgtattcaggattgagcatcagatatggatatgaatccgacatacgtatgttccacttttttttctcatgtatttcgaaagatcattggaaggtaatattctcatctccatgtcggacccaggtattttgtttaccagtgtgatgattgttcaactatcatcaattcggcaaactagaagtg

SEQ ID NO: 760 - DNA, 635 bp, Gossypium hirsutum
cctctaaagtttctatatccaaatagatcaaatcccctacaagcctgtccccaacaaagttcaaatgtcttgttaatactcgttcaagataaatgccaaaactcaatcaccatcaacaacaaaaatatcattcaacataaagaatataaattcagcattttaccttcgatagctaggtggagggttgaaggatgaaaaaacaatactctcaacacatttaatctccttcgaaggtgtacacagcaatttacctaatgatccagtaacatcctccataaagcccaggccatcaagctctggaacatcagtttttgcagcatctgcacaacataaaactgaaagtgaaaatcacagagtttataaaatggtaaatgataatgacagtgacttaaggtccaatttcaaacctcctgaattgggagctttactttgggcattctcatactgcaatgcaagtgaagtcgagagtgaggcatgaagtgtagaaagggaaagcagatctcttgtgcggtgaacatgagctctgatagatctatcatcatataatgctgccaaaagttttaggttagagcccatatagagaccttaaaaccataaaacagaaaacaaagcaattataccagcaaccatctcca

SEQ ID NO: 761 - DNA, 622 bp, Gossypium hirsutum
agtttttctcgggaacaggactacaaccaaaagacatgcaaacctgcgtattttctccacggggctggaatccacatttttcgacaacagatgacctgacaatttctggtgttgtcaatggtgtaaagccccttttcatgacttctgtcagtgtccagttgacaagggccatttccagcatcactgcttcattctttaggtaatagaattttgaaccacttacctatacaatgagaaagcattagtacctttggcatatgggagtcaaggatgcttcaagcatgcaagttgatatataatcccatctgatgagaagtaaggaattttttttttttttttaaaaataaaaaggttccaggaaagttgcaatttaaaaaactcccgtgcgcattaaattatttatggcaatgggaaacacaattttctggaggcaacccaattaattaaaaggattatttaaccaataaaaaaacccaaaaattacccgggatcttgttggctaaattggacaaaggaaatgaatcaaaaaaaaaaaacagctaaacaacacccaagggtaatttccttccccaataaaaaccctcaaaaaaacacataaacaaattagggatgttttatttcc

SEQ ID NO: 762 - DNA, 560 bp, Gossypium hirsutum
cccccagtagctaccaccacagaaagagtcagattccggtaaccaataccgggaatcgtattccaattgtctctccgtctcttccggatagtgaggatggggaacaggataaggatggaacatatccaacaatgaacctggttcatcgtaacagttatagaaccaagaaatataattatcaatgagtagtgtttcctccattactgttactacaagtaaagctctaaggacttgctgcccctgggttataacaaaaagggagtggcaaaaattcctaaatgatggttaacattggagggagattctcccatggtgaaccttcattgaatggaatctgtttttagaggaaaagataggcggcttttactggaagctgaggaccggtgggcgttagagcatctaatccaaaacttctctatcaccaaaatgtactcacttgctagtaaagcgtctttcctatattctcaccacgttacactcattagctacattacccccagcctttatttttataaaatattggtttattatgtattttttatccgtaaaattatgggttt

SEQ ID NO: 763 - DNA, 637 bp, Gossypium hirsutum
tgctattacatatatgatttttcttatgctaattctgccattgaaaatcttaactttgggtaacaccatatggatctgatgtcagttgggtcatctagatcttcatcccatgggcctggtgcatacatgtgctatgttgaccaaaatccagttaatcacttttgatctgggtcatattctcccttatctggcacatcttatgttgataccttcaaccatacggggtcttctggctttgttaatgctccgaatatgctacaagcaaattttgcatcaattctggtcatttcctccaatgtggctgatcaagcatggtacgcggatagtgaagtgacggcacacattaccaatgatcctaccaagttcgctgaatgtagtttttatactgggtcaagtacagttattgtaggtaatggtcatcatgttgttatttctcatactagttcatcatttttgtccactggctttggtgaattattgttgcatgatctattgtttgttcctgatatacacaaaaatttgttgtttgtttcgaaatttgctaaggataacaaagtttattttgaattatatcttcattattgctacgtagaggatctaaaaactcataagattctactccaaggcactgagtcag

SEQ ID NO: 764 - DNA, 614 bp, Gossypium hirsutum
tgatcatgttatttcattctttatttcaattgctatctggaccggcacattagggcttagtatctaaacagaatttcatagagtggactaattgagctttggtattttcttcaagtagttagtgactagcatttcattttctagttctgacattttacttaaatttccttctgctagaaactgtctgaactgaaatttcaaattttgtcattctgtatgagctactatcagtttcaaataagtgttaggttaaaaatgatgatatttactaaattatagcatgaagtggcaaacaacttccgcacttaaatgttgagtatggctatagtccactttccttaaggctttgcaattgaagggtggaaagctagaaggatggaaaatataaaatttctttccataggtgtgcttggaaagatggaaaaatagaagaaaaagcaattttcattccctccattgcttagtagagttgaaaagtgaaaggaaaggaaagaaaagaaaacaattgaaaaatatataatttgaactaacatacacttatctcccattttctctcctcttattccaatttggaaggattggtttttatccattaggatgaaaatgatcaccct

SEQ ID NO: 765 - DNA, 625 bp, Gossypium hirsutum
aaatacaattgcccgacatagacctttggtcatcaacgttagatccccagctagaatctgagtagccttcaagcacaaacttagatgctcgacaaaaatgaaggccatgatctaatgtgctttgcaaatatcgcaaaattctcttaccaactttaaagtgcgtatctaaaggtctgtgcatgatctgacagactttgttgactgagaacgcaaaatccggtctggtgattactacatactggagagcacccactatactcctaaagaaactctcattttcaacgagactcccttcatgagttgacaagcgacaggtagataccattagtgtgggagaacaactcgacttttccatagaagccttcttaagtaaatccagcatatatttcttttgattgagaaaaagtccatctgaggtgtagttaatttcaatgcctagaaaatagttcaacttccccaaatcctttagagaaaagtgatgattaaggtctttaacaaactggtttatagcactcgaatcggaactagtgactatgatgtcatctacataaacgaggacgtacaaaaaacgattcacagacttgtggataaaaagagaattatctgccttcgaactttcaaacta

SEQ ID NO: 766 - DNA, 589 bp, Gossypium hirsutum
caaaggtaatcttgggataggtctttgcagtccgggtctgcatcatctttttgctgttattatgtttcggggtttcgttctaggctgtctccgacgtatgaggaaatgatttttagatatcaaataaattcctatagttcaaagatcacttgtgtattttttctctggttagtttccctactctggttttctcatttaattctctttttcttccaggaaagccttgaacttgattcaatatctactgcatgaaaataattcagattgcaatgttgtaaacgagctggggctccctcgtgtaatgttgcatcttgcctcgagtgaggatgcagaagtaagagaagctgctcttcgtggtctccttgagcttgcccgggacaagacaggtgggagtaatggtggtttaggtgaagaagatgagaagctgaagcaaattctggaggaacgaattaaaggtatcagcttgatgtctcctgaagaccttggggctgctagggaggaaaggcagcttgtggactccctgtggagtacatgttataaggagccttcgtcccttcgagagaagggacttttatcacttcctggtgaa

SEQ ID NO: 767 - DNA, 652 bp, Gossypium hirsutum
tactgaatccaagaaattatgatttcaatcttcagaaggtattatttcaaaagagaaaagttgcaagaatgaacctcagggtgaagggctacaaagtcatccagctttccatactttttcttgtaatcatgccagtgtaaaggtgcaagcattttccccagcctatttggtagctgcaattgacagatataagtcaaacccatgcgtgcatgattttaataccatagccaggtgacctaagaaaaatcattagcagaccactaaagcactaaccgttgaactgattcgaattctaccaccaggtggaattgtacgaacaatgcaggccaacaatgctctttcctcaagcagagcagcctctgaagtcttacctggcatcaatatattagtctgctcagttgttacagactttttgggcaaaatagcaccagtgccattgctgattgttgtttcacaggaaccaacagactgcattgaagaatcaggaggagataggctggcactggcagcagtacttccttcttccaccgttagatcttggtccttcagcatatgatttttcatgttaagcatattctgttcctgtccagttcaaagttaagtagaggttagctctgagctcttcaactgcttgaaaattaaccaaactgaa

SEQ ID NO: 768 - DNA, 625 bp, Gossypium hirsutum
aaaggtaaataggtttattaaatgaatcaaatacgtcatactgtaggatataaactaaagtgtaaaaaacagactaactaaatgagacacactgtaaaaaacaaaagaaaggcaagaaacagataaaatatggttaggaaagtacactctaattcctaccatgactcataaacaacattataagacataagcatccatgtgttacctcctttttcatccctcacatggatatttagtgaataaccaataacaaaagacatgaaaacgtagcaatgggaatttaggatatctcaagttatgagacacttttcatagagggcctaccctaaatgaagatgctcttgtgtgcgtgcctcagcatatgcaaagtaaagttgtcgagaaaaatggtggtcatattatttcaagtggatgccagtcatggaagtaaagcaaaagagttgtttaaaagttttctatctgtaagcatatatgtatgtgtacttttttctatttccaatcatatcagagagctgccttaacagacctgtaatggtgtcccagtaagaagcaaacgcctttggcaacggaacctatcaagatcacgagctaaaacagattctctgtctttcattcgctggattgg

SEQ ID NO: 769 - DNA, 564 bp, Gossypium hirsutum
gatactgtgattaaaagtttagtactgtttattggttatagatcttcaatcaactctttaagtaattcaaagctctatcatatgccttaacaaaaacaatctaaatgcatatgtagcattcatttgatgacccatacagtttgtatctttcaaattaaaagttgggtgggtatataggtgcaaacatactaggtttttcaagttgtttcctgtctgggaattttcagttctaggtaatccaaaaactgacttcgtggctgggtgagcgctggaaaggaagtgccattttttcgagaatcgaggagaaagtggctggtttccatttgacaaggacaagtaaatatccacttatgttgctccgactcttcaatgttcttggagtatcagtgtgcaatgcatatccaaacaaaggtatggggatgtaaacctccaaatacacggaaaaccttgaaaaattgaacatatctgtgctgaacatgtatgtatctttaagtccgaataacattgaacattatcctcaactttattgaacaatagaatatccacttacaaaaaaaaaaaaaa

SEQ ID NO: 770 - DNA, 618 bp, Gossypium hirsutum
atgttttaaggatcatcaatgaaccaactgctgctgctattgcttatggtttggataagaaaggttcgaaatctggtgaaaaaaatgttttgatctttgatctcggtgggggtacttttgatgtttcattgttgacgattgaagaagggatctttgaagttaaagccaccgccggtgatactcatctcggcggcgaggattttgataataggttggtgaatcattttgtacaagagtttaaaaggaagcataagaaggatattagtagtaatgcaagggcgttgagacggctaaggactgcttgtgaaagggcgaagcggacattgtcatctactgctcagaccaccattgaaattgattcgttatatgaaggtattgatttttattccactattacaagagctaggtttgaagaactgaacatggatttgtttaggaaatgtatggaacctgttgagaaatgtcttaaagattctaaacttgataagagtcgagttaacgaggttgttcttgtcggtgggtcgacaaggattcctaaagttcaacaacttttacaagatttcttcaatggtaaggaactttgtaagagtataaatcctgatgaagcagttgcttatg

SEQ ID NO: 771 - DNA, 663 bp, Gossypium hirsutum
gtaatttatcttctcaactatttaattggtacttaaatttgtatttcaattacttagaatgatatctttgcattaacactattagtttatattaacgtggcactgataattaatttattggtgacatatgatagcctctcaatatgtcatgtggcgattataaattttaaaaattaaaaaaactttaaaaatataaattaatttgaaaaatatatttttttcacattaaaaatgaacctcgataaaaaattatattttttattaatttatttaattttaaaaattttaaatttatatctactatatgacatattaagaggttgtcacgtgtcaccaatagattggtatttgatgctaataaattaatggtgttagtgaagaggtatggacctaaataacgaaatacaagttcaattaccaattattggacaaaacacgttagcgaaaaaaatataaatataaatataaatataaatataaacaaacaattatttatatataaaataaaatataaatagaataatttatgtttaaattgtcaaatacgtgaaccaataaaattgtaacaaaaagttgaaatcgaaaagaagaacagagatttactaaacgttgaggcatgtttaacacatgttctttaagacagattcaaccactcctatgaga

SEQ ID NO: 772 - DNA, 636 bp, Gossypium hirsutum
gaaatgctttgtactttcttattctctctttctttttgttgtaatggttctattgttgtgcaatttattacaagattttattttcagattgctcttcttatcatacatcgaggctacaagatgaatccaccatgccctccttttgaatgtgctcatatgtggtatgtgttattgaatatcattatcctgtacattttcaaaccttttttaggaatcaatatttggggatggatgaaatgctgttatttaatgtgttttggtttttcccattctgagttgttacttctcagagagagggtttgagggccaagatggtattggatgaacatggatattggtggaagagaatggcgtttctattagctaaagcattattattgtacaagtttgaccttagttattgtttgccatggataaatatttggaagttcaatttttctagcagcaatagatgggagtgctctctctaagtgtctgtctgttctgaaaccaaatatcccctcttttactgaaggaaaagtttgtgctgtaaagcttgctgtcttggtacttattcttagggcatttagtaatctagctaaaggacatactgtactgacatatatttatgcagaactctttgcttcatattgaggg

SEQ ID NO: 773 - DNA, 625 bp, Gossypium hirsutum
  misc_feature (411)..(415): n is a, c, g, or t
  misc_feature (428)..(430): n is a, c, g, or t
  misc_feature (435)..(435): n is a, c, g, or t
  misc_feature (446)..(446): n is a, c, g, or t
  misc_feature (460)..(462): n is a, c, g, or t
  misc_feature (465)..(471): n is a, c, g, or t
  misc_feature (522)..(522): n is a, c, g, or t
  misc_feature (528)..(529): n is a, c, g, or t
  misc_feature (531)..(544): n is a, c, g, or t
  misc_feature (548)..(555): n is a, c, g, or t
  misc_feature (604)..(605): n is a, c, g, or t
agaattgaactcattactgtcattagacccatcatcatccattaaatcatcttcattaaattcattatcatcttcatcgctgtctgatccggctgttttagataagaattgtttgcaagcatcaaagacatgcagctgccactgcaccatgtttattctaatctgttcttcggcagaaatcacatgagtgatagaagcagtacaaggctcaaagctgggccattccggagttgttgaagtggacacatcaatggattctatgcaggaccacccggtggttgtgacctgagacgagcctaatccctgcattattttagattttgatggtaccaaaatcatttatcgactttcatcagtttaacattcaaaagcaagggtgcaagtgagggaatctaaaataacaacttgcannnnncaaaacttaggtnnnggctnttgtaagaatntgatgtgtagctgnnngannnnnnngtaacttagtctcgtaaacttcctcacgcttttctccggaaaacaccttantacttnncnnnnnnnnnnnnnnttcnnnnnnnnacgagtttctaaaaacttgtggatcatggaaaagctttttagagctccnngtggtatgatataaagaaca

SEQ ID NO: 774 - DNA, 425 bp, Gossypium hirsutum
taatattttattcctttagagctttgggtctgctttcgaggagatacaagttctcaatgaagtcttccaactgcgtaggtaagggtttcatttcatttttcatattactatacacatttttgtcctttcctgccattgttaatagtaaattttcttcatgcattgatttatgtttcatatttccttcaaaaattagttgaatatatatattgtcagttcacggggatgcaaagagacctgctggtacaaaagaagttttagcaataatggtgaagaaagggatggagggactaaaagattgaaatagttgtacatgttttcatctttgggtctacttttgaggagatacaatttctggtttatcatataaatgatcatactatttttttctgccattgttaatagggttctgctttagagttcat

SEQ ID NO: 775 - DNA, 628 bp, Gossypium hirsutum
  misc_feature (619)..(624): n is a, c, g, or t
ctgagtgtatggcatatccaccatccatccactgatccagctgagaagttgcagctagtatattcactccaggtgcagttatgtctggctgcatccagaggaaatttagcaagatgatctcgagatatctcgtacaagtacactcgaattacgaggataaatctaccttgagaatttctggtgcaatggagctagggcctcttgatgagaaaaaggccacctttgctgatacaggcttgcctacaagtgtttttgaatggcctaatttcactgtgggggacctgttttgaataaaatttgagaatcatgatcggaccaaggatatcaaaggagtctaggagagtaactagaatagtactttgtggatcgaatgtaatagagtattcgggtgccgatttcgtagtcaacttcaatgcatgggaagtcatccctgcattcaatcaaggcatcacttggatttttagcaataatcagcccaatccctcctgcttcttgtacagttgccgcagcaagtcttacggcaactctaccggtgactgaggcaaagcaaagtaccacttttccagctaccaatgttgaattaagtgaaagagattggcatgctctgcatggcaatatnnnnnnaccg

SEQ ID NO: 776 - DNA, 563 bp, Gossypium hirsutum
  misc_feature (537)..(539): n is a, c, g, or t
gatgaaacgtctttgaataactcattactgtttaacagcttgaatcttgacaacaatgcctccaattagtacattactcatgagggatcacactttttctctgcagggtcatgaggtggattgttttggaataggaacctatttggtaacttgctatgcacaagccgctttaggctgtgtcttcaagcttgttgagatcaataatcaaccacgcatcaaactttcagaggatgtatctaaggtttgactgggctgcgaagaaattttagcggcatgctttcttcatcatataacgcatttccttcattatttctctctctctctctctctctctctctctctcttttcatttatttatttcttaaattctaggtctctataccatgcaaaaaaagatgttacaggttatatggcaaagaaggatattccctggtagacataatgacaggggaaaatgaaccatgtccaaaggtaataagtcttgtgtttcagtgattagctaccgacattctcttcttatttatttattttttttcnnntttagtatcataaaatatttagaa

SEQ ID NO: 777 - DNA, 640 bp, Gossypium hirsutum
caggttttctgatgatagcttttcagttccaacatgtttgaagaaaaattccaacaattgctctagaaaacattttcttgtatgaaaaatacaagttatatccttgaaaaagctttacttggaattgttttctaaaatgacgatttaccatgaaaccaaacatgatgtcgcaaaagaccaaaaaaataaaaagaatagagagacaaggggtggaggaagaggttcatagttgtgcaagcatctagttattatagaataatttaatgttggatgagccttcttcatgcatgcactcatacaatttgatgatatgatatccttcagaaataactcaaaaagaccttgcctatcagaaagaattaaggtccaaaagaaaatcaagcaaattggatgataccagcatccttcggaacacttgttgccaatgcctgctgaccagactgctggtggattgagtttggttgctgctgtaagcttgcagaggtaacactattaagaccaggtgcttggccaccatgtcccagaccaggtgggatagagaaacacgagctttgaggattgaactgcaagcataagatcataaaagataattacgattttctttcatgaaagaaatttgtctgagagtttccaccaattg

SEQ ID NO: 778 - DNA, 655 bp, Gossypium hirsutum
ttttcctgttaatttcagtactggccattgtaacacaaaattccactgtctaggggatctttgcaatgagcaaagacttaacacctctttccaaacagtcttagaatagttgcattcaaaaaataaatggtttctagtctccatctcactatgaaaaaaacagcaacagccatcaacttgcaatccccaagccaatagcctatccttcgtaggtagtcgattaagcattgccatccaaccaatcattgaatgttttggaatatgataagggaaccacagcagcttacacctatttaccttggctactttacctctacttccattccatacttaactaacagaatatttttgtcttgggacaatgagttcacccatttgaggatctctaatcaacccgatccaacacctcaatttgagaagtttcctctagctccaactactagtctgaaaaggagaaacctgcaacaaatccctacctctaagaacataagcttggatccaagcaacccaaagaggtcctgcttgaatcaaaatagaccacaagttttgcataatgcaagcttgattccgactatcaagctccttcaaacctaaccctccctctgatttaggtttgcaagttgtagaccatcccactcttgcacctttagcatcc

SEQ ID NO: 779 - DNA, 433 bp, Gossypium hirsutum
agttataccggtggcgcgaacgtttttggagccgctaactatagagatgcaatcatcaccttcaatgcaattgaatggagtagttagataaattgagcagcatagcatagacattgggatattcagatgtcccggattgtttagattaactagtgtttgattacctgttccgatgacacagttgtttatgttaatattctgggtttcagtcacatgaattccatcagtgttggggctgtgtccaggtgccttcaccaaaagattaaaggcttttacattcacacattttctaaatgaaagatgcatttgttgtgcattttttatcagtaggcttgccactatgaggttattgcattcattgaaggtcacagcctgcaaatacaagtcataaatcataatacatacaatcatatagttgaggcaaaaaaaaaaa

SEQ ID NO: 780 - DNA, 273 bp, Gossypium hirsutum
ttgagataaagatccaatagttataaaccaggaatagtaaacacaaaaatttgggcagttggtcttgtggtatgattttaactttggttacaaaaggttctgaactcgattttcagaatgccttgatgcattgctgctgccttttttttctaacccaaagtattttagctttggctttttgattccctatatcatatcctaaaatattctaacctaaagtcaactttaagtgcacaagagagaagtttatagacttagattgatctgttttct

SEQ ID NO: 781 - DNA, 462 bp, Gossypium hirsutum
cattggtgacagacattgcaactttgagctgttgcagaaataatctgaccataaccaagtgactggtagaaactctaccataaacccaaatgtgtcaacagctctaaaatgtctttgagaagagaaaaaaaccatattatatcccatgaatgatcataatacaaaatgaactaccaacacagtgagtgcttagacagtcgaactgtagaatataaactgatttcacttcacttgttttcttttccctctttaacattgtcttaatatgaatgcttcaggttaaacttcttcttgacagagaacgctgctagataattacagtaaaggcacaaagcttatccgttttcgacatcattcaatcagactacagctgtttggtgtcttccatagaatcagaaatttgtgcataaccatcaagtacctaatcttaataactttcaagatgtagccggctttataact

SEQ ID NO: 782 - DNA, 684 bp, Gossypium hirsutum
  misc_feature (677)..(679): n is a, c, g, or t
tttttagaaattctacatcatcctgaaactaggagtcttgagtcttaagattgttttgttttcggacaatgatggcagaagtatgcgtactgcactatatatttccagttataaaatatcagatttttttttcttcaaatttttattatacttaaagttcaaattttgtcttcccttctttttccttcaatattgtaataataaaaaaaatgttaataatgtgaatgtaaagtttaataggataactgattttattttttttatagaataaaaatagtattttaattttaagacgtattttactttttaaaatataactataccatattttattaatctattttaaatatttttaagacatgtattttatttttaaaacatttatactttattttaaatttaatttaaataatttaaaatttttatttatattttgacctactaaatatttaactaaattacatggaaaatgatgataagaaaaatgtatttaattttagagaggaaacaatccaacaaatatgaaatactagagtaattagataaaattgtattaatttttttttttaaaaatttattatagtcgtattgttgaatacttttttggattaagaaatttgattttaagttttattaaaaaaaattttttaaattcactagttggtccttttcaaaannnaacca

SEQ ID NO: 783 - DNA, 616 bp, Gossypium hirsutum
gctatgatgtcaccggctactgaaaatatgcataatcaaccttttcttatcggtaagttcgaaaatattgttctcctattacttatgttgttttttagatgcaataatgatcaaaagttgtttaagattgatgaaaaaaactctatggacatccaagcacctctttaatttttattttttgaagaaacgattaccataatagtatatagtatttgttgagggtggattggctcctttgggagaagtcttcaaagagtcgttctatagaaccccgaacccccaacaatcgaaggtattgtccccgtgttggggttttgtcctcagcttccgtgaagagccagctcacagatgggaatgccttagttgatgaagataggtacctgcaagactcgggaaatgtgccaacatggggcgtgagaataataatggagggacctgggcgcgggcaggatggcatgaaccaccaaccaaggcttaaaggcaatatgtttgcaaacatggtacaacttgcctagaggacgacactttgaagacttctctcgaagagttgatatcccctcaacaatattctacaaaatatcacctcttttcgttttcattgtacccaagatgcaag

SEQ ID NO: 784 - DNA, 883 bp, Gossypium hirsutum
  misc_feature (158)..(158): n is a, c, g, or t
  misc_feature (190)..(190): n is a, c, g, or t
  misc_feature (336)..(336): n is a, c, g, or t
  misc_feature (364)..(364): n is a, c, g, or t
  misc_feature (513)..(513): n is a, c, g, or t
  misc_feature (557)..(557): n is a, c, g, or t
  misc_feature (873)..(874): n is a, c, g, or t
atagaggcttcttctggggttcatttttctgggttccacatggatggtttggattctagacatatcaagaagcctatgatgtcaccggctactgaaaatatgcataatcaaccttttcttatcggtaagttcgaaaatattgttctcctattacttangttgttttttagatgcaataatgatcaaaagntgtttaagattgatgaaaaaaactctatggacatccaagcacctctttaatttttattttttgaagaaacgattaccataatagtatatagtatttgttgagggtggattggctcctttgggagaagtcttcaaagagtcgttctntagaaccccgaacccccaacaatcgaangtattgtccccgtgttggggttttgtcctcagcttccgtgaagagccagctcacagatgggaatgccttagttgatgaagataggtacctgcaacactcgggaaatgtgccaacatggggcgtgagaataataatggagggacctgggngcgggcaggatggcatgaaccaccaaccaaggcttaaaggcaanatgtttgcaaacatggtacaacttgcctagaggacgacactttgaagacttctctcgaagagttgatatcccctcaacaatattctacaaaatatcacctcttttcgttttcattgtacccaagatgcaagccttttgattatactatgtggtatttggttaatgaattggtttctttcaattacttagagcttttctcctttagatttctatcttgtttaactttggctattattttttggttcaggagttgctggtggagcagcgtccggtaagactacagtctgtgatatgattattcagcaacttcacgatnncacgtgtgg

SEQ ID NO: 785 - DNA, 617 bp, Gossypium hirsutum
ttaactctccaatatcaccattgctctcaatgttcttccacacccatctagggaaccactcctggctgtccggaagttggacgttaaggttcctccgccggcctatgatctcaaataacagaatcccaaagctataaacatcacacttgtgggttattggatatggcatccaaagttccggtgctgcataccctggagttcctcgacctcctgtcatgctcatatgagtgttttccctgttgcatagcttggccaaaccaaaatcagctactttgggacaaaattttgaatctaatagaatgttttcaggctttatgtcatagtgaatgattcgttgttgacattcttcatgtaagtaagcaattcctttcgcagttcctacagcaatttcatggagtttctcgaatcctaatatcttttcttgggtaaataaaaacctgtcaagcgaaccatttgcaggtattcgtaaactaatgccctcaggttcttgtcaaggcagaagccatagagtcgaaccaagttaaaatgatgaactctgccgattgtgcccacttccgccatgaattgttgctcgattcttttatccgaggttccatggagaaccttgacagctacca

SEQ ID NO: 786 - DNA, 613 bp, Gossypium hirsutum
gggggagcaggttgattcccatggtctgcctgagacggcgatggatgcaaatcaacccagtctagagtgacgaattcactggtggtggagaaatttgtgagccttccaatcatagcacttgatagtttgaggaacggatttattaagccatgttatgtttgaatgtaagtgctttcctccagcaagttctcaagaatgctggcagaagtgtgatataaattggttttactgatttctcttgaatctttaaaattcaagttggcttgttagagccattgaaggtttggtgagatggtaaggatcctcattgtgatcgaaaaccagctgttcaaaaataaaggacatctccggtgagaatttctgcatggagcagatgagaataattgtatagcagggcagttttgtggggtgaggttagcatctgtgagtgcatcgaagaaactctcatggaatattgccttctgtatgaaatctgcaagcacttgtactgccaagacatgattcctgtgtttttcttttttctcttaaccaggatcatggatgttggaaataatataaaagcatacgagtggggacactgcaaaatctcagcagctctcgatttgatctaaaa

SEQ ID NO: 787 - DNA, 637 bp, Gossypium hirsutum
tagctggagatgctttcatattcctgaggcaatatctttcttgacaaatccattaactgttcttttttgttacatttgtttatttcactgcctaatcactatccattcatatttgctgctctccaggggtgctaatggggagctgcgtgttggagtgaggaggcttatgagacaacaggcaaatatgccttcttctgttatatctagtcatagcatgcatcttggggtgcttgccactgcatctcatgccctttctacgcgaagtatgttttccatcttctacaagcccaggtttgtatttttttcatcctgcaaagccatccaattgtaaccctatgtcatcatattttttatcaatattcttacccatttttgtagttgttgttaatatgttattacaattagttgtccattcattttatttgctatttaattaaaatgaagaaattgtatgttgcagattttgagttaattaatgttagcacattttatttataatcattattgtttggccctgaattttgattatttgtggattaaagttgtaggtatctttttctcttctaaggtcattatttattcttccttcaccatgtattaaatatactcttcttgaagagtgagctgcgttagattt

SEQ ID NO: 788 - DNA, 628 bp, Gossypium hirsutum
aagtgagggtaacaaatatgatttatatgctacaagtagctcatcctttttatggaagtgacatacatgttaaatatcgagtgtgtaagatatgggctctgtcgttctagtccagaaggaattgcagtctcaacctcggatgcaagagatgcagcagtgaatgagacctgaaagttagataaaggttaagaaggcaaaaaacatacaagtgtgaacattgttataatggaggaggttattagcactcactggtttgccaccagaaaatactttgaaaagcttgtccacatcttccaaagtagttgtttcatcaaacgaaacagtaatctgcaaatcagccaagtaccggttatctcatgatatataatattgtgttgaccgaacaaacgggtaggtgcaatcagactcactgttttggcatcaagaacccgaaggtttatctcactcctgcgagcagcatcagcaattgaatgggcatcagcacatgtaaccttcacagtatcaaagaagggaaggccctggacttccacggtgccaagtttcttcagtcccaaagcaaataccccagcaagaccatgaacacgttgtgcaatggcctttaagccctcaggtccatgataaacagcat

SEQ ID NO: 789 - DNA, 633 bp, Gossypium hirsutum
catatttttgtctgcctcagcttccgcaatcaaagcctcagcaaaatatgtagtgtaagactgggtagcagaattgcctttgaattgctttccagttgccggatcgaacttcaccactcctgagaaaagaaatccaggtacagtttattcttttattccctaaactaaggtcatatatctaggcaccagtaatttaaatcatatgaaatgatctctcttctaaaagggcttattctgtatgttaccgtgatacttgtcagcagctctctctgcatatggataacctcggcctttctcagtgacaacatggatcaagaccggacccgttgttttagtagtcttaacctctttgagaatagaaactaaatcatcgatgttgtggccatcaacaggtccaatataatatagtccaagttcttcgaaaagtgtagatccagaaccactgatcattccacgagcatactcatcaacttttgcagccagttcatgcataggcccaccgatttgcttggtaactccctgcaatcaaaccacatccagtcttagtaagttttagtttctagtaaaaattatattagttttctgggttctattcatttctacttacctttgcaacctctctcagttctaaaa

SEQ ID NO: 790 - DNA, 624 bp, Gossypium hirsutum
cttcgatagactttcaagtacttcctcatccagattgttctttgacttgagtcgttcaaactccaccttcattgcatctctttcttctttaaggctggtaacttgtctcgataaatcttgagtccttttgttctccttcgtaatctgtttcctaagagattgcaactctaattccgatacttctacctgcctcaaaaacattgcattttcacttctgagtttctcaacaggattttctgattccttattccattctcttgggacgtcttcggggctaatagctaactccgctaaacttccatcagaagttgaactggccgaccaatccgtgtttgttctccggtgcatgttctttttagtcatgccagtatccacagctctcttaggcatagagttctgccgtagagatgaatataattcagcggagtccaactgcccatcctatgaaagaattaaagaacaatttaattgtaaacttgcataaaatagccatctgttccaggtagtaatttcaggatgctttaaaacccaaatcattgccatgctaaactatagtaaaaccagataagtggggcctttgaacttacttctgttaaagtttggacattgtcactgtaatttatg

SEQ ID NO: 791 - DNA, 502 bp, Gossypium hirsutum
ttaccaagctacgtttgtgtttggtttggtaaacagtgctttcatttcttatttggttgccttctttttctaccttcagatactacatatccacgtgtaacaatacaatgagatatatagtaaccatggtagtacgtttgtaaatttgtatggttggtgggaagagatatttcttgaacattcacttggaagtattgtgaattttgttcattaatcaccccgttgtctttcttcatgctgaattctactgcatgacaatgtgatattagtcaaattagcatggtatatgtgattgaagctaattgtatctaattctttggttcagcaatggagcttgccttgtccctggagaaactaacaagtgaaaagctctttaacctacgtaatgtgagactctctctgtctatatatatacatagatgataaattattttgtcctgttttctatttgcacttatgaattttgatttaaacatattaatagggtctagggtctcattaa

SEQ ID NO: 792 - DNA, 665 bp, Gossypium hirsutum
tgtcctcaacaaaaactcaaattatagatcttaaaagatgtctaccttggacaaaattccagtgttggtagctcctcctatgtagttcaagagcaacaccctgccagatggagctcgattcgggaaaagtgatgaactgtatatcgtccctgcaagttgttttgttaattaatcaaatttctcaaagcgaacttttaccgcaaacaagttcagtatgatactagatatgttactttaggaagaatggagttacctaaagtttcgattccttggctgcgtgggtgcaactggccaaaccccttaagttcaccatcaatcaaacattcttttcgaatggcttcttttggataggagactgtgactgatgcaactggaggataataaaattgggataatgcatctgcagcagcagcctgcaaagaggacacaaaaatggatcaaagaaataatagtaaaactctgaagtcaactaaactagttaagaacgagaacaaggcctcaataactcttttagagaacaatttccttcaggcattttcccttgttgggaaaagttacttttaggtatgaatacacattactagtataccaagaaagtatagcagatccataaacaacatagagtacatggaacatttttcaagaaagtggacttgcacaaagta

SEQ ID NO: 793 - DNA, 666 bp, Gossypium hirsutum
cttttttgattgatagataatttattaaccatccttcattattctattgactttgataactagatttgtctttgctcaaggtgattacctctcattttatattttttaatgaaaatgtgaaatgatgtctatatgtgggttatcttaaagctctccgacttcgtcagcttgtgtactaatgtctctagtagattgttctgttccatgtgataaactaattttatatgttcttacatgtctccctgcttatgtgatgcatctgttcagggagattgtcattgggcaagatggttgctcttatcaaggtttaatggccatgaatatgatgcatcttttgaaaatactcgttcaataatgtctcataatttaattcatggtggcaacctccatggtcatgaagtagatgaagtagttcatactattgatgatattgcggaaggaggtggagagatggcagcattagcaactctaatgtatgcttcagctccaatacaaaattgcttaactagtgggagtgttaacaggcataacagctccacagcgcagtgcacattagaaaatctgagacctactttgcagcactatcctacattgtggcgcacacttgtatctggatgttttggacaagatacatcttttggtttcttccacactggagctaagaaa

SEQ ID NO: 794 - DNA, 452 bp, Gossypium hirsutum
tggctcttgttaaggcatgaacacgaccctcaaaattccggttcccagaaagtacagcagacgctacaatgtctgcgtagaatattcaaaatattttagattagccagttaaaaactgaacattaaatttggcaaggaataagattaacatgttaaagtgtaacacaatatttgagtatttacacgcttacatcatgcaaattatgaatcccaaaaacttttacagttagaattttcaatggtaccgttttctgaaatagcagaggcaactgattcatccaattctcctgaatttccaatacaagttgtgcagccatatccaacaatatggaagccctgcttattcaaatattcttgcaacccactgcatcatataaaccaaaattagtgaactatttcctaagaataatttaaaataatttaataaaaggaattttcctcccaatcccttt

SEQ ID NO: 795 - DNA, 608 bp, Gossypium hirsutum
caaaatggggttgaataataccttgtcatctctaagcaaggccctacatcctgagttctccttttcaagtagccgatttgcatacacgaccaacaactcatgttgcactttctacatacagaataaacagctataaatagaatgctctagaaattatagagttttcttcatagaaaaactatgttaattcttattccagtattccatgtaattgaatataaaaacaatgtggaatctcaatttctaggtaaatggaagcaaacagaaagaaatatatagttgccacctaaagagaatgcacataacttctatcatgtatcttaatgaaaactttcacacatcaaaaagtatccatttatgtttgctccaatggaagacaaacagattttctctaaaaacgaaggtgcaccttcaagccaatttaagctcacagaaaaagctctttattaacctataaatttccaaccattcaactgacctctgacaatttcgtctcactgcttgaatgcaggtaatgagacactctgtccctttccttcttcagacattcttcagactgcaattatcattaaaataaatgctatcagaaccatccaggttagtcaggg

SEQ ID NO: 796 - DNA, 562 bp, Gossypium hirsutum
agtctcgagaaactgcttctgtaattgatttctgcatgcgtttgctccagctttactcatcacacaatattggaaaggtaatttttgttcaaactccttaaaaatttcccacggtgctctgattaaagttcactgtctctttattatctccatcttaaaatttctgcttaagtgacatttcaactatggaggtaccctattttaattatccatatctgtagttgccctctctgtctatttttgtggggtatacttgcattttacgttaaaagcttctgaaatttaaaaaagaactcaatgatcatgcaaaaagaagaatatcttcatgctagataatattttcattgtttcaagctgtaagaactatttttgtggctattttcagaaaaggatatttatttagctctgtagtgtagttcagtttagttccaatgctaaaactttgagcttactcccaaagtagtggaagtaatttctaatattgtgccaattatattgttgcttttaaaacttttatgcaagcaattccatggagagatttcctttgccttcctcttatcta

SEQ ID NO: 797 - DNA, 602 bp, Gossypium hirsutum
tattagatatctgtttgtaaactttgtaaaaaaatgggacttttattggaattttttcaataccccatcaatcggctaacacagtcatcaatattttttgaacttctcattttcaacctctcaaattcagctcttagtgattgcagacatacccccgcatatttcctgtgatgttttcgcatccaatttttttttcaaaagttaagtcgtcaactccttgaaaccttgttatcttttttacgagcttccttaatacccatttctcttcacttctcaaaccgcttcaacagctgcattttcaggctcaacatattctttttttataatattccagcaatcttgagtgagagccaaatatatcttttatttggaagctccagttatcataacttatcttcattaatttcaaaatgtgcagttgaattactttcgtcatcataacatggccacaaactaaacttttataccatttattggatgcatagagaacactgaaaccaaaataagtttattactcaaggaagtaacttactagaaaacaacataaatatataaacacgttctttttctccattacccacttctattctcactgcacatga

SEQ ID NO: 798 - DNA, 650 bp, Gossypium hirsutum
  misc_feature (43)..(44): n is a, c, g, or t
  misc_feature (645)..(646): n is a, c, g, or t
ctctattatttagtaacttctcatcaattaaaaatctaacctnntttttaagatttctttaaaaatatatagttctaaatataaatatatattttaaaattttaaaaattatttgtctaacaaaattttttttcctaatttaacgttacatttaatgtaaaagttccaataaattaaaatattctagtatttattttttgtaattcttttgtacttaccttggtaattagtttatgtattgtttacattttaacaacacaattcttatttataaaatgtttggatttattccattagacacacaagtccaatggatatcgtttatatagctggaaactggtgcactactcaagagtaacagggcaaccaagaaagtcccaacaaatgtgtttgttgtatgcaatacagtgcaagcaaaacttactgtctttgacatcttcacaattccaatgatttaatttaggaaaattcaagtcatttttcaaaaataagttgaatagttatcataaaatgatttcatttttgtccagatccagattcccaaaggtaaacgcaggacttacaaaaaaaaaaaccgtttttttctttttcctgcttcaaactttgttgaaaaaaaacattcaagtgcccaaatttctgcttcanncccc

SEQ ID NO: 799 - DNA, 649 bp, Gossypium hirsutum
  misc_feature (644)..(644): n is a, c, g, or t
catgggggagagcatcatgaagaggctgtctgagatagagttttccttgaataacacaactaatcaggttcgggatgctaactctaaagttcagaagcttgaggtggagcattcgtgctgaaaatggagattgaggttgctaaattgcaggctgcagcatcagcttcaagttgtcaagaagcattggaaagagaacagaaagcacttaaggatgttcaatcatgggatacacaaaggagcatgcttttagaggagcttgcatcagagaagcagaaggcagctgagctgcaaaggaaagtgggcaaggctaaaagatcctacaatcaaattaaggtatgtttctccttgaagaaatttactcattgacttttgctaaataagccttgctcagcatatggttctaccttgttaagccagtatatggctcttaactaaatggattagtaaggttctagaatgatatggctgaggagaagatgggttatcaaattaaaagccaccaaaagaacatgataaagtataaagctctaacagaccataaaaattgtagaaatgttttggaccaaccttcactctttcttgcaaatcatcatgaaattagttgaagggatggcattgcaaataccttgtcaggttgtccattntcaag

SEQ ID NO: 800 - DNA, 553 bp, Gossypium hirsutum
gttgtttacttacacagcagcaccgttctcaagtaaaagggccacacagtctttccttccataaccagctgcataatgaagtgcagtattcttattcttgtccaaagcatccacttttgctccagcttcaataaggacttgggcacatttcacctgaaattatatcaaaaacatgatactcctattgttttaataaagggattattgttacacaaaaagcgaaatcgatatgcccagtagatggtcattagtaaacgctgaaccaagaagcaagcgtataccttagtagctatggcatattccattatacgctaattcctgatattgatgtttaataacaatataaacctttttttccaccacatggatcccaagatgggatgctataggcaaaagaatatgctttaaggatccaagccctactatttccaactgctttcaacattctataagtaggccatccaagatctgtttcaactttcaatatttgtccatcccaaaacttgccttcaacgaggcaattaagacaaggtccttagtgcatagaggactg

SEQ ID NO: 801 - DNA, 638 bp, Gossypium hirsutum
atcattaatgcattcgatagcaaaagatgaaacccagagaataaacttgtgttaatgatattttctattatgtttttggttggttgattggtactctactttctatgaatgaaatatttttttaatcctttttgatgccatgcttgtttacaagaaccgcctgttctttggttttaagattcttattgtctcagtggctccctacctttcttctttcctcttgtcctgcgatgccttttacttttcttgtattgatgatcttctaatacttttggtttttaggtcttctccaaaaaaaattgaaggtccagatggacggagcttacagctccacttcaggtctagattatctcttccccttttcacaggaggaaaggtcgaaggagagcagggtgctgctatccatattgttctagttgacagtaagactggacacgttgtaacaactggacctgaggcctctgttaagctagatgtcgttgtgcttgaaggtgatttcaacaatgaggatgatgaagattggacgcaagaagaatttgagagccatgtggtaaaagagcgggaagggaaaaggccactgctgactggtgacttgcaagtgatcctcaaagagggggtaggaacgctaggagatctca

SEQ ID NO: 802 - DNA, 628 bp, Gossypium hirsutum
ttgtaacgagagattattattcgaaacaacaacaaaaccaacagtgggtcgtcggagaatcaaattccacggaggtgagttgcatgtgccggcgcatgggcaaggacgctgaaggtatgggtggcgtgtgagggccacaagcagggagtttggttactggatttttgggtttccccggggattggactacaactctattgaagggggtggtgagaaaaaaaaattggccggaaaagaacccaaattgagccaaatagcagcaagaaaacacccttaaaacagaacaaaaaaaaacagtgattgaaacaatgcgaaacctaaaaagaaaataaaaaaaaagacctacaaatcctcctccgatcaagcaaccgaccactgggctagggttggacaaaggagtcaacatcaagggtggaagccggtggtgagatgaccacgcaccgacgcgtaaaggagggtcgcaaatctttaggccgtgcgtgagcctcgcgtgctgctccggttgcaactgtcaagatggtggtgctcctgcctgtgctgacagtgtacccgaaaaaacttgaaaagttaaactcacgaaatgctcaaatggtttgtgttcaaaacaacaaaacacaagctccctaaa

SEQ ID NO: 803 - DNA, 664 bp, Gossypium hirsutum
tcaaagaccaaggtatgtgtattggttgaatcctactttgttttacatatagttgtgtttgtgtgtattagagttgggatccttatttgtgaatgctatttgctgacagaaatcgaggcccttatgcaagcacttgatgaggaggaggtccaaatggaagagttgacaaaaaagaacgaggaactagaaaaagtcctgcaacagaagaacatagatttagagaaccttgaagcttctcaagggaaggttgtgaaaaagctttccatcactgtgagcaagtttgatgagcttcgtgatctatcgcaaagtcttcttaccaagattgaacagcttcaatcagaactacaagatcgggatgctgagatttccttcttaagacaagaggtcaccagatgcaccgatgatcttcttgctgcatcacaaatgagctctaaaagagaatcaaatgagatacatgagtttttgacttggtttgagggaattgtttcttgtgttgggttaccccatctgcattttgatatgaaggacattcaggtgcctgaatacaaggaaataatacagaaaaagcttagctctattacatctgaacttgaggacctacgtgtggctgcacaaagtagggatgaattgttgcaagcagaacggactaaagtggaaggagcta

SEQ ID NO: 804 - DNA, 355 bp, Gossypium hirsutum
accattacacgatcgctacaatatttaatatcatcgtcactgttgtttttatagtaactataagtaaatgcaccaactatctaaacccacccttagatttagaatttttaagatttgggctcaggttgaacaagatgatcttcatcaaattcaaatgattttgaatcttttactttataaatattcaattctgatttaccttatgaaaagcataaattatatatatttaatagaattatattatataaaataattaaagtgcttctgaatacatatttataaaataaatctttaccatttatttttattttaagtaatatcatataattatttcggacttgggttcctatagacc

SEQ ID NO: 805 - DNA, 634 bp, Gossypium hirsutum
acaaatccaataaataaagaattgtttcattctgttttcaatcataatggaatagaaatgcatgcaaatatggtactagtcttattgttaaagaagatttggtgcacatgttgctaaaatcaagagtggaggatcctagactgaaagtgtggaaatcttaactgagaaaacattaattgaaaataaataaatagcctacagagaaatcgacattttctataaaaattgtctggtaaacaaagaacacttccggactgcaacagagcagacttgcaaaaaaaaaccatacagtcccagttatgttactgtgaagatcagcttccataaacctaggaatacgaatactactcaaactcagctccaattcattactgttgagcacattgcactctctgggcaccaccatgcgtatcctcatcttcatcataggcttcctgagctacctgctgcttcctcctcatctcctcttcaatgttcacatcgtgtagcgtggtctcctcacactcatctagctccatatcagtcaaatgagatgttggttttggcggcagaatagcctcaagtgccttaatctgatcagggttcaatgaatcagggaattcaacggtgaagtgaatgtacattttgcccttga

SEQ ID NO: 806 - DNA, 628 bp, Gossypium hirsutum
gtgtggcagcattgaagatgctcaatgggcttttgatgagatgccagagaagactactgtaggatggaattcaattatagcaggttatgctcttcatggttacagtgaggaagcgctaagtatgttctatgagatgcgtgattctggtgttaaaatggaccatttcacattttcaatgattatcagaattagttcaaggttagcttcagttgaatatgccaagcaagttcatgcaggtctgattcgccatggatttgggttggacattgtggctaacaccgctctcgtggacttctatagcaaatgggggagagtagaagatgctaaacatgtttttgacaggatgccttgcaagaatacaatatcttggaatgctttaattgttggatatggtaatcacggttggggagctgaggccgtggaattgtttgagcaaatgcttcgggaaaaaatgagacctaaccatgttacttttcttgctgtgttatctgcttgtagccactcaagattatttgaacgtggttgggaaatttttcagtcgatgagtagagatcacaagatcaaaccccgtgcaatgcattatgcttgtttgattgaattattaggtcaggagggacttctagatgaa

SEQ ID NO: 807 - DNA, 608 bp, Gossypium hirsutum
tataggagagcataccttgttttaaaggaaaactattgagtatcaactctcgtcatcggaactagaactaaaattttccatccttcgttcggcaattgcattaaaaagcttctgatgaggatcaagagaagttggtgcaagacgagactcagaagaagaagatgatggattggaagcatgttttttatgtgttttaactggtttccttggggcatttctaacttctttgcaaaccttgtctaaaattatcaaaaagtcgcgtactatgacgaacaagcgtaagccttcgtctttatgtgcgttaccgtgaaaataatcaccagtgctctttactaatgccattattctcttctcttcctcgagcaatgacgtgacatcgacttctgcattctgcacaaaactctttaatgcttcatggaaaccactttgttcgttcgtatttttcatctccgacttcaagaaatctcgtgcttttaggagtccatggccaagtttggcaaccgttcctgttaaggtttcggcatcgatagctgctgctttcttgacattttcgagttcactacttagacgtgaaaccacctcaagaccaaggttatggaagtgctctt

SEQ ID NO: 808 - DNA, 406 bp, Gossypium hirsutum
aagaatgctgtaactttgcatctgacatattaggagttcatggcaaaatgattacttacatgtgaattcttttccattttcaggagcttgtcgaaaaacttagcttgggagaactatcgaaggatgattatccttgtatgaatgatcctagtccaagtttccatggctcatctccagctgctgcatccatacatgaggctccagttgctcattccatgagatcaaggaggacgccaacatgggctcggcctcgtggttcagacgatgggtattcaaggtccttattatgaatacctagcaaattacttttggaatcattctccttaagagttttattttattttatttatttatttatttcactgcttttaatgcatcaatgccactgtcaaggacccttgtgctt

SEQ ID NO: 809 - DNA, 634 bp, Gossypium hirsutum
aggggttactagaaatgcagtcaagggagggtataaagcagtgttcgcaaaacggatacaaagaatgcaaagacaatactctgatggagtgaagatcggcattggtatgttaacctccataatatgctgtgctgttgcatcatcggttgcgtccaaaaggttagaagctttgcgtgaaagcgggttgttgaatgatcccaaagcaagggcccccatttcagcagcttggttgcttctgcaattctgttctctgggtgcaatggaaggattagcaggtagcggaatcgcagatttctttggtcattatgtgcctgattcaaggagatatggacctgtatttacagacacgcttgcaggatttggaatactacttaacattggattcatagctatgatagattattacagcaggttcagatataaagaaagttgggttggtgatagcgtaaacgaaagtcgtttggatttgatctatcgtgcatatgtcatactcgccatactcaactgtttcctctatgcttatgtctcctcatcgtattcttatgataatataataggaaaaccagaagacgaaccagaaataccattcttggaagttaaacaagaagaagaaacagtggcctatgagttgcag

SEQ ID NO: 810 - DNA, 650 bp, Gossypium hirsutum
taatgctcttaccctcctcatcatcatcttctttctttctcttcacaaaaataattgcaaatataagtatcaaagccaatgctacaacaggaactgtaacaccagcaatcaatgccgtgtggttcttctctttaggattgcttgggggtatcccactgacagttggtatgaaatctggagaacaaaataggtgtattagaaacataaaacagaagataagcacatggagcatttattacatgaggattcaaaagtgttaaggtgtcttacttggaacaacactaatagctgaaatggatggaccataataaccatcttctggtgtgccggaagtccccttaccagcccagaacaggtgaatttctagatggttctcagttacgttagtagtgaaattcctacttattgctctctgaacaccaccagcctcctttgatatatcaaaatcccttagtctccgggctccctgatgaagcattaatgagatatcaaaccaataagtgtttctaagtgtaaaattatgtgaacatacttgtaatcatagaaacactgcaaataggggcagtgaaatgatttatatatagcttacaatggtatgaatttgtacttcaaaagaaatattacctgaatataaacatccgaaaccaccc

SEQ ID NO: 811 - DNA, 584 bp, Gossypium hirsutum
  misc_feature (395)..(395): n is a, c, g, or t
  misc_feature (527)..(527): n is a, c, g, or t
ctttctcgtctcagacatgttatttattgcttcggtaataatatccttcacctcagcttttctgtgaatcaaatccagatcaaagtgcgtacctgacatgatcaaatcttataattagtgaagtctaaaaattgaaattgcaactcatatacattagaaactaaagggaaaaataccaagttgccgaagaatatccgataatgttgcctgcatcacaaacagaagaaaagcttagcactacggtctcgattatcatttcatctccaaagatacgcaaatagacactacttacagtgttgaagtccactttttttagaatatctaccactacttcatttatctcttccctgctaggctcagcttttggcttcttgctgcttttgcctttacctgtngctgcataagctcaattgatgagaatcaaatcaaaaaatgcaaaagaacacttcaaatatccctggcctagaagattttcttttaataataaacagttaaacacatcaaaatttaataaaaatcttatgaanaaaagcctgagtaaacatgcacagtgtttcaacggtataggcgtatggatagataaa

SEQ ID NO: 812 - DNA, 625 bp, Gossypium hirsutum
tgatggacctttggagaaccacgctccaaaaactagttgttgatccaagtctcataacataacatgcaatttggcacatatcaattgtttgacagaaatgaaaactgatagaaaagaaaataaaatttttaaaaatgcaaatattgtaaatattcatatttaatttgtatctattccattctctctcctctcattattacaaattggaatattttttgtttctgtgcattatgatggaagatagtcgtctttcgtttctaatttcctctcacttctttttcctaccaagcacacttgaaatttattatctttcaacttttccaatctaccattgctttcttgatacttttccacttcaccaagaataccctaaatgaatccagtatctgcatgtgcatatgttcgataattatttgcagtataagatgaagtcctaaatctactatttgtttgcagatcaatgatggaagcaaaactgaaagctggaaccacccttatagtagaccgttactctttttctggagtcgctttctcatctgctaaaggacttgatttcgaatggtgtaaggtgaaggcaaactgccaaaagaactagctgcttctcacatattaagttattgcttac

SEQ ID NO: 813 - DNA, 640 bp, Gossypium hirsutum
ggaaagtcagagggtgagtcgtagccatatccataagcagcataatgtttatgttctgctagatttgggttaataaaagctttcttgggcactaaactagtttactctgtgctattctactttgtaggctacttaattttgttgggttaataaaagcttgtggaccaaaatagtttgggaagattaattttgttggttttccttaccctgttgcattattcatgcagtctcactaaatgggtacctccaccagtaaagatgacaagtggctatgtcagggagaacattgatgtctcacgcaagaggatggatgtgccttcattggatatgcttcagtttcactggtactattaagtatctgtcacactttctttccacttagagtaatttgctgcggaaatttaaaacctcccttcaaaacttgataggatgatgcaagcttgatttttaatttcacagagaaccatatttccttaaggggatagggagttagaagcttcaaagtctctgtttgattttatattgtttgttctgattagtaatggcattaggtaaaagctcgcattatttgttacagaatatattattgacttcagcattgttgtctattaaggtagacagaattgggtgaaagtatttg

SEQ ID NO: 814 - DNA, 255 bp, Gossypium hirsutum
tgacattttgtgacattatttttcaggtttttttattatttaatttccctccttttcaaccattttcccccagattaatagagtagaatatatgcattcgaggggttttcttcaccgtgatataaagcctgacaacttcttgatgggcctaggacgcaaggcaaatcaggttctagttattgtgtttttcttgtaggttaacaaatataacatgtacatactcattagatggctagcacaaccaccttttttttt

SEQ ID NO: 815 - DNA, 359 bp, Gossypium hirsutum
acgcggcagtgtaatgaagtcaattgatacaagggactcaacgaaaatcatgaagacaaacataaagcaaaactaccttaaaacgagaaccaattgaagaaaacttggatgatttagatgtttcttctggaagtggagggaaaagacctgatacaaacgaacatttggaagcactcaacaagtcttgatgttcaggaaccacataatccttgtttttgtccaaaaattgatctgattggtatagaacctgaaaaggaaagttgttaggaatcataattgacatatcacctccaactatttactcataagcactttgctaatgggaacatacatctccagcataagagcaatggtgaaaa

SEQ ID NO: 816 - DNA, 629 bp, Gossypium hirsutum
ggaacaaaatacgtggtaatcctgtatccactccactatgccaagagaaaagcctaattcatgtagcataacacgctgattcagttcgttgcatgcactcaaaatagctgaggggcaatttttaattacagcccgcatcccatgaagtaatatatcagctgcacaaccatgaaattctgaaggtagataacatagacaatcaaggaaaaaccttgaagcatgagatgcagcttttttcatttcgatcaagttaatgagtaatccattagccgaattgccaacagaaacatcttcctgaaattttggcctaaatggtgcttttccattcataatagaattctggtaatcatctgcttcaatgttctccatttggtttttcaaaaggacttcaaaagccatctgtgcatggtgtttaaggagggctaaggggaggtgctttattcccccagttatagaacacaaagacagcagcatcaaagctgtttcaaaggcagatcccttaagagcagcttccaaaaatgaatcaatagtcgctgattgatcaatacggacaactttcccatcttttgtcaccaagcacaataactctttcgcacggacttcattaaacaaccacaatataagagaac

SEQ ID NO: 817 - DNA, 649 bp, Gossypium hirsutum
cctgtctaattattagacccaaagcagctatcaacccagaagtgatggtgcaggcttgaagcacattactcctggaaggaatggaaatgatatccggtggagttgaatctacgcttttcccattattagtattgccatcgttggaaggatgcatatcagctagaccattgatgtcttctggtaaggtctctttagtctgcaaggtgaaacttttacttggccgcccctctcttcttgattttttcattggtttgcgactagcaaaggcccttgcactaaatttagtgctctgcggatgaaaggatatatgtataaaacttgtaggacctgaaggcaaactacttatcaaattcaggaagattagatggcttacaatgattgagtttcggggtgaaagctctttgattccatagtatctaacaaacatgccacctattcatatatcaccaatttttcacatcaacaaagaataaagataagcttttttatttttactaataacttagtttctgagtcaaatcttaagggtataaacaaggtacttaggttcgacgaaagaaactagattcgattttgacattatcaagtcaagctcaaggtaaagctatcaaatgagctagattattctgatgtttgcctcgagtagttc

SEQ ID NO: 818 - DNA, 564 bp, Gossypium hirsutum
gctcttgggctatgctgcagttgcacattagaaccaagtcctagctgttggttccagttggctgcgttagaatttgacagcaagtgagaggggagaccaccatccgcctgagagtttccctcagcttggctagaaatggcaccatcagttacttgtccttgccagtttggagatgatgaactctcttgagattgggaacttccagaatatccccaactttttcttctattaaactggccagctgcagccatcttacttaaaggtgatccctgacaactgtttcttgcaggagaagtaggaccatagtgtccaggagagccacctgaataggagcttggaggagtaaactgtgagggactggtgccaaggggaagtggtgcaaagtttccagctgatgggctcacaccaagtccttgcccctgagaatactgcataaatctccatctagcatcaggactacttccaagcattgatgcaccgctctgtggatgcatgttcattgcagatggcccaacaggtgaataatatgcaaacatattactactctctccgttactcccgtaa

SEQ ID NO: 819 - DNA, 612 bp, Gossypium hirsutum
tggtagaggttttcttcaaccagatgatacctattgcttgttcattcttcaatgctctctccatgtgtgtcacttaaccccctaattatgtttgcattttcatcttaaaattggttgctttgaagccattgtttctgccttctaagattgtttagtttatatttaatctttttggttgatttaatatgtttttgcagagtgtattgagtggttataatgggacagttatggcctatggtcaaacaggcactggcaaaacttttacacttggcagacttggtaaagatgatgcatctgaacgtggtattatggttagagctctagaggacatagtggccaacatatctcttgcttccgatactgtggaaatctcgtatttgcaggtaagattcatattgcgttcttttgtgtgatcgtttgtaggcacttgtctcatggttgttgattaaatttactgttgaggtgtgttttcttcctcaacctatagctaatgtattagttttgagttgaatttatcatttgatgctttatctaatagataggcatggttgggttttgttgtttggacctttttgatttaatatttagccacatgacagttatactggatga

SEQ ID NO: 820 - DNA, 625 bp, Gossypium hirsutum
agagttacataaacaaaatgttagttatgaatattttatccaactgagcaggtcagatgttaagaattgaaaaagtttaataaggtcttctaaaagccataaaattgaatgcatagaaaagtagctcttaaaagattcaaagcaggcagaacaatgttaatataggtattacatcagttgagctgaacatacctcatcaataaagattaaggatgactgatcaatttgacaagaatccagcaaccattttaattcagcatgtgagttcagctctgtcctctttatgttgatgacaggaacagtaaagaactgatcattttccagtgtttcattcaagtagaaggcatacatgattgctgaagcaacagagccaacatctgaaaattgaaaattctgatatcagaatataaaattcatggcaagaagcggaagaataaaattgtggtagagcattccttttcttcatcccaaagattttgaatttctcaatactgaaaacacaatacctcctcaccagtcttccaaattttttgttgccaaataaataaaattaattcattaattgaagaaacttgagacttaaaagtacaggtaaagaatggaaacaacttcaatgcactcgcaa

SEQ ID NO: 821 - DNA, 631 bp, Gossypium hirsutum
cacataaccaggaaggggggactgaaaatgtttacagtaacattgcaaggaatggtgacaaatccactcatggttccttcaagtcaactacagcttccttcaatgaaaaatcatcggtgaataatgaaatcagagatgcatattccctaacaaactaatcttaagacaggcagatggagcattttgctgaagtgagcatgaagagaaactcaggtggaaatgggaagcaatttgtgaatgaactgcatgatattaagaatcctcagaatgttgatcatcatgacatcagggatggggaacaatcaagatattcttcgtctgtttctcaattaaacacatctaccggtgatcatgatgatctctctaatctaaattggcaggagtcaaaaatgataagagaatgaactgcataatagaaagacttcttatgatgatcatgatgttttatcaaatataaactgtcagaagtctggaatggattctggtgaggatttatttcatctcaatgatgaagcaagccttccaagaggcacagaagaaacaacaggttcttttgtcaacgcctcggcagtttttgatgattatggatcagatacttatgaagacaactttggtttggaggaagatccta

SEQ ID NO: 822 - DNA, 457 bp, Gossypium hirsutum
tggtgtctgtctcacaggtggtaacaagtttccatgtcttccatagctatcttcaggggatgaaatgttagctatgctcattttggcacgagtaaaatcgcagtgaaaagaagggagagcagggtcaggtgtgcaagagtaaaactgaagaaacaaagcaattcaataagatgggattataaataagtccaacttccaacaccaaaagctcgtgattttaattttctctatgtaaaattgacacgataagactaggggaaagttagctgtcaaacttggcactatatgcttcaacgaaagcctatgcgcaagtccgtttaggtaatagagtcttgattgtatttttaaaaaatctcaatgtcggtatttagtggagataatggtttatatagcttttgaagtagacaaaaaggacaagttgttggaccactccattttttaaaatggcttttttttt

SEQ ID NO: 823 - DNA, 623 bp, Gossypium hirsutum
tcttggcaacccaaccttatccatgctcagagcattcttgcaatctgggcttgccaagttgtgctcatgggatttgttgaaggatacagagttggtgggggaccacttggtgaaggactggacccaatttacccaggtggtgctttcgacccacttggactggctgatgatcctgatgcgtttgcagaattgaaggttaaggagatcaagaatggccgccttgcaatgttctccatgtttggattctttgtccaggctattgtcacaggaaagggtcccattgagaacctctttgaccaccttgccgatccggtggccaacaatgcatgggcttatgccactaactttgtccccggaaaatgaacttagattatagatacgtctctgaaagctgtaacattaattgctatgtagcatctgttgctgtgtactgatgtaattcactgctagtcttttgagctgttgtatcattaaatccatatcctttttccctgaaatagcacctttcttgaaatgagatgagatcataaagcaaatgttttattttgtcgtaagaggctggttcagttagttgatataaataaagcgcaagaaacatatctagccatttctataaaccctca

SEQ ID NO: 824 - DNA, 635 bp, Gossypium hirsutum
tggccctcatcaatagaagtaccctccattgacaaggactgatcaactttactacaagaggactgtccactagtctcacaaggtgcacccttttccgatgtcattccagaagtattcatgattgagaaacttgtttctgaagatgacacttgaaccttgttttgatcagacacagcagcagtagcagcaggaagatccttaccagaaggcgaaagaacacactccactgtaacacaggaacaccaatttagcaaatgacccaggatgtataaaagatgacaaaatgaaagaatggtaagctcaattatcagacataatgcttcaatatatacatacttgacttgccactaatggcaacatcagattgtaaaatcgaagctaactcatcagctgtgccacctgtaccggaggatgagaagtcaactccctttattacaggcacagatccaccttccccacaatctgtgttactagaatcggaagacaatttggtgttctgatttgcagcagttgaaacagtctgatcagatttataatcatcactatgttcaacgactatactttcttcacattctttcataggttctgttcccaaagtattgtgggaaccttcaccttcacgcttagaaccatta

SEQ ID NO: 825 - DNA, 647 bp, Gossypium hirsutum
ggcatacaacaccgataaaaggctagtcgtgttgcccagattcttcattttctaaaagtacccatgtttgatacttatatcctatattgtttgtttggacattagtttggaggtacatgatcctccaaaaacatgaaataactagaaaaaaaaattgaacatacttgaactagacacatatttacaacagacaccgagtgaacatagactgaaaatataaaaatgtgttgctcaccacagatgcattgaaaatgcgagccccatcaatgtgaagctttaagccatgcttcttagctagctcaccaactttgtcagtgtattccgcagacaagcatctacccccggtgctgcatggattgagtaaaccataaccagaggatttcaatatgtatataatcatattgtcggcggaagcataacttagaatttatagtacatatatgacccattcttgtaatgtagtgccaatgcaaaagtagttgcttcgagtctatatttttcttgaagtatccatttctgatgcatatccagatacatgctcattgttcaaattgatcatgtttaaaacattttcataaactagaacaaaactcttactttgcatgtgaattctccaagcaaatgagccttgtagttgggtaaacaaa

SEQ ID NO: 826 - DNA, 648 bp, Gossypium hirsutum
gctagataatttagtattcttccatgcttattctattaaacatgcctttcgtattagacaaatgaattgaaaatttgtacttactctgctgtgctactttcagatgggacagtggcatgttgcagatgaatatgatggtcaagtgagagagattaccttcagaaccatttgtaacaatcccatgtgccctccagacactgccatgaccgagtatcaacattttgttttatcatcagataagaaaaagcttgtaggacttcttttgttgtccattcagtaatttcttttttaataaactgtcttacttttgtgaaaaaattcattgcttgtgtaacatatggctatttgcatctttattgtagattctatgtttgtttcatttaattgagtttaatcaatgttctctcttctcgtaggtttttgaaactgtacaacaggcacacgatgttccatttggctcctactttgaagtaagtatttgaaactttcttgcatatcacccacactgttattgatcaaagacttatcatcacctaagtccaatcaagatggaaattgctgcttacactgtggcggaaggaaatgccccttttgcaggttaactggtcacttacttgccaacagggcaacgggagtagagacttatgt

SEQ ID NO: 827 - DNA, 610 bp, Gossypium hirsutum
attaaaatgtaattaccggtttccattcctatttcatagttatgctattaataagtcttttaacttatgtccagaaaaaactttaactgccacgtgaatattgcagttttaacacatatattactttctataagatatgggcaaggcagctaaatgaaaaaaaatgtaactattctgcaagtaaaataaatgaattccaaacaggaggaaggagaatttagctaatcaagaagcttttaaggttgaaagatttagacacgcggggaaaaagtagtcaacttacccagtcaccatcaggtccggtaggcaccaacacattgatctcacttgactttgctgatgttatagatgtccctaaagagtctttgcttaagtacaactgacagccagatgtgttgtccactgaaattgttggagcagaaccctacaaaagccacaaagtagatgatcataagtaatacaactatcaatcactgataagtagtaacaatatctgtcaaagagcatggaaagaaaggccatgtgctatgaaacataataccatggccagtatttgctttgaaggtaactatgccagaaggaggaagtcagtaagaagaagaggaaagat

SEQ ID NO: 828 - DNA, 607 bp, Gossypium hirsutum
aaacaaaaacaacatctttaaagctctgtcaaaagttgtaaaacataaatctatatttatatatattgaggcatcgaaaggagaagaaaaaaaacaaccatattataaaaaaatttcagtacattaggcagttgatttagtttttgtgtgttctttcgagaagatgatattattacttcgagatgtgttgttcatcaagagctccactgggaacacttttttccttcttttttgcttttatattgcttgacatgaagtgttactgtcatataattacaaccaaaatggttgagaaatggaaatttggcttttcttctattatatctttctttttcttttttttgtccatctcatggaaccctaaataaataactattgcaaaagttagttttggttatggccctaattttctattgatagtccaattgtagtgaaaaggattgaatgtgcaaaaaggaaaaaaaaaatcagcaagtggggttggcatcgatcaagctcacgttagcatgatgctaggatagctttaaaagagccctctacagtcgttttctccacaactgtcctaattaaaatcaatttgattcattgcattgcaaaaagggaaaaa

SEQ ID NO: 829 - DNA, 625 bp, Gossypium hirsutum
agttctgcactgttgggtcctcttttgctactgctcatattactgtttggccacccttgtaatagaactgttaatacagtactttaaaaatgtaacatagttgcaaagaattctcggttaagctcagtatgttctgtgtgtcagcttggtaaatttcataagcttatttttcccccctttacaactgtgtactcagctccttttgagctcattgtagctgatctttgagggccagctgctgtatcttctgaaggccattcatattatatttcatttgttgatgcttactccagatttacttgggtttattttcttaaacataaatctgaggctcttgcaaaatttctcctttttcacaagtttgttgaagttcaatttggcagtaaggtgaagtccttcaaactaactagagagtggagtttcggccctttactcaagttttttctaaattagggatacatcatcgtctttctttcccacatacctcggagcagaatggcttggttgagcaaaaacatagacatatagtggatgttggactgaccttgttggctcaaacaaatgttcccatgcatttatggtctcatgcgtttatcactgcggttcacattattaacagggctcc

SEQ ID NO: 830 - DNA, 625 bp, Gossypium hirsutum
gaaatctaatttgttgaggaaaaagagcaagatgcatcaagatcattctcagcgaacttctccagttccttggaacaatggcattctcagagaaggtccgacttcaagggaaaatgtagagataagacaaattgggaatgtagctgttccgcttgaagtaaccgatgatgcatcacctgaaaaaggattgcaattttcctttagtaattgctttcctgctaaaagatatgatacaaaatgtagcactccaataagagatgggctacgatctttatcatcttgccaagggcgtgttctcagtgaatatgatactgggaggaaagatctaaacatgaaccatgctggagaatctacttttccaactaaatctcaagttgatgcctaccttgggaagggaatgcgtgttgatctcaacagtaatcaaaacacatacagaattccattcctgaatgagaggcagaagcacagatctcctgctgaagttgggagttgttctatgatgcagcaaatggtatgagcttttcttctgttactcaagtagtgaactggcttttgtaatggaaaagagaataagttcataagatattgttgcagaatcatttgtgtgatctttccctgaatttgg

SEQ ID NO: 831 - DNA, 573 bp, Gossypium hirsutum
agaccatcaaaatattctaatccctctttggtcaagtttgcctataataatccagttttatgggatatattcctacacaggtgctttaggaatcaagcctttatgatgccctagaaaagaaaggtttatgctaagattctagggaaccaccatagaattttcaacttttagttgtttgatttttttttttttaaatggtaggcataaagtacaggttctaagaatctggatgagcctagcatagctcttgaagcaatacagtagggtgttcctgtaattcacctaaaatggaatatgttctttgagtgttaaagagtattcctcacttgaaagctactccaaacctctatcactaccactattaaataatgcatttttggcaaagtttgaatccattttactttcttcagctccccaaaattatttgtccacaacacaaaaagcgtatatcatttactttaatccaaaatctgcaatttgtttattgtaaattattaacttggaaaagaaataaagaattattaagaataaaagaaagtaaaagggtactaatgtcaatgaattaatgctaca

SEQ ID NO: 832 - DNA, 657 bp, Gossypium hirsutum
ctcttccataattcccttcacaccatcaacatttcataaaagttagcattctttaagcgatcaaaacctgtgtctttttccgggtaaaggaatagctacagaggagggggggagttgaacaaagccaaacagaaacaacaaagcgagaaactgaaactcatactcaaggttgtatgaatgaaggaatgcttgaaacagaacatgaaatacaaacagattacaaaccgtaggatacaaactccggctacactgattccgttcctacaatatctcaatctctccacacacacacacaaggatacaaactcaatcattcatacttctaaagaagccccatcaaagcaataaaatccattaagaaaataaaaatcttgtaataaattccaacagaaaagcccgtaaaagtttcaccttgaatatcaagccaagcacaacaaatccattctcaagcatttcgaaacagtacttcgaactaaacaaaagagcaccaataatcaaagctaaaacccttttccactaaatccaaaattatcccaaaaagaaaaatcccagagattcaatataaccttcaaagccccatctatcgaacaataataacaaaatttcaccgataatcgaaaaatatggggaaatttgggaaattacctgagaagagag

SEQ ID NO: 833 - DNA, 661 bp, Gossypium hirsutum
tagaatagatgaattttttaacaaaagtatgagtttgccctttaatctaatgtacaagaattaacttgccttttttttagtagagtggacgaaatgcaattcgactcttagtacaaaagcctccacgatacttttattgctttgttggtcattacgcaatagattaagtttatatattcaacatagtgaagatgccaatagagtagaaagatcctttgttggtaattatagacaatttggcactgtattcaacatggtaaagatacaaaagagagtattaagatgcatatttctacttggttcgtgataacgaataaggcatagttgcaaaaaatgcaaaatggtgtatgttgtatataatgtatggtgcaataagtactacgtatgactttagatagatgtacaattcaacatagtcaagatgcaaagagagtactaagatctttgttgatgacaaagagagtattaagatgcttgttcttctttggtaatagttggtaaaagtaccctggaggcccctggactaggagctagattgcattaaaaatagacaaattagttcctgtatgtcagatcaaagagcaaatcagtcctattaaaaatttcatctatttatactattcaaaattgatcactgtatgttaacaggaggtacatgtgg

SEQ ID NO: 834 - DNA, 629 bp, Gossypium hirsutum
ccccgaacatgacataaaacagacgtggagaatgccaaagaaaaaaccattatctaaatgttaaagagtaaaataatgaactttagacttcacctgatatcttggttgctcactcaccctatcatcaatagctttaaaatcttaatatgtgctttagggtgacatattcaaagacaagtactttggggtatggtaatgtatagttgataactaataattgttctcaagttatatgccatataaactaaacagagatgcttgtttcatcctctgctcatccattctcgcataaataaccaaaacaaaccaaccaaagcatttcttgaccaactgatcaaaatatctcctatgcatattttgaattagagccctcaactatgaaaaacgcatgtaaataaagttagaaccatgctcaccaatggtaaatgtttgaccttcaaccatgacgccaggactttcattgcctgtcaaataattaataattacatttagaaaaggttcgttttgcagggaaaaaagatcagatattatacaaattgccacaccctgccacccaagagagggagagagagagagatttggatctattatctgatgaatacttacggtgatgcaatataattggctga

SEQ ID NO: 835 - DNA, 620 bp, Gossypium hirsutum
actgcatttaagttccagatatgttccatgcatagcttaccgactcttgtgtaagagaaacaactacaagaaaacaaaaacctcgacccctctctaaacaaacaaacaaaaacggccctaaagacacaaaagacttcccacatgaaactaaagaccaagagttgtatgaatcctccattgaagtccaaaggggtgaatggtaaataaaagagataaaagaaaaagtgatcaaacatttcaattaagtgttttttttttgttgggagaaaaaaaaggataaaaagagatataccttgagaaaagggttccgcaatcacatctgtattctcttgttccacaggtcttagaatgagccttccaatctgattggacagcatagatcttggagcatttctcacacttccattttttctctccatgttttctgcaatacacagtgttggtcccaaaatacacagaataaatttttctacttaaaaacttctaatatgatgacaataaggttaagaaatgctgtatgcactccatgccaccagagttggtacattgcaactacaaaatattagaacagccttaaacataaaaaaatttgttatacccctccccacagggccaaataa

SEQ ID NO: 836 - DNA, 386 bp, Gossypium hirsutum
  misc_feature (259)..(260): n is a, c, g, or t
  misc_feature (327)..(331): n is a, c, g, or t
  misc_feature (334)..(336): n is a, c, g, or t
  misc_feature (351)..(352): n is a, c, g, or t
  misc_feature (360)..(360): n is a, c, g, or t
  misc_feature (365)..(369): n is a, c, g, or t
  misc_feature (371)..(371): n is a, c, g, or t
  misc_feature (375)..(375): n is a, c, g, or t
  misc_feature (379)..(379): n is a, c, g, or t
  misc_feature (381)..(382): n is a, c, g, or t
tatcttgatttttctttcaatgagtggagactcaaacctctgattttgcgcctccaaaggaaaggtcatcaatcaatcacaaggtttggccatgttcattttattttttaaacttgggttaaaaaaaaccatgtatttttcaaaaaatgtgatcaaaactctcaaacgaaaaacaaatccaattaaaccctcaattaaattctttatgcagatgcatcagcaatgatttttgacatggcatggtcatgccaaaaaagannaaaaaattttcgttcccatattaattttgtagcatattttttaaagctattcaagctacccctttannnnnttnnnacccatgtatctacnntatttttncttcnnnnntnatgntaangnnaaaa

SEQ ID NO: 837 - DNA, 445 bp, Gossypium hirsutum
aacatcaaaagcatcatgaatcatcctatatcaagcagaaatactataaagttagaacatgttcactgtgaatctcaaatttttttgaggcacaaatactataaattagttttgttttataagatggaattagcaaaattcctatcctactttctcttagttctaaagtaactacgtattcccatgttctagcaaaaaaaaaaaaaaagaaaaaaaaaaaatttcaaaaagggaaaaagaatttcctttaggttttaaaaaattttcatttttaaaaaaaaaacccccaaacccaaaaaaaaaaaaaaggttaaaaagggtgggggggaaaccaaaatttttttggggcccaaaaaataaaaattaattttgttttaaaaaagggaattaaaaaaattcctttcctatttttttttattttaaaagaaataacgttttccctggt

SEQ ID NO: 838 - DNA, 640 bp, Gossypium hirsutum
tttgagaagaagaaggtgctggcaaaataagtgatggggaatggataggagtaaaagacaaaggctctagatgaagaaaagtagagttatcagttgtaggaaaaataaaaaaatgttttgtaagaaaggaaaaatgaaacacggtctcatgaaataaaacatcacgattaacaaaaaaaattttggttttaagcttcaataacaagtaacctttctgaatataagaatatcccataaacatagaaggaatagccttaggagaaaatttatcatgataattaggtgtggtagtataacaaagacatccaaacacttttaaactggaaagatctggaggtttacgatataaaagttcaaaaggactcttctaatgtaaaagagaagtaggtattcgatttatcaaaaacatgcagttaacatacactcaacccaaaatttactaggcatatgagactgaaatttaagtgacctagcaacgttaagcaaatgtctatattttcgtttagcaactctattttactaaagagtatgaacacacaagctttgatgtacaatgcctaacaaagtaaaaaattcgttgcactcaatcttaaaaaatccatacccattatcactacgaacaactttgatgctagtggaa

SEQ ID NO: 839 - DNA, 605 bp, Gossypium hirsutum
ttggttgattagaactaagcagctctcctttccaccacaatttctatttgaggatcacgattttttgactatattttatgttggggtcgatgattatgattatgattatgaattattttaatagtaagtttgaagcctcgataaagttgcatcccaggtgatgtgatgggcggccctaacctctctagtgttcaccaaacacaagatacaaatccttttgtttattgcattaaattattagtggcgctggaccatatatcatcacctcccagatattttgcctccatttcatttaactaatacatcaaatatctttgtacctttgaataaagtaacttaaacacacgttacaaactcctgcacctcaattcatggcttagaggtgaagtcagaaaatttgcttgagagtgactaaaattaaatcgtatatatttacaatagtaaatattattttaatgtctatatttttataatttttaaaagattaaattaaatttttattatttttaaagggataaagtgtaattttatctttattaatttaaatttgtatacattttaaaagggcctaaataaaaaaaaattcattttaaggaagcctagag

SEQ ID NO: 840 - DNA, 1281 bp, Gossypium hirsutum
  misc_feature (485)..(492): n is a, c, g, or t
  misc_feature (507)..(514): n is a, c, g, or t
  misc_feature (521)..(524): n is a, c, g, or t
  misc_feature (532)..(537): n is a, c, g, or t
  misc_feature (547)..(549): n is a, c, g, or t
  misc_feature (557)..(559): n is a, c, g, or t
  misc_feature (567)..(570): n is a, c, g, or t
  misc_feature (572)..(572): n is a, c, g, or t
  misc_feature (575)..(578): n is a, c, g, or t
  misc_feature (580)..(581): n is a, c, g, or t
  misc_feature (585)..(586): n is a, c, g, or t
  misc_feature (588)..(594): n is a, c, g, or t
  misc_feature (598)..(599): n is a, c, g, or t
  misc_feature (603)..(605): n is a, c, g, or t
  misc_feature (608)..(609): n is a, c, g, or t
  misc_feature (614)..(617): n is a, c, g, or t
  misc_feature (621)..(625): n is a, c, g, or t
  misc_feature (627)..(630): n is a, c, g, or t
  misc_feature (633)..(636): n is a, c, g, or t
  misc_feature (639)..(653): n is a, c, g, or t
  misc_feature (656)..(659): n is a, c, g, or t
  misc_feature (661)..(662): n is a, c, g, or t
  misc_feature (665)..(665): n is a, c, g, or t
  misc_feature (667)..(671): n is a, c, g, or t
  misc_feature (675)..(676): n is a, c, g, or t
  misc_feature (678)..(692): n is a, c, g, or t
  misc_feature (699)..(700): n is a, c, g, or t
  misc_feature (703)..(705): n is a, c, g, or t
  misc_feature (710)..(712): n is a, c, g, or t
  misc_feature (714)..(714): n is a, c, g, or t
  misc_feature (716)..(729): n is a, c, g, or t
  misc_feature (731)..(741): n is a, c, g, or t
  misc_feature (743)..(744): n is a, c, g, or t
  misc_feature (750)..(763): n is a, c, g, or t
  misc_feature (765)..(766): n is a, c, g, or t
  misc_feature (769)..(785): n is a, c, g, or t
  misc_feature (788)..(814): n is a, c, g, or t
  misc_feature (826)..(838): n is a, c, g, or t
  misc_feature (841)..(857): n is a, c, g, or t
  misc_feature (865)..(866): n is a, c, g, or t
  misc_feature (868)..(872): n is a, c, g, or t
  misc_feature (877)..(882): n is a, c, g, or t
  misc_feature (886)..(896): n is a, c, g, or t
  misc_feature (898)..(901): n is a, c, g, or t
  misc_feature (907)..(908): n is a, c, g, or t
  misc_feature (911)..(916): n is a, c, g, or t
  misc_feature (918)..(918): n is a, c, g, or t
  misc_feature (920)..(920): n is a, c, g, or t
  misc_feature (922)..(928): n is a, c, g, or t
  misc_feature (932)..(939): n is a, c, g, or t
  misc_feature (947)..(952): n is a, c, g, or t
  misc_feature (954)..(967): n is a, c, g, or t
  misc_feature (970)..(973): n is a, c, g, or t
  misc_feature (978)..(979): n is a, c, g, or t
  misc_feature (984)..(991): n is a, c, g, or t
  misc_feature (994)..(994): n is a, c, g, or t
  misc_feature (997)..(1002): n is a, c, g, or t
  misc_feature (1005)..(1018): n is a, c, g, or t
  misc_feature (1021)..(1024): n is a, c, g, or t
  misc_feature (1026)..(1031): n is a, c, g, or t
  misc_feature (1034)..(1037): n is a, c, g, or t
  misc_feature (1039)..(1042): n is a, c, g, or t
  misc_feature (1044)..(1058): n is a, c, g, or t
  misc_feature (1062)..(1062): n is a, c, g, or t
  misc_feature (1064)..(1067): n is a, c, g, or t
  misc_feature (1071)..(1071): n is a, c, g, or t
  misc_feature (1076)..(1076): n is a, c, g, or t
  misc_feature (1085)..(1088): n is a, c, g, or t
  misc_feature (1090)..(1097): n is a, c, g, or t
  misc_feature (1111)..(1113): n is a, c, g, or t
  misc_feature (1117)..(1121): n is a, c, g, or t
  misc_feature (1123)..(1124): n is a, c, g, or t
  misc_feature (1130)..(1151): n is a, c, g, or t
  misc_feature (1159)..(1161): n is a, c, g, or t
  misc_feature (1163)..(1167): n is a, c, g, or t
  misc_feature (1169)..(1175): n is a, c, g, or t
  misc_feature (1178)..(1180): n is a, c, g, or t
  misc_feature (1182)..(1184): n is a, c, g, or t
  misc_feature (1186)..(1194): n is a, c, g, or t
  misc_feature (1203)..(1213): n is a, c, g, or t
  misc_feature (1215)..(1238): n is a, c, g, or t
  misc_feature (1242)..(1258): n is a, c, g, or t
  misc_feature (1262)..(1268): n is a, c, g, or t
  misc_feature (1270)..(1273): n is a, c, g, or t
  misc_feature (1275)..(1278): n is a, c, g, or t
gtaaatatagttagaaacgaacttcttagagcaataagctcttgctgtatgattaaactaatttaccccttagtttcatagttgtatgaagtagctgatgtttctctaactttcaatttttatggctcttcagttttaatccacttgattcctatatatggttcgagttatacggatcaccttccgacagagaagtcaatctcattggcagtgtaagcaaagcctcattctccttctgattccttcttctggcaaattggtgctgaatttatttaattttagaagaatcctttttgtatttgctcttgttttgtgtattatctgttacgtacaaacaatttatgttcactgaatttgatatacatgcaggttattcagtcatggtatgtcatgggacgcttgggtgcctttaattcctctaatttgcaggtttggcaatggttgcctttgctctccattttcttaactttgaccaggtcttgatnnnnnnnngaaaaaaaacttctnnnnnnnntattgannnnaggggggnnnnnngtctatgggnnntgatcccnnntctgatgnnnntnaannnntnnatgnnannnnnnnaccnntccnnnagnnaacannnngtgnnnnntnnnnaannnnggnnnnnnnnnnnnnnnacnnnntnntangnnnnntgannannnnnnnnnnnnnnnaaaaaannaannnataannntntnnnnnnnnnnnnnncnnnnnnnnnnntnncataannnnnnnnnnnnnntnnaannnnnnnnnnnnnnnnntannnnnnnnnnnnnnnnnnnnnnnnnnnaaaaaaaaacannnnnnnnnnnnnaannnnnnnnnnnnnnnnncttataanngnnnnnaaccnnnnnntaannnnnnnnnnnannnnagaatnnccnnnnnncnanannnnnnntaannnnnnnnagagtaannnnnngnnnnnnnnnnnnnnaannnnctcanngaatnnnnnnnntcntcnnnnnntannnnnnnnnnnnnnctnnnnannnnnnaannnnannnntnnnnnnnnnnnnnnnttanannnncgtntaganaaaatatannnnannnnnnnncaaacaattaactnnnctannnnncnnttatannnnnnnnnnnnnnnnnnnnnnctaccatnnncnnnnncnnnnnnnatnnntnnnannnnnnnnnttgtcttcnnnnnnnnnnnannnnnnnnnnnnnnnnnnnnnnnntttnnnnnnnnnnnnnnnnnaatnnnnnnnannnntnnnncta

SEQ ID NO: 841 - DNA, 553 bp, Gossypium hirsutum
cttttatcttttatctgtttataatgggatgatgcccctgctacacagcaatttaaggatgcaacttccatgttccatatagtttcaaaagtttataggactccatttgaatgatgaaattacattgatcattcttatatggaagaaaaaggttccatctataaatagtcaacatggactaaataaaactattggtgtgtctagagaggagactgaatgattcttcaagagtcacgattaccatatctagcataagaattgcagtcaaatatcgatcagtgtcattcagagagttgtaatgcctatgaaacagggggacgaatgtggcagtttgacggatttcagtgctcctgcccttgcagtgaagtactcatttagtaatttctcatataaggtgagaatgactaccattgctcactatgcagtttcctacattactaatttcttgtttaaacgccatttgcgcctttattacaattttgtagtcaaattgtagaattcactggagttttattatttttgcagaatttatctcagttggcttccatcaatt

SEQ ID NO: 842 - DNA, 669 bp, Gossypium hirsutum
tttgtcgatttgtgcagtattctaatgaatattttatcaccatttaccaggtgaagaaaatgatgtatagtatccgaaagtataaagttcctttgcagaaatacatggccatgatggatttgcaggttcctttttcagtctattttgattttgcctgttaagctgtatgtcttttggacatcggtatgtgtttgactaaccccatggatttggagggcctttggaggattatatttacataccgatgtctaagtatgtgatggacatggtacttaaagaaaaatgaagagtcagagtaacatgtcacacccaattgcatgatttattatactttagttcatcatatgagtgacatgttttaaattttttgtgtaccattatatgttttaattttaataccttgatcctaatgcttttcctactattaatgtaaatttatgtaatttctaattttttttctcgttattcaattgcaatacctttactttctctgttgctgttagctccaaatcttattctcttataaatgcttataaaatttgcatgcagtatattgtacttagaaagcaatgattcttggtcctttaataaatttccatgaaagactaacaattttgaaattgatgccccttttttatcttgttttcaggagacaaatgaaaggctgtt

SEQ ID NO: 843 - DNA, 617 bp, Gossypium hirsutum
  misc_feature (21)..(21): n is a, c, g, or t
  misc_feature (603)..(608): n is a, c, g, or t
ttattttttttctctccgatnaccgtgttgaattttttcattcaaaagcattcctacatcgagatattaagccagataattttcttatgggcttgggaaggcgtacgaatcaggtttctgatttctgtgcaaaatattaatatgcatatattatgttgcaggagaattaatgtgttattgcttttcactttcacgtaggtatacatcatcgactatggtctagctaagaaatatagagacagttcaacccatcagcacattccatacaggtgaaagaacttagcttgcatgcaatctgttgtattttacatatggttttaaagacctggatttgtttcatcctccccccctccccaaaagaaaaaaaaaacccacatgactcctaatgatttgttttgtacattgcatatttcttgtagcagcggtaatgatgatccacaaacttattgacaccggcatgtctatgtttcagtgctcccttgctgatttattctgtgataattgttgatgttcctagccatttatatatatatatttacctggtcatgtctgtttcagggaaaataagaatctgactggaactgcaaaaaatgcaagcatgannnnnnccttgggca

SEQ ID NO: 844 - DNA, 661 bp, Gossypium hirsutum
gggatttaatctttatactttaatttgattaattttaaacttatgttttctgcattgatttagtccctgtatttttcaaatttgaaattttagtcctaaccaaatggtagcaactaaatctatttggtcaaattctactattaatctcgtattacacaatattatagatttagttcatgttctgtgattgaattatttcttgtctttatatttctaaaaattaaaaacttttagtcttaatgcaaataagagctgttaaatccattaactaatttttgtgtgtagtatgtagaaataacaaattgacatgaccattacatgtaataagtttatcatatcaaaatttaaaaatagcataatttaatgaacttaataaatgttatttggttagaataaaaattttagaatttgaaaaagtaaaaagataaagctgcctggcttggttgcgtggaggaaaaagaagccttccctggcacattattgtacaccttccaaacgtataaaaaagtgtactaaaaagtgggtgcaaaacctgtagacaactggcgctcgggaacgttcaggcaatgcgcattagcttacattagaatcagatcctgccaacgccacatcggtctttttagtttgttgaagtaattatagttaaagccagggctgccac

SEQ ID NO: 845 - DNA, 633 bp, Gossypium hirsutum
  misc_feature (619)..(619): n is a, c, g, or t
acactatagcattccttagtgtatcaagctctaccaaacgcatcacttcttcaacaaactcctgtaggtaagtgtgcaaaaacgaatatgagaaatgcagtgaagtgaaactagacaaagtacaaaacaaatataaattgctgaaaggattatgcagctcacaattttctggtctttgctaatttctttgggaagacgaagactggaggaaaaccagagagactcctcaactgtgacttgaggagaatgtatatcattttgctcaacatatcctgaaattctggcaaatgtttcctgtacctttgggtatcctgatatcttaatatccccttcaatgtatccaccggttttccttccggaaagcacgtccatcaatgtagtctttcccgctccgctggacccgactaaggcagtaagaacacctggagtgaatactccactaacatttgagaggagctgtaatctcgtttcaggtatgccttgtgctttcatttcctaagatatttgacaaaaggaaagagggaaattgaaaaatgaggcttcacatcagtaaaatatatacataactgcaaaaaaacaaaaaaaaaaaaacccccccaaaaaaaccttcccccggganttccccaaaaaaaa

SEQ ID NO: 846 - DNA, 678 bp, Gossypium hirsutum
cgtgagtcaatatcgctattcgccacgcacatatatatatatatagagagagagataagtaatacgttaaatattctacttaaatttgtcatatttaattaattctaattgattaacatgatctcctggaacaatccaggtaggtggtccctcgtggacagtgaagcttggaagaaaagattcaaccactgcaagcgccagtctagctagcagagaccttcctcgtttcgcagatggtcttcaaaggcttatcgatctctttgaaagcaagggccttagtgaaagagacatggttgctttgtcaggtttgggcacaactaatccttttaataccatttcattttctttactaaacaaacagtactgataactgagataattaaattaaaccatttgtgggtgcaggttctcacaccattggacaggcgcaatgcgtgacattcagggataggatatacagtaatggaagtgacattgacgctgggtttgccagcactcgcagacgcaattgtccagctactttccccaacggaaatggaaatttggctccacttgatttggtcacaccaaattcctttgagaacaactacttcagaaatctactgcaaaagaagggtcttctccagtcggatcaagtgctgttcagcggtggaaccacagatagcatagtcaacgaaa

SEQ ID NO: 847 - DNA, 640 bp, Gossypium hirsutum
cgtcacttgcatccatttgcacttgtaggtccttttgccgaagatgatttagaagattattattgtgatatgtgtgagataaaaataaatccagaaattcatgtttattattgtgcagaatgcaattatattgtgcatattgattgtgtcctttttgaggtaagacaactgtaataactaaaatagtagtttttttaactcacgaaagaaatatgcatagtgaaaaaaaggaacatataactagtaaatttcaaaccacagcgaactaatggtattaactatcttaaatttattacaatggttttgttctatttggtacattatgaaactaaacatttgtgcttaggtactttagcctttggaagagatgcttttagatcttcgaagaatggaagagaattttaatgatggaagtttgggattggagatggttagtatctaaatgaaacccgagaaacaataaattacccttatctctaacaattttttttgtcagattctaagagtttcttttcatcctcacttgttggtactaaatgatgatgatgatgaaataatatttaggtgtgacaaatgtgaagaactatgtattggttcacgttataactataaactttgttcattcaaccttgatagcaaa

SEQ ID NO: 848 - DNA, 529 bp, Gossypium hirsutum
ttgagtgatcattttataacttttcataattagaataatagttaggtactgacagtgatatttacccaatatttatttatttgtttctccgttagaattttatattcatacataacttagccccgaagggcgatgataattgaccctaaaccctacctttttgtattatttaagcatccccacacccaccatgattcttcatctctcagcatagcttaactgtgaaacccaacatcacaaatcttcttcatgtatatttctcttttttcaatgctcttttattaatctctatctttctatttcacttaaaaaaatttatatttattctgctttcttatatagctttagcttcagtggacattaatggagtacagtggtaatcccttgtacagatgcagaaactgcaaaaatccacttgctcttatcgacgatcttctttctaaaaacttcatagtaatcaatctacttatacgacttattttttaaaaaataagaattttaagtttgattttgatttggtctttttttt

SEQ ID NO: 849 - DNA, 684 bp, Gossypium hirsutum
  misc_feature (659)..(661): n is a, c, g, or t
caacataggccacaatccccatgcaaggacttgtgagatttctataaagtttactaccacaaatgtgacaatattctatgtacaacacagtgatgactaatcaggcagaagaggtaacctgtccacaccgtgaggagaaccatttgccccgtagggctcgaaattttcaaaatcattcgcattggcatcttcaccggagcttttgtcctcatcttttaccagtttaaatgggaggatccgtaagcgtacatctgaacctttgccgattttctctgattgtagttggtatttctcaatgagctctgtttgtagagatataatctgggttggccttggaagtagttccacaggttcctcttttgggattactacctgttcgatggctattcttgcctcctgaaatgattaatgcagtcgtaagcaagtcagtgaaatagttccgatatatagagcaagtagatattgtatacagcatactttacgcactgatatattgctacaaagtctaatttatcaatccttgagatcataacttctgctcaagggacgggcaaatgggaggatatcattgttagcataatgagtaaaaaaacatggatttattggagtatttccttttgaaaaacagatttctcatgagcctatctgaaggtttcagnnntgagcctatctgaaggtttcagg

SEQ ID NO: 850 - DNA, 604 bp, Gossypium hirsutum
  misc_feature (586)..(587): n is a, c, g, or t
aatgtttctaataatgattttccatgagttctcttgtggaactggtatgtgctcaagttggttattatacactaactaatacatgtattgtcgcttcttgttctttctaactaatatttcaattagtatggcagtaaaatgaacataaaaggaaaatattgtcaatatttccctagagataaataaaaatcatgatcaggaaaatgttacagtgatggctctttttgcactttaaattcagcaagtgtccaaaatatggtcaggcagtcacaaatgccataaaaagaaacgtacaaaggaacaactcacctgcatatgcgagattgtggatgttatccttgctaaagcgcttaaagacattgctttttatctcagcaaagttattggataccagcaaagcaaatagtgcgttattatgagcaacgatgcaagttgataaagtaattgcctgagctaataaaataaaagaatgaagaagtaatgatagtcaaagaaacaaattgaacaagaattttttttttttttttgggggggggggggaaaaaaattttttaaaaaaaaggattttttaaaaaaccttaccccnnggttgggaaaaaaaaaa

SEQ ID NO: 851 - DNA, 635 bp, Gossypium hirsutum
cttacgcacaatttgttaaattttcccttcaatccactaactttttgaagctcctatcatgttctcagggctcaactaacagactcagttataaaaggcatgatcaggttgaaattaacccagaccacaaaggtgggtacaagatgtttgaggatttgaaggcacagttacaaaaaccatgatgaggttgaaattaacccaaaaacaggagtaggagcctctgaatggcaatacatttaggcatgggaagttccaattacatgattccggctccaaatctacacttagagtttcattaacaatgaatggaataaatcgtgatttattttagtgaggacattttaaggtttcagtagagtatccttcaccaaaaggacaataagaagtccaaaacaaagaactataagttcacacctcataattgcattgagaaagattagtcgtaaaaggttgcatgagcctttgaattttatagcttagtgaggtttagacttgtgttaacagaaataaggaaatctatctaataagaacaaaattgacttttttaagaaagcttacctttccttcagtgatgataaatagcgatcaaggcaactctgatgtacagcatgcccacaggaagaaagataaatccc

SEQ ID NO: 852 - DNA, 627 bp, Gossypium hirsutum
aacacattagaaaaccacgaagattagcaccaaaaagagagaaaatttcctcagagaaataggttcactaaaatacatgaagggcaaatacaaatgcaaaaagaatataaaatggtaattgattgacacaacttcacaaaaaattccttcgtaagacaataatattagatgctattgtgcattgaaactcattatcaaagtagtgtcaatctatcgccactaatatgattttgaattccctagcaggagactggaaaggcctcatcacaacaaattaaaaccctttttcctttttttggcagcacttacctttctccacaaaaaggttggtcaaccatgcaattgcaacgcatgtatgacctacaagcctcatgaactgtcaaatcagcaacatttttattgaaatagtcctcaataaaatcgttcttcccctgagaagagcactcagcaccagaatatctcacagcattatcaacttgtggtattgaaatagcttttttaatctggtttttatcaaaaccttttttatgatcactaccatttaaagagcgcttccctttcatttcttcaatatcaaccctactaacctccaaggtgccatttgattcttgtggtacctgttgacaa

SEQ ID NO: 853 - DNA, 567 bp, Gossypium hirsutum
tttctctatattccaactcatcaaaatatgcttttttctgagctttactaagctttgatatttgtgctttactcaaccgcttgaaaggtggcagctcatcatattctggttcatcctcggagtcggaggattcatccaaatcatcatctaatccatcctcatcaccatactgctcttcaggaagcttaacttgtggtcttgattgaagaagagatgaaagaaggtaaggtaaaggaggtgttcttgctcgagtagcaaaaggctttcctgggggagtatcttgcaacttcaaaagcgtgtttgcctcggccagaattttagatgctaaggaaagcaacaacaaatgaggtttccagacctgaccatttggcaatactctctggcctgccctatttgttctacatgcagagtgattctccactaatgaaacaggattcatgagtcgcatatccccagctgcctgacgaatagcctgctgtacaacatgagaacgttgagtgacaaacatgtcatagctagaagcagtaccattaggaccatctggtggagcagaagctgcatgagtca

SEQ ID NO: 854 - DNA, 515 bp, Gossypium hirsutum
agcttcggttgcatatcttgtagcaggtcagtcaaaattctgctatttatgcttcgtttcctttaagcgaaatattgattttagtattattgtcctttagatcttgtttagaaaaagactaaaaggtaaagaactttacattgtgaaaaggaaatatttctaaagatgaagactgactttgaatcttgaatgtagatgattatgatggctaggaaatttaaagatgtcttccctctaggctgtagtttcaaatggatagggaatatagatgcaatttagttgttagataattctaatgaattaagcttcttatttgacttgctcaatggcatagggggatcttattggctgtccggtctagttttccatgtggtaaatggttgatttacatattcagttccaatttggccagcttcttgaaattttcatcgcttctatggtgtgtgctttgcatgaatcatggttaacctgtaactggtcttgtaatgttgactttcttttcctttgttattact

SEQ ID NO: 855 - DNA, 612 bp, Gossypium hirsutum
  misc_feature (287)..(287): n is a, c, g, or t
gtgaacaatcaactccatcacttcccattgccaagggtgttagtgtcaagccattagatccctgacagaacagacataagaaaatttgtagtttagcactaaaatcttaacaaaatcctgggaatttcgatgttagatgagaatttgacacctcagcttggccatcagttatgagaggaactactgcccctgctgctcctagcctactcatgcttagtacctgcaaatagttttcataatcaccatgtttacttatggtaactaaaacgccattaaacatttttaanggtttcaagttatttcttttgaagcttggcttgtatgttgtgatattaacaagaatttagtcttaccttgacttggagttgaaggaactggacgtactcgatgattgagtcaagcatagaggccttgtcagtctgcaaagttcatcaacattaattcttaagtgaacaattcagtgtaatttttctttaagtactcgtgtccaatgtatatttggacatgagtatgggggtatgacccttctaggaccctcaaaaacatatagaaaatttgcatatattcggcaaaaatatacctgtatctaacacacccccccaagtctaaaaa

SEQ ID NO: 856 - DNA, 572 bp, Gossypium hirsutum
  misc_feature (536)..(536): n is a, c, g, or t
  misc_feature (544)..(544): n is a, c, g, or t
  misc_feature (556)..(561): n is a, c, g, or t
ccttttgattgttgattttgctactttgcaagtgaaaaagaaaaaaaataaataaaaagaagaaagggatttggatacaaaaacaagaaacattttataagagtgtaaattaaaagctttattttaaaggtaatagaagcttcatttatattgcatcacataattgtgcctgaatcagagctattgtttggaaatgtgcttgattttaatgacatatagtttttgcttttcaatttttactctcttgcaaaatgtgaggatgtacaaagctagcagcaaaagctcaaataaagggagccttggtaagtgaaggccaaaacaccaaaaagccatcctactcttataaaaattgtgtttttagcacattcttacattgatcaatttgttcttcatatttaacttatactgctgctgttacttctttatatgcatttgtttcctactaccacattcgtttagtatcttttgcatttcttttaccttattttctccctctaagttcaaattaatcaagacaatttcttttattagatccngagttttngattttacaccnnnnnntatatgtgtta

SEQ ID NO: 857 - DNA, 614 bp, Gossypium hirsutum
cgttttaactcgaagtaactcataacaagctttatctacatgattcttaattacctctttctttcgtttaaaaaaacgaacagcctcctcacaggtgtctctgtatcttatctcaccaatgccttttggcagcatatttggacacatgacaagaagataaagcatgtaatctgataaacatttactgattttgctagattttgtgatactagggtggttgaatctcgtaagatcatcatagtaacagagttcagtagcaatgtgccaaagaagaaggctatggtcgaattctaccccaactgtgctccactcaagatgcttatcacatttgatttctttaagcacatgatcacctctgtgtgttaataatgtcttgcataagttgatgtcatataggttatcctcgattctcttacttttctcttttagttgttggaagatcagatctttcagttcaggaaccacaccttgccaagttacattcatcatcttctcggatatttcatatatgccaagagacttttgaaatccaatccaacgaggggtgatagcctctcttaggcaaacatccatgatattgtactgggatatgattcttgcccacctcttaacat

SEQ ID NO: 858 - DNA, 594 bp, Gossypium hirsutum
ttgaaaatgcatgttaagatcttaaataccttatcagctatgtccaaatactctattaataccctgtgtatcatcgagtggtctaatattcctttttcaaggattggttggattaccgaactcatgtgtcgcaaaacagatgatttttgcaggtccagcttcgatattatatctattaacctgaaatatggaaattttgtgtcaacctttgttcccaacttgttgcagttgtaggatattgctatggaattacatatatccaacaaagccatggaaggaataacatcgcgaaatttaacgacagcccatcaacctcagtgataacttctgaaagtatgacaatcatggccaaaaaatacaaatttatatatattctacctgctttctttgatggatgcgaggtctttgaacagatgaagctcggtagaatataattccatcagaagctcttgtttttgagtggcatttcccagttgatatgcatgctcaataactgcatagggagaagcatgaacaccggatgttagcaaggcttgagaacagatttacctctcaagaacatgtagtgaacctaatgaaaattaggtgcagtta

SEQ ID NO: 859 - DNA, 608 bp, Gossypium hirsutum
ggttgttttgctttgttattttattgttttgcagagaggagatatctaaatacaaagaacttgatccaactagccgcttgcttctcctaaaagcactttgtgaaattcgagcagatgtaatctatcatccttttgaattctgttctgttttaattgaattagtgattgtgtctctatctatcatcatgttcgtccatgtgcttttggaatggtttctttgtatcatcccaaaatcaatgtctaatttctatttttgtaagttttgagatgaatgtttgtagtaattccatatcattttgacttttcttttacggatcctattatcctacagcaagatgatgcagtgtcatacattaatgatgctatgaaaagtaataaagaaatttcttgcttccggaaagagaagataggggtgaatggaaatgtttcgtactggtaactgttgactgtattctggattctgtaaaatcagttgtgtgatttacactaataagttcaaatttgtttgtaggtatgatggaaatacagtctttggttatagattgtacaaggaaataaacaggactgaatctaaatcaaaagcaaaggggaaagcaagctcaacctta

SEQ ID NO: 860 - DNA, 512 bp, Gossypium hirsutum
tttactttgaatacatcattgccatttgtatctttcattaaacactgatttgtttcaaagataattttgaaacccttttgaattaattggccaacactcaacaatttttgacccactttaggtacaaataacacatctttgataaattttgtacctcaaacgttttcaattgcaactgtcttttcccttgactgcaatgtactcactgttgccaatctttacttgggaaactactgaagaatccaattccttgaagagatcatgatcaaaagtcatataatgggtgcaaccactgtcaatgagtcacttctcacttgaatgaaagattgcaaagcaagtggccacaaagagttgctcctcttctttgtcgccaacttgagcaacattttcttgttgcaaattcacttgtgcgatagtcttttgctgagtattgcttttgcaattatttgatgatgcttcatcttctgacacttttcgcattggtggtttgactttctccagcatttgaaagg

SEQ ID NO: 861 - DNA, 639 bp, Gossypium hirsutum
ataacttagaacataatacgtactgatatctgacatagcttactacttagaaattaagtagtattttttgttaagattcttttggtttgatttcgtggctgataggttgcattgttactgattttgacggcttgcgggggatgggttgggtgtttcacaggtaagtgagttcgaagtgaatatggtattgaaagtattaaaaactagccatatgctaagccattcttttcctctctaactttcagaaggattttgctggacaagaacaagtgaaagacaagccacaagaatgagaagtagatatttgaaagctattctaaggcaagatgtaggctactttgatttgaacgtaactagcacagctgaagtagtcacaagcgtttccaacgatagtctcataattcaagaagttatcagtgaaaaggttgtcatcatttttatcaatgcttttccgatattctgattactttttgtcatgttaattgacttgtttattatatgtatcagattccacacttgattgcaagaggtacttcatttattggagcttacataatagcttttctggtactgtggaaattagctcttttgatttttccatttgtactgttgctggtgattcctagtttaatatatggg

SEQ ID NO: 862 - DNA, 501 bp, Gossypium hirsutum
  misc_feature (491)..(491): n is a, c, g, or t
  misc_feature (494)..(496): n is a, c, g, or t
tcaaataacaagaccgaacacaaaacatggacagtaaaagagacatgaagaatacccaaaaaataaaaaaaatagagaccggatattcatctccaagcttactgatatgtaagcccaagtagacaaataatgtatagccaagtccatataataacagagctaggtattatcaatgacccaaacatgatgtaacttaatatttgcatgttaataatttgtttcagttgaaatcatcctatacatcttctgaaaggaaaatgcaaaagaacaacaaaggcagatattagcattcaggatgtcagaatgaacaaaagatacctgaccattgcgccattgtgaatttttccatcgcacaggatccaagtcactgaaaccagtacttgtacccatgtacctgcgaactccaaactcctcggtttcaaacatcattctaaaccgcaggccaagggaaacttgggtatacttggttttgttatactttgccaagggantcnnnaaatc

SEQ ID NO: 863 - DNA, 592 bp, Gossypium hirsutum
  misc_feature (437)..(437): n is a, c, g, or t
  misc_feature (553)..(554): n is a, c, g, or t
cactctagacacagcaataaatggcataaatttttgaatcagaaaaatacctggctgaagtaccgcttaagcaataactccttcaccactccacacatgccatagaaataaagtaagtttgacattacctgaaataatacgacaattcatcaaagcacatagtcattggacccttaagagaaaagtaaaaaggcacagaaaaagaaccttatttaccaaccattctgtccatgagggcgctctgcatagtggagaaacaagtattaacccgaggacacgctgcctgtatttcatctattaagacaaaatgcacaataattagttccgagaatacaaacttaggttttttatatttatttggattaaaaatgaaattgtgtactgtgccaaggtagttgactgacagcaaatagagtaagaacgtatgctccagctgnaacccccatacacattacagaaccaagcctacagttaaaaccgaaaaaagaatgaaagagttgaaggataaggaatataagcttgcttgcctatattattttatatataaataacnnatgataaaacatattaaagaaaacaataacttaagaaa

SEQ ID NO: 864 - DNA, 655 bp, Gossypium hirsutum
aactttattaggcctatagctacttaaaagtagttaactctgtaccaactcataccccccaaggatatccccttgggactttcaagcttggttacaataaagtaaatcttcatcttcattcaaatgtgtcgtctcaaacttgtctcaatgcgtttatcaagtgattctttgaaattgttactgatgctgaattggcaatatgttgggcaaattcatctcacctattcctaatgctcttccagggagtaacactatagttatttcttaaagttggtcagtcaccacttagggcattctctgacctttcctgtccctattattccaacatcatgattatctttgatatcggacttagtttatgcaccttagaagggaattttttaaagaataaaagagaaacatgcaaacactgcgtgcgcatggacatatatttagggggggaaaatcagtttacgttttgatttgatggcaacttaaaaactttattattacaaacctataatgaataacactatgatcgggtcttttaacagcatctacaaaaacacaaacaagtaaagttccatttgaattatccacaatttacggctaaaatgtacatctttctaggtggaatagtcaagtttgaaaatctttatctcttcagactcgcatg

SEQ ID NO: 865 - DNA, 623 bp, Gossypium hirsutum
aaattacaggaattttgatttgaactttaatggcaacgaaaaccctctatatttttctctctagagccctcctatctttttaccctatttttgctgtctttgccttcttgtgagcagccaacccggctttagggctggcatcgctcacatctccgactgctatagtaagaccttttccatttgcctttattttcgataaaataactcaagcagaagtactttttgtgtggttttccttcgttggtgaaaggtggtggtttgcttctccaagggttattttttcccattcattttgaaacttctttgtggttcatcaagcacatcctttggcaactacctttttctcccttttggatgtaaggatgaaagatgaaagctttgagaatccgttgatgttgcttgtttaattttcgttttgttgtaacttgaaagaaaaaaaatagagatggagatcaagaatttgtttgcgcagttcaaaagttttctacatatgcaggatcttaattagagagtaattcaccataacaacagctgcaagttgtgatttaacacactcagcaatttacagtctcactctatacttctaactaaataattcctcctcttagtctttccctcttgga

SEQ ID NO: 866 - DNA, 661 bp, Gossypium hirsutum
gcaagaccaactgacacagccaagcaaagaatttacagattgtattgacactacgagtatgactcctccaatcaagcccatgagaagacctttgatctgcaaccaataatatagatattaactcactctatccattacaatagcagctgatatccattaaagatacgatttcttctcagaatcaaacccacagtcgaccaggcacggaaaagcaacaacctcgaagatataaaccaacatgcattgtaagaatcagaagctaacataagagatagatatcaatagccctccaactagatttttcctttttcccaataaaaagtttaagcaagaatccataccgttgatgatgtcaactccagtccatactgctcatgtggattttgatagccacgtattcttttaccccataacatgacaagtatcatgagagcaacataaaagccaagaatcgaaacaagttcagcaaacttggcgggagtttttttggtccagctctgcacaagagctggaagcaatggaacaataactggtgaccacaaaacaagaaccatgctgacaaagccaagaatcctttggaaagaaaaagcaagacacgaggaaaagaacaacattagtacaacaggagatataaatcagggatgtcaaacatgtatggact

SEQ ID NO: 867 - DNA, 631 bp, Gossypium hirsutum
tgatgtttttgttttcctatgctttgcagcaactaatgggagtggaagattgtgatgtaggagatgatgggtgcttgaggagaagattaatctcagaggctcatttggactacatttacacccagcatcgtaagccttgagactttccgtataccaaggattcgaggaagttggtatttttaacttgcaattaagctcttgttacctatttcatagtatgagtggaataggctttttcttcttttccctgttgataattcctaaatattagcacaaacttagttgttatatcttgtaccttttgttttattattcctcatctttgagtttgggtttttgggtattgaatttattatgttaaaaattctaaataaattaataatattaggtaatgtttttaatttaaatatattattaaaatcaaatttatgaattttattgttataaacgaaaagaggctataaaatatataaaaagaaataagcttaattattttaataaagaaatgttgatataaaagtttttaaaggtatggataggtgagagtataggattaaaataatatattaatgaagatttttaaagttatgtatagatggttgggaattttagtgaaggaatcagcagtttg

SEQ ID NO: 868 - DNA, 608 bp, Gossypium hirsutum
tattatcctcttttaggcttactagacataattcatcatacatagagttcgaagctatcaccttcaaagaactttttttttccttaagcctttcagctcagataatgtaaagcttctagtacatagcatatgcttttcataaaattgctaaaatcaactggtaaaatttaaaatctcacagccaatagatgtggaatttatcagcacttagaatccccttgacatgcaggataatgaggctatcctgtggcttcttcacgtgaataataatatcactatttaacattaaccctcaaatgaggacaaagaacctattgtgtgttattcttcataattgttatgtcaggcttattatacaataaggaagagaggcaggcaataactgataccataacaaataagaggtgaggccaataaaattggttttatcaggacttaatatgagtaaacatacatgaggatgcattatatgtgccgtaagagaagttttagtttcatctatttccactgcttgtttttctatctgtggcttataaattcaaaattaactgccatagttggagttgaaacaaatccatgttatgggcttgtaggaattttctcacata

SEQ ID NO: 869 - DNA, 367 bp, Gossypium hirsutum
tttgtgccatggtaaaagaataaagtgatgatggttaccctcaatgaatgtctatatgtcagaaagtgcctagagtttggaaactcttttgccatttgtatatttttctcatcacggttaacacctctgagttgaatatcctgccaataataattcactcccataagttgaacatcacaaatgctttatataatattctgttcgccttagatttttaatagtaaagacaaagtcaaagatatttgagacatacatgctggtcggcatgaaaatcaagctccaatagcccttggtcatcctcccagagattataaataataattcgtgtgccatggtctttcatcagattgaactacaagcaggaaaa

SEQ ID NO: 870 - DNA, 1231 bp, Gossypium hirsutum
  misc_feature (471)..(479): n is a, c, g, or t
  misc_feature (488)..(492): n is a, c, g, or t
  misc_feature (496)..(496): n is a, c, g, or t
  misc_feature (498)..(501): n is a, c, g, or t
  misc_feature (506)..(507): n is a, c, g, or t
  misc_feature (509)..(509): n is a, c, g, or t
  misc_feature (519)..(522): n is a, c, g, or t
  misc_feature (527)..(527): n is a, c, g, or t
  misc_feature (529)..(529): n is a, c, g, or t
  misc_feature (533)..(534): n is a, c, g, or t
  misc_feature (536)..(538): n is a, c, g, or t
  misc_feature (543)..(550): n is a, c, g, or t
  misc_feature (552)..(555): n is a, c, g, or t
  misc_feature (557)..(564): n is a, c, g, or t
  misc_feature (568)..(569): n is a, c, g, or t
  misc_feature (571)..(576): n is a, c, g, or t
  misc_feature (583)..(588): n is a, c, g, or t
  misc_feature (595)..(597): n is a, c, g, or t
  misc_feature (602)..(603): n is a, c, g, or t
  misc_feature (605)..(612): n is a, c, g, or t
  misc_feature (616)..(617): n is a, c, g, or t
  misc_feature (623)..(625): n is a, c, g, or t
  misc_feature (627)..(632): n is a, c, g, or t
  misc_feature (638)..(643): n is a, c, g, or t
  misc_feature (645)..(651): n is a, c, g, or t
  misc_feature (655)..(672): n is a, c, g, or t
  misc_feature (676)..(687): n is a, c, g, or t
  misc_feature (689)..(698): n is a, c, g, or t
  misc_feature (701)..(713): n is a, c, g, or t
  misc_feature (721)..(740): n is a, c, g, or t
  misc_feature (742)..(753): n is a, c, g, or t
  misc_feature (757)..(763): n is a, c, g, or t
  misc_feature (766)..(767): n is a, c, g, or t
  misc_feature (769)..(783): n is a, c, g, or t
  misc_feature (785)..(807): n is a, c, g, or t
  misc_feature (810)..(812): n is a, c, g, or t
  misc_feature (815)..(815): n is a, c, g, or t
  misc_feature (822)..(823): n is a, c, g, or t
  misc_feature (827)..(827): n is a, c, g, or t
  misc_feature (829)..(829): n is a, c, g, or t
  misc_feature (833)..(833): n is a, c, g, or t
  misc_feature (835)..(844): n is a, c, g, or t
  misc_feature (851)..(851): n is a, c, g, or t
  misc_feature (853)..(866): n is a, c, g, or t
  misc_feature (868)..(870): n is a, c, g, or t
  misc_feature (872)..(872): n is a, c, g, or t
  misc_feature (875)..(887): n is a, c, g, or t
  misc_feature (889)..(891): n is a, c, g, or t
  misc_feature (893)..(933): n is a, c, g, or t
  misc_feature (939)..(952): n is a, c, g, or t
  misc_feature (954)..(954): n is a, c, g, or t
  misc_feature (956)..(957): n is a, c, g, or t
  misc_feature (959)..(978): n is a, c, g, or t
  misc_feature (982)..(982): n is a, c, g, or t
  misc_feature (984)..(988): n is a, c, g, or t
  misc_feature (990)..(990): n is a, c, g, or t
  misc_feature (995)..(1001): n is a, c, g, or t
  misc_feature (1004)..(1004): n is a, c, g, or t
  misc_feature (1008)..(1018): n is a, c, g, or t
  misc_feature (1021)..(1023): n is a, c, g, or t
  misc_feature (1025)..(1025): n is a, c, g, or t
  misc_feature (1031)..(1032): n is a, c, g, or t
  misc_feature (1034)..(1035): n is a, c, g, or t
  misc_feature (1037)..(1040): n is a, c, g, or t
  misc_feature (1044)..(1049): n is a, c, g, or t
  misc_feature (1052)..(1056): n is a, c, g, or t
  misc_feature (1067)..(1079): n is a, c, g, or t
  misc_feature (1086)..(1086): n is a, c, g, or t
  misc_feature (1088)..(1095): n is a, c, g, or t
  misc_feature (1097)..(1133): n is a, c, g, or t
  misc_feature (1136)..(1162): n is a, c, g, or t
  misc_feature (1166)..(1181): n is a, c, g, or t
  misc_feature (1186)..(1203): n is a, c, g, or t
  misc_feature (1207)..(1209): n is a, c, g, or t
  misc_feature (1212)..(1216): n is a, c, g, or t
  misc_feature (1218)..(1220): n is a, c, g, or t
  misc_feature (1224)..(1226): n is a, c, g, or t
cagctttttggctagcctttctactatggctatgtcagcattcctttcatcggtttttgaggataccgccatcagatctacagcaagctctatatcttgcgtgtctgttctctttttggcccgggttaattgagtcagcatcagctcaatctgaacaacaatccacattcaattaccaagaatcaatgttaagtaatcatgttctgaatcccaaacatatatcctatcaaattaattatcttataaaagctcatatatacagagagagagagagagaccaagtcaagaggcagcttttctgaatgatgcaattgctcttttaatccctcttaaaattttaaaagttcaatttaattcattttaactttgatcaaatggaaaaaaaattgcatttttggtctctccaagaaatttatcattcaaattaaaccattttaacccaaaatttcctacctttgggcctcaaaaacnnnnnnnnnggagtgagnnnnnaaanannnntcacnnanctggcttcannnngatanangtgnngnnnttgannnnnnnntnnnnannnnnnnnaaanngnnnnnncaaactnnnnnncaattannnttcanngnnnnnnnntctnnaatggnnntnnnnnngtacgnnnnnncnnnnnnngttnnnnnnnnnnnnnnnnnnaaannnnnnnnnnnntnnnnnnnnnnggnnnnnnnnnnnnnagtgaatnnnnnnnnnnnnnnnnnnnncnnnnnnnnnnnnctgnnnnnnnccnncnnnnnnnnnnnnnnntnnnnnnnnnnnnnnnnnnnnnnntcnnnaanttttgcnngatntnaagngnnnnnnnnnnataatgngnnnnnnnnnnnnnntnnngnacnnnnnnnnnnnnncnnncnnnnnnnnnnnnnnnnnnnnnnnnnnnnnnnnnnnnnnnnnctgccnnnnnnnnnnnnnncngnncnnnnnnnnnnnnnnnnnnnnctcntnnnnnantgaannnnnnngtntttnnnnnnnnnnntcnnncncactcnncnntnnnntctnnnnnnttnnnnncactccctatnnnnnnnnnnnnnccattcntnnnnnnnntnnnnnnnnnnnnnnnnnnnnnnnnnnnnnnnnnnnnncgnnnnnnnnnnnnnnnnnnnnnnnnnnnttannnnnnnnnnnnnnnntactnnnnnnnnnnnnnnnnnnaccnnnctnnnnngnnnttgnnngattt

SEQ ID NO: 871 - DNA, 325 bp, Gossypium hirsutum
ctcattgtgagcttcccatttaacaatttcaatcctctggcattgaactttatcacgttaactgctttgctctccattttcccatcaccaaatgctaatgttagtaaaacacgaatcacatcacaaatccagcttcgtatagaaaaaatggcacaccagtttttatttcactactaggatgagaatctggatatttaaatcattcagttgtggtataagtccctgtaaaggtttaatgcataatttggtacctaagtttggcatttttttctaaagtggtacttgcattttttcctgaagtggtacttgcttctttttttttttt

SEQ ID NO: 872 - DNA, 611 bp, Gossypium hirsutum
ggcagatagatgaaataaaaacatcggatcttgcgcctcgtaaacggatttgggcataaatcggagcactgattttcttttttccggcaagttatcggagcatatccgatgaaaccatggaagtcataagactcagggaacttcaatgcttttgatgaaagattcgaacatttttcgacacatacactccttttttatccttctaagcttttgtatatggaattatttgttgttagtaacatcattttttaacaataaaatggtgattctatcaaaatgtgtggtcaaaggtaacaaaaaacctggaaaaatcaaaatcagagttcaacagtaatattagattggcataattccttattttggcactccaactttacataaataaataaaaaagtcattttaacaattcatttaaattttcacttcttttagcccttaaacttatgttatttgttagattacttcaaaatgaatgaaaaagttaaagtctgttaatttcattaacatgacatacaagtggatgccacgtgaaatttattaaaattattaaaagtataaaaaatattttttattataaatttttaaagattaattaattgctaacatgtcgt

SEQ ID NO: 873 - DNA, 511 bp, Gossypium hirsutum
ctccttgacattttgcaggattcctttattgtgcggatttttaaaacttgtctcttgataattctctcctagatgcaatgaattgaacaaaaattacaaggaatagaacagtgcaaaatatggatatccagagacaagaattgccctataaaaatgtatcacctgataaagatgaggcattaagttggaacgcaggataattcttccagtttacctgaagaaaattaaaagaacagcagcattttgcatttttttctcttattacgtataatggagattaattaaaccatatctaatagtgtgtacttgaaaatatatccatttttttatattttatccctgatctagcagggaacttacccactcttcggttctgatattgaaacatatgcagtagacatgccatatcaaaaatggtccctgcatggacaaaaaaatctgatgtaacataggccctttttttataaattttaatatagacctttcaactagatgaattgggatttgggat

SEQ ID NO: 874 - DNA, 609 bp, Gossypium hirsutum
gcacaccagccctcttcacctgaagaggcccatatcttcacttcacggtttagtgggccctataggtaaaaagacaatagaaaattagacacttggcataatgagaagagaatttatgccacattaccaacacaaaagcagaagtaattttctgtcgaaatcacaaaacttcctaagggcctaaaaaaaggttataaaaaaagggaaaacaatctctaaaagagaaaaaaaacagacctactcccgtgagaaaaaaacaataagaacggggatatggggcacacacgaaagtggcccagaaaacacgagatgcccctcgtgggctcaccactgcgagtgggatgggcttacaatatccccccattttctcctgtgacacaaatttacagattccccaaaatcattacctaattgaagaatgaatacatatggcctgctgtgaatctaagcatacttcttaatggaacaactggcacaagtcggaccaaaatcttcaattttctgggccttaaaatgtcaatagctgtcaggtacttgatttgcagtattgccgcattaatagtagtttatagtcataatgagaaaatcgcttggacacccaaaaacctt

SEQ ID NO: 875 - DNA, 619 bp, Gossypium hirsutum
aaagccactaaaacaaccattgacatccatacttatattctgcactatatcggagttatccatatacggcagtaaagatgactaactcaaaggtactacccttcctgatgaaagatgaactgttaaatacatgcagaaatgaaccgttcaacacatacagaaagaacttacttttcccataatccacttaatgaatccaccaaacaaactccgacaagcactgcctgaacgttgcctacaaaatatttttaaaaaatcaataaatcatcaattgaattacaactaaaattcttgcatctctataatttaaaaaggccatacctagctataacagaaagttgactctcatgttcactgacattcataagctttgcaagtgcaaaaactgcatcaaacccaaaaccattagtcctataaactgtactaaaaaacaaagtaaaaaagaaaaaaagaaggttaaagggtctgcacaaggctaactgaatttattccactgcttagcatggtttgtattagcttcattcatcagattcaaagaacaacatctaatctgtaactaactgaatttatttcttaaacacggaaagcaacatttgatgtaaccacatatccctccatg

SEQ ID NO: 876 - DNA, 593 bp, Gossypium hirsutum
tccataccatctctaaacataagtaaatttatgattgtaataaaaataacaattattttatataaaattttaatgaatatatttattacataatttatcacaaactcataaaatttatattatttacttacattaataactataacaataaataaattagttcatggaatttaatatttaacttgtttacaccttactttttttttctttatacaatgcctagaactacgcataatcgctcctcatcccttaaattaagagaataatgcgttttaatatacccaaacccacgtcttcctacattaacaacaaataaatgatacaaggctccaactttgattttttttccacctaacaacaattttttgcttgatttgtgcctattttcttgatgattgtatttatttctcttaaatttggagttatttcataaaaaaaaagcaaacattaaataaaaaatgaatatgaagtcatgaatgaagaattaacttgctaacagcttatgctaagacttagtgattaaagcttccttttgacgctccaaataataaacaaaaattgctaacaccttatgtcatcatcaaccttaaacc

SEQ ID NO: 877 - DNA, 955 bp, Gossypium hirsutum
  misc_feature (332)..(332): n is a, c, g, or t
  misc_feature (335)..(337): n is a, c, g, or t
  misc_feature (424)..(424): n is a, c, g, or t
  misc_feature (737)..(737): n is a, c, g, or t
  misc_feature (866)..(866): n is a, c, g, or t
  misc_feature (876)..(877): n is a, c, g, or t
cgacgtcgtttcacccaccgcgttaacatttccttctcctatttttaattttattattttattataaatttgaattaatgtaaactaatttatcacaatttgtatgacaaaatttatttgaaacgatgaattgtgattaattaatttttttatataatatctaaaattatgtatagcccctctctaatctataaataggagcataatacacttcagtatactcgaacctacgtgctcctatcctatgttggcaataattcccataccaatctctaaaacataagtaaatttatgattgtaataaaaataacaattattttatataaaatttnaannnatatatttattacataatttatcacaaactcataaaatttatattatttacttacattaataactataacaataaataaattagttnatggaatttaatatttaacttgtttacaccttactttttttttctttatacaatgcctagaactacgcataatcgctcctcatcccttaaattaagagaataatgcgttttaatatacccaaacccacgtcttcctacattaacaacaaataaatgatacaaggctccaactttgattttttttccacctaacaacaattttttgcttgatttgtgcctattttcttgatgattgtatttatttctcttaaatttggagttatttcataaaaaaaaagcaaacattaaataaaaaatgaatatgaagtcatgnatgaagaattaacttgctaacagcttatgctaagacttagtgattaaagcttccttttgacgctccaaataataaacaaaaattgctaacaccttatgtcatcatcaaccttaaaccaattgaattganaatacaccanngtcaccttcagttcagttctgggatccatcctcatcacgatgccaaccaaaaagtaaatactatgatgctttggacat

SEQ ID NO: 878 - DNA, 656 bp, Gossypium hirsutum
ttctaagctcctcctttatgataatgacatccctaagaatgatgctattgattctgatgtttttgggaattatatagaaattagaatggttggaaatatctagtacagctgtcactaactgatcaacttatggaagtatgttatttgtagcagctccttttctttgattcttttcagtacatcataatttgctgttttggttattagtggaaatgtggcaattatcgtagaggacctgcaatgtttgtgatcctagtatgtttgttgttttgagcaggcagttcctaaaccggctggtaacaggttacctaccaagtgtgattctgatattatttctgtatactgttccaccaatcatgatgctgttatccagaatcgaaggaaatgtttcacgtagtgataggaaaaggagtgcatgcattaaagttttatacttcacaatctggaatgttttcttcgttaatgttctttccggatcctttatcaaccaaatgagtattttctcacaaattaaagagttgcccatgatgcttgccaaacaagtgcctacccaggtaattttccataactccctaatagttggcttaataacacctaacatcctgctgcaaaagtgtacactttaatgcccttgccctttctttcatcatcacatt

SEQ ID NO: 879 - DNA, 632 bp, Gossypium hirsutum
  misc_feature (90)..(93): n is a, c, g, or t
tgaggtgagagcttttccaatgcacttctgtttgaacttactttcatttaatagcttaaagctcagtaatcccttttttttttagcctannnnattaaccacaagctaaaaagagattactgagctttaagctattaaatgaaagtaagttcaaacagaagtgcattggaaaagctctcacctcaaaatattggctatcaagttcacaaaatctttaaccctacactgccctttctctgaaaaccctccatgccatcaacttttgatacaacttggtagcttcttgtttcattccggcatcagctatacctttgattattgtcaaataagttgtctcttctggtttattctgacttaagaccatcatttctagaacttgtattgccaaatctatcttctcatttttacatagcctatggatcaccattttataaccactatttccaactgcgtgtttcctctccgccatcacctttagtatctctactgctccttcaacttgatctgcacggcaaaatcctcgtactaaacatcgatgagttatgtcatcaggattgatcccatctcctaacatctgatcatataatcccattgctttctcaatatcaccatttctagccaagccatctatc

SEQ ID NO: 880 - DNA, 653 bp, Gossypium hirsutum
gggtttttgctgatgagaatgcagaaaaataaagagaaatcttgataattccactttggtcctaactttattaagtaaattttgcaatattccaattttgccattaattctccttactttgttgttgatttcatgcctttgccgtccagcccaaatggactttgtgtctatttgccttttaagccctcttccttttatcttttaagctatttaatcattttctataattttgcatttgttacaatttagttctttttattcaattaattatcagaactttaaaatttcttaacgaaactttaacactaccatattgacactccgtaaatatttataaaaatatttacggctcggtttataacatcgaggtctcgatacctcttttcctcaatttcttgacttaataaatttttataaaacacaaattactaattcaaaaatctcttaaaaatcatatttggctcgtagttattaataatgaaatttacgagcttattttctgaatttggtgatcttgtaccactgtttttgacatttctgaaaatcgggctattacaggctgagcctcgggtaagactttttcgggtcgaccccgacctgacccaaattatatactagatatatatttttttaatcaaatatgggcccgggta

SEQ ID NO: 881 - DNA, 540 bp, Gossypium hirsutum
gtacctttacctaataaaaattttaccatgttaccaacttctcaatcaaaatctaccaataaaccatagatatcttatcctttattatgattctcaagtggttttaacgtatgaatttccaacacgcatctcaaaacaatttatctaaaaaagtggaaaaattttgcaatccagaacgactgaccatcctcatcagcaccaagtcatagtaaatattaaagttggtagggaaaatagcagagagaccatgataggagagtggcatgtagcaatgcagaataacttttttcttggagattatttttaaggactgtggcctccgtgcttattttcctttaaaagtatccgattcgatacacattgcattgatatttctcctttcacttaaaaaggacagcaatatatatatatatttagccttaaaactcttatactaaaacaggggacacacaaaagaagaggaatgaaaggttttatttatgtccaagattcatgaagacaaaagaatcaaatacaaacttagcagcaaacatcacaact

SEQ ID NO: 882 - DNA, 648 bp, Gossypium hirsutum
ccaagcctgcctattacaacatcaatgtaagtcaagcgtgcttgttcacaacattaagaatttttttataatctttatttctttctctcagttttcaacttgccaatcaatagatggaaacagaattaagttttctttttatttatcatctttcctaccaagcctactgataaaaaatatatatagtttctatcctttttacttttctcatccattaatcgtttaccattccaatcttcctctaaattgctttgtaagttgtgttctgggatgcttaattagttgcctgttgcttcatttatgtcaattgtatgagcaggcggtgagcaattcaatgatgcttgatgcacatggtgattcaaagaaacaccaaccattggcaatggttaatgcaccaaatgtgacttcaagttctgtaaagcaagatccccatgggagggacaggatggtatctctcaataatgaatccagggaaatggatatccctgatgtcgagtcaattgttgatccgcacagtattgttcgtgctacaagattccacaacccttactatcaaaaattaggagagcaagaagatgatgcaaaaagaatcaataaacggggaaagttttgcagaaaaatagcctcctcagacaaggtaagggaaat

SEQ ID NO: 883 - DNA, 618 bp, Gossypium hirsutum
ttggtgatgtcttccccaggttcatcctgaaggaaaatatgttgtcgatattgataagagtattgatatcacaaaaatcacgccatcaacaagagttgctcttcgcaatgacagctatgtcttgcatctgatcttaccaagcaaagttgatcccttggttaatcttatgaaagttgaaaaagttccagattctacatatgacatgattggtgggcttgaccagcaaattaaagagataaaagaggtttctcttgcctttccttaagtttttcattaatggcttatcatttttttggttttcccttttctggtatgattctccgttattaatatcatgtttggttgtggattggttaatccgttacacctgctatgcggtaaaatttgcaggtcatagaacttcctattaaacatcctgaattgtttgaaagtcttggaatagcccagcccaaggtatcatcatgctagcaattgatagccttttgtggatttacttctcatgtgataacatcttaaggctaaatcttgctccctgctataaattatagggtgttctgctgtatggaccacctggtacaggaaaaactctgttggctagagctgtggcaatcatactga

SEQ ID NO: 884 - DNA, 383 bp, Gossypium hirsutum
  misc_feature (42)..(44): n is a, c, g, or t
ttatttttgttcttcttttcttccttcaggagcaccataacnnngggagaagtttgaagagctttgcggggacctttgggataaatctcttatgcctgtgaaagaagtgctgaagcattcaggtttgcaagctgatgatatatatgctgtggagttgattggaggtgctactagagttccaaagttgcaggtttgtactacactttctcctaattttgcagatatatggaaataaatcagtatgaaagcaaagaaagaaggaaatgttaggctctgttgtaccagttagccataggggcagactcaacttgaacaaaataccgcaggaaacccgatacttagtaaatgtaggataacaccatttaacacttcccccccccccc

SEQ ID NO: 885 - DNA, 462 bp, Gossypium hirsutum
attttgaattatattctttttcagggtcataattgcatatgcaaatggtttgataattctttgggatgtttctaaatctcaaattccctttattggaggtggaaaggatcttcaattaaaggatgcagtggattcagatgttcaagatgatacatttgagcatcatctccaagaaaaggaaataagtgctatttgttgggcatcttctgatggatccattctcgcagtgggatacgtagatggggatatcttgttttggaatacaagtattacctcttctaaaggtgaaagaaatggacaaaacaaaaatgttgttaagctgcaattgtcatccgctgagaggaaacttcctgtcattgtcttacaatggtcctcaaataatacatcacgcaatgattataatggcaaactttttatctatggtggtgatgagataggatctgaagaagttctgacggtacg

SEQ ID NO: 886 - DNA, 590 bp, Gossypium hirsutum
  misc_feature (583)..(583): n is a, c, g, or t
caaaagagttttagttagtggagtgaaaaaaaaacaaaggtgttttagggcatgccaatctagcaaccctccggaaaccagagctgagtgttgcagtttgcaagctttttgttatgtattgatgaatgtgaagatgcaggcgatcgagatgtgtggttgcaataccaatacctgttcaacagcaccgatttgagttaatccaactgatggagccactacatctagcaccacacgtaaatactcctttgatattttcccattgcgatcctttggcacattttctaaacctacattcagcaactgtattgcgaaaatgaaagacttggttcagtaatggcggcacaagagaaaatgtaaaatccgacataaatatatacacacagggaaaactagggtaagacaagaaaatacgaaagcatgtatatgtatgtatataccttgtctaattcaaacttgttggatagtagtcttttaatgccacttccatcaaaggtgttttcactatgagcaacaatcacaggctcctccttgagattttgagcaacacgcttagctactttctttgatcttccaagaaggttcntgagaga

SEQ ID NO: 887 - DNA, 669 bp, Gossypium hirsutum
tttatagagccttaaaaggtccggatgaagcaaaaaatagtatagcggttgcattagtttcaagtgctagtaagatgtaaaagctttccatgtccaaacatttgaaggtaaacaaatgttaaaagcacaactttataaacaaagttcatgttgttcatgttaaaaaagtgtcgaagcatcatctataaaacagaggtgtaccttcacaaacgaatatgaaagtcactttgatttctttacagagtcgagcatgggaaaagcacatgttaccttttgagtggcttatagagtacaacagtcacatatttggactcaaacctatgggtgtatccgagggcaacaacagactgtgatgcccatcctttctctatgaaaagatggttaagtacaacatgttgaggcttcgaggatgatgctccatcttggtcatctgtaccgaggacagttaaatgtagctgggatggaaccacagcaggctcctttgtaaaatcttcctccgctggaaatgcctgactgtaactggaagttggagatgctggagcctcaaactcggctacactatccagattttcaggtacatagtcctgcaagaaatagtgacaagtaattaaacaaatgaaggcaacaaaaccagtgacgagtatcaccaccatcttagttatgggcaag

SEQ ID NO: 888 - DNA, 620 bp, Gossypium hirsutum
taagagcaccgaccggcgcttaaggacatcgtctggacgtcgcccgccgataactcgactgtcgcttgacttttattatgttctagtccattgtttcataatgttgttattattgtttagatagaaaaccagaaccagaggatgttctcggtttggtcgtttgtgattatgtctaagatggaagcatacgagcatcattcgattaactttattgatgatgatccatttttacgccaatattttcatgtttgtgttgtttttctgcaagtggacggcttcagtttatgatttaactcgtctgcaaccttttttcttggtattcccgtcttttcaattaaagttatatgtcctccatcaacaatttcttaccatattaccattcttttaagcactaattcttgttttttcccaagatttagcatgattttccatttaagcactcattaagcaagcagaccttgtccattatttgaagctaatcaaatcaatgtgacaattgactgctggagttaataaggggtttaacatttatttagatgcgaatttcattgtagtggacaattattgtcctgctaccgagccagttgcccgtattggtttcactgcatctctataatagt

SEQ ID NO: 889 - DNA, 635 bp, Gossypium hirsutum
tcttgcgagatgtgttgctttctttattatttatgacggtggttcgaatggctcgttggtgaaagattgtttataatctgaatgaaaataaagcagatttatggaaacataggatgagagaagtggatgtgcaaacatcaccatattgggcttcttattacattattgtagaagacatcatatttggtttgcttttgcaatatctggttttgttcttattactattgtcttttttttcaaaggtttgcagatactgtaatgcttgcaatctctttttctcaaactgtacttatatttgcataaactattaactatcatctacagctccaacaaatgactaaatcttaacaaaagttatccaataacataagaaataaatgaaagaatgaaatgttgatatctaagcctaattcgttggcatctcgaaccggcaaataggacagtaatggctctgcttcagccacttttcgatgcaatccccatgaaaagtatgagaacaaggcatccgagaagcataaaacccaacctcgagctcctccaagcatatcatgcaatcttcttcatctccatcttctactctaaccatgcttaccatctccttaaccaatgactctttagccggaaccataccatag

SEQ ID NO: 890 - DNA, 585 bp, Gossypium hirsutum
gaggttgagaagacagtggaagaattgactattgagctgattgccacaagggagtccttagagtctgcacatgctgcccatttagaagcagaagagaaaaggattggtgcagcaatggcccgagaccaagatactcaccattgggaaaaggaactaaaacaggttgaagaggagctccaaagactcaatcagcaaattcattcagcaaaggatctaaaatcaaagctagacactgcttcagccctgctacttgatttaaaagctgagttagcttcttatatggaatctgcacttaaggaggaaactgatggacaccacaatactgagtcacaggcatcagagacaagaactcacactgatgcacaagcttccgttgcttcattaaagaaggaacttgaagatgtgaaggtcaatatagaaaaagcaactgcagaagtggattgtttgaaggtggctgctatttcattaaaatcagagcttgataaggaaaaatctgatcttgccaacactaagcagagagaaggcatggcttcaattgcagttgcttctttggaagctgagctggagaagactcgatcggaaata

SEQ ID NO: 891 - DNA, 610 bp, Gossypium hirsutum
cctgatgagatgatgaacggatgggggaacaatgcaccgcgggatgaaaaggagccttcggaagatttcttgaatgacgaagagactgaaaacggagatacaagtgtgcagaacgaatggcgtgaagttggggagtttgatttgaacagtagataggtcatggatggtggtgcttagttggcattttggcatctccttttcttaatcgattttttgttaacctaatttgtaaaagaaatagtaaaacacgaagtgagaggcatagatggacattttcattacgttgtgtttttattgtatttagttaggcatagacaagcaaaagcatttgctttggtgagctgctgatggcttccatttaaccttttaaatgttctttgtaaatttgcccatattaaatgaatgactgattcgaagtaggtttgcctacaggacaatacgttatgaattgatctatacaaaaagagaatatcgctagtcaaagttagacatcgattctatcaaattaccaccaaatcatttcctctcttttttctttatttttattttagctctttttctttttgtttcttttctttttctgttccctcctaacttttctttctctcca

SEQ ID NO: 892 - DNA, 642 bp, Gossypium hirsutum
aaaagtaaaataaaaagaggagagcagaactgtgtatgtgccactagtagggcaaaggcacctaaaatgaggactttgtgaattttcaagaattagctagcatgattgtatgaccgagtaatttcaactacacccatattaggtaaaagagtccctaatcattttaaaagttctactatttctcagccccaatctaaattataaagcacaaatatatgacagagtaatttcaacaacaaaaaacaatcaacactttgagaccaaacaacaatgaacccagagcatatcatgctctggcttatcatttttctttaagcacatccgggcatgtgtatggaaaataaccccccaagaaccctccaactttaccagaaacttagacagaaaaagttgaacatgcccatatgagatatacatccatctctgacacttacacccgagtctaactgacatagattagagcaaaacggtaagcaagagcagacacaatcacacttaacacctatcaagattagcttaacaacctaaaagaacagataaaaaagataaaacaaaaaaccccataagtatgatcacatacgatgcactaatgttgtgtttctatcgttttcaataccatcattatcactgaaacagaccaaa

SEQ ID NO: 893 - DNA, 637 bp, Gossypium hirsutum
ttttgagcatgtccagctttaggggcaaaaatacataaattagactctgttcaacctagaagcacattgtttccccaaggctttgcttggtaggaaggataaaaaggggtgggaacaaaaatttcttagtctaatggttagtttccataaccactttcctactttagagcttaacaattggattaaacacgtttcgttcttccccttcgtatctttcctatttcctaccaagcaatgcctaaatggtcattgaaaaaaaatttagatgatagttatggcacaacaattacaaaaatgacataacacagactccatcagaaaacatagaacatgcttgtccacgcactggaagtaaccaagaatccatatagaggacctagttattaacattctatgcgagggtcaaggttcaatttcccttttcattaatcccaatgtaaccatttctttttccttttcaagaaagaggaagctgattccctatatttatagcactacaatggaagtataatgagtagtagtactatggctgataaacatgaaaatttacctgtccatatataggagtttgcaattgctgcaaaggagagaatgaaccattcaggaaaccattacccttgtcttgtacatgatccaa

SEQ ID NO: 894 - DNA, 1259 bp, Gossypium hirsutum
  misc_feature (595)..(896): n is a, c, g, or t
  misc_feature (899)..(900): n is a, c, g, or t
  misc_feature (904)..(946): n is a, c, g, or t
  misc_feature (949)..(952): n is a, c, g, or t
  misc_feature (961)..(987): n is a, c, g, or t
  misc_feature (992)..(996): n is a, c, g, or t
  misc_feature (998)..(999): n is a, c, g, or t
  misc_feature (1004)..(1009): n is a, c, g, or t
  misc_feature (1011)..(1013): n is a, c, g, or t
  misc_feature (1017)..(1029): n is a, c, g, or t
  misc_feature (1031)..(1034): n is a, c, g, or t
  misc_feature (1037)..(1105): n is a, c, g, or t
  misc_feature (1107)..(1128): n is a, c, g, or t
  misc_feature (1130)..(1145): n is a, c, g, or t
  misc_feature (1147)..(1170): n is a, c, g, or t
  misc_feature (1174)..(1188): n is a, c, g, or t
  misc_feature (1190)..(1193): n is a, c, g, or t
  misc_feature (1196)..(1196): n is a, c, g, or t
  misc_feature (1202)..(1213): n is a, c, g, or t
  misc_feature (1215)..(1218): n is a, c, g, or t
  misc_feature (1222)..(1235): n is a, c, g, or t
  misc_feature (1241)..(1256): n is a, c, g, or t
gtgacgcaaggtgcttatgatactcgcaatatcttccagtcacttgatttagcgtggactttgcttcgtatcttcccacgtgaactcctccaccgtatacctgcaaagacacttgaccagtattacagccgtgatgcaacaagctaagctgatgaaagctagtctgctctttgcttatctacatatatgtcaattttcatataagtcacctgtaggttgttttatttgccaacgctgcttcatggcctcgaccagaatcaaatctcagtggacggtatctctatgattgcatatgttacttcgggttcccgtttcattaaagttcggggcatgtgattattgtagtagtaagtgcaattctttgtgttgggaacctagaagcttttggaaggccattattttgtgattcaaaaccagctgttaagagttgaattgccaggaaagaatcggaataagttacagattttgtgtgttatgtattaaaagtctggtggcaccgtactctgcactagctacttagcaatttcggatatcgtttgggatcttattttttgtcgcgtattttacatggagatttcacgaatcatctgatgannnnnnnnnnnnnnnnnnnnnnnnnnnnnnnnnnnnnnnnnnnnnnnnnnnnnnnnnnnnnnnnnnnnnnnnnnnnnnnnnnnnnnnnnnnnnnnnnnnnnnnnnnnnnnnnnnnnnnnnnnnnnnnnnnnnnnnnnnnnnnnnnnnnnnnnnnnnnnnnnnnnnnnnnnnnnnnnnnnnnnnnnnnnnnnnnnnnnnnnnnnnnnnnnnnnnnnnnnnnnnnnnnnnnnnnnnnnnnnnnnnnnnnnnnnnnnnnnnnnnnnnnnnnnnnnnnnnnnnnnnnnnnnnnnnnnnnnnnnnnnccnncccnnnnnnnnnnnnnnnnnnnnnnnnnnnnnnnnnnnnnnnnnnnccnnnnccccccccnnnnnnnnnnnnnnnnnnnnnnnnnnnccccnnnnncnnccccnnnnnncnnncccnnnnnnnnnnnnncnnnnccnnnnnnnnnnnnnnnnnnnnnnnnnnnnnnnnnnnnnnnnnnnnnnnnnnnnnnnnnnnnnnnnnnnnncnnnnnnnnnnnnnnnnnnnnnncnnnnnnnnnnnnnnnnannnnnnnnnnnnnnnnnnnnnnnnacannnnnnnnnnnnnnncnnnncanaccaannnnnnnnnnnnannnncaannnnnnnnnnnnnncccaannnnnnnnnnnnnnnnacc

SEQ ID NO: 895 - DNA, 563 bp, Gossypium hirsutum
aagttgttctgaatgaaggttagaggccccttcatatcactactacatcataatttttcatttgacaatgctgcttgccattacatttggtttgctctaaatgaagtttagtgccccctacacatcactaccacatcttaattattcccatccttgtaaattgacggagttttcgtttgccaatactgcttgtcattgcattttgtttgctcttgttgtcactaagaagttgacagtgagcctggaacttcctgtataaaacttgagtaatgctaaggtatggagtagacgaattaggcgtcggatttgcattgtgtgaaaatgtcttcctttggactttttccaagactcagttttattaggactatgcgctgtgctctatttgttgttttaaatgggctcgaggctcctagcaactttagagaactagaactcaggttctgtcttgccttacccccaatagttgcttctagttttttgttccaaaaagaaaataaaatatgatctaaacaaaggcttaaattcctacttaggaagttggtagactatgacaatgttcctgc

SEQ ID NO: 896 - DNA, 487 bp, Gossypium hirsutum
aagttcagaattggaagtatttgttataacccgaatttgattttttatacttgttggtgggttggtttgtttagttcttgttcatcatggaaagtttcgaacaagtaaagggaaatggtggtgttattgatcaaactatggaggacgcaggggccactaatcccagagttctgtggaagcaaatggggtacgaagagaagaccgtggctgttcacgaagaaatgaaaaggatgaaccgacttcctgcgactagttcttatgttactcaccgcatgcgtgttcttaataaaattcttcaactcttgtctattcaggtaatcaaatatgttggcttgattggttttgtgccgatgcttgaaaattataaagttgagtttggaagttgcttgatagttttgtgaaagagagggatttgatgatttattgcctttttgtttataccagagaactgcttcacaagaagaagagttggagttgctctttgctg

SEQ ID NO: 897 - DNA, 635 bp, Gossypium hirsutum
agcataagagtaaattctttgtattgagtggttctttccatccttgatttatctccctgttgatttacatttcatattgggatattcttttcactgctgaagaatgctttagcaagttattttctgccatgtcttaaattgcttgtctttatgcatacacatacgtatgtgtcttcctctcaggatgagcatcctccgatacctgatagcctatctcctgacattactgattttctgcaccagtgctttaagaaggtaaggtggcagataaatgaagattcagttttgtattttaattattgcttgatctgtcaaaagtgtataatgcttcagacatacttggtttataacagacagaatacggttattagcaatgaaagatatattttgatgggaatgacctgtgttttgatcttataactttggaatctatgaagaccaaaagcatccagtaactctcttgaaattctagaatgagtaaatattcttctagtcacaaaatctttgggtggaattcaccatcaggatgaaatgaaattctcaaaatggaaggaaaatagaatagcctgataatttcatagactaattgaaattcatgtggctaaaagaagatattggcttctatcttggtccca

SEQ ID NO: 898 - DNA, 406 bp, Gossypium hirsutum
tggaggcattgtggataacaatcttaaatattcaacaaacgaatcattgatctatgccacttgtatatttttagacaggagttcatggaagggtcttttcttcagacagtggaaggccattgcctgggttgatcacaatcaagggaataaattacacggtttgttcatatatatatatatcctgtcataatacacagacatctccttattaaccatattattgtcacagaaatcatagtgtaaggattctgatttggaatgtatcagtttattcactggcactaaaggagagcaattaactgtcttgttgaagtcactttgaatttcgtatatactatgatcactgagaattcatcatttctccctagaatggaaaattttaatctgctcacattcgacctgttaa

SEQ ID NO: 899 - DNA, 618 bp, Gossypium hirsutum
gttgggggttgacgaccatcttccgactcatcaccatcattttctctcttttctcacttcatctttgagaatcttaaagcgtatcatactgctcacaagtctgttattgcttggctgagtcttacattacggtttgtaattttatattatggaatgtttggattgtcaatgttttggtcaccttataatatcagactcttaaatagtgttaaaatgccctaacatagagtgtaatcttattacagtttattcattaaggtatcttagataacaagcataatcttaaaacttttttaagcttagagtattttatatttacacaatcttattacgaaatataatcattattttttataataatggaaacacaattcgtgcttccctacatgggaataattttctctttatggaccactagattactgttcataagaattattatatttagtaaactgtcaggtgtgcttaattagttatttaacttttttttaagctaattcgaatcaaataataattcttaaattgaccatttttatttctgaaaagaaaattgaagcttacactttcttgattattttcgctggtctggtccggtccattcatgaaaagcagaacagc

SEQ ID NO: 900 - DNA, 608 bp, Gossypium hirsutum
cttttctgcttagttaggttgtttagatgtcctgctcatgtttggggcttacgccactgcaagaggcatggccatttccaggctggttatacgatttttttggtgtggcttgacctctgtatttgtgacctatgtttatgtgtaagtttgtgcttcttttaaatgattgaaattattttcttgttgatagtcatctgttatatgttcatgctgattcacatatatatatacacacatgcaggaaggttttggaggaaatgaatgatcggaacaacaattcattatattttcggatatatatacttgtcttgggtgtttacgcagccttgcggttgattcttggcttgttactgaagtttcctgcatgtcataccttgtctgaaatgtcagatcaatcatttttccagtttttcaaatggatttatcaggtttgttcactttttcttaatagttgagatgatcaaatgattttggaatggatcacttggtagttcatatacgttaatttgcacatttcaggagcgttattatgttgggcgtggcctttatgaaaggatgactgactatttcaggtttttttttttggtcttttataaaagggggatttc

SEQ ID NO: 901 - DNA, 617 bp, Gossypium hirsutum
tgtcaagtaggctccatagctcaccactataaaaattgacagtttggatgcagcgttctgtcctccaaagtacagaccaactactttctgttgtagaaaacaggagtgaagacttaagctaaacatctatgcagagatttaagttgcagtcgaactgcgttcgtgatttaacgaatacaattgcaactaactaaattgaatatcattgatgtaaagagataaaaccacaaaaataacaattgtaatatcgtgttccggccatctgtgtgtggttgagagatagaaaggacactcacagctcgtttgagcccaatcttcagtctttcatcaaccttctcggagtacttggagactgcatagccttcttgagcaaaagatctaattgttcgaatagctccaaaagattcctaaacgtcaaggggtttgtcatgaaggacagaattttcaaagcttttcagttttgaagcacgttacagttcttacaaacctcagcaaccgaggcagccactgcagctgcagcttgtattgtgtgtgaaagttgtttgagatatcgtctgaatctacgcatggtgactgcggtaaccggaactaccaccaaggatagcactgaacacaaa

SEQ ID NO: 902 - DNA, 708 bp, Gossypium hirsutum
  misc_feature (632)..(634): n is a, c, g, or t
  misc_feature (637)..(649): n is a, c, g, or t
  misc_feature (653)..(654): n is a, c, g, or t
  misc_feature (661)..(661): n is a, c, g, or t
  misc_feature (663)..(666): n is a, c, g, or t
  misc_feature (668)..(668): n is a, c, g, or t
  misc_feature (681)..(682): n is a, c, g, or t
  misc_feature (693)..(695): n is a, c, g, or t
  misc_feature (697)..(699): n is a, c, g, or t
agaaacaaaccactgtcgcttcgctatcgctgttgtctctgatgcacacaaaccatgtcatgcttatagcatcacccagatctactgcctccaacacgatatacattagtctaatacccatcaaacccacaactggagaagacatttaacattctcctccattgagtttgacattggagtcccagaaatcaaattccaatctccatttgatatcctctgtgtttgcaggtcaaacatagccttccttgtcagtttacacaagctcaataattccattacctataacacatcaacaatcctagatatctaaaccgaagtaattaaacataaaaatatacatccataaacacataaccaaaataatgattcatcattaaatatggaattggaaacggaaaaaagaaaccagtttcacagtttttatggcactagtttccccatataaaataaagggaaaaatatataatactaaaaacttacctgaagagaacagtatcatctgctgtaaacctttttatctgcaccgacagtcagagtacaagtatgcggagttgcgaactgaggaatgcagctttgctttacctaaatgataagtgtattaaaaaaatgaaagccattgaagctagcacgannncannnnnnnnnnnnntttnngttttanannnntntcccttttatttnnagggggaaaannntnnnataaaaact

SEQ ID NO: 903 - DNA, 509 bp, Gossypium hirsutum
atgtgtacaagcaatgttttaatagtctcaatactgattggtggggttagttgaatatttagagatgtattttgactataaacgtactgttatcatattgaatgagtttgctgcacatttgtgagcaagtaaattattgaatgcctccttgttgtatgtttgtgagcaagtaaattgttctctgtttcttcctgctttgctcaatatcttgttctcttcttttgctgctatcaaaaccccaacaaatgttgttaaccattcaagatgtgctaaaagatgcagagcaaaagtagctaaccgatgcaacagtcaaaaacttggtgtctgatctcagatatttgctttatgatatggaagatacagtggatgaattttccactgaatatctaaggtgcaagctgatggcacaacgtcaagctatctctaatatggtacatgatcaagtccctagtcatttcacttgtttgaatgcaatagttgtttaatttgatgttagtactgggtccagg

SEQ ID NO: 904 - DNA, 642 bp, Gossypium hirsutum
ctaaacttctatttttcttgtctagaggtatagggtaaattactaatagaaccatgaaggtagagagcttctttaacatgaacgcttctctatatgaaacaaaatcatctttagcaaatgtacttccttccatttttgacatcagacgcagttatcttcattgttcttttatgtagttttagacgcagttatcttcattgttcttttatgtagttttagttgaactatagaataaactttgtacaaactccaatttaggtttagattcagtagggatatatagtagagacctccaaatagtcgatagataaaatgaatcactgaaatcaaagctgattctaaatatgaattagtattgctaaaattatgaaacatctacctcaagtctaaacgtagctaatgcaacaatactgccacatccattttaaagacaagaatgactagcatattatgagtctcctgggttgaggctttgcatattaattattaccttactttttatgtttgaaatcatacattttgtgtcctattctaaatgattgtactgaatcttcacaaataattcaaattaaaataagaataaggagaaaagaaagccaattgaaagaaaaaaaaaaggccaaattttgctattaaaccgca

SEQ ID NO: 905 - DNA, 512 bp, Gossypium hirsutum
tacggttaaatctaatttaaagacttcacctaagatgaatgttaatgtaatacatacaatataatgcttgattaacaatacatacctcaagtaagcgggtcacatcactttatttataaaggaacctcagcttaatttattaagatggagagtcatattgtctttttttcatatttaaattgaaaataaaaagagggcaaagctggacctggaaaatccacaaaaacggatgacccttgaacccaaagcttcactagcacctaactctgtcagccttgtcttttaagcaaacagctcaaaccccattattctttctcacaacatggtttggttgctcatcaaagaactcaaaccaaaaagttccaccctttagtccaagcgttctagccaaagcatccagctttttagcagtttcaagtctcccagctgtagtcatcacaggtatacagaaaggatgggatcgttccaagcgcctcctggaatgagaagctctgcactgtaagaaacttcaa

SEQ ID NO: 906 - DNA, 621 bp, Gossypium hirsutum
actacttatcaaggtattacttgcgactaaccctcttcttcctaactctattatataaatagataaattaatatcgtatccgtgttgttacttaggcaatggctgtaggacttcagttagtgagtgctttctggttctacaagattgtaaagatggtgaagtacaagcttactaaaagatggaagcaggtgggcatgcctggaaaattggactgaggctgtgttacatactagtgaactaggatgcataaaatgttcagtatcttaattcacttcaagtatccacacagctgatagtttactaaggatgcataaaatattcagtatcttaattcacttcaagtatccacacagctgatagtttactaagggttgaaaattgaaatatactgcgtaaacatgcaggattctatgtacgacttttaaaaaaaaaagaatcaaatcataagaattatacggttgtactcgtatttttgatggggctgtttttacttgtgaacaatatgcacattttgtttgattcattcatcaatctctaccatcaaggaaagtaccagataaggaaaaactacataaatgcggattgaagttaaaaaaaactacctgcacccataagtttgga

SEQ ID NO: 907 - DNA, 642 bp, Gossypium hirsutum
tggggcttggatcattagagcgttcgaattattagcattaacggtataaatgagatattgatattaataagttatttgagttctatttgaaaaaaatttagatttaattcggtaattattgagttaagtttgaactatttaagttgaattcgagttttgtaatacttgatgccaacagtttgtaagtcttatcaagtttttcatattattaagttgcattattacctttaatatatattattaacactaagcttaattattaaattgaactcgagcttgagtacaaaaattgataaatgaaattaattgaacttgagtagttcgattatatttcgagccgagttcgtatttaaaaatagatgttcgattgaacttgaatcgagttttaaaccttaaatcaaaactcaaatttaacagtattcgagcttagatcgactcgactcgattacagtgttctaaagctccacacataagtgctggttctcattatcctttgttcattgttcttttagctattattggcccatcaaaatgcgatggaaaagaaaacatgatgtattttcaatttcctacaacaaattaaaccccgtttaaagtcgaaaatgataactaagggccgaaagagcgggagccaatgtaata

SEQ ID NO: 908 - DNA, 611 bp, Gossypium hirsutum
tggccggcgatctttcaagtcaatatgctagcaatgcacctagtatcacttccatgtctgaagatggggttgatgttgaaggacgctcagctgaatctttgctaccggcgacctctgatatctctcatttggagatgcagaagagtagccataaagttcacaagcaagagaatcccaattgcttggaattgatggacgactttctggagatggagaagttggcatgtctgccaaatgatgctggtggagctaatgatgtttcaagccatccaggtaattatgggaattatagagcagaaggtaatacgtcacgcaatgctgtccaagatcaggacatcttctctgtgcaagagtttggttttagtccatcatcaaagcagggttcttcaagtgcaagatcctcaacaacagagcttcagcacgatgtggaaaatctgcccttcctaaagcttcggtcgatgatttctttgatatttgagtctcaaactaaggactcgaatttggggaaggttttggaggatatcaaatgtgctattctggaaatacaaggttctctgcctcagcactgtttatatgaaggagttcaagcaggtcatggtccctctgatcca

SEQ ID NO: 909 - DNA, 639 bp, Gossypium hirsutum
tggtcaattgtatatgatatgatctatagcatacgcactaacaactttggataggataccacaaaagtagtggtaacgattgagtaagccatagagatacattaaatggtattggtgtgagaaaagctggctcaaatggaataaaaaactaatgaagagttgcaagtggaggaggaggataatggtggaactaatttgtcagaaggactacaaacaatattgtttacatcactttggaacataattggatttggatggattaggacttgcaagcataaggtgaactatgagggcgttggaacttgtccttcatgatgctttttgatgcttaagccaataaagaggatgagagccagaaagggatagcataggggtagagtggtagaatgattcaataggagactgctacactgctttctttatatctgagcatgtcctccattccctagggtattcggtaagctgtcactttgcatgagagtgcatcgtcatttcttaattggttgaggcatctttaacccaattagatcttgctgaaggactttaggttcactaccttgctttctgttttgctccaaacatttgttagtactaagtgtatagctttgataagttttggctaagagcatatggagtttg

SEQ ID NO: 910 - DNA, 645 bp, Gossypium hirsutum
gaagcatcttgatttgcttaaaagatcattagaggaaggcctggaaaaactggaaacagaaaagaggcaatttgaaggtcgtgtcaaggagtttgaactgagggaaaaccgattcgattccgtccaaaaggctgttgaacagagaagtaaagaactcgaattgaaagagaagaaacaatctaatggccttcactctcaagcgagcagcaagaatcctagttcttttttctcgcgggctgttggaatagctaacacagaatcaggtggattctctatttttatgtatcaattcactgatagctatgttagtcagacttgcatatatgtttcaggtatctgtacatattcaaaacaggatgtgttttgttctttttatgtggttgtggagcaccataagacatgctcattgttctttactttcagtctctttatttcactgtgtttactatttcaaaaccatggttgaagttacaccctatggccaatatgaagattttgaaagcttggtggcttgtaggtgacatgattatgttttgctatattagggcaaccatccgctattttaacaaccctgtgaaggacattttttattctagctgttctagttataaagtgaggaaatctcatttgttgtccgtgatgttg

SEQ ID NO: 911 - DNA, 598 bp, Gossypium hirsutum
gcaaggttttcctatgaaacaaggagttctcacacctggccgtgttcgtctgttgcttcacagaggtctttggagtctacaaaattattccccctttatttgtatagaaatgtttttccattatggattcgtgatttttattgaatggttgtcttcttctcaataggtattccttgcttctgtgggtatgggaggagaaatggagagcgtaggaggaagtcagttcgtgggtgcattgttaatcaagatctttcagttctgaacttgattattgtgaagaagggtgaaaatgatcttcctgggttgactgacactgaaaagccaagaatgaggggtcctaagagagcatcaaaaatccggaagttgttcaacctctctaaggaggatgatgttcggaagtatgttaacacttaccgccgaacctttacaaccaaaaacggtgagtgcaaaatatttatcattgtttcaagttgtgaggggaagaaaatttttatttgtaatttgacttatttgaaaatcaattatcggaatgcaggtaagaaagtgagcaaggctcccaaaattcaaaggctggtgactccattgacatgcagagaag

SEQ ID NO: 912 - DNA, 621 bp, Gossypium hirsutum
ttttgtgatatgatgacagctgcttctaagaaaatgaaggctgctaaacaggaatctgaaaatgtagatgctttagaggggttggatactcttgccaacctagctatcttgggagagggaggcgttctccctgcttctcaggccaccacaaagcatccccggcatagacctggctgctcatgtatcgtatgcattcaacccccgagtgggaaaggccccaaacacaagcagacatgtacatgtaatgtctgccaaacagtaaagagacgcttccgcaccctaatgctgcggcgtgagaagaaacaatcgcaaaaagaagcagacgctacacgcaagaagcagcagccttcattgcccgataaagtagtggacgatgagcctctcccttgcactactagtgcgggaaacagcagtctgaacccggaaaaggttgtcagcgagaatttggatgatgatactaacagggtaaagtcctcgagttcaccctttaaaggccaaattgacttgaatatccagccggagcgagaagaagagctctcacctggttcagattccggcggcacgatgagattgcttcaagatgccaccgacaaataccataggcagcaaagtatcttgagc

SEQ ID NO: 913 - DNA, 620 bp, Gossypium hirsutum
caccttaaaaggctcataaccaaatatatttaattagtgtcaaaaggaaatcaaaactttaccagaaggaaacttgagaaaacaagaattaatagtataaatatagtaataaaaacatcacaggaaagaacaatcataatgcagagccacactatcacacagttacatgcaatgttggcagagccgcatgtaagttccaggcaaagagggtattcccacataccatgattctaatggtatggtccaagaatgtagataattaagctacaatcttaaagagagtgatatttatggaaagtaccgtcactactcagacaagcagtgttattcacaatttcatgtctatatttagaggaatagaaaaaagaaaagccaatggtatttgacccttaatccttgaaaaacttggcatttcagtggaaaataaaaaagattttccaatattttttaaacaattgaaattcaataactaagcatgattttttagctcttataagattgggtttatattccattgttgtcactttcctcaaacaaacaacagctgaaagtgcaaaagttgtatgggcaatttaatagtaaaagagagagagaagaggtctgtcattatagaaatggga

SEQ ID NO: 914 - DNA, 601 bp, Gossypium hirsutum
ttatttattggttgaagggggaggggtatcttcctttggctgccttgctcttcatttctgatggctttggtgtgaatctaatggaatttgttgttataccaggtgatgaagatgaggtaaaagagagagaaactaaacaagagttcaatcttctctgtgattggataaagcaacaactgggagacaaagtggccaaagtccaaatttctaagcgactaagttcatcaccttgtgtgcttgtttctggcaagtttggatggtcagctaacatggaaaggtgaatgattttattttatttttgtttctcgccataagtcaaacatgcactaaatcattcctcgactaatattttcattatgcaggttgatgaaagcacaagcgcttggagatacagcaagtttggagttcatgaggggaaggaggatcctggagattaatccagatcatccgattattaaagacttgaatgtaagaccatttagttgaacttgattgcagatattctagcgtagcattcttttaattagtttgtggagaactaggtgtgtttgatagaacagttatcttgggaccactggaacccaagaaagcacaaaagcac

SEQ ID NO: 915 - DNA, 592 bp, Gossypium hirsutum
cactggttggatgttacttcatccgctgccatgtggactacgctctcctcaggtaccggtgctgttctcgaaacactaagacaagctttgtctacattctctgacaactcaacgtcctttgtatcaggtggactgttgctagtatttgacgactccatcttttcctcgaaaatttgcttcgtgtcactctgttgtctgcaaacaaaaatagaagacaagatcaactttcgttgcactgcaactaaggatatttatgctagcttcagttctatgacaagcaactcgataattctgaaccaagctttattgttccagtataaaagtagcagtaacaaaccatgtcaacaaatcaactaaaaaaggaacatatctgactaaatgatttaattaacctggattttaagtaatttacagatgcttaaagtacatagagaatggattaatcaaccaaaagggggaggaaaatgaaagtgttgtttgcattaccatagtaaaataataataatcacggacacagttcttttctcttaatgaccaatgattttgtctttgattttgcatttctagatcaaagaaggaggagaaggaagtg

SEQ ID NO: 916 - DNA, 640 bp, Gossypium hirsutum
tgatcgttctttggcagagcgttacgaccacctgacaggagaattgaggaagaatattccatcagacctccaatctcagggttctgacatctctgacattgcctctgatctaccccctatttggccgtcctcagaccaaaggctgagtcgtcgtaaatctggcccccgagctgctggcttcagtgtcttccttggttctggtgggagtggctctgatgtgtaccagaaagaagaggatgagtcatctactcgagcggattatgaatcagaatctgatgattcttcagtcaataattactcagttttgtcagggaatgggagtgatcaaggggttagcaggaaaatggttgagttggagcttgaacttcatgaaatgaaacagaagctacggatgctagaggaagaaaatacagatggttcagtaagaggggcaaaatgtaataattccgaacttcttgctagaattagggagtatgaggaaaaacttgaattttccaacagaagaatacagctctctgaagaaaaaatcacctggttgaggaccgagctccaaaaatataaaccactagaggcagctgacctggaatcatctgaagaagaaagtggcaaaatgcaccagactgagcagattgaggtaaaa

SEQ ID NO: 917 - DNA, 612 bp, Gossypium hirsutum
tgtaagtttatacgtatctatgcacatagattttgatgaaaaggaaagatggagtgtagatgaatgatctgcttgtgtacatatatatgtatattctcattgcaaaatgaataacttgttgctgaattgttattagttacagggacggttgaaaggtgcacaattgaaggtttgggccttgaaaatgaattggaaaaatctagcaatgcgttgttaggaagaggatgttctccaggttggagcaatgccgatagggctctaactgagtttgtcgaacagaatttatttgactattcgaaacggagattcaaggttggggccagctcaacatcacttttgtcgccatatcttcattttggagagataagtgtgaggaaagttttccggtgtgtacgtatgaaacagatactatggcgaagagaatggaagtctcaaggggaagagagtgtgacactatttttaaaggctatcgggcttagagaatactctcgttatctttgtttcaactatctgttcactcacgagagatcaatattgagcaacatgaagtattttccttggaatgctgatgcgaaccattttaaggtatggagacaaggtcggacaggatat

SEQ ID NO: 918 - DNA, 598 bp, Gossypium hirsutum
actttttttttgtgataataaaaattaaaacaaatacaaattacaaaagatagtccgtttctcgagtggggaaacttcataaattcgtaattcatggcttccccatgtgccagcttgaccagactattaatttcttgattgccccctaaaatactccaatgatcaaactgtgatactaagtgaaaacccctccttataaaggtccagttaaatccttccctattactcttccgaataaccttagtagcctcaagactatcaatctagattctcaagtgatcatagacccgatcaattaaaatacctaaactatccaggatgcccaaaattcaacttcaaacacccccaaatatggatgtattcaagaatgtatatatttaaaggggaatccacttaaaatttaactttatatcattatgtaaattttttatacgattaatatttaacaatttaaccatatatcgcattattttgcttaactgcagagtatgatgaggatattcatatatattttatatcaggcttgagacagagagattgcttccactcactaatatgaattgaaaagagaaaattccgactttgacacagcctacct

SEQ ID NO: 919 - DNA, 662 bp, Gossypium hirsutum
gtgttcttctttatatctcacttgttgaaacatttacctttttacaggcaataatatctatagccattgaagatggtaaccatcttcaggaagcctgggagcatatattgacatgcctgtccagaattgagcatttgcaactgttgggagaaggtgcaacaactgatgcatcctttttatctgtgtctaacactgaacaatctctgatgaaaaaaggaactctccagaatccagctgtgatggcagtcgtcctagggggttcatatgatagcaccactgttggagttaatagttcaagatttgtaactcctgagcagattaaccacttcattgcaaacttgaatttattggaccagataggaaatttcgagttgaaccatgtttttgcacatagccaaaggttaaacagtgaagcaatagtggcatttgtgaaagccctctgcaaagtttctatgttagagttgcagtctccaacagaccctcgtgtttttagcctcataaaactagttgaaattgcgtaagattctgatctttttcttttagaaaatttcctatacttctatctccaacagatcctcaagtttttagcctcatcgatcaatttgtcattgctctctccagcagctgtctatctctccccctcctcctttatgctcctatga

SEQ ID NO: 920 - DNA, 617 bp, Gossypium hirsutum
cattggtggcatgctaaatgccttgtgatgcatctcaatttcacgtagaagacgtagcactccgtcaccaccaaaggcagtgacctgtcaaagaaacatggaatagaattacagttgaaagatgctcttaaaaatgttcaggggaaaaaagcacatccatcctcatttgtttcatctaaaaccataaaaaacaaagagttgcccagaccttgttggtttgatgtagacggagctcacaaatttgatgatgaacttcacgctgctttctttcgtagtaattaatctataaaagggaaaacaggatcagtgatgtgaagtaattcaagaggaaactatttctataggctaagagaaattaagaatgaaattagaagaactaaatctggaacaaaagaacaataaaagcaatttgcagatgtcaaaaataactcctctccacacaactgaccaggttaaaaaattaactgcagtcaggagtaataagacaagggtattttgaagcaataaattgagaatgttccaaaacccttacttggcatgttaaaatgcaagaccttcttatgttccacagtcacttatcctctaaaacctttaccagctaaagacaccattgaagg

SEQ ID NO: 921 - DNA, 609 bp, Gossypium hirsutum
  misc_feature (594)..(594): n is a, c, g, or t
cttcaattagttgcttatttcttcccttttccccccctagaagtgtagatgttgacatagttttttttcctccaggagaaatgggcgaagaatctctatattgcatcagtttgttatggtcgaactgtttcatgacctggcaaagttttgttcagatgccattcattttgtttgctgaacaagggacagatctactgcttcacttttagggaactaagctctttagtcaagattgattgatcactgcatttgggagttgatgtatgcacaattcaacttttttgccacgaccatgtggcatctatttaaaaatctgtgcactgtcattcaatcaagtcagaatctctgtgagctaatttctgatcttttgtaccattcggtgcaacatatgttcttattgtatagttttgaaatcataatttcttggttgaaggctagtgcacaggttaagttctaattgttgatgggtgtttgaggaaatatcaatggcgattttatgctggactcttaagtgctttgggtcatatgatctgtattatgtttagtgtctagccttgttttctggactataaaataattatgatctttctcccngttcatggatgtctg

SEQ ID NO: 922 - DNA, 620 bp, Gossypium hirsutum
aagtttacaatatggtttctcattccttatgcatatttcaattctgaaaattgtgaaacccctttttacatgctgtaatttgatattgatagtcttatttccattgctctgccttccaccctagaaaaagttcagatgaagggaggaatgcatgtagtgcttatggaacacccatcaaatgaaattgttggtaagattcaaactgtgatggttgaaatgtgctaatgaatatataaactgctgaacccaaaccatgttaatgccttccaattttcagtccacagtgttaatatattacatgtgtcattaagttaaaaatattatgtctacgtttaaaactcaatatattaatattcatatcatatcaaaattatcagatcataggttcgatacggtgggtagtagtcacttttttagaaatttagtaagttagaaaatagttctaatatttggcaagtcaaattttatttactttcctttgtagaggcccaatttgacctgggtccagaaaataatcaaacaaaaaccaaaaataaattaaaagttcagttttttttacaatctaaaattgcaacccaaaaagcccaaatcagacccagacccaaatagctaaacccagc

SEQ ID NO: 923 - DNA, 601 bp, Gossypium hirsutum
gtgagtatgctgcattataaaacaaaaaagcatttatcaacatctgccaattgtttcacatgtcaaaatactctgtgacaagtataagtgcttgaaaatatggcgcaggaaaaaaatgcaattagactgaaatcctgtaccttgatacagaccacattggattccaactttctggatgaactgaaaaagtacatgaacaaagttaaaagggaatcatttataaggatatacataaaaaggaatatctaagttaatcttcaaaagacttacaatcactcatggacaagcatattttcttctgcgtcataaaccgtccattgggggtgatcatgctacatgaaagaaaattttaatttgatgtcagaaagagttgtgtgttttctatcataaagtttgtaaagatcaaaaccgcaaaaaactacatacgtgattccaggaggtttgtagggatactcaggagggaacttgatctttccatagtaatatccaccttagcaaatcaaattaaagaaaaagaacaaagatagcggcatcatatagctgcttccagacacaacaatgagtgagataaaatcaatcacaagctatcatgggataaact

SEQ ID NO: 924 - DNA, 639 bp, Gossypium hirsutum
gcacaaactacgccactgtcacataggtctccgtcaccgcctgtatcacataggtctactactcctgaacagtcccagtccttcacacctgctccatccatcccctctgctccagtcaatacccatgccatgattaccgggagtaaagctggaatttttcggccaaaggcgtacctcagcatctcctctcctgggtctagcactgtacccagtaatattcatgatgccatgaagtctgaatgttggcaggcagcagttcatactgagttacaggccttgattcgcaacaacacctgggttgtttgccctctgccagagaatcgccaagcagttggatgcaagtggttgtttaaggtaaaaacaaaggccgacggttctattgacaggtataaagctcggctggtagcaaaaggattttcacagcatgcaggttttgatttccatgacacatttagtccagtggtccgggcttctaccattcgaactgttatcgctattgctgttatgcaggtgtggtttttgaggcaggttgacattaataatgcctttcttaatggtgagttatctgaagaaatttacatggagcaacctccagggtttgaggcttctagtaacactggacagaaacttgtttgcaag

SEQ ID NO: 925 - DNA, 560 bp, Gossypium hirsutum
tgtggtatgtgagaggtgcaatctcaatttctccagctaaaatactggatattttagataccatgaacaaagaagaaacaaaaacaagtggatgtctactttaaaagcaagaaaagggtagcttacattcataaaggtagacacatgaatacttcaaaaaaacaaaaattagaatgcatagaatacaacaagaattgcagacaagtgaggaaacatgcgaaaacaaagaaatagcatatttgttggcaaatggcaagaaaggaactaaaaggattaccccagatggtgggacagggtttcgagtgaacttggaaccaccaggagcccaaggaactgcaaatggaattaagatgttaagcttcaaacagcataacaggtttaaaactggaaagttagcaacttataaggaaatcgcagtcaatcagtcaagtgtcacaacaagagcaagacttaacagtaagaaccaaagtattttttaccaaatacaagaatgtaagtagatggcaccaagcaaggagaggtgaagtaccatagtactagtttggtagcatttctcttcc

SEQ ID NO: 926 - DNA, 632 bp, Gossypium hirsutum
ttttcatcacctcttcaataaattgccactccactcgatcgtacgctttgctcatatcgagcttaattacgaaccccttttttggcccgttctttgtactttggagataatggactaactgatgggcaattaaaatgttgtcgtggatcatcctccccgaaacaaaagcactctgattttggctaatgcatgacgggagtgtttccttcaaacgatttgcaagcactttggcaacgattttatacaccatcctacaaagactgatcggcctaaaattagttatatccaccggctctttaattttagggattagaaaaataatagtatcatttatacaatccacatttttaacacccctaagaatatcatgacacagcttaataatatcttcccccaccacttcccagttttctttaaaaaaattccccgacaaaccgtcaattcccggagctttcctaggatccatttgactgaacgcttccttaatttcgttttccgtaaagtccttcagcaatctgtcattttcttcacctgtaatacagctctcaacataatcaaggtttagcatagtattagaatttaaattggatttgaataacttttgacaatactctctgatcgccttgctgata

SEQ ID NO: 927 - DNA, 565 bp, Gossypium hirsutum
gctggagtgtttttgggattccttataggagtatcctttccaacactttcattaactaaggtacattaatcatcctcactacctttatttgttattgacacagtattatttcatttccttttcccttttcttatataacacagaatacgagttttctctgatacatttaaattttcatagataaatcttccatccagcttattcccttccgttgatctaacgtatattgaggacaaacattctggtctttcaacacgaaaactatttagtgctttgagctctctcaaggatgataaggttgtcatggcagcatctaacaaatctgagaagacaaaggtaggtcctctttatttcgattatacatgcagcattacaattcagcatctaaattgtaggctggccctgaaattatgaaaattttcgactgaattctaccaaagtgagaagatttttggacaaaaacaattctttagaaccaagttaaggatgtcatttacatacataaacactgttgctctgattctttatttttcttgaagtatcatccgaacatggatataaggga

SEQ ID NO: 928 - DNA, 444 bp, Gossypium hirsutum
aatcacacagtctattacagaattcaattgcacatttatatgttggtaggtattggatatttagccctactttgtatgaatgaccattccagtttctttgaatttatgctatacggatagtcagggcataactgtgctgcatataaaactgaagtgagatttccgcttcctattagtttttgaatattttggttcgtatttttcatttttattgaagatgcattgagatctactatgttaatacgtgcagtgaggcactaataatagttctgcattttatcattcagtttcataagagtactatttggttggtcaggtgtgggagattgtgtactcaaaggatggttcagtcaaggaggtttcaaaagctatgcaacttaaagggcacaaggcatgtgatttcactcagtagtgctaaagcttatttgcatccttcaatatgct

SEQ ID NO: 929 - DNA, 640 bp, Gossypium hirsutum
ttgtgcttcatttatgtcgttatatttactatgcaaactggtgcattcttatacacttcgttattactaagatcatggcaattttcttttgtctagacttacataaattatgatgtgagaatatgcatgacaaattgctttatgtctgctatgtttatgtgatgcttgatatcagcatggatttctacaagagattttagaaaattctataaaatatgtgaagtaaatagcaacttaggcatttataagagttatgtaggttgaacgaagtggggttattgttggggttatgttgtgtttgtataatatcttttaagaagtctatgttctgattgatacttacagaagtacagaatactggaatgtaagagagtattagggaggatatgtttctgatgtatgaacacgtgatctccaggttaaattgctagcttcttccatattgccataatctcggagctataatttttatagtatagttcttacatatatattacaagaagtaccacatgactggatatataggaatccaaatcagtggaaccactcatgagcttctacatcctaggtcttcctgcatttggcttatgttctttatgtagcagtcagacagaatgactatgaaattacgttgatactg

SEQ ID NO: 930 - DNA, 611 bp, Gossypium hirsutum
ggtgtagccgacctgcatagagaccttgaagatttctgtacctcttccgagttatgtgcatgtgcaaattccttggctgattcacttgcaaaggatagtgcttggcgtgagagtttgttcactggttggcggtagtttcctagtaggtggtggcctggtttggtgtattctgttttctggtgtattacagtttggttgtaattgataaattgttttgttacagagcgaaaagaaaaataataatctgccttacagaagaataatcatatatatatttcaaaaagagggaaggaggtttggggggaggaggaaaaaagtaaccaggtgcatctcaatctcaaaagcaccatacatctttaaagtaataaacaccaaaaccttaccaccatctgtcaataaaatatttagcatagtgtacacagtactaatctttcagcagcacgagagctatagcctccccaacattctgctcattaaaacaaccaatgtttcttctttggcttctgaattggggcacctggaacaaagacgttagaacattttgtgcttgaatatccaaaatccatataggctcaacctaaaatcatgttttcaccctaaccttggatctc

SEQ ID NO: 931 - DNA, 652 bp, Gossypium hirsutum
cagaatctgaggcagaaaagaatatttctcgagaaatctggagctcgttgcattgtgatgccatgccatatctcaaatgcatggcatgatgagatatctgagagctgctcactgcccttttttcacattggtgactgtgttgccagggagctcaaggaagcgaaattgaagccactggatgctgggagcagtgttcgaattggggtactttccacctgtgaaaccatagctgttgctccatatcaacaaaaattacagaatcaggtatctcaatggtctatttgattctggatttgatttttttttctggtatcatcaagtttatatacattgtacgataatagaaagctaaatttgtgtcctaaaaactttgggtcataaaatcaacaatcaaattgttagaccaagcgcttagtcatgttatcagaggaaaccggggaactcttcaaattcaagtttattaagattttattcgccattgtttgcaaaatctgttcctttatttggtttggttggaaaacatcatgtgaaacaactaatttaagacaaaagatgccactaggaagaatcttcactatgttcatccaaaagtacacattttttgcagggttttgaggtggttttgccagacaaggaaacgagggaacatatt

SEQ ID NO: 932 - DNA, 664 bp, Gossypium hirsutum
aggccacgcacatattcagatggttctgtgctggcatgagtgctactacaagtgtccatctcacctacagatgttcggctaggagtcattattgaatcaatactagataaactagaggctctaggaatgccatctgcgtttgacctcctcataatgtcggtgtacaagtctgacatgtcaactacatccctatcagttgagattttaccttctcgatcctctttggctactgtaaggtactccacttcatagtggtattttggcaaacaaaaaaactttaggaagccagcaacaaaatatcgtagtggacccaattatttctgatatttctcagatagttctaagactgcaagacataagaaaaagatacaaacagacagtttatccttcccacactaggagataataaaatacggaggagttactctatgcaacaccatacatacactcataaaagattttcttcattcaaacattatatatgcctttcctgaatctaatgtgccttaggcaacttacagccaaaagattcaaagaaaagtagtaaagatggctagtctagaagtagttctgacgtaatttcaattataggcacaaacttatggtataacaacgggaaaacaaccaaggatgaggtacagaaaaccaaggatgaggtacagaa

SEQ ID NO: 933 - DNA, 631 bp, Gossypium hirsutum
atcaccccaccactccaaattggaaaatataatacaacatttactaataacttcaatgcattcaatcaaattatggctacgctgattcctttcctacccaactaatggaatcaagcaataaagcaaacataatttacttgagcttccactaaattttgagcagctaaaacattttaaaactacaaaattatccccaacaatatttttttcaattcaagtaacatcatacactccaccacttaatatattttaatataaagtgttatatataattcggaaaaatatgattatttgtcacatttcattaaacaataagtcttcgatgtgataaatgatcatttggaactttcacaagtcatcaatatttaaagaaaactgtagtcatcatgcactaataaataacatcatttttgttaaagtccctatattctaagatttatttatttatttatttattaaatttaagatcattacaatatcattttcttatttcaaaaaatatataatattcaaaattgacctaaattttaaaatctaaaaaataaaaaaaaaataaaatacagagacatgaagcataaaaaaagttaataatattttaacctatatttattaaaaactgggctgctttgtt

SEQ ID NO: 934 - DNA, 573 bp, Gossypium hirsutum
  misc_feature (19)..(19): n is a, c, g, or t
  misc_feature (561)..(561): n is a, c, g, or t
ctgttgattctgatcttanagacatttggagattaccctgaattctaatttagatgaatctttaagatccaatttgcattgtgtttcaaagtcaaaactattatcaagctcatcagaatcatagtcagacaaatatttgttcaagtcttgcaaatcaatagtcaaacttccctttttacatatttagtaatacaccagcacaaacttatatcaaattttaagttaattttctttcccaataatggatttaaaattttatctaaattcggttcaaataaaaaatattaaacctaaacttgatttagttagcctatattaaattttttatataaaaataaatttaaaaaatataatataccaaacagactaaaaatattgaaataaatgtttcctacaaatgaaaaatatatttaaacaaaagtctttatactgaacaatactaatataattgtaacaaaattaacaatagaacaagagttatacaatattcaaacaataataataacttattagcaatataatagagaaatggtagtaaaataatagcagaaataaaaaatnaaacaaatcgag

SEQ ID NO: 935 - DNA, 664 bp, Gossypium hirsutum
ctcttgtattctgcctctgctgtggaacgtgacacaactgactgtttcctactactccaagaaatcggattacctcccaagaaaacacagaagccggaagttgacctgcgattatcagcatctgacgcccaacttgtatcagaatacctctcaagaagcaacttcaaggttggagtgaaatataagccaaaatccaacgttcctctcaggtatctcagaacccgtttcacagctttgtaatgagtgtccaaaggcctatgcataaactgacaagccttgtttactaaaaacgcaatgtcaggtcttgttatgaccacatactgcaaggcgcctacaacacttctgaacagacgctcgtcttcaacaggagtcccttcatgagcagacagtttgcatgaagtcatcatcggagtggaagagggttttgacttttccatggaggcacgctgtaataagtcgagaatatacttcttttgactcaaaaagacaccatgaggagtgtgagtaacctcaataccaaggaaatagcttagttgtcccaaatctttcaaagaaaaagtatcatgtagagctttgacaaatcatcaatctcactcgagtcagtatcagttactataatatcatcaatatatacaagcacatagaagagctgagtgcctgtata

SEQ ID NO: 936 - DNA, 623 bp, Gossypium hirsutum
tgaactgctttcaccagcagctgcggcagcttctgcctgcacatcggttaattaaccacccttatttccattatttttcgtcaaactgaaacttaaaatggataagataaaacataatcagatgtgtacctgagaagtaacccttctactaacacttgaacctatcacaaacctttccctcaaacttgcagcttcagtcaagctatctctagcccgttcaagtccatctgttatatattggctgacctaaaaaaatgagactattaagtaccatgaaaaacttccagaggattgacatgcttaattaccaacttacttggtgcaataggcaagtgaacactgatcttacattggctgcaagtgtagcaggctgtcagacatattgcaataaattagtcattgatgacatttatgtcataatatatggtttcttcaatctgcccagcttttttttccttttaccacactagcattctggttcatatttcatatatttaatcatgtcactgtaggcaatactttacctatcatgtaccagtcattgaattactcttatattagcccatttatggagtttaaaaaaaacccatggagtgaatagacttacgcaacttcaagagcaa

SEQ ID NO: 937 - DNA, 615 bp, Gossypium hirsutum
caatttggataaggacagtatattccatctgagtgaagaacatttgcttctgcttgtgctctttctaaagactcataggaagcaagaggaagaaatgatctacactcagcagtggagatgtaatatttgcattgtgactgagggcacctgattggaactttggacgactgcagtttaccatctacatgagttctcatacaatgggaacagaatctatgggaacacttcatggtgatcatcatcaatgatggcttgtcctcaaagcaaatagaacaatattgaagtgatttatcacccttggcaggagaagaaacaactcctattgctacttgggctagctgcaatggcctcaaaagatcggtgcttggaacaagtttcaggacaaactcttccaaattacgggaatgttccatgactctttcccttaacgccatcaaaagtggattatcaaggttctcctcacatgtaatctgccagaaattcatgtcagtaagctaattcaaggtataacataaaagctattcagggttacaataaagattataaacttcagactttctgtctataaaataatcattaaggatttttttcccctccagtgattcatcataagca

SEQ ID NO: 938 - DNA, 628 bp, Gossypium hirsutum
  misc_feature (443)..(447): n is a, c, g, or t
  misc_feature (449)..(449): n is a, c, g, or t
  misc_feature (451)..(471): n is a, c, g, or t
  misc_feature (478)..(480): n is a, c, g, or t
  misc_feature (483)..(484): n is a, c, g, or t
  misc_feature (486)..(493): n is a, c, g, or t
  misc_feature (498)..(501): n is a, c, g, or t
  misc_feature (522)..(527): n is a, c, g, or t
  misc_feature (531)..(540): n is a, c, g, or t
  misc_feature (542)..(544): n is a, c, g, or t
  misc_feature (561)..(562): n is a, c, g, or t
gcttgtttctcttaggtgagaagctttttgtgccttgtgcctcgggccaatataagtgttaatgcacctgttgcatgcctgctccattgactaaaatgaatttgattgtgatattgtttatctaattgcagttatcaagaccctgaaggtaaaacacttattcgagttacgactgtgacaagacaatgggcagacatttctgttagtactgaggttagtatagattgtctcatttttgtacctatgattgtttaattaattgtctaaaacaattaagcataccccctttctccttctcctcttttgtgtgatgtgatatatgtgccatttggggacatattaaagaggttgtgcgcctgtgatgtggatgtgtttttactgtgtgtcgtgctgtgaatatgagatagaacgtgtgtgtgagagattttttgtgattatatttnnnnnanannnnnnnnnnnnnnnnnnnnnccctctnnnccnncnnnnnnnnatgcnnnnatcctttgtttgcacagaatnnnnnngagnnnnnnnnnntnnntcagtgtcagattttcnntttctcttgaatgctatgattcttgatgcctctaatctgatattgcagacgtgatgcacggaaggc

SEQ ID NO: 939 - DNA, 649 bp, Gossypium hirsutum
agtggaagtgaagttcacttacttaattgtgaattttttattcactaggtatcaaacttaaaagaaaaaaaagatacactatacaaggcatatgtgtatttaaccctaacaaatacatgcttggtaacgttaccaaaagtcaaagataaacacaaaacttattaaagataaaatctccttgacataggcataccctcgggatgggaagagaggctagcagaagaaacagaaaatcaataaaattgaaaaacaaaagcagatcatccatgtgtcatttcaacaaaattgttggaatttcgatactaagaaagaaagaattgcagagaagaaacaagaaattcagcaacaaaattgtctgctaaggtttttattgttttgcactcatatattttgaccaatgtaacaagggtatttataacaaaaaaaacttctaaatatggaaagaaataacaaaaaaattttatactaataaatgttaaatatattgtactaataaatactaaatcttctaaaaagaaaaaatattttgtttaacttaacttgtaagcaatctctttaaattctgttcatatttctagttcaccaaagttgaagtgttcgccaactttgcatgaacggtcatctcgcaacactccctccttgacccttc

SEQ ID NO: 940 - DNA, 615 bp, Gossypium hirsutum
agtttctatatatttaaaagtcataagtattgaaatactttaatattagaacttgggttatttccagaagaggttcccaaattatggcctaatttttaaattagtcttaaactagaaatcgttttaattgagtcgtcgttccgtgatgcggagcatattgtatgatactgtctctatttttagcacatcatatacacaaactattcatggagtaaacataaatgtatttgaaatttgattattatattttaattatgctctactttatatttaaataaggatttaagatgtgtttaattggatgaaaaagtaaaaggataaaaggagaaagtaaaacgtggaaagaaaataaaatttaattatgcatagttgaggagaatagtgaaaaggaataaaatgaaaagaatgattatttttcattttaatgcatttctcgaataaatttattttcttttcttatattttcaatatctcttatcaaccacacttgtagaaagctatttttctagtatttaccttttcaatttttcattttataatattgttgcttgctaagctaacgatagaaggaagcaatttataatatttttacttgctaagctaacgatagaagga

SEQ ID NO: 941 - DNA, 623 bp, Gossypium hirsutum
gttttcagctatggtgtcgttattcttgaagtggcttgtggtaggaggccaattgagagagaattaaacagccagaaaatggtgaatttggttgattgggtgtggggattgtatggtctgggaaagatcattgaagctgctgataaaaggctaaatggggctttcaaggagcaagatatgaggaaactgctgcttgtaggtttgagctgtgcacaccctgatagtgctgagaggccttcaattaggagagtccttcagatacttaacaatgaggcagatcctatacctgtgccaaagatgaaaccaagtctcactttctcttgtagcttaactgttgaagaccttgtctcagatgacgaagaaagcaaaacaactgcttgagggtgagcagggattcaaagctgacttagagttagatttcattttctaatatgcaaatttattttattgttttaagaccctacattatagtattacttcaattttgtttacttattttgagactaggagttcattagtctgagttcaaaagtactgtattgaactatgtggtctctgctgtaacctgaaaatatatttctaagttttgagataaacttgctctgatctatcatgttccttca

SEQ ID NO: 942 - DNA, 570 bp, Gossypium hirsutum
cctgtgccgagaggagttggatgagacaaggccattgaaacccatagcaaatgccaaaatcaatgatgtggagtgtggttgccttttcggccaattccattatccttttatttgcatagaaattagacatcttcttaaaggggcaagctaaaacatacactccataagcttttaagacatcagcagctgatgtcctgttgcttagcagatgtgcatacaatggcgcccccatgccagccaaacgtgttgtaagggcattagcaaagtaatgtgccaatctttgggttccatctccggactcagacgagtgttgccttatcagtttcagcatctcattagcagtcctttggtcattgactgctaccgattgtgcacattgagtaagtagactccataaatccactgcttcacttttcttttcgtttttcttccgccggccattagaccgttttatctgcctgtgctgcgctgagttgccattaagagaacactttggagagtcctcattttcacctttacaaagcaatacatcgtcgaacatctctgtctgctctgaatcttcaaacaaaa

SEQ ID NO: 943 - DNA, 648 bp, Gossypium hirsutum
tatatatatttttcactttgttctttactatttttataacaaaaattattcatattagtaaaaatcagatcaacccttacataaaaaactgaaggggattcaaacagttaaatcatgtaccatagtgtattcgattttccaataacccaaatgggaaaaaaagtaaaagagaaaaaagaaaagaaaaaaatagtccaaaatttattgttcatcttcaactgctgaagccaaaccagccacgatcttaaccccaatctgtgagctcctgggatttatctgaggtggcttcctttcttctttcttcacatttttttcattccgttcttcttcagaactctccgacaaagcaaatatgggttcccccaaatcagcatcgtccacggagtttttaccctcaggattcaattcaaacaaaggttggcattgttctttagctttgggatcaagctcaaatgctttgagcgttccggttatagatgttgatgttggagtaggtgaaggtgaaggtgaaggtgaaggtgaaggcgtgattcgattataaggagaaagccatttggccttgatatactcggcctttcgccatggaggaatatgcattcccttcttcttcaggcattgctttaccgcctcggaaacagtaacaattat

SEQ ID NO: 944 - DNA, 607 bp, Gossypium hirsutum
tgcagccctctctcaacaatgatactatatatggtgctctaaagcagtactgttcaataaagggctgtggagcaacgctctttttggctacttcccagggtttttcacaaaattccctacccttctctaatacatcatcaagtgcagcttctggagacaaattgaagaaccgatatacaacaaaaaaaccagataaagcatagaactggccataaggacgaggcaagctatccggaagtgcacatggttgcaaatcacaatcaatacctgggtatagagtcgaccattcagataaattgacagaagctttggcaattgcactgcattgctcccaatttggagcaccagtaagatgcacaggtattccagatttcccccctttgtccaaaattttcccttgaaccaaaggacttccactttcttgatcttttgaagcacattgagaacagatatattgttctttgtagccagagtgcaagcaaggatgtttaatttctatcattccattaaccagattggcattggagccatctggaaggctccttaataaacgaactacagacttgtcaaatgcatcattcaacccatagccagaaagagagtaagc

SEQ ID NO: 945 - DNA, 414 bp, Gossypium hirsutum
ttttacttgaatatatccgttgattgcaataagcgggagtagtactaggacaataaatgccaactgccaacatgcaacaaaagcaatgactaaaccagaaattgcagatgaagtattttgaaccagctgagctagtgcatctccaaccaaggcgcgtattgaggctgcatctgctgatagccttgcaccgattgcaccacttgaattttctggttcgtcaaaccacccaacttccatgcggaccactttctcaaaacacatcgatctgattcgttggattaatttacttccagcgatggaaaagaagtaattttgtgctggacataccacaaatgctgccgcgccaagggccaagaatatcagtgcccagaaccttgaatcttctctcaattcatgtggtttaaagaatgcgtc

SEQ ID NO: 946 - DNA, 581 bp, Gossypium hirsutum
tttgtgtttcattgtagtgccctacaggcaggatctcattcaagctttatgattggaatccggcagaattcccacgaagacttcggcaccaagtattttaaagaatattcttacagtttagtatttaaataaatataaccatttttgctgttagagacctgaggaattgattgatacatggttaacttaattgcagatttttcaatggttggctgatatgcctgttgagttggaaggctacatccgccctggttgcacaatcttgactgtgtttatttcaatgccaaagaatatgtggatgaaggtaatggttcaatcagttggctttaatttaaatcattttagcttatatctggtctatatttgaccaggcagactggtcatcacacacatcatagtcgaatttgaagccaataacataagagaaaattctttgtttacatttccttaactacatggtttctagaagtcttgagttttaatctggtatttgtaacctctatatatttatcagcaacaattattatttggtattatggtttattagattaaataacttagaatgtacataagatacaata

SEQ ID NO: 947 - DNA, 550 bp, Gossypium hirsutum
cacgtttacttatgccttccacccataaccttgctcatcgtcaaggtcactgttaaaaaaaccactttctgtaaactcatgagctatatctggaactatatcatcctggaaatggagatgattctgaagcaaatctggtgctccccgcttgaatacattgttgccaccagtagctgaagagtcgctgtttgaagcagctttaaaactgttgctttgacttggtgcagggcctgcaacacctcctgatacattagaggtagctacagcagaagcaggggcattacttccaaagcatactccatttcttccctcacttccagtcccattatgcccactcaaggattgctgttgacctcccgtattgttattagacatctcatggagtagccggtggatcatttgttgttgtaaaacctcgttatcctgagaagactctgggtggttctgttttattaagtcattagtgctggctgtatgctggtgagctgctaaattggggcttgataggccactaacaggcagggactgcatcgatcctggtaactaggcc

SEQ ID NO: 948 - DNA, 617 bp, Gossypium hirsutum
ttgaccacaaaagcacgagacagcaactaaaaaggcgctcaaagttcagtgaggctatactacaaagcaaggtagtcaataccacattagtggacacactatttttccacaggaattggttcatactgatatgagtctggttcgatgtactgctttcgttttatcaatattctcgaaaatatttaatttatgcatataaaaatatatttacaaatatggaatgaatggtaactaaatttcaaatataaaatattcatcaattatataaaatgctcatcaataaacttcacaaataaaaacccatcattcaaaaataaacaaggaaaaaaaattatcacatgtattaaacaagattatccaatacattaaacatgattatctcatatatttaattttacatttttttagacttcattcatgcaccagccgatacacattattccatggtatgcccagaattgggtggaaagagctggtgtaaccggtacgggccagaattttcaccagtgcaaaaaaagagaattggctgttccgatttactgttgaaatggtgcgcaccaaccagtatagccggaacagtgcaaaattggctaccttgccacaaactctacattgtt

SEQ ID NO: 949 - DNA, 631 bp, Gossypium hirsutum
ttattaaatgatgatggggatgcagctacggcgtgctttggggaagatcaaacccagttcccatcaagcaatctttttgcagcggcgggtgatggaatatgggacagcggagcatcttgtggaagacaatacctggtgagatgcataagctagaaagggaagagaaatgaaggttttaccatcaaacttattcattaatctcgggaagttctacatcaacttcgacctccccagagatagtagcaagatgaaatcaagttgtcacttttcaattctttagattttgctttttctttgttaaccattattaatcccaaatttcaaaggaaaaataagattaaaaagtattagagtcacacgcgtggcgtactggcgttgtgaatgaagctaaccaattgcattataggacgaagcatgaagtctttcatagaacacgatcagctaaagcaagagaagaagaaagacaattgcagcaaaaggacccaacattattctatcatttaacatcaactccgacgaccagagctaccataccaaccgcccgatggggagtgatatacagataaatacattactgaaaaaacttatttttctataatagaaaacttacaagtcattaaactctcccgac

SEQ ID NO: 950 - DNA, 652 bp, Gossypium hirsutum
attctcgaaagtaatacatgttttttgaacgtacaatgcacttgaaacttgcttacttttacattgacttgcgttttctcaatttactactcgctttactccgttaaggcaaattattatttcattcgttcaaaactcatcgctcaatccttctcttatatattttgcaaaggtacgccatctgctttcatttgttctgtcttgtttgtttacagaagctttactttctgctcatttttacttgtacctttttcttctgcttttgttttgatttctgttgtggctgtggtttttcagtttacttgctctttgctctctcaatggactttgttgttgccatcgttagctctattgtcgctaaagctgcagagtatacgatttctcctatcataaaccatgtcaaatacctttccaatcatcagcaaaatgttgagaccctcaagcaccaagctgagaagctgaaagttgcaagggacagagtgcagcattctgttgatgcagctttacgaaacggtaaagagatcgaaggcgatgttgacaaatggttgtctgcagtcgacacaaagatccttgaacaagtagagaaagtgacgcaagatgaagaaaaagcaaagaaaaagtgtttcgttggtttgtgtcctgatttctggac

SEQ ID NO: 951 - DNA, 656 bp, Gossypium hirsutum
agggaagcttgggcaagactgtaacaggaggtcaagaggctagaaaggttaaaggggattgaaacagtcatcagaaaggacagtgtagtggaattgcagccacgttttaaacccatcatgtatgacacggtaaaagcaaagcaaaacctccattgccaatggccaagaacaataccagaggttttttacctttggcttcttgtactttgggaaatgagattttttgtttgccaggctttttatcaccactttatatgttccaacagtcatgcatggcctctacctcccttcatctctccaacattgaccatcagagttactctcagtcaacatccatcatttttgaggttttgaagaaatggaagcaagcttgttttggtttctgttagctcttcaaatagtagtaacctggagttgtgcaacaagcaggtctttaacaccagactatggctttggagctaatcaaccaggtttgccaatcatcaccagaaaaaggggtccactcttttatctttaaataattacgtgtattaagttttaccttactaatcacaggccagaatccagagtctttgcaagttcccttgggaccaagttcaagctcaaaagaagtctcttcacagagttacaaaagcaagcaaggaaagggtaacata

SEQ ID NO: 952 - DNA, 636 bp, Gossypium hirsutum
atctgatagctctctattttgcttatgcaagtactcaactctgtccacaaaggttctaaggcggcattaatgtccaacaccttagaaagagcagtagaacgctctatttcaggaagcagctgcagatccttttctctctcagttattgaagaaacaagagaactcagtgcctgtaagacccttaaaattgcagctccatcagaagatattgagctgagtaaagctttcaaagcttctccaaacatgcgtaactcatccatggcagatttaatcagattttgtacagcatctgctagctcagaaataaacagatgacagtggctaggagcaattgcaaccaacttcttcattacctcagcaaccaggccatatgcattatctgacaatctgggaggggaacagaacatcagactgagcaaatgggaaaaaagcactaaatcatattgaaatttgacaatggaaagataataaacgtagcaagtgcaaaatccataattccacaggtcacagaaaatgaaaaaagaggacctttcttcaattgaagcataataaagaaacagaggaaacacgaacttctcattgaggaaactgctaaaaccaatacattgttagacatataacttacccttttcccgt

SEQ ID NO: 953 - DNA, 621 bp, Gossypium hirsutum
  misc_feature (613)..(613): n is a, c, g, or t
aaccgtaagaagtccttcacggtatgaacgtttttatatgccaaacgtttatggaaggctccgtcttttgctattctttcgagacgccatacttcgtcatgaaggagcggtgggtagtgcttcttgtacactgcatacaaataaagtttgtgttactcgaatagaattatacagagaatatataggattgaagttgaaaacagagtattcaaactttacattctccccgatgatccttcaccatgaatgcatcacttgtagcttccctgattgtcacttcaccagcactcctttgcacaattctagctcccaaccggaactttcgacatcttatccagctcgaattgtcggtgaaaatcacattatcaacagtacctacaccatctaccaacgtaatgttgagatctccagttaccaacggccttctaccttctcgttcacgaagaacactggcattgaattcgttttcggtccaatcttgtcgttcatcagtgccaaactcaccgttaaggacgacaatctcgaccttaatagaagacagcgagccagaggagaccattgcctggctagttgcatcaactaggataatccgaatgggattaccattctcacnctcaacct

SEQ ID NO: 954 - DNA, 624 bp, Gossypium hirsutum
  misc_feature (49)..(52): n is a, c, g, or t
  misc_feature (149)..(149): n is a, c, g, or t
  misc_feature (157)..(157): n is a, c, g, or t
  misc_feature (325)..(325): n is a, c, g, or t
  misc_feature (586)..(586): n is a, c, g, or t
  misc_feature (600)..(604): n is a, c, g, or t
  misc_feature (606)..(608): n is a, c, g, or t
  misc_feature (621)..(621): n is a, c, g, or t
tgcagatctccgtatcttgatcctatgtcgcgcttcgtcttctacgagnnnnttgataatgtatgcagcggctgccactccaacggccaactccgtgttgtagtcgtcgttcatttgccaggaaaactgtctgcgctacctacaaaacncaaattgngactcctttgtgccgcgagatttattattaacgtaccctcttctactttcaggttatacattgctcatatttttttctaatatccctttcttatataaatttataaaacaacagtaatgatctgaaataaagccttggaatatatctttgtattgttatataagatanaaaacaaacataaaataaatatatgaacatactcacaacactatcatatcataaacttatataaatttatcaaacctttactactgttatgtcataaaaagaaacacgaatggtaacagaattttccacaataatgctaaaaacttgattgtatcaaaattggaggtacttaccttgctccgttgccggattaaaagttttcaattatgcataatctaagaacccaaattcttgtctgatgccccatccattttcttgtanttggaaattatttnnnnngnnnatggagcttgganatg

SEQ ID NO: 955 - DNA, 623 bp, Gossypium hirsutum
gcgataagaagtatctatatcccagggttcaggtaaccttttcttatttcagttttcgtaagaaattaactagtttcttcatgtaaatatttatattgtactaaaaagcttaagtaattgttgtgcaaggtttttgcctactaaaaataatagagcgaggtggagactagaaaatgaaactcgtgaatctgtaagggcactgatccggtctaacagcaagagaggagaaaactcttcaagcctactcagtcttttgatgtcttcatataggaatcaggatgataaagaagagaggttagaagaggaagaaattataaacgaatgcaagaccttttattttgcagggaaagaaacagctgctaatgctttatcatgggcacttctgcttttggcattgaatccggaatggcaagataaagcaagagacgaagtgcttggcatatgtggaaccgatatgcttccagctgtagagcatttgagtgacttaaaaattgtaagttctatcaattgatttctcaggttctggtcgattcatgtttaagagatgtaattgcataaacgattcaatgaacaggtgagcatgatagtcaacgaaacacttcggctatactctccagcagtaa

SEQ ID NO: 956 - DNA, 613 bp, Gossypium hirsutum
attggtctaagctacacaaatccaacttatgctgctgccattcaacctgcaattccagtctttacatttctttttgccgtaatgatggggtaacagcacaactttatatgcttttcttttctctaaattttatttgatttcgtataatttctatatttatatctgttacttttttgccataatttgtatgacattctacgacagtacagaaagagtgaatttgctcaaaactgaaggtcaagcaaaggttggaggtacgctaatctgtgtttctggtgcaatattaatggttctgtttcgtggtccagctttgcttggacagtcaaatggagacttagccgtgcaaaatgacataagtgccaggggtcaaccagagcctgctggatggcttatgtctagttttctcgagtttggacttgacccttggcatattggagttatatgcttgatagggaactgtatgtgcatggctgctttcctggtcattcaggtatgccatatttccatgcaaaatgaatcagagcaagtctagttttcctgttaatattgttctttgtttgtagtagatgaaatgtcatatcttatttgccagagggaactgagaagcaatctg

SEQ ID NO: 957 - DNA, 657 bp, Gossypium hirsutum
tcgtggtctgaggatgaagaggaaaaagttgtatctcatctcagccaacttgagcttgatgggtcgatgactgaagttcttcagagagtatcatctgaaccatctacttctgcaagatcggatggcatcctcttgaaccttcttagtggtgttcttcaagccaaggatgataaagctcgtcgagaaatgaagacccttttttcacggttacttagagaagattcatttgatgatgacaatcggtttgatgtctcgaaagacaccctttatcatctctgtcatagatgtctcagttctctcgttctctgcttatctgaagctacggcaattgacggtagtaggcgagatcgaggagttttaatggctgaaatagctcgagaagctgacaatttgcagtggatcgttgatattctaatagaaaagagaatggcaaacgactttgtgaaattgtgggcagatcaaagggaacttgcagagcttcattcaaagatccctaccatgtaccggcacgaaatcagtaggatcaccgctcaactatgtattgcaataggtagaggaaacatcttggtaggtaaagaaagccggttctcgctgctggcgacatggttggaagcactttatgatgattttgggtggatgagaagagcatctaaatcg

SEQ ID NO: 958 - DNA, 601 bp, Gossypium hirsutum
tctaaagcggctgacgttgatgccgaaaggtgatgccgtcttttaatttcactgcgccccctcttcctgatcctggtaccatcttttaatttaggaataagccaaacccatatttcattttctttagtttctgttaacaactgttcatgctagtgttttcaggaacttttttatttttttaagagggaaatgcaatttgtaggaagccaatctgttttatctatttccccccgttttattgttattttcagttgttttatgttaattttttctttttatttgggtttcagttgatatttattttgatatttcattgtcgtttagagtaaatgcagagtacagctatcgatgaaatggatttcgccatttccgtttaatggtgaagtcgatttttgtcttttttaaagaatcatatgctacaattgttcctttccatgggttcttaacttagaggaaatgggaaaaggaaagaaacttgatattttgaaatttctgattttggacaatttgaagtttgaaagaattggtttttatgctcaaataagcgttataagatatgtggaaatcttgcatggctgatctgttattcttccacatttac

SEQ ID NO: 959 - DNA, 606 bp, Gossypium hirsutum
taaaaaattgcactacacaatttagaaccatttgttctgcattttataaaacacccaaattcccagtagtatcaataatgcagatcgtagacagaatcaaattgaaaatatgtgtcttttatcaacatatgtttaacttctacaaagaatatctgtgtatatactttcttacaaggttttcaacagtcacaacactccaagctcatctctccgccataggaacacctggtttttttacctgaaggatgcatttccgcatgattggaacttgtactgttaatgggagaggaccgcttcaaactacctattagccatttatattaccattccttactactaattctaaataatgatacgcacacacaactgttgtttaaagatacaaggcagtataacagtatctctcatgacctgcacagccatttcataaagaaacttcccccaagggatgagtattggcgaaagaaaaaagaaattgatatgattttgatgaaacaacctcatctgcagtcctcttttccttctgtagtgttgatgttgagaatttctgcattgctactcctgcatcaaaccgtaatgtgtagtttgaaggagctaagtggatgg

SEQ ID NO: 960 - DNA, 567 bp, Gossypium hirsutum
ctattattcctaatgacaaaatggaataggagtggttgagggttgctttaaacgcagcatcgaagttcaccttaacaaaaggttcttgagggggcttccatattggagtcattgttttcacctgggcaggtattttatttctcaactccctcatctcccttataatgctgaagataatagagcatatatcttggactggttgtctttttccttccattatgcgcttgtttcaagcttgccagagtgcccaagccatggttgcagcaatctcaccaaaatcatgcccttgttttgaaaaacaacattaagccaggtgcgaaaatccatattttcatttaaagttgaccagtcaacaccgattgatcgccaaactttttttactgggccacacatcagaaaggtatgcataaaattctcacgagcctttccacagctaggacaaataggagatgaatttattcttctgttgtagagattagttgcagcaggaatgtactcatgtgtaaatcaccaaatggcgattctgatttttgggtgagatttagctcccaaatctgctgtaaaaaa

SEQ ID NO: 961 - DNA, 666 bp, Gossypium hirsutum
acgtagaagctgaactgaaaaaatcctccaggtaggaaaaaaataagaaaaaaggatcccgaagaatcattttgcaggaggtggagaaaccagaaaaccagaaaaccagtctactcgtactgcaattaaaaagtctcagttatcattgtattaccagttttggtggtaactttatgaccagaaacagttatacagataaagagattgcattttacttcatgataaaaaagaaaggaagaaagacaaacaagtctagtaagtcgatcttggaaaaaagccaaaaaactatcatcaagacaaaagattctcaggatagctttgaaaattttgtagctgctaaactgggccttttatttggggaccaaacggggtataaacacaacttaatcatgaagctcgctgaatccttaatttctcttcaatcaagtaagatctaaagtttaaaatccatcaaaacagaggtgctgggtaatattctgggagccaagactagattgatagaaaacacagcatctaatccattcataaaatttagaaaaagcacgaagttgcaaacaatttgataattaattaatgaccaatccaccatagaagctcaaaaacctggggaaaaaaatatttcaccacattacacaacactgattagaaaaaagcaatcttgagaag

SEQ ID NO: 962 - DNA, 691 bp, Gossypium hirsutum
  misc_feature (442)..(444): n is a, c, g, or t
  misc_feature (461)..(462): n is a, c, g, or t
  misc_feature (504)..(511): n is a, c, g, or t
  misc_feature (518)..(519): n is a, c, g, or t
  misc_feature (551)..(552): n is a, c, g, or t
  misc_feature (560)..(561): n is a, c, g, or t
  misc_feature (567)..(568): n is a, c, g, or t
  misc_feature (582)..(584): n is a, c, g, or t
  misc_feature (587)..(589): n is a, c, g, or t
  misc_feature (591)..(596): n is a, c, g, or t
  misc_feature (600)..(605): n is a, c, g, or t
  misc_feature (612)..(617): n is a, c, g, or t
  misc_feature (619)..(621): n is a, c, g, or t
  misc_feature (623)..(625): n is a, c, g, or t
  misc_feature (627)..(630): n is a, c, g, or t
  misc_feature (636)..(643): n is a, c, g, or t
  misc_feature (645)..(649): n is a, c, g, or t
  misc_feature (651)..(657): n is a, c, g, or t
  misc_feature (670)..(670): n is a, c, g, or t
  misc_feature (674)..(675): n is a, c, g, or t
  misc_feature (677)..(677): n is a, c, g, or t
tatcccgtactagtgcaggatgacacaagatctttgacgtcattacgatctatgcctacaccttcatccaagagtgaagaggcctccatcactcctcctgaagcgtggggtggtgataagatatctgataaatttgctcacctccgccatctgccatctcgatttgggatggaggcttctggtggtctgacaacaagctctacttattctggacaaactcaatcttcaatgctcagtcagacaagtattagctcattaacaagtaatgacataagctatgaaaacttgcgcacaaaagatgtctcttcaagtcaggagacgtcattaggatttcctgaacatttatccagctccttgtctgctttgtctcttggttcaaaaggcattactggagcaggcagcctcgactcaccaaaactagcatctttagggctgcctcgannnttttcaacatatgctgnnagaattagtactacatctgccttcagtgacggaactttccannnnnnnnttccccnnaaacaaagaaaacaggagctgaaaccagagannagctgttnnatagcnngttattgaggtctnnntcnnnannnnnnaaannnnnnggggggnnnnnngnnncnnngnnnnttctgnnnnnnnntnnnnngnnnnnnngcccccggttttntttnntngggggggggggaaa

SEQ ID NO: 963 - DNA, 607 bp, Gossypium hirsutum
cttgggagccttcaagattttgaccttacgaataaacacattctgcaaaggatagatgctagatgttgccttctcgatttcttttccaatcacctcggggatgaacttttgaaccagttccttcaaatcacaagatgttgcctgggaagtcattatttccctcatctttcggcgtatctgaaaaacaataatttcacttggtcatcatgggattgacaaattcacagaaagcacacaaacactgcaaacagtccaagcaccggggtagtttacctgtctaatctggctggactgagcataacaagtccttttaacctggttcgggcgtctcttagtgaatccaatgcagaacaatctcaaagtgtaattgtcagttgtcttcacatcaacatgagcttcaatcagggtttgccatttacggaccaaagacctcagcctgtcagttgtaaaattcattccctggaaatttgaaaaaggaaaacgaatcaaaatttttaaacttctattgctaaaaaagctgggataatatagtaaataaaggaagtttatattaatcataccccaaaagttggtcaaaacattttttccttgaacatcttcagctctc

SEQ ID NO: 964 - DNA, 645 bp, Gossypium hirsutum
aattttgaaacccagaaaccaagggcaaatgcagcagcatgtaggagagctacaggcaatattagctgagctccttgggctttcaagacgtcagacacttggccaatcttagtatcaaaggacatcaatgtgagttctttatgtgtggaaagaggctttgaaaagaagtagcaaaatttacatgaaagcgtaatgataacttacagggcttgcacaaagtaaggtagtgagaataactccaattaatggagtcactgagataatctttgaagtgaatttgggaaagaattcattggacaagactgccacaaagatgacattagaatcttatcattgtatgtcaaatttctttggacttcatgataattgaaatgcaataaataaaaacagataagaacagtaatcctttgttacctccaacaactgtaggtactaacacaacctgaaaagtgcttacagcaagaccctgaaaagatttttgggtaaacatttttacattagtggaatcaccataagtgaagggttacatgctttatatttttatagatgaaactttgagatcttataacttccatgtaatttaggttctatcaccagtttaaagtgtaattatattttaaatttctaatggatccacctgacgta

SEQ ID NO: 965 - DNA, 634 bp, Gossypium hirsutum
tgtttcacctaacctctatgctaacataacacgattcacaggggaaaaacatacccaagttttgtacttcagcaggttgagaacccgatatcccttcggcttccacagttgcgaaaggtaaagaatgaacagacctagcataggggaaattgggaaatattaagaaaaacaatccacatgaagttttccatagaaaacatagtttcttcaagaaaaaaacacaacatgaaatttaaacatccaaactttatgcccagcaaaaaagaaaaagaagcaaataacacattcaacaaaagtggcaaagaagtttcatcacatcatgagcaataacaaaaaaagagtcaaattgtcaaattttcaatccaattatgtacatcaatatatctacaaagtgttttatgaataaaattaaactaactcttagagcaaaacgccctcaagtataaacagatcagattatcacaatccaaaactaaactctattgccacaagatttagttccctgaaaatgatcacaaaaagaaaaaataaacaaaacccagaatccccccagcatctattatcaaaaccacggattaaaaataacacattgacgtacctaaagagattagaagaactgaaccaagaaagagcc

SEQ ID NO: 966 - DNA, 616 bp, Gossypium hirsutum
gcatgcccagtctggtctgccacttctgttttacctccatcctgaacctgagtttcaatggaagtatctttttctctttcagcttccgcagtttccttttcagtggttggtgcatcttccttttcattttctttctcaccttcggatttttcgggaacagcctctgtttccttgttttccttctttgcactcaacgattttcggcctcgcttctttgggggttccttttctggtgttggagtagccttggccttttcactgatccttgctgatcttctaggggtctcaccggtaccccaatcaaactccgttattggaggattaccagggtgtgattttagatattgctccaactgtttcctgctactaatctcctccccagttggtgcaatgaacatgatctcagtcttcctgggtgaaccgactttcttgggaaaaaactgtaaaaaaaaaccagaaagacattttatacaagtatactacagccaaatcaattaaagaagaagcacaataacatgaacactgaaatatgaaattcaaaatgtatcataatccatctgcatgtttcagatcatacaaaacaagtagaaggcacaaggtaattgccgatctataa

SEQ ID NO: 967 - DNA, 631 bp, Gossypium hirsutum
gtcatctgcagattccatgcatattggacactctgtgttttcacccctccggataccatctacaacttcttcaatgtaggccttggttggggcattttgattcaaagtgaccgaaccagggtgagcttcaaggaaccttctcgctagtttgttcaagtccaaatactgctgcgaatcagctcgactgtgcacatttaaagataggttagaagggaaagaaactaaagtttctgcaccagtaataagttcatgaaatgcatttctgacctcattacaagaaaaggatggttgcaacactgccttagtcgtagtaataactcgagaatcgatgcataattgtgaagaaccctgccttgtgcaacaaattgatcaaactgaacctgtttaaatcaaatagagatattttagctttcttctcaacttactcaactcaaaaagcaactcttgcatatatgataaggcacacatactttagatcttttgaataaagcatcatagaaatcacgttcagcttctgactgctcgcactcgatgacttgaatatcagttggaggaagaacaagaataggccttccctctttatcctttgtttcctttgttcttctcaacatcagtagccttaatattgcga

SEQ ID NO: 968 - DNA, 657 bp, Gossypium hirsutum
attgtgatgaaatgcttgagattggaagatagaaaatatgcaaaaaaagcggctcctcatatgttctttcagctacgaaacagagttcaaaacattggacaaatcattccaaaagatgtcagaactcagaacatagcagacatttgtaagtgtgatttatgtttcattttatgagagatgatcactatgcacatactaattttgcttatactacttgtttcactgttgaagttaggactaagatttcaaatgaacaaattatcccctgatatttggtattgtggcaaggattatgcttagaacagaaacatttatgctgtctttgtagtttaatttatttgttattgtgaaaataatatatacagtgtaacctgctgccattagctagatgtttttttactgctcataaaaaaatctgtgatggtctaatactggcttgcatttgtgtggtagatatctgagtgatactacaacaatgaattcactttaatgaaaacttttaaaagcttatgttcactagccaaaaaccagatggtgtttgctttgtagatgccgctgctaatacaaaaaaaaagcaaacaccatctggtttttggctagtgaacataagcttttaaaagttttcattaaagtgaattcattgttgtagtatcactc

SEQ ID NO: 969 - DNA, 611 bp, Gossypium hirsutum
aaagtccatccagaaccgacagacctccctatgagtcagttgtatccccgctcggagttttgtctcccggcttttcggaaagcccagatgtctgaagcggcgggtttaacagaaccagagcaccttgtttaatcaggtcatgcatggtgcatgaccacctactaagagcacgtgagcatcatcgcttgatagggtttgattcaacaaaaccccgagcaaaaacaataccgactcatcgagggatctaacgactctagactgtcgacactcggaaaatttcttctctcaacaggtaagaaataacagaacctacagaaactaagaaattaacagtcggggcaaatgaaagttaagcttatggaaattgaagaaaaacacccattgtggaattataacatacacttggatgacattagagcctaagtaaagccatttccatatctaaacatttctttgcataaaatgaccaaacagagcttgaacacacacacacacacacacatgtaagagaaacatcaaggaaatcctacaaaaagttaaaatgcttcaacaaattcaatcaagtaaatgtgatcataataaagtaactcaaaccataccagaaatggaga

SEQ ID NO: 970 - DNA, 640 bp, Gossypium hirsutum
atcaaaacttctggtatttctttatattccctttatagcataatgaaaaataagacacgtaagctgtttaagcttataagcttcaaaataaaaagttttcatgtattgtttagacaaactcgagctactcaagctagatatcgagttaattatcttaccttagtttatgtgtgtatatataagttttgctgataataaatattaaccattcattcattttattttcctatatatatgtatttgtgtatataaaagcatgcatttataaagtaataaaacagtgtccaatacaaccaagcatttggtttaaatgattaatacatgatcaaaacaaaaagaataagaaacaaagaatgagtaacaaacagttacgtgtaccttcttttcttcccttaaagtgatggaaattccttgtatcctaatttatccattagctaaatcttttttttctaaaaccgaatacatccgctaattgttgatccgtaatattgctgcaatcgcgaatcaagatagccactttatattttttctattctacattaccaagttttatgaaactaagtttaaggaggaggtgctgcttcagtggtttcatcaacaactggttgtggtggtggttgagtaagtgataatcgccgtg

SEQ ID NO: 971 - DNA, 583 bp, Gossypium hirsutum
  misc_feature (564)..(564): n is a, c, g, or t
gtttctcgaggccgcagttaaggaaagaagttcagccatactaaactccaatgtcagttatgtggacgagttggtcatactgttcataagttctattatcgttttgacgagaattttgagggtgtgtatgatcagtttatgcaggctcactgtcatcagttttaggagctttcgatctcttcttgtgctcactattgttctcatgcgagtacttccactgatgctgtggctactcccaacaacagatcgtgttcttcgaactctttaaattcaactatgtggtatcccgattcaggagcaaccaatcatgttactaatgatttagaaaatttgaagggtgctgcaccatatacaggtaaccacaagctttacatggggaatgagatgtcagtgcctgtggctcatgttggctcaggtcttcttccaactgctagtagagtgtttcggttggaaaatatcttacaagttcctcgcatttgtaaaaatctgttgtctgtagctaagtttgcaaaagataatcaggtttattttgaatttcatcctgtgcattattttgtgaaggangtcaagacagggagcattt

SEQ ID NO: 972 - DNA, 643 bp, Gossypium hirsutum
tggcaaataaataatcactttatacctcattttcttgtaaactaaattttatgtcaatgttcctcacaaaggactccagtttctggcacagctccttcacaaactcattttctgttatccccttttgactattataatttaccaagtacagtaaatgtttaatatcacttgcaatgtagagatcttgagcgggcagagacagctgaatgtcggaaacatcaaccaagacagggtaaaaaagcttctccagtgcattgctgcaaataacaaaacaagttctgaaagtttggacaagatgataaagaaataatagcacaaggaaagataatagaggtatttccgagacttaatagtgcacgtctccagacttagttgttaagtcttgagactaagattccctgttttcaaatcttggctactgactttggaggacttaatactctttccttcaagtatcgatacttcacagttcacttttaaaccatagttaaaccaatctaaggggcccagagtcactgttcacaccataggttgaccatatagagacctcaaataagttaggctcatagagagccaccaaccataatttgaggtctctatgactggggccattgccaactcagttagggggtgtacatttagt

SEQ ID NO: 973 - DNA, 595 bp, Gossypium hirsutum
ttcactgtcaatttcggcagaaaagatggttgcattagtaggcaatagtggttgtggaaatagtactattttctccttagttgaaaggttctaagatccctacaaaggtagtgcaatgttctttatgcaaatgtctgaagttttcatgcaagcatagtttcgatctaatgaaatgtgcttacacattgtaggggagatcctcatcgacaattataacatcaaggatctcgatttgaagttcattcggaagaatattggagtagtatcccaagaaccatcaccctttgctggtaccatcaaggataatatcaaagtaggaaacatggatgcaagcgatcaacaagtctgggatgcggcaataatggcgaatgcacatatgtttgtcactcaacttttgaatcaatattcaaccgaggttatccatctagcctctattttcactactttacaatgtttcaggccctatgttgtgatgtaaaatccataccggaaggccaaagaggagtccagttatccgggggacagaactagcgaattgcaatagcaaaagctattctaaagaaccctcctattcttttactcgatgaggcaacaa

SEQ ID NO: 974 - DNA, 676 bp, Gossypium hirsutum
tgcaggttgcatgaaaaaaagatgaccaagcttcaatctccaaattttcatgtctcaaagacaagacttgttatttataatttgccaaaatccatgactgaaaacgaaatgaaacaacttttctttgtagctcgcgaagtaactgcatcgatacaaagttgtttcaattcgttttcagtcatggattttggcaaattataaataacaagtcttgtctttgagacatgaaaatttggagattgaagcttggtcatctttttttcatgcaacctgcaagacatccaaaaagccttataataaacggaataggtaagtgaaatttcacatgagaatcagcaggagaattaagaactaccaatatcaagttgctttcaaaacttgaagcaacatcacgtttaaggattttgtaacagactcgcatattcatttccatatgaaaaattaaaagagaaacattcagaaacatcgatttgactttattcttatctgctcttctgtttttactatccttttaaatcattcctggccagaccaaagatctcttaactacaaaatggtcaatacaacagaaccgatttgcatcgtgcagcaaataggcagaagaatcttgtgctcagtatctgacttataatatcaagggaaacaaataaaagagatccttacgtttggcgtttat

SEQ ID NO: 975 - DNA, 623 bp, Gossypium hirsutum
ccctgttagcatattgttggaaaggtcaagggatttcaagtgactcaaattgcctatttcaggagggataccaccgttaatctcatttgtttgcaagaagagagtatccagctgctttaagtttccaagttcggaaggaactggaccatccaggctacagttagctaggtctaaatgaaccagattgaccaacttgccaaacgtaggtggtattcccccatcaaactcattgtagtaacccagtaaaaggtacttgagatttgttagattccccagctctgcaggaataaaaccactcaaatcattcccagcaagagacagatactggagctgctccatacttgcataggctttaggaatttgtccgctaaagtaattcccaccaagatttaagtgcgtcagcttaggaagctccgtgacacctaatgggagtgagccattgaagttattgtcgtaagcatctaacgacaccagctctttcatctgagagaaattccacttcatctctccgctaaacatatttttggatatgttgagaaactgaagcctcgtaagcttgtgaatttgttgcggaaactcacccgagaagctgttgccagaaaccgagagataaacaggctttg

SEQ ID NO: 976 - DNA, 657 bp, Gossypium hirsutum
gattggaggaagcaaataaaggaagaacaagtcctcactgaacactagaatctttgaactattgcctttactcgccaacaacaccacagctccagcacacaatccctgtatccaggcctcaatcacaattaacaattcttaccccaaaaacaaatataaggtcagaaagacaagttaacataccaaaagaagtgctgtaatcgattcattagcccaccggttctcttcaagtaggtgacctatgatgatacaagcacaaaggagtgaaaagaagatggtaagtgcaattatggtggttgtactaagaaaatctgatgaactttggagtgttgaaagatgggacatagttgcaatttcaatggtggatatatgtgaaggtctatagatgaaaattacattcaaacaaaacaaaacaaaacaaaaaaagggtttttgtggagagattgaaatgaagggttattgatgaaactgatgtttaaagggttcaagtttagtgatgcacaagtgaaggattgatagtccttacattttaaagatgcagttggagggaagactgttaggtgctatgggaattatattctatgctatgccaacaccttgcttttctataatcttactacctgccacgtgaccgataaagttctgccacgtacaatc

SEQ ID NO: 977 - DNA, 570 bp, Gossypium hirsutum
gcgcttcaagacccaagtttgatctcaaatataaaattgaaatccagcttagcaggcgataatgatatgaacagaacaattctacccaacattttaaacaggtggaatggcaatttcaggaattagtaatagcaagtgcttggaggccaaaaacaacactattcatggagaaacctctaaatacacaatagaaagaatataaaagatataatgcacttcaatgagatagagattagcatctaaagtggaaatagtgcttcgtaaatagaggagtataatcaacactaccttagcatcagaagatttaagatttttctccagatcagcaagtctggcctgataaaatattttaataggaaaatcagatcagaaactcaactaaaggagggggggggaatgactgtgaaagtaaagcacatataactccaagagtgaataagaacaagcagagctaagagttagacaaatgatattacctcagaagtggtagccctcgcctcagcagcagcacgagcatgcaaagcattagccagttcttttcccatttcttcgacttgtttcatagcaaaa

SEQ ID NO: 978 - DNA, 497 bp, Gossypium hirsutum
  misc_feature (314)..(318): n is a, c, g, or t
  misc_feature (352)..(352): n is a, c, g, or t
  misc_feature (383)..(383): n is a, c, g, or t
  misc_feature (392)..(392): n is a, c, g, or t
  misc_feature (394)..(394): n is a, c, g, or t
  misc_feature (427)..(427): n is a, c, g, or t
  misc_feature (434)..(435): n is a, c, g, or t
  misc_feature (443)..(443): n is a, c, g, or t
  misc_feature (450)..(450): n is a, c, g, or t
  misc_feature (454)..(454): n is a, c, g, or t
  misc_feature (479)..(486): n is a, c, g, or t
  misc_feature (492)..(492): n is a, c, g, or t
aaatcttttgttttagttgggtttttagcaataaactaaggcaaatttatagtagatgtgattagaagaagcaacaaaaaatcgagaatcaaatttaataaagagaaaacatataattatgctttgaaagttttggaaaggaggttctgatgcttgctagacaatattgctcaaaggaatcaaacgatccttcaatggtgccagtttacataccaatgtaaatgcttgataggaatgtatttgcttgaaatcccttactgactgtaccctttacctctgttcttgaacgattagatataaaataaatttatttnnnnnagataattgatttgtcttaacatttgctttgctnaagaggtgcggaggaaaccactgctgggganaaaaaagtntngtctacaataccagattcgtctcatgttgtggngaggctnngctgatantttatcntgtnttgaacagaaaagaatattatttgnnnnnnnnattttnatgtg

SEQ ID NO: 979 - DNA, 685 bp, Gossypium hirsutum
gctgagatggcactttaaggtaaattcattctgatttcaaaatatgtctaattcaccattcttttaagctatttatttatttaatacttgatcagcaggcatacagtagggaatttttgcttggcctacggaaaagagacgccatatttgtattattgaatgtgtgcatttaaggtttaacagacaatgtacaaatttatctgtactttgcttcctttaaaagaaaaccattgattcaaagtccttgtacctatattgacttgccttgtaatgtcaacaacttggtgacaaaatcgtatggaaaatgagatttggtgttttttagctctcccaatagatgttacgtaatgagttttgtatgatatgcaaatttaactctttgcaccaacattttgacttgaaaccatatctattaaataagttaaaactattccattctattttaattatgttgtatgatatgctactatgcaaccatatgtttcattacacgccactgatgactagggggttctcacaacgggtcaaatgaatattggaatccacaaattcattattcgtatcatcttcaaatttgaattaaataaattattttttgaatattggagtcttctaagtaaaaaataattaaaaataaaatgaataatatatattcaaaggtaatatttccattcacgtttggatg

SEQ ID NO: 980 - DNA, 400 bp, Gossypium hirsutum
tttatttttaaattttattcctaatcaaatggtagcaactaaatctatttaggccaaattctactattaatctcgtattacacaaagttgtaaatttagttaatgttctccgattgaattattttttttctttatatttctcaaatttaaaatttttaatcttaatgcaaataacggttgttaaatctattaactaatttatgtgtgtgtagtatgtggaaataacaaattgacatgatcattacacataataagtttgtcatatcaaaatttaaaaatagcataacttaatgaattatttgattagaatcaaaattttaaaattcaaaaagtaaaaaataaacatactaaattaattaaagtataggaaaagattttcctacacccaaaaaaaaaaaaa

SEQ ID NO: 981 - DNA, 909 bp, Gossypium hirsutum
  misc_feature (253)..(253): n is a, c, g, or t
  misc_feature (334)..(335): n is a, c, g, or t
  misc_feature (364)..(364): n is a, c, g, or t
  misc_feature (817)..(817): n is a, c, g, or t
  misc_feature (824)..(824): n is a, c, g, or t
  misc_feature (833)..(834): n is a, c, g, or t
  misc_feature (860)..(860): n is a, c, g, or t
aagtatgattggataaaaaagggcaaaatcttgctattagtcattgtattctatttaatctttatactttaatttgattaattttaatcttatgctttctgcattgatttagttcctgtactttttaaatttttaaattttattcctaatcaaatggtagcaactaaatctatttaggccaaattctactattaatctcgtattacacaaagttgtaaatttagttaatgttctccgattgaattattttttntctttatatttctcaaatttaaaatttttaatcttaatgcaaataacggttgttaaatctattaactaatttatgtgtgtnnagtatgtggaaataacaaattgacatgancattacacataataagtttgtcatatcaaaatttaaaaatagcataacttaatgaattatttgattagaatcaaaattttaaaattcaaaaagtaaaaaataaacatactaaattaattaaagtataggaaaagattttcctacacccaaaaaaaaaaaaaacataagcagcctggcttggttgtgtggaggaaaaataagccttccctggcacattattgtaccttccaaacgtataaaaaaagtgtactaaaaagagggtgcaaagcctgtagacaactggcgctcggggacgttcaggcaatgcgcattagcttacattagaatcagatcctgccaacgcgatatcggtctttttagtttgttgaagtaattattgttaaagccaggctgccactgctatatgaacattaaagggcccaagtccctaccaaaaatcctatcttgaaatgngaaacantaagatttnntcagtcattgaaagcatttctatctncatggcctttcgcattgagagagacaaacaattatatttcaccattcga

SEQ ID NO: 982 - DNA, 607 bp, Gossypium hirsutum
  misc_feature (590)..(592): n is a, c, g, or t
gatctagatagtaagtttgcaacatacactatatctagcctagtagcgaacaaatataacaagttgcctatcaaacttctgtaaatggaagcatcaacctttttgcaattatctgacttagacaacttcattcaaaaccagcggaatagctgcaagtttgggattttccattttgagcttcttcaaaacttttgaggtatactttctttgagaaataaaaataccaggatcaaattagtgaattttcatccccaaaaaaaacgctatttcacccaaataagacaattcaaacatatttttaattctttgtttgaaatgctctatagacacttcattatctcccgtaacgagcaggtcatcaacatataatgaaacaatgagttgtttttcatcatcaagctttttaacatacaatataacttcactttcactccttataaaacctttttgcagcaaataggagccaattactctataccaggcttatggagcatgcttcagcccataaagaggtttgtaaagtttatacaccttgttttcattttatgaagctttaaacccttatggctattcaaaaaatatctcctccnnnaagcaaaccattaga

SEQ ID NO: 983 - DNA, 467 bp, Gossypium hirsutum
tgttaaacataacttaataaacgtttaaaatctaatctttatttattaaacataatttgtatataacttacccaattaataaatataaatttattaatctcaaaataaataaacttcaacatttttgaatgtaagttagtgaaacttacgttaataaatattttcatgaatgaaataaaaagtttatcccctaaaatttctcattcacattttgagttctataaaataataataataactttcattagacaagtttttataaaaaaaaattccaacaactagtaaggttatcatgattgcctaatttcacacattaatgggttaagtagggtggaccaatagtgactctgtgtcaaatccttgagtatgaggtagatggaaaaaaaaacaacctgtggcgaagtatcaatagattgggtggagttgcccttacaattttttcttctttttctttttctttttttttt

SEQ ID NO: 984 - DNA, 654 bp, Gossypium hirsutum
atgtcctctctattactattgaatatattaatatacagtgtgttccacaagatgagatgccatgtaagaaacctgtggttaaagttagggaaggtaatgatatcaacgttcacgatatggaagtagatatcccttggggagaagtacgctctttgaaagatcttactgttgaatcagccaatggaattcttgaactagaaactggagtggtggaagtgtttcttaccgaagtcgattttccaagccagggagaatgatccaagagctttcatttatattttaatattgtattacttcagttttatttcataatatttattttaaccactagatatattataggcagctagagttattagttatctttagagtttaaagctagggctaggaataaaactttactagtaagaaagcctagtaactttacttgcaagaaagaagcctataacctatataaataagttgtagattttaccgtcattagtgttattcttattattttcttcgaattaactagagattttccataagcctgagttttctagaattccatctcctttcctatttgtttgtgcagccttaattctttaattgctgttattttctcccctaaaccacattaccattcatgagggctatagatgtttggatgca

SEQ ID NO: 985 - DNA, 608 bp, Gossypium hirsutum
cagaagttgaacaactcgaatactcgtaaggaattaggatgggagccaaaatatcctagctttgcccactttcttggagtttcggaataactcataccttcatcttcgttgccgggatttatcatggaaggaactcgatttagtttgctagggaatcttttgcctgcatgctgttgtgcctcttttcttttttcacttctccaatgggttctggcaaatacttgttcatatacagtgtctgaacactcacaccagttttattaataaaaaaattatacattggaacactttcagtcgagttgttcttccattttaaccactcgcgtaatccacatcgccaggacatacttgagttatgttggtgttggaattatatttttcaagtcctaagaaagagtagaacaacaaattagtgtgtttttagattttgtaaaccattaatgacaatcttgtgaagcaaaatagtatttagacccccaaagagcaacgaataaattaaggagacaaatttaaaatattaaagatgagttggggctacgttccaagaaaccgacttcaataataaactattccatgtaaagttgactttgcacatcccaagattcttc

SEQ ID NO: 986 - DNA, 621 bp, Gossypium hirsutum
tgatgatgaccagcaggatcagaagaatgatgatgatgatgatgatgatcctgttggtgtagatttgggttgggaagatgatgaaaggtgtgtctgcttgattcaactctgtcattcatgaccgagctttgaactgtttgggcatggatacgagtcacatgggattcattagtagccaaagattcaacagcaggtagagggattgaggactttatagatggatcatctgtaatataaacttttaagccaagctctcctctaacacgtgaaaatataccacgcttttccaaagggtaatgcaagacaacagcatcagagtagggaacaaatgaagtcccagttagacaaaccttaccgagaaacgctctggtgttagtacctctgatattattatagacataggcttcaagagtatgaaaatggagcattgaaggatcagagatgttgaaataaaaactctcattccaaacaggattgagatccttttccttgatagtggtacggtacttctgaccatcaaagtagagttccacaaaagcactggatgaaccttgcccatctttaggcaaaagattgtgggcactgaccacatcaacacctagcttaaggttgctcatcatc

SEQ ID NO: 987 - DNA, 649 bp, Gossypium hirsutum
cggccgccgcccggcccgcgttagaggggaagattagcaaagcgagaaaagacagagggaaggagagcagcattttattctctttgcgagaacttccggatcggagaagcattcggaacgggctccgcgttcatttcgttggcggaaacgatccaatccattcggggcttcggggaacccaaaaacgaagtctttcgacttgattcatagatagaatcaatgataaatagacaaaagatagatgaacgagatatctttttttctctaaaaaaaatggagagagaaagagcagatgctcaatagcacctatatcgaacactaattcctatctattgataggaagatcttcgtcaaataccggactttgccttttttttttaggaattcctcatatccaaggcagcttaccacaagccccaccccatacgactagtcggggggggctgttcgccttttgaatcaaacaaagtaagtagtaggggcttcatagctactttcattctaaaggaaacctaaaaaccaacctttagtcaataggagccctacttccctctttgcgacctcatcacttcaatttaagcgcaaacccatttctttcttagtcaccgggcggagcgcacctttggtacttcagtagggcgagctgttt

SEQ ID NO: 988 - DNA, 649 bp, Gossypium hirsutum
taaggggtgggttggggatttgggcccaaaattgagcctgtacatcgtacatcaatcaaccccaaattaaataccattagtttttgtatctctaatcaacctcaaaataatactaaactctaaattttatattttactttgttgttattattaattaattttatttatttaattaacataaagagttagaataattagggttaatagtttactttagcgtcattattatttaattaagtggaataattaaagttgaaagattattaaggaaaatttgatttcatgtagggctctacttttcttaaatgttggtctcattttgttccatgtccctacattcgataacatttgaaatttactgtatttatttttaatttttaattttttaatttaataattagagtccaattgatatccaacttctattaaattagattgggggacacttggcaaatgctatatataaaaaagaagttgaattgaaagttgatattatttttattattttaaattcatataagtttttttttaaaaggtcatataatttatgagggtaagttatttcacaattatcaattaaacttcaattatttattaaaaaaaaagtaaagatacttaaaaatgtatttcacccaaatatccgaatgct

SEQ ID NO: 989 - DNA, 498 bp, Gossypium hirsutum
taatggtcatgttggaagtcttcctcataaattccttttgatttaaatgcagtggatatgcatctgagatgcgcaggaaagactggaagaaaagttggccatttgcatcagatggtggccagaatatatttaaagaacaaaacgttaagcttcctcctttacttgtcccgaagttcagatggtggtgttgccagaactgtcagcaggagactggggctgagggcagtataaatgaagaaagaaatgttaataataatagtagcaaattgaaatccttcggctcttgtccccttggggattctgtggcgtcttcatcaggtttgctgcaggctggaaagattaatgttgactcaagaaaatgtgatgccattgcttgtttgaatgttaataccagtacctgtcatcctttagttagtggtaaaagtaacaggaaagtggaaaatgcagacaaacgagttataggtatatttctaccctagctcattcttcatgtcatta

SEQ ID NO: 990 - DNA, 607 bp, Gossypium hirsutum
gcttctggagcctgttcaccttcagaggattttagagcacaaaatgttgttgatgagttcttccagccagtaaaggtatgaattgatctctttctcctacgttttgatgtgttttttattctctattggctcgtttgtttgtaaattgcatctctttttcctttttgcagccaacattggggcaaatagttaggcagaaactgagtgaaggtagaaaggtaatctacatatactccttaatacaataagcaaacgtttggtgcttattttatttgtgtccattgttttctagaagaaggattcttttatatgttattagatttggaaggacaaagatagaaatgggattcattcttttgctcattcaaacttattgatttgctttttttaggatattttgctctggtaaccatgctcctttgtaatgattaataactgatgctcagggggggaaaagagaaaaaagggtgaaaattcaacttctagaagtcttcctactccctgaatgtgcactcaagacttatatgacatgccttggttaactgacaggcattacatgttatagccataacaagctgctatattactactgagggagaatctgttt

SEQ ID NO: 991 - DNA, 763 bp, Gossypium hirsutum
  misc_feature (234)..(235): n is a, c, g, or t
  misc_feature (468)..(468): n is a, c, g, or t
caaccataacgtcaagctccaacaactagtggctcttctatcagtgcccaatcaaatgcaacattgatgccttctggagcctgttcaccttcagaggatttaagagcacaaaatgttgttgatgagttcttccagccagtaaaggtatgaattgatctctttctcctacgttttgatgtgttttttattctctattggctcgtttgtttgtaaattgcatctctttttcctttnngcagccaacattggggcaaatagttaggcagaaactgagtgaaggtagaaaggtaatctacatatactccttaatacaataagcaaacgtttggtgcttattttatttgtgtccattgttttctagaagaaggattcttttatatgttattagatttggaaggacaaagatagaaatgggattcattcttttgctcattcaaacttattgatttgctttttttaggatatttngctctggtaaccatgctcctttgtaatgattaataactgatgctcagggggggaaaagagaaaaaagggtgaaaattcaacttctagaagtcttcctactccctgaatgtgcactcaagacttatatgacatgccttggttaactgacaggcattacatgttatagccataacaagctgctatattactactgagggagaatctgtttaattggttctgcacaattactttagtctttacataggatacatgagcaattaaacactgctaattaacttctcatataagtattgat

SEQ ID NO: 992 - DNA, 601 bp, Gossypium hirsutum
tataaggggctggatttggcgagctgagtcctcatgtttttgctgttgcagatgttgcatataagtaaattccctcttttctacatcagatgtttccaagtaataaataccctctgttctacaacagatgtttctgagtaattctatcactgatttatggtttaaatagggcaatgatgaatgagggaaaaagcaactcaattctcgttagtggagaaagtggtgctggtaagactgagactacaaagatgctcatgcgataccttgcataccttggtggtcgatctggagttgaagggcggactgttgaacaacaagttctagaagtaagaaaatcttaaacctaacaaccttcttggcttccttgttatttgcttaaattcgtcattcttgtgtagtttctgctgtggttaccaaacatccacctgacttggtacatatggatgtttaacatttgcagtctaatcctgttcttgaagcttttggaaatgcaaaaactgttagaaacaacaactcaaggtgagtgtctataggatttgaaaattacaaccttcttcatacatgatagtctattccacttcccattataatatcaaatata

SEQ ID NO: 993 - DNA, 563 bp, Gossypium hirsutum
  misc_feature (31)..(33): n is a, c, g, or t
  misc_feature (494)..(495): n is a, c, g, or t
attggctcagctatcaaatgaaaacagatgnnngggatgccatggttgcattttcgattgtgtgaagacatatatgtcaggcttggttgtgcaatttcagggagtttgaaaaatttggtagaggtaaaaccaatttattacactagatagctaaccatcccctctgttgtaattgaggagtatctcttgtaattagatcaaacctcccatttgaatgactggtatttgcagctacccgaatgtctaatttcttattgagttttggaacctgcagtatgtttctccattgacacttgtatgattttgcttcaaatccacatactcttcagtatatgtaaatgagaatgctaaaagatgggaaagttttgttttagtgaacaaagatatggttatttatggtctccttaaatgaatgctcaaacctatgttatccggggcattattttcatactcatgtcttaatatgcacaatgacggatccggaatgtttacgnnagccagtaaccgcaaatgcagatgctcctgtacaggctcagcctgattcccctcgatacaataccatt

SEQ ID NO: 994 - DNA, 657 bp, Gossypium hirsutum
tctgcaggcagaagagagcaacagtggtgaatggcagacatttcaaaagtatgttcccttacctaagtatattttaaagacatggaacaatcctcatatgtgaaggcaatgcaatgttacaactttaagaacatcttggccaagttccaacacatcttcaatgcaaagaaattagaacgtatattatctacaagtaaacaccaaaacgatatcatcacagaatagtgttcacataaagaaaaaagggatcttcccttgaaaaataaagagaatgaccttcaaataccaaaaagaattacattcaatctgtaataaagcacctgaacagagctacagagcatccaacatccggtaatctggccagatattcaacattactaatttgcaacatgcttctagataccaccttgggatgggcaaagttcagctaaagtaatgcaatatctgaactgagaaaaaactaaataagccacattgattttaaagatgtaaaatgcagagtcataccttgatcaccaaataacttgcgagacgaggaccggcgctgtttaactaaaagtaaaaaaatctcaaactgacaaaaactaaaaaatctacattctttttaaagatgtacacacaacccccgtcctcccttgatcaccaaataacttgcga

SEQ ID NO: 995 - DNA, 669 bp, Gossypium hirsutum
tgtttctttcatcagcagcaaccaagttccgaaattatatgcctttttcattggtgcctgattgatcttgaggtacctcatcagtaactgatacagaaatcatacaacagtaaccatttagtcaacattattaacccataagaatgatcactatttttttttattaaaaaaaagaccccccataaaagcttacgtttggagttgcctttccagcaatgtggtttccagaattgaaaggcaaatgggagcgctggttctttggaaaatcaccaacaagatgtgaattccacgactccgtagattgatattcgaacccctcatggccattaataactttaagctctgccaatatctgattaggatctaactcatactgcaccgtttgtagacaaatattgatagttttacgtgcatatgttcattatcatagtttttgggaaaatggagcaaaaatgattagtacaaaaagcgaaattaccgtatggcatctagcggcctgagcttgaattccattatttgcaatataatttcccgagttaggaagcaaatattgatttgattgaccactttcgatgcatgaaacctcaacctttccatactttctctttaatttacgcagaatataagttctctacacaaatgaaggaacgacacaatccaagtaaccag

SEQ ID NO: 996 - DNA, 625 bp, Gossypium hirsutum
catttcgaaatgccaagacgaagcgatcagcttgcgtgggtgtgaatgtgagctttgtgtactgcttgtttatgtcctcagaactctccatggactttgaaagaaagatcttttcttgtccttgaagaacaatcatgtctccatcatagaccttgttcgaagtccaatgctcgaaccatctaggaaccacctgacatgagaagcagggaatgatttaacttaaagaatttatacagaaatgaagcaaaacttgggtgccaaaatcgaggcttttcccttaacatgaaactttgattaggaacatggatgctaattaaagcaagcatatcacagaaaacgtggaaaaataaaatagttcgtgatgaataaaccttacaagaagttctaacagaacgcatatagaaaacaagaaaggctagcgctatttgcaacatcataaagagagatatatgattaaagatcctcattttactgcaatatcagacacgaaaatatgcattagaagcacaatgaaatagtactcacctgccaccaggcagacccaggcactgtaaactggaagaagtttcgagcactacaaacgattgatcgagtcttccctggagccattggtacatggaacgaa

SEQ ID NO: 997 - DNA, 540 bp, Gossypium hirsutum
cactagctacacgagctggaagaagccccagtttgtgcagtcgcaagatacaatccagtatattcctccaacctgtacgaatgtaatcaccatatctatttgcaatagtaaaaacagtaacagttgccatcctggctttagcatcatcaccgaaagccaacactggttcctcaacagatgatggattcaaaagagtggtaaacttgcagagagacacaactaggtcatccagtacatcttcaagatgatggcatgcagaaatctttgcaacagctaagaatccatcaatacaggtctggtaaacatcttcatgttcagcatgatcaaatacaacagagatagcagcaattgttggacctgacattattgcgaacatatcatggtcaaggtatgctctagaatcagctacaatgaatggtgcagttttcttagacttgtgcattagatctatccaccgactaggggtcatttcaggatagccaaagccttgttctggtgttgtgcggatctcattcttgcatattgagcggtatagttctg

SEQ ID NO: 998 - DNA, 393 bp, Gossypium hirsutum
  misc_feature (312)..(317): n is a, c, g, or t
  misc_feature (322)..(322): n is a, c, g, or t
  misc_feature (365)..(371): n is a, c, g, or t
  misc_feature (382)..(382): n is a, c, g, or t
tcaatgacaaaaattgaaaataactatgcttgagatggtaaaagtacaaattctatcttcaagaaaacttgcaaaacaatgttcataatgcggaaaactaaagaaagccaaacaaattccagactaatcaaatataggggccccctctatctcctgtgtcttactatacccatctcatggaggggaaatatgtagagctcgtgcagcgagagagagggggtgataaaagagttgggtctggccggcgaggagaggagagcattaccttcatatctgatgagatggattggactttacttgatggggaggtgnnnnnnccagngctcatatcctatgatatgatgcctcgctgctctgttgagttnnnnnnncgtgtcacgcntcccctccata

SEQ ID NO: 999 - DNA, 640 bp, Gossypium hirsutum
gctgcaccacaatttcattttccgttctcatatgcacatctgcattagctgctgctggctcttgttcccttacctctaaaacatttgtaaatgatggatcatttggtcttgatgtttgatccttcatatcctcaacaggaatgttttcattttcattttgattttcgttttcgttttgtagccacctgtcatataaatcatcatcatgtgactcaacaccaccttgttctgttctacgcatgtcactgagaaacgatgtattttgcttccgactgccagagtaaatattttctaggaatctattgctagctccatcagtagaattatgacaagcagagtagaaatcatctagtggaagggctctaggatgtatgagcacctccagtgcaaacaaagcataggcacaaaattgggcgagcttcattccagcttcttgtttacctggaatagccatataattacagttaaacaaaatgaagtatggcacaaaagttaacaagaatctatatatgcaacagactatggaaatgcctgcacaatgtttttaacttattaattatttgactttacaggctaagctagttttttgccctggcctcaatttggagtgaagcataataagtactacaaaagaggagtt

SEQ ID NO: 1000 - DNA, 648 bp, Gossypium hirsutum
gcacttcttggtatgtattaagtttgagaagtaaataatttgaaggttaaagctctcaacagtttacaccgtatttgtgaaattgcatgttctaggcttggattatgagagactgtcaattgcatttttaggcaatagagctggtgacattcatgttttgaccccttctatctctctcttcttctgataacccaaagtttttaattgttgtattgcatcactaataatgcgcaaaacagaaatggaaaaggaagatgatcttcttgatcagttgtggaagtctagaagcttggctatggagaggataagaggaaatcggcagcatattatcctagtagcatcattgattgatcgcatacccaaccttgctggattggcacgtacctgtgaggtatgctggttattaagttgtatttcttttttcttagtaccttgattcttatttatcatttattattttgaagttattattgcaatttatttagcatgtctactgttcacacaaacactcctaagtcttgttcctttcaggtttttaaaacacaggggttagctgttgcagatgcaaaaatagtacaggacaaacagtttcaactcatcaggttctgatgatagttttcatttgtgctgtaactctctgtatcaccc

SEQ ID NO: 1001 - DNA, 592 bp, Gossypium hirsutum
cttggtggatgaggaaggggcagaaaaacatagaatctttcaaatctgatcctcctcttaaatcaacaaagcaagtttctcgtggtagacaaaagactgtgcgtaaaactcagagtcttgctcaattagcagctgctagaattgagggtagccagggagcatctacaagtcacatttgtgataataagataaactgctcacatcatagaactgaggtagaaactttaaagccagtggatggaatcagaacaacccattttggagatattgtttcgattgaaaagggtttaaagcagcttcgctttgtggagaagaggattgtcatggtttggttgatatctgtagtcaagcagcttgttgaagagtcggagaaatctgtggccaaggctggccagtacggcaggcccttcattgcggctgatgagaagagtccttggagatggaagcttggtgaggatgaactatcagttatactgcatctaatggatgtttcctgtgattcagtttcagcgatcaaatttctcctttggctgttgccaatagttagcagtaatcctggtcctactgttcataggggagaaacagtctaagg

SEQ ID NO: 1002 - DNA, 620 bp, Gossypium hirsutum
taagcataagacaagaaatgtgaatgacatgcgaatcatcatataaaatctccagaagcttaacactaagttccttataaacgaggctgactatgacacatataaagaatttgtaacttgaattagagaaaccaacctattagttgatgcaacccacgacaactcgtggtacaaaagttgctgagggtttccattagtgtaatgagttgagaagctagcctaacatcctgctcacatctgcaattgaagcatagttagtttactgaagtgtgcttcggaaaacaatcacttggttacatgcaaaatgcaatgtgcatatacactatatatcctcaatttttatcaaaataagattcctttttttagccaagtgaaccattgatagcaacctctagagcaatgtagatgaaggaaacaacattagaaatttagtgataaatttttatccgtacaataaccaattataagtgatcaactatcatgcaaagttacatcttgaattccatgaattctcaacttgtttgtcaatcacattcaaatacaaataccatttaaaaaaaaaagggaggaattttaaaaataacaatttttctcaaaaaaaacccctttgttgcccccct

SEQ ID NO: 1003 - DNA, 653 bp, Gossypium hirsutum
aacaacgttgctcattcctttactcaaagctgctttacttatcactgatatacccacatctgtgcattccactgtaatcattgccataaaagggagtgcattccataggtaagaacttaaccccatattttgactaactgcaaaacctgcaaaagcagagaaatatgtggagatgtttggttttccaaccaaggaaaacttgattttatatgtattacatatgtattgtcccatcttgaaagcaacaccttagctgcaatttgtttatacgcagtagtgtgtttcaaaattaatatcaccccaaaagacaaacctcaccattatttttatcagccacttgcattatacaataatctacaacatttaatggactagatcatttcctctcatcctattccatgtaccttttagtgccacttgatttctccacctcatccactttaatatcatttttctttgaaattgcagtttttgcttaattatatatttaagcaaattcatagtatatttaaaatatttaaatatatacttaataaaagtgcagaggcactaaaagggacatgtctcaaatacaagcaccaattgaattcaagattcatgctactttggaaatggaatatatatatatatgagctagtatttctaacaccgga

SEQ ID NO: 1004 - DNA, 622 bp, Gossypium hirsutum
tgctcacttttctagcaattctctctccttagccaccagctcctccacctatagagacagcaccaaagtaatcacttaaacaacactgcctaaaatgcaaatcagaatttgacatccacagcaaacagagttgcaatgaaaacattgtcacctatgaaggcttaattaacaaacttcttcagagtaggactaaaaatgcaaaaagacggatatcaaactaaacagaaacaagtaaaagacaagtgaaccttggataatacttgaacagctgatggggaagattgcaagaaggtcatcaacggtttcaactcttttgacagctcttttaacaaaccatcagtagattttcgagcagctttacaagcttgcacctctcctgtcctagaaaggtcgcgtagagatgcttccagcttatcgtgtgttgccaagcaccggcatatgatattatgaacctgctgaatcgcaacccgaacctgaaattgcagaaagcaaagtccataaccaatgcatttgtagatgctgatttgggtgaaccaagtaaatggcatagtgatatcctactcacctcttcccactgctgtttagctaaataagaagcagaaaacttggagattgatgtatc

SEQ ID NO: 1005 - DNA, 647 bp, Gossypium hirsutum
ataatcatactttgccatactagtgacattgtatgttctcgtatggataaaaactatattatgaactttttgcaaaacatggtagaatttttcattgttattgatgctgttggaatttgttgttcaatgccactcccttgtacccaattgccattcccgtgtggaaattgggtttttcctttttttcatagtgttactgtttccttggtgctgtcagcaagttgtttgttattcctttttttgccctttttctcgcatttatagtttttaaatttcttactattaggtccaagagggggtgaattaggattttaagaaccttttttaaaataaaagagaagggaagaaaagctttgacaattcaatttatagaggttcggcaccaattgcttatctccacttcattagtataccccaactgaggattttctaatttattactttgaattgtacctttcaaggaaaaggtataaaccctttacaatccctatttgtttttttaggtaagatagaaccttcacatataaacctctaagaaggtaggtgttcacagatttggctcgctagaactatgtgcaagagaataagaagaaataaagaattaaatactattctcttgatgtggatgcttggatgttcctcttatg

SEQ ID NO: 1006 - DNA, 642 bp, Gossypium hirsutum
cattttaagggagaataaaatcatacatggacttggaaagcttttcttctaattgtttgtgaatttctttgtaccgagtttaggcacttcttagtgttattgtgtaaacatgtttggactgtttcttgaggttcctttgaatccagtttccagccacagtggcctttgtattagttttcgcagtactgtatttatttgccttctgcaaagtttatgttttgcataacatggatctattgttcttccgcaactagaattgccttggaagatgtgtgattttccttatttcttcagctgtcagtaaaaattgaaatttcaaatttggtagtcatagtaatgttagaaccttatcttaaaattaaatttcaaatgacgtttaggaaggcttgctcatttgtttttcaacgtggttgaattagttgactcaagctgccacctcctacttgtgcttgcctatataatccctacaggagtactgtaattgaatcaaatttctgagcgcagtttgagctcttatttgttactctttaccttcttttgaggttagatcagtgtaagaggtttcctgataaggtttgccttgggattatttaaactagttcctattgtgtatgaaatagctgttcatcctaccagtgacta

SEQ ID NO: 1007 - DNA, 640 bp, Gossypium hirsutum
gggaaattatgtgacgcaaataaaagttatccacaaagaccagcttgattccatcattcaactagaccaccatctcttgataacctttcaaaagtattgccttcttgattgcctacttcaatcgtgcacttagccttagtgttacattagattgctcctactcttgttatttaactttgccctctacttctcgttaaaaacaaattcccatggtatcacctatataaaatataaagtttcccattcgtaagttaattcatccaactgcccatgtaccttcttcccttactaatcttcataatcacttctttcactagtcccattttaaagttatttctttttgagccttttcataaaaaaaattaaactagtttacaacatgtctaccatatgggtaaaaaagaattatgtaccaaatatgtttataaaaatttgatttaaaaagataaatgaggttttggctgtaataataatgttaagatattaaagactttaataggcacattttgaccaggcttacacaaaaaccaaaaaaataaaataaatcaaaataaaaaaactaaaattaaagtccaaaaacagtcctcatacaaattgtaacatttttacagataaactcagcccaattactaaataaacc

SEQ ID NO: 1008 - DNA, 506 bp, Gossypium hirsutum
aaatcatattgtggaagtagtcatggttacacaggcattggattgatattgatcggtttgatatggattcgatatggaacgatgattcagatgaatttacccggtttgagataatcgcctccaatttatgatttggtgggactgtggatgcccttgtagaaaagatgagcttgcaccgataccactttcctcacctataaattgctcggggtaactcgaagatggcggggaccaaactggaacaactccgccatccctttctctcctactactactagatgattctgcagtggaatcctcagcatttctcaacccaatcgggaagttaagttgcaggctgcgtgctgtttctggaatcgcttggtttaatgtgtctctccgttgttctcgatttatatttacagttcctggaacttctgctctgctatcttctgctgaagttctaagatacgaagaagactcttcatgttcacctctcaacaacgaagaagtgatgctaggaacca

SEQ ID NO: 1009 - DNA, 610 bp, Gossypium hirsutum
aaaaggggttaaattttattaaaaaaaatattcatacaaatcaatacatgcaaaaccctgaacacattgaacactcgttaaacctaaaggtaaaatatgtttaaagaagtggcaatgctgaaagatcaattaaccttttttgaatctgtacattgatgatgctcattaactgtggggctgctacatattttcctctacagaatcaataaaaagcaggaactacgaaatgaaagaaatccagaccctaattttcctttgagatgggaagtggatgaaagaaaaagagcgcaaaagtgggctgttttgctccatatttatttttgcaccgtctatatgttatattggttgccagctttggtcgaactcgaaataattagatgagtgaatttttgttgaattatttaaattataaaattatttaaaatttataaattattaaatctcgtgttttttatatttttttatcacttccgaattttttttttcaaagatcacttttaactcttttgttgactcaaaaatcaatctagcttgaataatattgactgttagtgtcacttggcatgacaaccaactataaaaaacatagttgtaaaaactggatccaact

SEQ ID NO: 1010 - DNA, 640 bp, Gossypium hirsutum
attcctcaatagtccaaattgctgcatggttaatggatttagacaaatctacaattgtactaccaacttgtaccttatacacactgccaaatccacccacaccaatcatgtttgcgtcagagaaattgtctgtagctgcttcaattgtgctcatgtcatattgtaaagaattcatggttctagccttgcttttatctacagacgattgatatgacattaattacagggtaattttatatgaaaaaaaatagaaaaagcaaatatgaattgttaaccatatgctaacatataagacaacggccacagtacccttctggtcctttagcaaatagggtttcatccttgctttccttcttagaatgcaataacaaattgttgacaaaagcactaagaaaccaaccgttggaacaataatgtaaataattgtctgtgatgagctcttccctttccctgaatctcttggcggcagaggagatggcttggacctggatacttcccctacagttttgttataaaatggggttaatccatattgaacattgcagctaggcagcaatgaacttgctcgagttgctttctctttttgacgacaacaatctgagaattctgtaatagcactctcaagacataaattgcaaag

SEQ ID NO: 1011 - DNA, 301 bp, Gossypium hirsutum
ctgcacacaaaggtaaatccaggtatattcttgttcttcagttcatttgacttcataatctggttgccttttcctttgggtaagagtatagtcatgtgaaagcagcaagttccaatattagttatgatgaaattttccataaacgggaagttattttatgttcatttcttagataagtaaaccgttagcaattaaaagttcctaccttgaatctagagaaattactacggaatgactcctcgaggtaaggtgaaaacattttaaactatgacataggggctcaaaatctcttttttttttt

SEQ ID NO: 1012 - DNA, 659 bp, Gossypium hirsutum
gttatttttactgttaaatggctttaaatattgtttggtgaggtgtcaagccctttcatgaattgacccttttgaatctctgatggtgaaactttgtcatgtgacagtagagcataactttatccatccggaacttttaaacattaatggcaatgaaagtgaaatgaaatttctaaatctgttgcatgatttttgaatcattaatacttccattaagaaaatgattttaatgatcctcaaatcctgcgtccgcaaggtacggtggctgtccactgtccaccggactcccatggtggtaggagctggaagggcaataatgatgttagaagacagacagcgttgtctccaaataaaaaaaaaatacagatccatatcatccaatgatattattatggacaattaagaaaaaacaatattaagtattgttgaccttcaccttcctaccccgattctaaatgtctgattctctttgactttgtctgttttattttataaactggttagttcttctcccacattttctttgacttgtagggactcctattcatattttatgcaacaatggaggacttttgggttatcaacttatctacccccaataaaattattgttctttcttctattattcaacttaaatttcgattccattgttgacttga

SEQ ID NO: 1013 - DNA, 612 bp, Gossypium hirsutum
cgcgcattttagtgtcactcctttatcctacgcaccatcgtgtatggtaggcttattatagcccattgcttgtcatcatttttttctctactcgttttcacacgtgtcttccaatgaattacccacgtcatcgtctcttaagcctttttacttcctgtttttctccgttgttagggtttctagtttctttctttgaaagaaatatttctttcttttttttcttttcgactttcggctactgagtcaccaaacgagttaaggaaaagagagacaagtttcaccaaaccatggggtcgatccccgatcctggcgagttgaccgagttaacccagccgagtttcgatgagttccagcgtcaaacgtctctgatgacgagctgtactctcctctggaaagaactgtcggatcacataaattcacttgagcagaacctgataaagcagtcggagaccttgaaacgcaaaatcgaggcactggactcggagaccaaggcttcactcgactcactcaagaagcgggaactcagtatcgaggacagtgtcaagatcgcactcagccgagtcgagttcaacaccaaagctgccatgaggacccttggcgatgacgttgaag

SEQ ID NO: 1014 - DNA, 650 bp, Gossypium hirsutum
tacttcccccttcatataacttttatgatctttcaactatttatctatgtctttatatgggatgatgattatatcacatgcttcagaaaaggataaacgtggtgaaaaatatcgattcactataaaattgatttgagaactggtgttttcttcatttgtatgttgtttctatgttggaatggatgaagggtgggacgctttttcactataaaattctgaaaggcactcaatctattttcattgtcccattcactattctgaatctttttaagtagcctttgctatctgttgacacatttttttttctcccagagaagtgttgtcaaccagctaaaatccgatatggagaagttgcaggaagaaatcaaggccctactggttagtatcatgttatatttagggtacttatgatcagcttaagttcttcgtaaaataattgaatcttgtgggactgcatattgcttgagtcatatcatatggttagtctaggtgcgtttgtgtggtgtatttcatatgtccacttatgcacatagatttcgttcctatttcttgcatctttcttcatacctgttaaccagaaaacttggtacaaaaaaaatcaagtttatgagattcactcatcattttatgatatgtgataccactcgcaa

SEQ ID NO: 1015 - DNA, 663 bp, Gossypium hirsutum
tacccttgacatcatcaaacttttttgccactgctagagtagaaatgagtgcttcccgagcatttggagtgcttttatgtgctaaccactctgaggattgacctgaagtttgtggagaaaccggcaacttatatgacattgcacttgagttgcgctgttcaccagctatataattaatctttggaagcgatccattgttaacattatctgaacagttaggcaagctagatgatgtactacttccagagctaaccagttttcccagagtgagatttattcccggtggcaccactgctggatgacttttctttttatctgtacttgatgtacttggggtaagctgactgctgaatttacctccaccaccttcaatatcactgggttgttgcttatatccatctgccccattcgccaaactaactttcctagtggaatcttctaaagaagattttccaaacgatagaaaatttataccccttggtaccatttctggctttttctttggactatcattcccattctgaattttgtgtgattcactttggtggccctgaatcccaagtctgccacttccattcatcttcagagatgagctacctaggataaatttacttgattctgccacagatggctttgaagcaggaccacggacgcctaacatcc

SEQ ID NO: 1016 - DNA, 620 bp, Gossypium hirsutum
ccctttgtttcatgcttttcttcaggttcttaagttgtcaagcgttataatattgctaccaaaataaaggaaatcaatgaagaagtagatgagattgttaaagacaaaattaggtttgagttgataaaaagaaaaatcaaccaacccaaacgtccagaaactacttcttttgtggatgtttcagagtatggtttaatgcttctcttacttctttcagccttggcttaattttttatttttgtgttctagatacaatgtaggggaagggatgctgtacctgagaatgcgtctgtaaatacctttgtttatgaggtactttttgctatgatatttttccgttattttcagaatctactagaatcactgccttcatctcttcttaaaatgtaatttctgtgatagatttagtcccaactcccatggtgcatttatcaattgacaaccaaatttgtggctggtcactgggttatatgtttccatgttatgctaaaaacaagaaactactatgttgtaatcacaaacataaattagaacttatgtcataatcggtaatgcatccccacttcttctcattcatgtagtacagttgctgatctacatgtggtatgatgtgagctact

SEQ ID NO: 1017 - DNA, 430 bp, Gossypium hirsutum
  misc_feature (412)..(413): n is a, c, g, or t
aaagttaataactagacagtgaggatattgcagatcacctttaatgaacaccattgatggtcaactgctagtagacttataaggtttcctcgatgatgagcttcccacgctgttcaagctcataaagcataaacagtgctgctgagtctgaagaactttttttgtcagcttttgcatctccagtgcattcaataatgtcgtatcctgggacattcaagatgattttcgacacaaagctgataaacccttttttcctctcgggaccttcaccaatttccatgggagcactacaaaggaaagtaatagtgacgcttcaaaacactgaaaatgtactagcagatcaagaaatgaaacttcagcagatgaaatatttgcaagagaaaaaagagagatgccctgatttgtgttcaannttaaaggtgatttgcaa

SEQ ID NO: 1018 - DNA, 618 bp, Gossypium hirsutum
tcagaagttgtctttatttatcttgattctagacctgaattaacctatgaaaacttctcgagtcttaagcttctttaaatgaaaagttgcaggctttctgcatattttgacagatgcagcagcttagagacaactaatttatatcttgtacatacgacataccattatgaagatgtaacatcatagaatatccaccaccatctaaaagctatagtaactataggtaatatcaaaatggcaaaagaaattggacaaatttctgtcagacttcaataataaatgtgtttctgcaataaaaactgacctctcgtgctgcctccatgcttaatctgcggaggtcagcatccgtaccagtcacactagaacctccacgagcagctgctgttttcttcttcatcacagcatttgacacaggagcctttggagcggtacggacatagctaaatcctaaacctcgaccagaaggatcaccaacaccagttatctccaggcgctcaatattatctctgtcctggaaaaagggaaaagtagaaagtaatgatacaataaaacagcaaattcttacttaacaagccactttcccaatcaaaacattttaaagaatattattggaaaggg

SEQ ID NO: 1019 - DNA, 645 bp, Gossypium hirsutum
cggaatggcagttttctgtagcaaggcaagcggagataaagaggctcttgattttggcctctgaggaggcggctagagtcgagcttgaagcgactattgaatacggtacggtttctatttcgcggaactatcaccagtgtgctgtttgttattgtcctactaccacgcggtgcgctcgctgtaaaggggttcgatattggtacgttagcttgttaatttcgtgttattgttctaatttatttataattattgagatttctttttgtttaggcgattttgtttcaaatgtatttgagataaatttgattcttttatctgacaatactgtcttaaagagtatgtaatcgaaaaaatatttgattagataagtgcttcaagtagcgcagggcgagtgtgggtctagtttaaatacgctttaacatgtgtgaatgtacggtagtcgtgtaagtgtttatgtagtgagcaacgaagcaatttagaagactttgtgaaaattaattttaaacccaacatccacaatctatcattgatgggaagtttggagttggtcttaaatgctgcaattttttggtggatgtttatgctgattttctgaaaatgttttggtttgtaaattacatgtttgagcctcctatctctaggtta

SEQ ID NO: 1020 - DNA, 510 bp, Gossypium hirsutum
atcaactaaattacacaattaaaacaagcaccaagaatcaagcttccacatcatatcccctatgcagatttgatctctggtatttatatagatgacttgcatactttataacaaaaactttgagtcaaaaatcactgctggtttaagtttagaaactgaccttctcaggtgggagatcaatgcccaaatttccacgagaaaggatgataccatctgcttcttgtaggatctcatcaaaatggtttaaaccctagaaattcaaaataatgtcacatgcatattcatagcttctgtaactatatagtcatcattctcagtaaacacaacattttactgcacctctatgttctcaatcttggcaaaaatttgtgtctggtagaggtcaccctgcttcgaaaggaactcacgagcctacaaagaacatataaaaccaatcaaagaactgcataaactgcataaagaaccacaaggatatgcaaatataacacttacatgacgaacatcttctgc

SEQ ID NO: 1021 - DNA, 623 bp, Gossypium hirsutum
tggtggccaacgcttccagaatttggagaaggaaagtgaaagccattggaaatgaattgatgcgcgttgataggaaaagcttgggatctaccgttgggctttgtagcagtgctcgtgatagattgttgtttgggaagcgtagtaagttgttgatggacggaaaatggagacactgtacttgactgcaaaaagtaatttaaaatttagaactgtaagtctccacttttgaactttgaatgcggcagtgacttagcacggtgatcaatttaactacgatgacagtatgtcacgaaagcacaagtcaatattctatatacactttcgattttcaaccaagggacaccataccatttcaaatatagtatcttgtttaacatcacttgcctccttggtggactttgcttcagtagctgcaaaacgctaaagcaacatcaaatataaaatactatatttaactgctttcagcaagaaactacatagtgataagctcgagacagaaagagacatacgttgcaaagaattatcatgagctgaaccgaagtcattttctcccgagtcccccatagagagcaaattgaacagttcagttgcgtaatcgattttggatgatgctattactggtg

SEQ ID NO: 1022 - DNA, 648 bp, Gossypium hirsutum
tttctggtgcattgaaatcatctctttcattttggtcaggccatgtatcgttaatatcatcctcgaaggtcgacgcagttggtaaacccaatgataagggctgagcagttgattctttcagattcatggttgaagataaaacatctttcttagagtttcccccttttgaaaggctcttcaccctagatgtagattttacaatgaacagaagtcaaatgcgtgaaaggaaaaaagaaactaaaaccaaaagaggaataatttaaaagagatgttataaaccatttttacaatcagataactcttatttacctatcggcatatcttaaggtgttcagagtgtgttcacatgaccctgaacttggtgaaatgcaagatatcataactgtacgggaatttcccataaatgagtcccttagaacctctgtcagtttactgcctctgaaaggaatgtgaccctgatcattgtcaagggctcttatgcactccttcaaagcgagcaagctcttgttgatctctgcaccttccattctgcattacaaatagaaatggctaaattaaacaagcacatccagcaaaattaaactcgtacatatctaaagtttgtctgcataaagggaaaagttttggtatgctagatctgaaatcacg

SEQ ID NO: 1023 - DNA, 622 bp, Gossypium hirsutum
ctagggcttgttgtagcgaagacgaatttgatgcgctaagtaaaggctgcaaaacatctttgggatagttgaactctggcaatgattctccaaccattgcaggactggttgaagattcgcgaacctgcaaacaaagcaattatctgcaacaaagggacaagaagaccgattttacattcttcaagagttatggaaatcactagaaccaaacaagccgacctagtaaaaggttgatggcctcatgcccaaatcaaaggaaattatttgaagtcctttttccaggctataattatgaaaccaccagttcaataaataatgacatgcaacatatatggaaataaataataacacaaaatcaagcatgaatgaatataaaatcattgcttaattgttatatttaaagtttctaatgttctataaaaagaaagtttctaatgctgttttggtaaaaggttttagaaaactcaaatccgattggaaacataatgcccgtttttaaaatagatttgtagtcaaacctttgccaaaatctaaaacaatataatattatataattctgttaattgttaagatcttttcaggcttaggaatgaaaaacataaggaatgacaacgcgagagat

SEQ ID NO: 1024 - DNA, 555 bp, Gossypium hirsutum
gagtgtaatgttttcctttttatctccttacatagttggtattttttgttatacagcatgtttccgaaatcaacccatgaaacctttgcccaaaagctctatcagacattcaaggatcacaaacgctttgtaaagccaaaattggctcgcacagagttcaccattgtccattatgcaggagaggttagtcatgagtcctcgtttttacctgttaagagtctcacagtgttagtctttgcatatgagctctattattccatgaatattttcaggtccagtatcagtgtgatcagtttttagacaaaaacaaagactatattgttcctgaacatcaggagttgttgagtacttccaaatgttcctttatagcaagccttttcccttcacttaatgcggagacacctaaatctggcaagttctcatctattggttctcgtttcaaggtatcttaattttgctagcatttccataaactagtcattgatttatatttatgcatatatattcttaaatgtgttgaaaaataaatgatttgtggagccatgccatgtgttc

SEQ ID NO: 1025 - DNA, 657 bp, Gossypium hirsutum
tgggaatatggcatatgctttagagtacaatgatgagaaagggatctgtttttttactgatttccttgtagttggtgagaaccagcagacttttgaccttgaaggagacagtggaagcctcatactattaaagggtcagaatggggagaagccacagcctgttggaatcatttggggtgggactgctaacaggggtcggttgaaactcaaagttggccaacccccagaaaattggactagcggagttgatcttggacgtcttctagacctccttgaacttgatctcatcacaaccaatgaggggattcaaggtatgtattctcaaaacaatcgtgctgcaaactatagttcctgccaagcaaattacatgttgaaatgggagttccatttcgaatggctgtaaagtttaaaatgtatatagactccaacattcactgaatgataatgaaaatattaatcaagcggtattttagtgtgaaaggtttatttcacttttgagtactggtgttatatcccttacttttccttcatatcatttgttatttagtaactttagatatgcggtaatttaggtagaatatctcactatcaagcaaaataaagtgtaaatagaaaaagataagaagtggggaaagggcctttgtacctttatggtta

SEQ ID NO: 1026 - DNA, 606 bp, Gossypium hirsutum
  misc_feature (11)..(12): n is a, c, g, or t
  misc_feature (461)..(462): n is a, c, g, or t
  misc_feature (484)..(484): n is a, c, g, or t
  misc_feature (489)..(490): n is a, c, g, or t
  misc_feature (493)..(493): n is a, c, g, or t
  misc_feature (495)..(495): n is a, c, g, or t
  misc_feature (498)..(498): n is a, c, g, or t
  misc_feature (510)..(510): n is a, c, g, or t
  misc_feature (521)..(521): n is a, c, g, or t
  misc_feature (523)..(524): n is a, c, g, or t
  misc_feature (529)..(529): n is a, c, g, or t
  misc_feature (531)..(531): n is a, c, g, or t
  misc_feature (544)..(544): n is a, c, g, or t
  misc_feature (555)..(555): n is a, c, g, or t
  misc_feature (590)..(593): n is a, c, g, or t
gaaatgccttnnaccacatagccgagcaatgatccctgcaataacacctatgatagttatggctgccagcactacgatcagtgtttcgatggatcgatgcgaatagcgacttggttccctcactgtgggtggcacctcaactaccggtacatattgattgtttgaacctgcttccatatctacgatgacaatggaaactgaactaaatgctcatacactttgtatttctattttggttactgaataacggtgtaagactgaactcaaggaccactcacggaaagcctgcatacatgtaagtaaaagggaaaaaaagagatagataattgagagtaaagaagggtgaaaaggtgagcagactatgaaacataattgagagtaaagaagggtgaaaaggtgagcagaatatgaaaccaagaaagcaaatgaagtagcagattaccaaggcttaaaaaacagtnnagaggaggaggaggaggaggangaaannganancantgatgtttgttnggttggaaganannaggancnctataatttgaangtgggaaaganggaaataggataggattccagaaataaatagaaannnngtatttgcagtct

SEQ ID NO: 1027 - DNA, 637 bp, Gossypium hirsutum
cagaaaaaaatgaggacaaagcagataccatattttaaaaagaaagaagattttaaaagcaatagaacaaaactagccccaaggttcattaacagaacagtgtatgacaacatgcacaacaacctcaccaaagctgcttcacctacttttgagtattaaaacttaaacataaaggatgggaaaaggagtgcatacatgtatgcaagcatcaaaaggaattaatccacaatgaataaaacaaagtttctggacttgtaaaaaaatatataaagatttaaaggaaacatgttggaaaaatggaacaaatgtacttgactggagtacttaataaggaaccggaaaagaaatttgcgagacgtagcgcaaatattgccacgagaaaagaaagcttttgacataaacaaagtaactgacctaaaatgaggccacggattaaagtggaatcatttcagctgatatcagttccaggccccccaaaacgagagcctcttgatgtcctgctttaagaaaacatgagtttatataagtttttgcatgttttaacttttaatataagtaaaagcatccaagtttacataggcaaactggaaggaaacgactttgtataaattccgccatatcttcaagtgcataacta

SEQ ID NO: 1028 - DNA, 614 bp, Gossypium hirsutum
aagtgctcatcagtgtttccttcataatagctttaatgaactctgtaacatatattctatgaccattttcttgaaggtgagcattcttgtttgcttacattatgattgagtacaacaatcagtcccacaatatctcagaagaatatcgaaatttgaatgattcgtctcaaaagaaggaagattcgtttgccattaaggtaaaaagaaactgatttataaggaaaatattgtaatgaataaagttcatcataattccaatggcaaaatgttttttacatttcgtttacttgttttagagattctgattattcgtaatccagaacgcattagttctaactgcattcattttgtatgtatgcaactaactctttttgaggaacaatattcaaaagcaatgttatgcaatacaaatgcatgtggcaaaagaatatcgtacctcgagtttataaatttgatgcctttccttggaatcatgatgatcagatccagcttcagaatcctcatcatcttcttcgtcctccttttcaaggactaccttaatactctcacctgtccttggtatatatccaaaggcctcacagacaaaacctgacactttctcatactgatgttcc

SEQ ID NO: 1029 - DNA, 621 bp, Gossypium hirsutum
catctcttcttccgttagcttccttaggaacttggccgggttacctccccaaacctgtaaattacaaaggagaaaatccgttaatcttaactcaatgataggcacggcaaagcaggaagcttatagctgcttcaaagcttctcatcgagtaatggcaggaggtttcctcaaaggaatgatagcaggtgagagatctacattttttgaattatctgaatccataaatctgcctaaatatatcctagtccgcaaaaaagccaatttcaaaattttcaatcatttttcaaatatcaaaatctgaaaaaaattcgaattcaattccactaaaattcttttatatataaaatcaaaattataagcattttataaccagtggattcgaatatccaaatccacattcattatctaaaaaagcaatgcagatttagataatgtacatccggggtatctatctgcaatctcagcaaatagtaattttaaaatctaaatccaatattatccgaatccgaaatctgaattgccattaattcctctccctccaaaacacttaaaaaatatgtaacattcattccaactgatactagaaatgcaagttgaatcgactgccattagaaagcagta

SEQ ID NO: 1030 - DNA, 603 bp, Gossypium hirsutum
caaagcatgttgctaactttgtacgcattgggcatttgtaggatttttcgtttttatttatgggaaggttgttagaagggttcggtgttggtattatttcttatacggtaccttgaaagctttcagctgttttttttacgtttcttggattttttttccttttacaagtaatacttaaaatagaatagttccaagattttttttttaaaaaaaattatgtcaaggtgcctgtgtatatagctgagatagcaccccaaaacatgagaggaagccttggatcagtgaaccaggtttgttgtacactagtatccatttcagtatcccttatttgcttctgtctactgattaatcaagtgaacatctttattggatagctatcggttactattggaataatgctggcgtacctgttgggactctttacaaattggagagtacttgcagttttgggtaagcggattaaactttgctcacctagcccttctttccagaaagagaagcacttaatgctgttgaagaaacagtgtattattttttttattcgaacaaattcaaatttctttgaagatttcgtattgtgcatggccgcatgcatgtgaagac

SEQ ID NO: 1031 - DNA, 624 bp, Gossypium hirsutum
ataaattagcaaaaaattaattgcaattagtaatttttaaccaaagaacttattttttacaagagttttactcctaatttcaagttaaaatttatactaattattctttatttcatatgtactacataagtttttctagtaaccaaacgtgtcatatgttaattatttattagtattgaatatctctagcagtttactaacagttattatgtgttatttggtattataaagaaggggaaaagggagtgtaccttgggtattatgtattccagtaccattggtgtgttggaagacttgtgtaatgtgttgttggcagtaaagattattggattgggttctatgtttcatttggtgcttgtgttttaaggatttacaggttaaagctgggaaagagttctaggtttcctaccaaggggcaatggacatagatgattaggccctacatataattactgaaaaaagaaaacataaaaaaataggtgctgtcaatgggcactgggcaggtaactgaaattagactaaatcgccatcacaaatttcaaaagagcagtaccacaacacaatacaatacaagatttacaaacgtgaatagctttctttccaatttaagtaccagttgagttg

SEQ ID NO: 1032 - DNA, 626 bp, Gossypium hirsutum
tcaataagctttctctttctcttgtgggaaagagaattccatgctagaaagtccattggatgattgggttccctcagcatacaagatatccatgtctgatggctcgtaatctgtccttgagatctcaacagcctgaggaaaagattaacttcaaaaactactccaattgctaagcaattccagctgctcacttagttggaaggataaaaacccagagcagcaggcttacccgttctaggaaataagtagcaatcctgggcagcatttggagttcatgcctccggttataagtggcctgaaaggctgcatcattccacagcttctgaataaatggtgcatattcacgagtagcagctgggaagatgacttccaaattaccagataccatcacttggacaagccactccgagaaggctttcagtcttggggaaagggaatattttgttttaccatcaatctggcttgcaccgcctgtcaacaatgaagatcacactattaaataataatgtcaattattctatccagaacctaagaatatatatctaaagtattgcaaatacttgaggcttttacagatcatattgctatctgggaagcttatcactactaatccaagtattgcaggg

SEQ ID NO: 1033 - DNA, 621 bp, Gossypium hirsutum
tagtttcttatatttattatgccaatgaaaacggtcatgttagaaatctgtaaggaatgatcatagaaaaatcaaaatatgtttgaaatggtaaaatttagtttgagttgaaatatataaatataaatatatatataaaattacttcatagttgagtataaaaatatgaggaacgatgggtgccttcgatcgccttgtccaggcattgaaggccctgtacttgtacatcagctcaccagatctgatcgacgagtatggaactccggcctcttggattgttacgagttatgaaattgcattcgttaggaaaatcaatatgtttaccaggagagccaaggccaatgtactttgtgcgctgcctgcgaaagataaaacaacaatggggaatgaatcttcgacgagttacatgtcaaatgtatgaaatttctagtctaatcggaaactacctatggttgaagcctgggacatctgtctacgaggaatgacaaaattagtagtgatttagacatagtcactttcaacttgaacagccgtaatcctacttaaaaaacaggaggaatcattcaaatggctgcaacttcatcgttttcgacatccaagccgcttcactattatacaaaa

SEQ ID NO: 1034 - DNA, 344 bp, Gossypium hirsutum
ccggctgtgtttgacaatcctaatagaactccctgtgattgacacaaacgacttactttcagaaaaagaaaaatgccattcgaaacaagaaatattgttcattaaggaaattttccagaatttaaaaaaaaaaagttcaataatgatattttatattgtgagtgatcataagttcaataatcaatctgttgttattagttctagctcttggcagagaacatgttagacgtcaaataatattattatattattagattagtttattatttgattagtagttttaatattattagaaaatttccgtagctgatatttaattcaattaggagattttatattattag

SEQ ID NO: 1035 - DNA, 627 bp, Gossypium hirsutum
tccttccttgataaaactttcgattccagtatcattgaatgaaccatctccatcaataagttgaactgaacaacattcatcgcttgttgctgagaaatcaaatgttcatagcatgtcaaggtaaagcgagaaagcatccataatgcacagaactaaaccgccctattcatttttcctttttaattgaaaattaaattctctatagcaattaatcaagaaaaggacattttaagtatacctcaactgaaacaaagtccatttatcttttgatagagaattttgacgtactaaatagctttaacagctgataattcaaattccagttctttgcttttttattttccttagcttcctcaacaaccaaacatgccataaacattaaattcatccccggtcccgatccaaacatcataatgaattgctgatttacactactaaaagaaactttagaaatctaaaatacagtattcaaacccaaatttccacccaaaaaaaaacccgcatcgcaccctaaataataataagaagaagaagaagaagaaaaatacttaagtaaattgtatatgcaaatcctcatagatactggaaaataacattctatctttaccctttgtttggtcagaagga

SEQ ID NO: 1036 - DNA, 360 bp, Gossypium hirsutum
tttttttctcctatttatttttacatccatgttcgatcgaaccttgatgatgatgatatcgtacatttgatttaaggtggacctcgaccttggaaactatgagcgctttctagacatcacattaacgcgtgagaataatataacaacgggaaagatttaccaggtctcttcgcgttcctttcttctttcttccattccaattcaaaaactctctcttcaatcaccatgctccttctgtttttcacagtctattattgacaaggagagaaagggagattatcttggcaagactgtgcaggtccgtttttaagctttccactcttttatcaacaaaatctcctatgcattgctaccttatga

SEQ ID NO: 1037 - DNA, 624 bp, Gossypium hirsutum
gactatcatcaggctcatatgaatgttgcactgagctagtagattcgagatgacagaactcgttgacaagtggaaaagttgaccttggtctagctgaggttgttgagacagtgcatcagctgctctgttattgactcccttcctgtaagaaacctcaaagtcgtagcccaacatcttagccacccaacattgtagaaatggagtgactgctacttgatcagacaaaaattacagactctgatgatcagtacgtatcttgaagtgtcttcccaccaggtaagcatgccatttcttcacagccaacagaatagccaacatttcgttttcatagattgatagggcctgatgtcgaacccctaaggctttgttgaagtatgccactggtctcccttgctgctgcaacacagctccaattctagtcgcacaagcatcagtatccactgtaaattcgagctgaaaatttggtagcaccaagacaggtgctgtgcaaagggcattttcaagtgattaaaacatgaaagtagcctgttcagaccattgccatccattcttctttaacaaatcggtaagagttttgccaacactccataatgtcaaataaacctcctataatacccggagaaa

SEQ ID NO: 1038 - DNA, 635 bp, Gossypium hirsutum
aacaagagtacagaaatggatccttgatactctagctcaatttcataaaaggaatggtgttaatacactcccctcctaaaaagttcagccccatcatttctctatttcaactttttctttcttgaaaattttagcatgtgtgagacgtctaacttcgtacatgaaaaattgaggattatgaattacagatagagtgcagtggaaatgccacctaaaatgacaaatttcatcataaactttcctattaagaggcagatccatatgtgtgcaaaatctaatacatgcatgcttgtatccaattattgtaacttacattcccattacaagatatataacattctaggatttcaactgcctctaaagcttgaggttgcatagaaaaaaggatcccaaaggaaagaaatatatcaaatatttactccaaattggtaaaagtattatggacacccctgtactaggagtcaaattacattttaccccctctacttaaaaattaacaagttaatttttgtacgatagataaaaaaataaattgattactttcattaaaaatttgatccattcataatgttaaaaactaacgagactgatgaaatattcatacaatgacatgtggcgtatcacatatacctcgt

SEQ ID NO: 1039 - DNA, 647 bp, Gossypium hirsutum
caagtcaggtaaagctatactagtttggctcacaagtttagcctggctttagtaagagttttgatgcgtgagttcctgcctgcctgtttgcagtagcattcaacttcttgatgggctaacattattttcgatattagacgacaggctttgagtttggtgacacatgcattccagcgcacgttttgcctcctttgcttttttgtcttaaaatgctaacagggatgattctgacttagtttccactattgcagatgaagcagtcaaagctttacacaatggtggggcaatctcagttataaagtctactccagacaccttcgaagatgccgaaattggtgcatacaaatcaaacttactgaagagatttcaagatttgagatatgatatttcctcttgaaaagtttttaactctttgaatttggaattgaagagcagttaggcaaaagaagccttagcattgaagggaaactctgtttttataagaacaaatgaaaacttgagtgtatcattttgctgattatagaattcaaaatttacacttcatgtttttggttaatgtgaccgtcgactggattgcattatcccaaggaaataaggaaaacttttgtttacctaagaaatgttttgtttttgccctggttacctgc

SEQ ID NO: 1040 - DNA, 671 bp, Gossypium hirsutum
tctgtaattcccacccgcttgccccccttttcttcttttaatgttgagcgttttgttcattatctggtctttgtttttttcccttgttcagtgcacagcaaatgaagatggaattaatattgcagacttgattggttacagaataaaagtgtggtggcccatggataagaagtgagtccccaaaactttcgctattccatgcattatagtccaaagtattattgtgaaaatttctgtgaaacaaattgattctcagtctcaatctccaatgttattcccactttatgcatgtttcgtgtgtttgggagtttacatgaggcttcgttttgttatgctttatggttatgaaaatgagtctgggctatttggtgcgtttcaattttctcctttttggagtttgcaaatgcatcctctttctagttgttttactgaaagcctaaattctattttgaagcagtgctctggtctcgtggcaggttaaggttttaatttcatttcttttattgtacttgcatcattgtgcttatctagcctgtcaacttgactgtttccttgtgagtattaattatatggtctgcatgattatatttgtcgagtttcatgttccattcaaatgcactccacattgttacatgtgttagcattattcaatttgaactggtctaatcagt

SEQ ID NO: 1041 - DNA, 591 bp, Gossypium hirsutum
gaaaggcatgggacggtcactcaatccatgaaaggattcactgccaatgccaaggtatccagggaaaatgaaattttgtctgtgtgtgcctatatgtatgtgcgacttttttgaggatatgtatataaattatcacttctctgtatgcatgcatgcatgcatttatgtatgcatgtctgtgtatatgtatttatatatgtcttacttgcacgtgcgcaacaaaaggaattggaggtatctacaacatacatatgtatgtgtgtgtatatgtatatgtatatgtatcactaattaatgaaagtagtgatactccttatatgactgcatgtagaaaatgtatgaggaggccaaccaggtggcgaatgaagcagtcgggagtatgaggaccgtttcttcgttctgtgctgaaaagaaagtggtgaaacagtacgaaaagaaatgtgaagcccctctaaaggctggaatacgacatggattgatcagtggcataggtttaggaatgtcatccttcttcctgttttttgcctatgctatcagtttttatgttggagcccttgtagttcatcatggcaaggcaacttccatcagttt

SEQ ID NO: 1042 - DNA, 379 bp, Gossypium hirsutum
acaaggtcactcactctctatctatgatgcagacaggggaaaaaggactctttttttttggcatatgggattctgtgagtttatcagagctttaagaaaagaatatgcaaatttacagtgtaaaagcaacatagtataatgttgtatggggtgtagtgaagtgagtgtgagtttgagtcactactccccagcagaggattaggtcattgtacgtctctctcacatcaaatcattaatgtcttcttttatatatagctacagaagcatattcatcggtttatctatatatataatataaaaaagtctttgctttgcctccacaaaccatgacaccagacaatagcgccagaaagttacgaaaattgccccaaaaagttac

SEQ ID NO: 1043 - DNA, 624 bp, Gossypium hirsutum
tcatgctgccaaggaaaatggaacggtcaataagagaaaatgttatacaaagttatcaaaacttctaaatcttaaagtatgagcagaatagatgcctcaaccgatacaatgtagagaagtaagtggaggaatgaaagctaggattgcagtatagtaaattctattccatccccagaatgttgcagttttttttggtagtaaccaaatggtgcaaatcatcctcagttctccacggttagtcacattattaagtccctctaatgctacactctaaatgctcctcttagtattcacacttctcaagccaaatgaaaagaaactgcaaaatgacttttacaagtaattttcaggagtttctagggatacaaacccgatagttgttatgaaactagtagtaaaggaaccatcagaaaaacgtaaaagcagacaactcttccccacacctgcataaattcaaatgagaaaatcactgtcgggaaaaatcaaagcttgagaaaacttagcatgttattgacctacaatgccggaaccgataaaaccattttgcatgggtccacataagcccacgttagttccagctattaaaaatagagaaatgagatgacaacggatactgctattcca

SEQ ID NO: 1044 - DNA, 599 bp, Gossypium hirsutum
ccctctttattctgttcttcctttctgtcaggggcaaggttgctgcttgtgcgaagcactttgtaggtgatggtgggacaactgggggcatcaatgaaaacaacaccgtgattgacatgcatgggttgcttagcatgtacatgcctgcctattctcaatctatcatcaagggtgtttcgacagtcatggtttcctactccagctggaatgggcaaaagatgcatgcaaaccgtgagctgatttctggtttccttaagaacactcttaagtttaaggttgagccttgttacagatctttatcagtaacaaaaatttgcaaatttagaacataatggaaatcccattattctttaaaatattggaccaaaatattgatatatccgtattatcttaaaggaagaactgctaattttgtactatgatattttcctgttaatgcaaattgttgttccaatggattttcagggttttgtaatatcagattggcagggaatagacaggatcacctcaccaccacatgcgaactatacatactctgttcaagctgcgattcaagctgggatcgacatggttagtagcttctgcatagacgtgtttca

SEQ ID NO: 1045 - DNA, 662 bp, Gossypium hirsutum
gtctcttcaacccaagttcaacagatggtagttctttagaatcattgatggttttatcattgacatcagggatcttggaaagcctgtttgaaacctcattctctgcaatttccttcttaagatcagtagtcttagatgtagttccagtttgattagcagcctcagacttttgtttgtttgatgggctttcactattgaggtccagctgccttttctcaatctgttcactgaatttactggagctcatatcaagcaggttaatctgtttagctccaactgttctgattgggacctcaactggacactctagttgtaaatctaaatttctaggcatgcctatatccaggtccttacccactgcaacattgtctgcaatagaaaggatcaataaggctaaaagaagagaagagagacaaggcagttctgccattaaaagaaagaaagttaaaaaggcactcagattaaagatgttgcccagcatggcatgcttcaagctgagggtgtaatgagacactgcctgcaagctaattgggttccactcaacaaaaattgaattcagtttggtcattgttgagcagaactcaagctcggcaactcaagctattaaaagagctcagtttgagtatcttaattctcagcttgagtagtttgcttggcttatc

SEQ ID NO: 1046 - DNA, 640 bp, Gossypium hirsutum
atgctctcgacacaggggaagccgtcaatattttaaagggtgcaatcgtgacagcagatcgaatacttaccgttagcaaggtgatttgttttgcacatgttctattttttatggtatatttacatcttaaatgttacacttaaatattacgttgcttcggctattcgtttatcttaaagtacctgtgctcaacacctgtatatgacatattcaggcatggatatttgaaaaatgtgaacatcagtaatcttaaaagattgatttagtctactatatttgttaattgtagggctatgcatgggaaataacaacggttgaaggtggacatggtttaaacgagctattaagcagtcgaaggattgttcttaatggtaagtatcctctactttataaataaactgtgtccgttatgttatactggtacaaatccaaaagcttttaggccatgcacatgcaattgttgtgaaggttaagttttgtgcccaagtttctccatgacaccccatttccgatgggtacgacgtttagtaagacctttatctaggtcttagctttgtctgtaagccccattaaggtaaaaaacagaccattttagagaaaatgcatgcatcaatcatgggtcatgcttattgtctcagat

SEQ ID NO: 1047 - DNA, 642 bp, Gossypium hirsutum
agccaccccacctcgtgaagaagaaaaaatagaacactctaatcaatcattcagaaaggagtaaaaagaccatcaatcagaattaaagaatagaaccgcaatttcaaaattatgcacaaaaaacaggttttcctctagggtatagtacttgcgatttgggatattgttccccagcttcaccaaacaggatcagcagaaagggaagttttaaatgcaaaccaactgaaatttcatgtgtttgtctaagtataacatttcttcaacctgaacgttctcataatacctataaaagcaaataagtggaagcagcaggaataggcttgatagtatgggagttgagagaaaataatgcttgggagtgggtagcaaatgatctgggaattaataacataatgataaaagcctattaatcatgcaaaaccgtaagttgtcacttgtcagacaaaagaaaatatcagcatgcaaatctagactccaaaccaatattagtttcaggaaagaaataggaaatccaaatggaattacataaactagcagtggcaacttaataaacagattatttgatatcagccactgtcagctttacaccagatccataacatgagtttggttttttctttttattgaatcgctggtttcaaa

SEQ ID NO: 1048 - DNA, 412 bp, Gossypium hirsutum
tacttgttcgatagagctttgaaacacatttatcctttctcttgcatttgaacatgcatgcacattggtggtaagtttagagaaaaagattatgttctatggaattttttatttgaataaatcagtgatcatgcatgcttacacatatttacagaaaggttcataatgaaaaaagcctttaactgaatgacttttggaatatatattacttcaagatgtccctatgttttgttatgaacaaatttgacggattttgttaatatgcttttggcctgtacactatttggcaggtgctcttcttttgagttggtagatttctccagagcagaagatttgcaatttgtaatatatagatgcggcggcttctgtttcagctaattagaggtagggatgtcttgctttggtataattg

SEQ ID NO: 1049 - DNA, 615 bp, Gossypium hirsutum
cttcttgttttgagttggttttgttggcatgaaacttaagattagcgctttatgttaagctgaatgcttttcttattcacaactgtgtgaggatcagcctagtttacactttagactttgctccataagcaatcatctggttttaggtataaaatatattatctttcttttgttgaacttcgtctgtgtagctcatttttagcagtgattttatgcagttccttttgttgtttattggaattgtttttgcatgtaaaataatggaatggctctgacctccaaacattattctttatggatgacgctcttcctttttcgttactgtttctgataattgtaggattatggagcgtgaaaagcaacttagcattctttatcagaaacaaggtcgtgctactcagttttccagtaaagctgctcgagataaatggcttcaaaaggaaattgatgatttggaacaagtgctttattcaaattcatcgcaggttgtttcaacattggttttgagatcttatattggttgcttttaggaaattctcttttgtatagtgtgtggacagattaccttgtcaatgtaattggacagatacaactaaatggagaagaaacattaaa

SEQ ID NO: 1050 - DNA, 654 bp, Gossypium hirsutum
tggaggaggggtatgcattagcagttcattgcctgaacttcatcctacccccttggcaccgtgttttcattttcttcaaggatcttttggggcttttagttagtctcctaattagttctaaaccagataaaattagttttagcagtccttgtctattaagttttataatattgaccaatcattcatgttattgtcttcctgcagaaattatatgatacaccaggggttcatcttcaccataggcaagctgcagtagtccactcagaagatttacctatccttgctcctcaaagtcggttcagaggtcaatcattccctgtacgttatatttgaaagatccttgacaccctgttaaattctttatattctttattcttacgatgttccccaagggttgccaggtctcctccaaaaatgggatggcagggaaattcaattccaatggcttaaatgggttctcaatattttggggtggccttgtcagaattgatgtcttgaaggtcctaataattttgtttcatgtatagtcagttacgagaccagttgtcattgatgtgcagtgtcttctgaatctgttacattcttgatgcttttaggttctccctgagacatgtttgacattttatgggccaaagaagttacccatttcatgct

SEQ ID NO: 1051 - DNA, 411 bp, Gossypium hirsutum
ttgctcgttttgtggaacttccggtttttaatttatctgaagaaatccctgctattcttgttgtaaatattcaggtgcatatacctttttcatctcttccttctttttctcgtagaattcactccatattgttatccgcatgttttctaagaccttacaatagatgttgatgtgaaatattttctcccaagctttagatcgagttgttattttccaattgtaacttacattctttgcttgaaactgaaatatggacataagcatgctcaatgtgtttataggttcaaatctctttgtgttgtcattgaaccttttttaataaagacattttctttcggcctgcagattccgttgtaccctattacaatctttcaaagtgaaaacgatggagaaggaatgaatttggtggtg

SEQ ID NO: 1052 - DNA, 1346 bp, Gossypium hirsutum
  misc_feature (633)..(634): n is a, c, g, or t
  misc_feature (636)..(649): n is a, c, g, or t
  misc_feature (651)..(653): n is a, c, g, or t
  misc_feature (675)..(681): n is a, c, g, or t
  misc_feature (700)..(711): n is a, c, g, or t
  misc_feature (717)..(717): n is a, c, g, or t
  misc_feature (719)..(719): n is a, c, g, or t
  misc_feature (723)..(729): n is a, c, g, or t
  misc_feature (731)..(737): n is a, c, g, or t
  misc_feature (741)..(744): n is a, c, g, or t
  misc_feature (752)..(753): n is a, c, g, or t
  misc_feature (755)..(767): n is a, c, g, or t
  misc_feature (773)..(773): n is a, c, g, or t
  misc_feature (777)..(795): n is a, c, g, or t
  misc_feature (797)..(826): n is a, c, g, or t
  misc_feature (831)..(835): n is a, c, g, or t
  misc_feature (837)..(837): n is a, c, g, or t
  misc_feature (840)..(850): n is a, c, g, or t
  misc_feature (855)..(864): n is a, c, g, or t
  misc_feature (876)..(887): n is a, c, g, or t
  misc_feature (889)..(889): n is a, c, g, or t
  misc_feature (891)..(911): n is a, c, g, or t
  misc_feature (913)..(914): n is a, c, g, or t
  misc_feature (916)..(916): n is a, c, g, or t
  misc_feature (926)..(928): n is a, c, g, or t
  misc_feature (939)..(939): n is a, c, g, or t
  misc_feature (941)..(960): n is a, c, g, or t
  misc_feature (965)..(978): n is a, c, g, or t
  misc_feature (980)..(983): n is a, c, g, or t
  misc_feature (989)..(992): n is a, c, g, or t
  misc_feature (994)..(995): n is a, c, g, or t
  misc_feature (997)..(1009): n is a, c, g, or t
  misc_feature (1012)..(1019): n is a, c, g, or t
  misc_feature (1023)..(1024): n is a, c, g, or t
  misc_feature (1028)..(1033): n is a, c, g, or t
  misc_feature (1035)..(1040): n is a, c, g, or t
  misc_feature (1049)..(1064): n is a, c, g, or t
  misc_feature (1066)..(1071): n is a, c, g, or t
  misc_feature (1074)..(1077): n is a, c, g, or t
  misc_feature (1079)..(1087): n is a, c, g, or t
  misc_feature (1094)..(1098): n is a, c, g, or t
  misc_feature (1100)..(1100): n is a, c, g, or t
  misc_feature (1110)..(1121): n is a, c, g, or t
  misc_feature (1124)..(1127): n is a, c, g, or t
  misc_feature (1131)..(1140): n is a, c, g, or t
  misc_feature (1146)..(1155): n is a, c, g, or t
  misc_feature (1161)..(1162): n is a, c, g, or t
  misc_feature (1166)..(1176): n is a, c, g, or t
  misc_feature (1178)..(1184): n is a, c, g, or t
  misc_feature (1186)..(1188): n is a, c, g, or t
  misc_feature (1190)..(1191): n is a, c, g, or t
  misc_feature (1195)..(1199): n is a, c, g, or t
  misc_feature (1207)..(1214): n is a, c, g, or t
  misc_feature (1216)..(1231): n is a, c, g, or t
  misc_feature (1233)..(1248): n is a, c, g, or t
  misc_feature (1252)..(1258): n is a, c, g, or t
  misc_feature (1260)..(1268): n is a, c, g, or t
  misc_feature (1272)..(1272): n is a, c, g, or t
  misc_feature (1274)..(1293): n is a, c, g, or t
  misc_feature (1295)..(1295): n is a, c, g, or t
  misc_feature (1299)..(1305): n is a, c, g, or t
  misc_feature (1310)..(1317): n is a, c, g, or t
  misc_feature (1322)..(1338): n is a, c, g, or t
  misc_feature (1340)..(1341): n is a, c, g, or t
tttatttaggctttgcttggtagagtagaaagaaaattacaaagatgagaaattgagtagaaaaatagaaagaaaacatatttttcctttccattcattgcttcacaaaatgaaaaatgagaagagaaaaatgaaactttggaaaaatgcatgatttttatttctctcattttctctccttttatcattccaatttggaacaatttgtttttatgcattaaaatgaaaaatagtcatctctcttgttttctttcctaccaagcgaactcaagatttattttcttttcacttgcccactcactccttccatccttccgtttttccactcaaccaaacacacccttaatgaaattggtcttggtgcatcaatgtgatagttgtctcattagcttttgaaattgcagtttgccaaataaccataaaataaatcagaagcaattatccaactttatacctgaacagggtatgtagcgggataagcaccgtaaccggcgctttgtggaactgatgtgggtacttgttgagtagcataattgctaccataactactacaagcaccatacgctccctacaagtagaataaaaattatggaactgtcaaaacaacatgacaaggactacacgaagcaaaanncnnnnnnnnnnnnnntnnngggtgtgtttggttgagtggannnnnnnagggatggaaggagtgagnnnnnnnnnnnnaagaananaatnnnnnnntnnnnnnngttnnnnaaaaaacnnannnnnnnnnnnnnttttcntttnnnnnnnnnnnnnnnnnnngnnnnnnnnnnnnnnnnnnnnnnnnnnnnnnatgannnnnantannnnnnnnnnnttttnnnnnnnnnncttttttcgctnnnnnnnnnnnncntnnnnnnnnnnnnnnnnnnnnntnnanaggaaaaaannntttttttttcntnnnnnnnnnnnnnnnnnnnnaaaannnnnnnnnnnnnntnnnnccttcnnnncnncnnnnnnnnnnnnncannnnnnnnaaannaaannnnnnannnnnnttttttttnnnnnnnnnnnnnnnntnnnnnncannnncnnnnnnnnnaacaaannnnnanaaaatataannnnnnnnnnnngtnnnnttgnnnnnnnnnnctttannnnnnnnnnaatatnngtannnnnnnnnnntnnnnnnncnnntnnccannnnnctactctnnnnnnnncnnnnnnnnnnnnnnnnannnnnnnnnnnnnnnnattnnnnnnntnnnnnnnnntatntnnnnnnnnnnnnnnnnnnnnancatnnnnnnnaaatnnnnnnnntattnnnnnnnnnnnnnnnnnannaaatt

SEQ ID NO: 1053 - DNA, 586 bp, Gossypium hirsutum
ttctgtttgtacttcatcttccattaatgacttttcacttcaggggttaggctgcattatcaaagcctaggactagggtcaccatttggccaagaactgaattatcttacaatctattcaagattcttattcattgttgtaacccgcataataaacaatttggtcattgaccaatctacaatccaagcatctttaccccttccaataattggttttttccggggaaaaggtctcctaataaaatattcaaagaaataaaaagggatttgataaagacggaaaaattaatttttttgaaaccacattttaactctcgacaaaatcgatgataggtctgaaattgatatactatataatgtttcaatcgttgatgagcatgaaaattctgtcattttccaggtgcatatgctaatttatccatagcacaaaaacattggacaagaaaacaaaccaacccttattttgcaatatatttctcaagaaaaaattctactcatcaagagcatctttgaggattccaccttgcttttcactttcaccttctcttcttaccttaaaaaaaaaaacaaacctctttcccctttac

SEQ ID NO: 1054 - DNA, 360 bp, Gossypium hirsutum
ttcccactgccttttagaagttcaggccgctgatccaaatcaattcttctgccagtggcatccaagttggcaaaatagtcaccaggaactgaacatggaagttgaatcaaatcagcacaaatactttgtaattccaaatattaccaggcaaaaatatcaaattctgccacacgatattaccaattggatacaactgaaaataaaacaaaattacattgcaataaagaacagttagttaatatgctatattaaattccattctacaaccgacattagctcaattgagaacataaaattatcatttgcactttaacaatgatttgagatagttcaaagtaaatgtagaggtggatggccaaa

SEQ ID NO: 1055 - DNA, 544 bp, Gossypium hirsutum
  misc_feature (445)..(445): n is a, c, g, or t
  misc_feature (452)..(452): n is a, c, g, or t
  misc_feature (460)..(460): n is a, c, g, or t
  misc_feature (474)..(474): n is a, c, g, or t
  misc_feature (496)..(496): n is a, c, g, or t
gtaagatccatccattaaagccctcttcatcagtgggaactttttccttttcacataatctgtatgcaagggctacacaacgcaagctatttacagccatttcatcaatagcagccttaaaaaattcctgcaaaaagacagttgaacatgaaaattgaagcatccattgacattgagtgatggcccattgtttgtgattagaggcaattgatgccttgcatgatgttctcaaaacccaaaaaaacaaaaaaggcagggtggtaattaaacatatcaattaacatgaaactggtatcaataagcagcagcatgaaaaacttgatttctggtatatttcttacttgaaacccaaaaaaatacactccccatccgaacccaaacttgatttgaccataaagagtcaacacggctaggaaaagcttgaatccccaaaaacctaaacgcnaaatggnatgaactntaaatatgctgaanctggaccaaaacccaaaatganctgaatccctaatgtgggacccaacagacccggcctcaaaccccaaaa

SEQ ID NO: 1056 - DNA, 587 bp, Gossypium hirsutum
cttgctcctataaataactgtcgttatgaaccaagcaatataatttcccagcacacttttcatcaatgttttccctcgatactatcatgtggagtataaggacggtgtatttgctttatgatatcttgacctgcattttgctctcttaaggtacatattgttttcccatgtcatgctacaaaactgtcatcctatcatttagctgccgtgtgaaaacatgctataattgacataagtttttcttttactatcatctaagcattacgattttggatgaacagttttagattatataggaatgctgaagtgtcttttcctcactatctgtcctcgacttttggagtacctttacatgttcatatttatagttttgaactcaaaagctatacaattgtttgcattgatttcttacttctgattgacagactacttttatcattatcgaggtgtatcttgcgtgtcttgtatatatgtaggaaatggaatttgttgccatgacctgtgaggagaaacagagatcgttaccttattctctgcctcctgtaaaaggtgagctattgctaccttagcttagtgttcatctttcc

SEQ ID NO: 1057 - DNA, 641 bp, Gossypium hirsutum
aaggttatcaaattatatgccattaatttgccccgttttctttggaattcagtaatgcatttatccggataaacttaagttaattaatagaaagatcaacgcttttaacattatagaagcaatcacatacttattgcttcaaaatgcaacaatcagaaatgctgctaaactattaacaccagatattaagccacaccgaagattccttattatacctccatgagattttcaagcttataatttcgacattataaggaagcatactcataaagaacccaaactgaacagacacacttcacacaaacataaatcttgtcataatccagacccaaaagaaagggggggaatgaattgcattaagaatctaactacgtttaaaacaagatctcagatgtataaacaatcgtagctgaaaacacaggaagcaaataaaaaccttcaaatgttccaaactctacatccattgaacaaaattcaccaaaacaaaagaaaagaaacccagattcaaagtgaggaacaaaagttgtaaactaaaaatatattaaaaaaaagtaaggaaaagggttaattatttgttcaccttttaagcaaaagagtgaagtattgggtgagtaaagagaaaagaaagagaagtgagtgga

SEQ ID NO: 1058 - DNA, 613 bp, Gossypium hirsutum
ttctttgccagaactaaactctaactagtaagacaaaggccatgcatgcattgtttctactcaaataaaactattaaattgttaccactaaagggttgctaccatggctacgatcttcaaattttaactaggattaattaatgagtggagatcatgtatacaacttccattcatttttcttccacctggaactgatgggtgtggctttcccaaaatcgaggcatttttaaattatagaacaacaaatagaagaatgccagcaacaactccagtttggctatcagcagctaaacagtctgaaaaggtagtcttctacctattgaaacttgaaacttaatctgccatttcagcattcggaaaaagataagttcaattaccatttcagcatctttgccaatattacaaaagccatggacatcaatgcagcaccactgggattaggagacaaatttctaaccatattgctaatgatctcaaccaccctgcaaaaagagcaaagacaaactgtttgatatatagcccacaagagatgcaaaacataaaatagcatacgaaggtaaataagcccaagttgcttaattaccacacattactttctatctgcccgttcatg

SEQ ID NO: 1059 - DNA, 660 bp, Gossypium hirsutum
acggttgacaggaaccagcgggtgcaccagtccagacaaggacattgaaccaggttttgagcaaattgctcagaattgccattgaactggttaaaaaacccattgaaccagcttcttatatttattagtccaaaccggtaaaccaaaaaataaaaataaaaatctggcccaaaatccaaataaaaataaataaatttgaaaaaaaaaacactaaataaatctattggataaaaacttattttctcagtcaaatttgatttaaaaatttatcgagtcaagttgaatgaaaagaaccgagttataaatcttttcaacttaaaataaataccaagtataataaaacaagctctataagatgttaggagacttaagagttcaactaaaaacttcacaaaaattaggactttaaatgagccatagttcgaaaagttgcaaacttttaatatgggtatcggtgtatgtatgaggcttcagatcaaatactttatcttgctgccatttaatattaaattgtgtcaaattgtcaaggtctttttatttcatgagttatatgtctatacatgcgatgggcaccgatgtttaatcagttgtgggctttattaatgtgtttattgcttgaaataattttaattaattggatgatattgaactcgggatgta

SEQ ID NO: 1060 - DNA, 603 bp, Gossypium hirsutum
cgcattgctatttgtaagctaaaatcttgagccaagaaacatttatatatctctgataattaatgaattcaatgtaatatctcaggttcccgatagccattaatacctaacaagatgggaacttccctgtagggctttgggaatgggtaagagtggcgagccctggggtggatgatgattgctccgtggacggtggcacggagaaaggaggaatgagcatgccagaaaagggttccctcctgtttagtgattctgtaattgtaggtgtagttatttccggggagaattgcacactgagtgatcatctcaggtccatctgaccaggcactcattaactgagaaacgccatgcctgttcaagcaacataaccgtcagcaaatgattaaatcataagaatgaatataaaaagaaaaacaggttatatatttagtattggactttggttaattagtactcaatcatcggtagttgaagttgagcaatctttgtattatataaaaatggttcacatgaattttcaagaaaaggaaaaaagaaaaaggtgaatcgcatgggaataagatatacgtttgcttgcatttgcatcccaaatgattgacttgt

SEQ ID NO: 1061 - DNA, 628 bp, Gossypium hirsutum
acaagtcacaggcccgaaccaaggcaaaggagaagcttcttgcaaaggaagctgcacagaggatgacttaaaagatcaccattgttatccttccggttgtactttcagttttgttttagattttgtttagattaaatggtcctcttttttaagtaaaagctgcaatcaactttcaaactttagtttcttttcttttttacagaggaatatttatagatttctgtttgaactttcgaaataactttctagctactgttttgatgaaaatttgtgggcttataatgaaaaactatcaattatgcggttgatttaacttttccatttccggttactaaataatgcttcatttgagtgcatttaaactcaaggtagttcaaacattaataattaagctcaattcaaattcgagtgttaaaataagtatactcatgaatttacatgagtagagtttaggatggattgattcaaaatcttaggttcatttttaggttagagtttagttttgctcaaaaaaaataggttttgaaattttacccaaatttggtccagataaaaaataataaataaggttgtataatattcaacaaaataataggaaaatagcagtttatgccacattggattatgc

SEQ ID NO: 1062 - DNA, 526 bp, Gossypium hirsutum
  misc_feature (210)..(210): n is a, c, g, or t
  misc_feature (230)..(230): n is a, c, g, or t
  misc_feature (243)..(243): n is a, c, g, or t
  misc_feature (255)..(255): n is a, c, g, or t
  misc_feature (259)..(259): n is a, c, g, or t
  misc_feature (261)..(261): n is a, c, g, or t
  misc_feature (279)..(279): n is a, c, g, or t
  misc_feature (324)..(324): n is a, c, g, or t
  misc_feature (386)..(387): n is a, c, g, or t
  misc_feature (389)..(389): n is a, c, g, or t
  misc_feature (393)..(393): n is a, c, g, or t
  misc_feature (404)..(404): n is a, c, g, or t
  misc_feature (407)..(407): n is a, c, g, or t
  misc_feature (411)..(412): n is a, c, g, or t
  misc_feature (414)..(415): n is a, c, g, or t
  misc_feature (447)..(447): n is a, c, g, or t
  misc_feature (449)..(449): n is a, c, g, or t
  misc_feature (451)..(451): n is a, c, g, or t
  misc_feature (453)..(453): n is a, c, g, or t
  misc_feature (458)..(458): n is a, c, g, or t
  misc_feature (512)..(512): n is a, c, g, or t
atgcgatgtctgcaaccactttgtaagctttttttcttgcattggtttaacattcgctttgttataaatttgtattgcttttaattcattcgatgcatgaggttttcaagccatgtgatttgctgcatatttcagttcacttattatatatgtcgatagtaaacttatggtaatgccaaatcacaagtatgttttttttagttttttttncctaataatgaatttcaagngctaaataaatcnggtcatacaaangctnancaatatcatgtaatatancctccctgaagtatagtttatggttgatatccttggatatagttncaagttttaacagttggaagtagtagaatgggaattacaaaaactacaaaatacaggaaaanncngtangcatagcatgnccnaaanntnntatcctgtactgtttttaagtagttttgaaananananagggnaaaaaaaagtgactctaatgctcttatgcgctcactcatctcttgacagattcnaacaaaccctgctg

SEQ ID NO: 1063 - DNA, 641 bp, Gossypium hirsutum
taaatacaaggtttctccatgaactgaaatcgaaccctgccacagatcccaagtgttcgactggcacccgtggtcgaggatagctcccacttggttagccatggcagtcgtttaactagttcagaggtccagcaagttatctccatgttactaatgattatacaaatcaattcccattactaaaccaaaacttcatctcggctaaaacattgcagtttgctctgatgtatagaatgcaaaaatagctttaaattcagagttaatctcctaaaccaacacatttactgcctttaaattaagaatcaatcattggtgaggccttgacagttgaaattaaagattgtgtcgccaatctttgatcattgcttgtatctcagagacttggttttcagttgcagaaaagaacagagaaaaagaatgaaaaaagaacacttgtctcgtgtctttccttgttagtcacttccagctattgattttttgacagtatctaccatgttggacgagattcagccactatcagacaaaaaagcaaagaaatctaaggattattttgaatatctgtcacaataacttgtgtttagtgtgaaaagagtagagatgccaaagaaaactaattatgcaaatcgcttaagatcatcaag

SEQ ID NO: 1064 - DNA, 616 bp, Gossypium hirsutum
atttcaccgagtcacaaagtgttgttcttggtgtcgatttggagagaaaggaaagaagcccaagtgttgaaatcgttagtccttcaagtataaagacgaaaagaagccccaatgtcgtttttgatattgggtttcccgagaaagaaacagaaaacttcacaaactcaggaagtgttgtttttggtgtcgatttgaagggaaaggaaagatgcccagatgttgaaatcgttagttgttcaagtaaaaagaggaaattttccgttcaagaaaaaggcaaagcaaaattagatgggtttggtattgaattagacgaaaaagagattcttcatgatttgatgcaaatagacccagagaaatgggtttcgattttggattcaccagttgaagaagagaagccaaattacattgaatttcaaggtttaacacgtgataacactgttaaccatgaaagggctgatttattggaggattttcaagaattattgaaaaaggagaaatcaaaaagacagcatgagattgctaaagattttgctcaaaggcttgcacgtgaagttgattctgaaggagaccttttaaaatcttcttctactaaggatgatgcttcgaagagtgttat

SEQ ID NO: 1065 - DNA, 362 bp, Gossypium hirsutum
cgtggacagatcattagaaatataaactcagaacttcactttgaacagatacactatattttgtaaggcagcatatgcacagttgaaagcaaactcagattcaactgtcacagcaaagcaatgtgagatgatgctcttcatctgaaagattttttggactaaaaccttgactaaagaactcttgatatcaggggctgaagcacttgaagctgccatcgctgcagtcagtaaatatggtggagctagtactggatatcgcacgttattggatgctcttattcctgcattagcagttcttaaggaggttatacagaacagcagcctttctttgctctttttcgttaatgacgtttaagattatg

SEQ ID NO: 1066 - DNA, 568 bp, Gossypium hirsutum
gctccttacatgcatccatgcaggtctatcatccgctcctgccctctgaaattctctagaggaactgggttcctatattatcatagttcataagcagtcaaacaagaaaaaactagtattaagcgacctaacaataaaacatgaatttggattattggaaataacaaacgaccaggcttcaaaactgacaaactcagttatattatgcatcagacctgtgagtatgaaagatgaacagatggatggatagtgaaagaagaaacgggggtcaggctggtagaagtgaggtataccaactaattatacttaaatgttgaaacagcacagataattaataccaccccctcatagatctcaggaaccaatgtttttactcttcagtctccacacaaaaatatccattgatcaaacagataataaaagcaataataattcatagcaagagaagaacggctagaagccttgaaaccaccctgtcaagggaccaagtacaacaggaaagaaatgacaaacctctggtgatatatagattcctgagcttttccatgagctgccttcatatgcatat

SEQ ID NO: 1067 - DNA, 462 bp, Gossypium hirsutum
  misc_feature (61)..(61): n is a, c, g, or t
  misc_feature (64)..(64): n is a, c, g, or t
  misc_feature (455)..(459): n is a, c, g, or t
tgagtagtttaatcacgtattccatgctgatttccgaagcccctcttcttcccatgttaanaanttttcattatgtcgtttgacagttcaacaatttggccatagagaagcggcatacatctaattcttccggccttccctttgaatattgttatgacctaaggtacaatctatttgtttagacctaccaaaaaacaattttccgttttatcccttcgaagcactgacttcttcttttaaccttgcagtgcaaatcaaaccaactttaagtaccccattgtgaatctgacaatgaaaggtggagactatttttttgttaatgatccaataatagtgatttccttgcaggtaaaaaaaaaagttcattttatttctatagatgcgcttgacttgccttgaaattaatcttttctttttttgatctggcagggtggagatgtatactgtttaggtannnnnaaa

SEQ ID NO: 1068 - DNA, 619 bp, Gossypium hirsutum
ctaccccaatgtttatacaaaggattacaacgcacggatattccataagaaagttataaatttgggaaaaaaagaatgcatgcacttcttttgccaagcagggtcaagaagacaacccctgaatttcccctgggaaacaagcagaccatcaatcccacccaaccccacaaaaacactcaagaaaaccagaagcttagatgctcaattccaccctaccaatagatcaacaataagaggagtgcatgcccctacttcaattgggcctttgggttactactttatatagaacgaccagtaatgaaaagagggccagcagtcagccagctaagctaacatctaattgagcatatatagattatatggtttagtgttttttcagttgtgtataagttcatgttgtcctttaggactgggcgttgggtttttcatagtttttcttaaaacaatccaaaaaaaaaccctaagggagtactattatttctttgagctgtgtctgatgggtgaaactaaaagtctgtcaaatacaggtggcagtgctggatttgggtgtgtgtccgaaacaggcatgttcattttttctgagttctaggtattttgactgtctgtgcaggatcataaa

SEQ ID NO: 1069 - DNA, 524 bp, Gossypium hirsutum
aaaaaagattgataatcggacttaaatcaaaataaaattaaacaaataaaatttaatttaacataaaatctacagctacataaatacttataattaaacttttactaacactgccaaaatagtaaaaaattatatgggtacaattcttttgcttaagaaaatgttgttcaatatatgcatctacaaattaagatttataaatgccaaaataaataactcaaaacatgatcatctttgaaaaggtttgttttttctcaaccaaacattttattgattcaaaagatgatactgttcatatatactatttttttttaattacttcaaagggctttttgcattttatcaaagctattattatatttaaatttgttaattgtttttgtaaacaagatattggtttttccaagcaatcgattgagtttaatcaagtttttcattttaataaatttttatattataaaattatattttgatccttatcatataaaaagaacttaaactgaactgtttggtctaacacgaac

SEQ ID NO: 1070 - DNA, 631 bp, Gossypium hirsutum
gtggtggcaggagcgggggaagggacggaggtggcaggagtggtggatggagcgggggaagagatggtggtggccgcgggggtcgtggtggtagacgtgggggtggtcgatttggtggaggacgtggaacacctaacaaaccaaaccttgctgctgctgggacaggtatctttattagtaccatttatttttattgcattacttaatatcgcagcttggtttgcttgaagatagattaacatcatctcatgctttctctcttttttttttaattaaggttagttgtaatgcaggaaagaagactactttcaatgatgacgattaattgaaaggcctttccacctgcttgcttatggcgattaattattttggtgctagattattattattattattattgttgttgttgttttgggcggcaaccatatttttgttattatcttaattggtgtcgaatttcttgaaatctcaggtgtggctatgtagttatttttgatagctgtgttatagaaatatgaagcggataattgttgaggtaatgatgaaacaaataattcaagaccaaatttcatcatatgtaaaaatggggctgtgcaacaaaactggaaaaacctgagtaccttctgtttgc

SEQ ID NO: 1071 - DNA, 578 bp, Gossypium hirsutum
gatgcagcatcatcaaatacaagattaagtgattcacagtccgaaaaataatgtttggccaatgacctgaaatcaatggcaggtatagctggtttgagatgtggaaagcgcaatggggaagaaattgagatggaagatggaccattcagcaatgaatcgggctcgcataagtaacctgggttcccaattagatcaactagatactccctgaaatcaccaagaccatgaagtaagaaaagttatccagaataataatatatccaatcattctcaatatcgaagtcgttcaataatcaaaatccaatctccaaacaacatgaaaccaatatatatatataagctggttttaagcccatgagaaaataaagtccatctccactagtgaatgaaacccttctaaattttatctaggatagacatcctgctagaacttggatggttgttccccatcagactggcttcatgagactacacttgtatatagaaaactttaaccaagataagttaggcagttttcacaaactgttgcccacaataggaagaaagaaccacaagatgcaaacgcagcactaccaagc

SEQ ID NO: 1072 - DNA, 635 bp, Gossypium hirsutum
tttccctacgcatgatatattaatgctttttccttttcatttcttaatagacaaaccattttgatagtaacgtctacaacaaacatttatgattgccaactcaaaatttaagatgctacatgcgattacaacataaaacagatatagggttttcagttttaaagtttaatgtggccttgtattcaagtttggcctctccaccgattctcctatgtttctaagttcaaatgcttggtatcaaattttaaaatagtactaaattctccatgattaatgatcaggattaatatgttgtttgatgatcctaatttgtttgtccccatggcaagattttctttttagtttttagtattggctcgtggggtgtcgaaagatttaggacttgagcataaagacgaattcctaaattttagggataagttttggttgctctttgttttttatttctgttttcatgaaatctggttagttctaggtttgataggggttagcatgttcagtgttttatgtaatttgttgttcctagaatcaatgaattattgattccgatttaaaaaatctcaaatagtatcaatgcatgatccttgagacttgggtggaaaatttactagatgtaccatgactagaagccaacc

SEQ ID NO: 1073 - DNA, 647 bp, Gossypium hirsutum
gtctttgcgtgacttcggggacggaaataagtccataatccttaatgcagtaatctccgaaagctcgagacattgctagtcctggcgactcctcatcaggcagccaaaccctgtgaacccctggctcatcatgcaaacagaatacccgacctttgcattgagttatccgctcagcctcctctgcgagcaagatcaaaccgaaaagcataagaattcataatggtttcaaagtatcttttacgatattcgagtgtatggtgaagtactcacgaggtaaattcggcttgaaatcgacagtgagctgaatcggaaccaaatttccatcatctgaagtagccaaaacagcccgagaatcaccaatattggctacatatatgaggtcaccctggccaatataaatgtcatataagttcaacaattggtatgccattacaagaattaaaagcttcagttacctgtctaacaattgtcaaggcagtcgttccgctataaagggaatcgatcttcctacaatgctcaagctcacgatcgacaatggcgcaagtctgcagataagaatgcttccatatatgaaacctgtgatgctttttatctgattccaaatcgaactccgggtcgagtgatgcctgagctagagtctcttgatg

SEQ ID NO: 1074 - DNA, 665 bp, Gossypium hirsutum
ttctttcaacaattcttcgacttgcttctgccataccaccacatgttaattcaaaacccaattattaataaaaccatacccatagtcatagaaatacacaccttttcatccagatatttctcgttatgaccctcatatcgaagtaatgcataaacttgttcaggggtgaatccaaaggcacctttcaacttccttagatttctgattgatccatattcagtcttagtaccaccaggcatgaaaagagaatgacttaatttataggaacggtctctaaacgccaaataatgaagtaaattcaaacctcttttgtccactttttcacaacaatcaggacacttagagagaatcttttttactgttccaacattaccttccctggctgccacaagaaggggtgtcatccccaactttttatcacctatataggcagctgatacatccttttctaacaatacttccacaacagaattgtaacctatgtgtgcagcataatgaagaggggtgtgcccatctttatcttttttctttctcaaattctcttgcttctctaatattttacttgttgcctctaaatccaagcaaaaaaactgtcaataaatctattctttatttattacaaaaaaaatatatggaactaactcaacatacctttattcttcggc

SEQ ID NO: 1075 - DNA, 619 bp, Gossypium hirsutum
gtggtcagtacttctttcattgacttcgtttcaattgaagttctataagaaccgtcattggaagcaaggccttatccattgcaaacattttttgcatataaacttgataaatattctatcaactattacagacttgataaaaatgcagttgactattagttaacagcttaccgctcctagcttctacaaaattggacataagacactgtctaatacttggacaagttgagctgcatgttttgtccatctctaggatggtcaattaaagacgatgaaatttgaaatataaccaatttaaatggtaatagcaaattaagatggattatggagcaataaagaatgtaattgttgttacaaattgacggcagtttactctttaagtcttaaaatagaaatcctaaaataatatgatattttaatcatgacactggctaaatgacatatctgatggaacaggagaagcatgctccgagaggctaaatttgagttgcaattaccctggaacaccagagctaccatatgggagatgggttgtctcgatatgttctgctcattgtgacactactcgagctatgtgcttttgtggagaaggcacaaaatatccaaatcgtcctgtggc

SEQ ID NO: 1076 - DNA, 335 bp, Gossypium hirsutum
atctcatatgatgttatattgcagcctccaggtgtccctcccccccttccgtgttttccttgtttcatgtgccctttctgctggctgtaacctagaaggccaggactgcatttgtttctggtcttttttttgttatactacttgcagttgcacgcaagatatgtgaaactttcctcctgattttgatcatggtgagaactgttgttttaatgaacttatgaacttggttctgaacaaacttgacagcatccaaacatagttggttttttttggataacatgaatcctgcctgcttctaactatttgagaactgcagttatagaccccccccccca

SEQ ID NO: 1077 - DNA, 652 bp, Gossypium hirsutum
gaacaagaatttagactcatcacaagcctacctgcaacaattgaaccatgtttacaaagaagaattgcagcatagttcattaaagccgctggatggttttgatctttaacaatcaaatcttggaaatacttagctgaaagctccaagtttccactagaaacatagatcatctgagttagaaggtagatgacatgcattgaaaacataatcatattaatgcatcaatgaatgtacgacttgaatgcagattcataatatcactgtaaaacaatagaagaaaatattcagatggtcattagccatggcttgaggttcatgtgactgttctaagatatatgtttaatgaatttatcaagtacatacacattctcagatataaccacaattaattgaaggggaattgtgagtcttggaaacgagttatctgacatgcgtattgttaaacttttcaaagtttttttttatatatttggagaatccttagatgtcatatccccatatccatgcaacagacacagtgttgaacatgggtactttaagaaaaatgaagattacaagcaacattgctttgcatgaagcacacattgaagacatgaagctcttctattctcgataaaatttaatactagctaagatcattgacatgaccatc

SEQ ID NO: 1078 - DNA, 638 bp, Gossypium hirsutum
gggtaaggattaatgaaagtagaaaagcagcacagaagatgccaaacttgaagatggaaacaaggggcatacctgtgagactataaagaatgaaggacgttagagcaccaggggtcatcaagcctgtgattgtcaaattagctccatatataactaccacgataactgataacgttgatgcagcatttagacctccgaagaagagtccgaccactttctgttgcaaccaaaagatgagattattagccccattcagctggggcaggggaagaggagaaaaagagataggaatcaataacagtagggaactcactgcttgtttaagtccaagattcagagtctcgtcaactttctgagagtaacgagatatctcgtactcttcctgtgcaaaagatctcaccgttcgaattgctccaaatgattcctaaacaacaattgaaaaactgtgtttgattttcaacaaaaggaagcaatagaacaggagctgcttcaactcctcatttttgctttaagtatccaaatttgacatgggtgtggaggacataaaaatcctaagacccttggaatacatgaaaagacttagagaagaagactgaagacacagacacttatccggaacttacactcaagtccaagta

SEQ ID NO: 1079 - DNA, 615 bp, Gossypium hirsutum
tttgaaaaattttatgcaactgctccacctacaaaatagaaagcagatctcaatcatttcatttttgcagcaaatatgtattttaagggtcttaaagccatgttatatgcatggacatgtcattactcagtttatttgcacaaatatgtatatatgttttggcttagaactctaaaattctacatgctttgtaggaaatctttcatttaaatgataaaaacacacctcagttcttcctggcataataggctttccagcatataactcagcaagtatgcaacctgtactccatagatccacagcggtaccatagtaagtggctccaagtaaaagttctggtggtctataccaaagggttacgacacggcttgtcatgggttgactttgatggggatcataaaagctagccagaccaaagtctgcaatcttcaagatgccattattgtcgattagaaggtttgaaccctttatgtcacgatgtaggacaccacggctgtgacaatgatcaagaccacacaaaagttgttgtatgtaacacttcacctgcacaatagatcaataaattaaacgtcaggataacctttcaatggaaagtgcaaaattctgtatttgcag

SEQ ID NO: 1080 - DNA, 596 bp, Gossypium hirsutum
tgccaaggatagctcggtgaggcttgtttatgaatctcaacctcgccctagagctatagctactctttctggggaaactattatcaaagttgcctgtggaacaaaccatacaggttcatgatatgcctgctctctttcatgttcatttgctctttcatcttttggtcgttcccttccctatccctggttcttcttttacttaaacattcatctcattgtttacttttctaatttgtgcatccagttgctgtggacacaaatggctttgtttacacgtaagtcattgttgattattgtggtaaggttttagatttcccttttattttccttgttcataaacaatttacttttattatgtgattgtctaggtggggctttggcggttatggaaggtttgtgacatgctcaccactgctaacttctgcattgttccagtatttgatgtgtttttacagggcttaaatcctttattctactttatttgtttttccttttgtttccttgacgcaattccttcatcacttatgcaggcttgggcacagagagcagaaggatgagtgggttcctcgtcgtgttgaagtattccaaaagcacaa

SEQ ID NO: 1081 - DNA, 653 bp, Gossypium hirsutum
cgctgcattgtctgtcttctttaacgcatccaatcttccttcgttcatgtttcagacatctctttgttctggtttaaatttattgaatcaaatttactttgctgtgctgtttttctcatgactttaacatgggatgcctcctaccttaatcagtgatgtagctaatgacttagtccagaatgttgcattattttcatgcatagttttcttaagtattcttcttttttattatttgtgactgcatctatgaagcacttacttacgaagtccatgaaacacaacccccacttttgtttgattcatgagattaaacaaatgctaaaaaaattgggtttggaacttgcatcacattccaagacaaagaacttgtagctgattggttggctaaatggaacttagggcaacattgggggttgagaactattgataaactaacacaaggagccattaacctgttaatggctgatgtgatgggattgctgaggattagttttggctagtttcctttgattgtagggctttcctctccttgacactaaaaaaaaaatataagcacacccttaactcttcttccaatcaggaaataagtaaacagggattctttctcttttatgttgtattacctttccctggacatgtgaactttgaaaaaa

SEQ ID NO: 1082 - DNA, 494 bp, Gossypium hirsutum
atgaagggccacgcattttttacccgttaaaaaagggaaaaactgaaacctgtacatggaattcttccttgtgcttacatagattcagaatgatatacttggcgggctgttctcattttataataattcctaactaccaatttttgcaataatctgatctaatttgggcatcgagtttttggtataaaacaaaaaataatgaattttccttgaaaaagagaaatcaaaatattattggcacctggcatcacctttgctctagtctatgtcccggccatcataaagaatctggcatgtaattacggttaactgatccgggaaacagcagtcaggtttgagttgccctcagtccttgtatataaatctaagtcaagaagagcacgaacagaatgctgatcattgcaccaaactcactgcctgattgaacgaagctcccactgaccctcaccatcaaccagtcttaattccaaagcatggaatggtattagagcaaa

SEQ ID NO: 1083 - DNA, 648 bp, Gossypium hirsutum
tcatgagtattcatttgaatgcataactcacctgtcgaccaagtgaaggaatttccaaaagaattgtctttacagcttgagtatccaacagcatctgcaatacaatataccattagttttatacattaatatacttcaatgctccggtatcaattattccaaattccatttttgttatcagaagccattcaatcacattcaaatgttgatacatggtcgttataagtaatagtaaataagttagcgcacatcacaaagacttaaacaactaagtatcaacatctcaattgaccttgccttgcatgctaatattcacaaaaagttaatagatatagtaatagaggtaatggcaatattagtattacataaccacaagaacaagaaggaaactgagagaaacaatatgtgaaaagtacttgttgagctccagtttctgatatctgcttgcatttgaaaatattcatgtagaaccgggggccaaccgatgatgcaagctgcaagaattagcaataagcaagctgcacaaaatatctatctacaaaaggaaagagagaagaaaaggaaaatagtaagagaaaaccatgttaagagacatagtgcaagacccctattttctggtatttaccttgtccaagaagaaactggaag

SEQ ID NO: 1084 - DNA, 629 bp, Gossypium hirsutum
gctccttctatcaaagagccaaagagggcattctttcacaagcgattcttgcacaattttttatttatatcaatcctcctcgtccagtaactatgccagtgcctttactagctttcttcttactagagattcatgtgcacaaacctctcgactgttaaacagtcgagttgcgggaaagagatagcattcgccacgttcaagctaaaaactagttcgaactaaagtatttattctattaggtaattagaaatatcgtaagagaagaagaaatgcccaaagactcccatgctttccgttggtcaacaaccaataaaagtaaactatagcactactcctacaggaaggactcgctttctctttctgtctggagggaatccttttttctcaatctcaacatgaatgatttaattcttaactatcttttcgatcaaatttccgggctaaataccgatacgaaaaaactaagcctactggaaatggcactgagacaggctttatcacaggattgaatctgcccggacttgatttgatgatccgccctttccatggggcacaggccttagggacgtaggaacttgctggctattgaaactatccttactttattaaccgggaactgaactttactc

SEQ ID NO: 1085 - DNA, 651 bp, Gossypium hirsutum
atgaactacttctactttaaatctctacgccgccgcaaaactgtaggactcaactcattgccccagtatgagagcaaccttctcggaggaaacaagtgaagaagcatgggcaattaatggttcgtaatgatcagcgccagcaccacaccaacctgacacattaggcaaaatttaggaacacaaacttgcaagctgatgagaaaaagtctttcatttggcaagcaagtaagaaaaaatccaatacctgttcctttcataaacaaaaagaagggaggttcgcatatttcactccttggacaatgcggaaggaagaaaacacaattgtcttcgtcaaccatagcatctgatccatgtgcttgcacctgtaatgaatgagttgatataatgaatgagcttcaatctaaactgagagttgataccccattagcatcttagtctcaaaattcataggacactgctgcattaaatgcaacacacagccaatgtgatgatacaaaaggctatgaaagtaccaaccaaacaatataatgctttgaagacattaaggctctgcttggtagagtggaaaaaaattgaaaggacggaaaattgaagagatagaaaactaggatgaaaaacataatttttctttccataggtgtgcttggtggg

SEQ ID NO: 1086 - DNA, 636 bp, Gossypium hirsutum
aatcgcatataacctcaaactcaaagagataggttatcttgccttttgatataccttggcaagattcattatattattatttgagggtaagggtcccactctcgaagctttttctacaatcggccaagcccttaactttaacattcatggcgtttgtagtttcctagggtaaaaatatacacgtgcccttactgcatgctttcaaaaattccatgacagaaattgacagtgacaaacgaaagggacttccgttttactgaactccaccctgaaaagctttaggtgataaattcataaaccgtattggatcagcacatgaattcaaagaaattattgtaacatccaaattcaactttcttcctctatttacttatttattagtataatattcattctgaagtgtgttatagaagagttatatatacatatgaatggtgatgaatatatatgcatgtgtaaaatgtggattaaaaagattgcaccgaccgagagatgtgcatgtgattcggattatgattctatgagatcaataaaaatagagttgatgtcaagaaggtggaaaaatagtgtaaaaaaaaaaggaaaaatcctctttaaaagtgacaaaattagatgaggaagcgtacatgaatttat

SEQ ID NO: 1087 - DNA, 562 bp, Gossypium hirsutum
tcttcatttttgcttgcttgtgggaagggttagcaatagtgtcaggtcaaatgtatagaaggtctatatactatgtatttttggcaggtataattgtggctctactttttgaaatgtctatttttagtcctaaaaccaactttttcctgttaattcagtcaaatagtttgaatgagttttttttttaaaaaaaaacatgccatggtgtaatgctacagtactccatggcattttgttttcacaattggacaaatagtcttttttcaactttttttattttttattttttgaagtgcaaatttgttcaattgtacaaaaaaggtcaagatttgtgtcatctcatcaaatgtttattaaaaagtaatccatgtcagattatttggtagaattaaagaaaaaagaagttgacctagtactaaaaatacacatttcgaaaaggaaaggctacatccatatttgacctgaaattttcatatgtttgctgcttttgctttgttttggaggtctctttttcaatctcttgtttgtttcttcctggaggctcatttgcagcctggctcgg

SEQ ID NO: 1088 - DNA, 360 bp, Gossypium hirsutum
  misc_feature (284)..(284): n is a, c, g, or t
  misc_feature (343)..(354): n is a, c, g, or t
atgggtttctttattaccagaaagctttcaagtaccttcaacaagcaatctcccaaagactactacatgatgtactacaagtcactttctaggtggcttacaaatgtttttccatgagtaaagataggaggagatctatcatccacaataccaccagtggcgacaatggagatatttcagcaccccaagggccaatcactggtcaaaaaaagatgctgcagctggaagctcatctgaaaaatcagccaaacagctccgttaacatcctgctgcaccagctgggnttggggtgtatgatgctccaactatagggcaaccaataaaaacccccctcgtatcatcnnnnnnnnnnnnaaaaaa

SEQ ID NO: 1089 - DNA, 559 bp, Gossypium hirsutum
  misc_feature (553)..(556): n is a, c, g, or t
tttcgagtaactaacgtaaacaataacaataaaacgaagtttatgcataccagaggcattgattcttaaggtaacatgtcgttgctctgactctctcatcccatttgagaaaagctacaatatgtgaataagtaaaaaaataagtattatcaattctataaacatgatatatcttttcacttttttaaaaatctatttcgataaaaaacaatatcttactttgtagaagaacgggctttttgcggctaaaatgggagagctaatatgcaatgttttaactctcagaactgtggaacaagccatattccagctcgattcattgctattagcttcctcatcacctacaaaaattccaaccaagatcaaaaggctaactaggcaactatgccaacagtaatggcaagaataaaaattcaaagggaacaactaaattcccttggtaattatactaatttgatatagagaaaattacttcgccttatgcgtttagttacataaaacctgcatgtccataagattctaaaagtttttcttgtttgcttaatccaatcannnnaaa

SEQ ID NO: 1090 - DNA, 634 bp, Gossypium hirsutum
agatgatgctgaatgctagaggtagaagttgacaatcttggtgagacaaggcattgtcaaactaatgaagctaaatgtccacaaggccctcatactactgttacagataacaaagaaaaggcattctactctcaggcatcggatcttggcattcagatggccagagatttttgtgccaaaagttatagcgttgagggagctcaacaagctaatctcatgggtgtttctgttcaagaagataaacttactaatactggtgatggggatgaccagaatgtgattaaagatgtccctccaaaggtcagtgaaactgacactgctgtcactgtttctgcatctccagcttctgctaaagggaaaaagctgcaaaagaaaaattctcaagtatcaatcgcatcttccccttcagcaagcccatataattccacagattcatctaatgaaccagggtgtagttctcaggctctgtcagctgatgcttttttgccccaattgctagccatgcaggacttgcttgagaaggtgggttttttttttaataaaaacaatacataaacaaatttttgacgaaaaaatttccttttaaaaaaaaaaaattataaagcctcttctttatacatgggcattcggggga

SEQ ID NO: 1091 - DNA, 602 bp, Gossypium hirsutum
ggaaattttgcgaaggaatccatgtaccacacctcaacaagtttaccttcttgttgaaacaagaaactattgaaatcgggatccgccgatatcacaattgatctacctgctaaacttgttttgaacagtggaccatacctactcattctttccttaaaaaaaggatggatgtctatggacttggctgtgacaagtaaactgagggtctctcccagaagtgggagtcccatcgaacctggaggcagtgttcctttacatttagggttcctccacctataaatccacctaatacttgttacaagcaaaggaaacacgaaaagccaaacagacctcaccatcatctccatcaaactcaactcaagtagcgaaaaatatttaagaggaaaactaagatccaagagtgcagactagcagccacattgggttattctatttatatgcttcaatgttctgagcttagtcctaatttatgtagactaactacattctcattattgtgaatggtggacatcttcatttccacatattttctcaaacttaaaatatatattttaaaattatattttatagagagaaatgattatataaaattatgatttcac

SEQ ID NO: 1092 - DNA, 597 bp, Gossypium hirsutum
agacatgcctttgttacgatatgtaattttgatctgttcatgattttgtttaatgttgatttgaagtgggttgtagaaaattttgatgatcaatttatataaacgcacaaagcttggtgtttgaaattttgtttgatcaactctagatatagatgcagagcataaatattagtgtttttgtgttaaaagaattagttttaattatgtaatattgatgaatctgttgcatgtttcttgtactgctgctgatgcacgtgtttgtttggttgcagttttttgcttaaattttgcaaaaagacaatttgagatgggagttgttagtgtttctagttcagctgcccgaactccagtaggattaggcacaaagttttctactcaaagatgtacatttagaagaccttgtattgtggcatttaaagcagataaatctaataatacggctctagttacgcttcgagaccataatcttttgccggtggaaacggctaaggagcacccgaagagacgcgggaaagcgaaaaaggcttccaagactgtaaaccgtgactttactgatgaaggttctccgtacaccgtggaccgtaattacaacgaaac

SEQ ID NO: 1093 - DNA, 590 bp, Gossypium hirsutum
gagctatcagccgaggatgttctgaggtgcaatttttgacttgttacactttatcttgttctattgttagcattgaatatttttaagctgagaaagcctgaaaaagacttcgaatgtaatttgacatttttgtctagacttaagaatatgctacagtaagtaatatttttcatttttatgacgtttattttcttaatatgaagcttcatttgtgattttataggcgcattttgttgagatggatccttgggttgtttcaaatgttctgcgaccaaacctggaatggactggatttcttgatgcctcagttatacatcctgttcgtgtcgaaactttcttagaacaggcagaccgatttgcaggtatgttttattcttttgatttcttatgatgaattctaggtaattaaaatttcaatgtggttactaatttgcaaatcgaactctgtatgtaactaagaggagagacatccaagaattcgattctgcagaactctgtatgtcaatgtagagacataaaaccgatatatttcaaatgaatgaatgccaattttcttgcaaaagcttgacactgaaaggacatataagtca

SEQ ID NO: 1094 - DNA, 523 bp, Gossypium hirsutum
aaaataaacttacaccagaactcatcagttccacgatcaacattcttcgtgagtgagtcaactggtgagccctactgcctggctgtggagcatatgtgttgacgcctggggctacctagtgatggcaagttatataacctagctcatccatcttggattcgttgaaaatgggatagagatagacatttgtagtcatgaccagctcaagccttgttaggtggatattacatggagcaggttgtttatattttattgtgcaccacgagggaagggatatgtcaaattggcaatttagccaagagacattgggaagatgcaaattaggcgcagagagttccctattctttctgtgtgtcgtatatgatgttctctttagttcatgcacttttttcttttgctaatttttagaatctctggatcccactttcaatattaataatattatttattatcatacactaaataacctcattattcaccttccatttctcccttattattattttaacacggtcccgggcta

SEQ ID NO: 1095 - DNA, 554 bp, Gossypium hirsutum
atttgtggagtttgtttctcatgcagcagcggaaaggatattgcagacttacaatgggacaccaatgcctggaactgaacaaatgttcaggttaaattgggcttcatttggtgccggagaaagacataatgatcctggccccgatcattctatttttgtaggagatttggcgcctgatgttacagattatctattgcaagagacctttcgagctcattatccatctgttagaggtgccaaggttgtgactgatccaaataccggacgctcaaagggatatggatttgttaaattttcagatgagactgagagaaaccgtgctatgaccgagatgaatggtgtctattgctcaactagagctatgcgcattagtgcagcaacaccaaagaagaccactggttttcagcagcaatatgctgtggctaaaggtcttattcctttcattaactttgacctaaagaaatccccagccagattaatttatgtatttccatcctccaaaattatgtgcttattttttatccattgctttcatgtggctgccctctgcttga

SEQ ID NO: 1096 - DNA, 592 bp, Gossypium hirsutum
  misc_feature (584)..(589): n is a, c, g, or t
tttcctgcaaacaaacagacacttaatttaaaaactcgcaacgatgaattttgaaatcaactctttaaatagaaatgacttcatttattactctattcattttctgttggggatcaactcaattaagggcttatttagtattacttaaaaaaagtatttttgattctaaaagtatttttgaaaaaaaactgtgctaaacaaattgtttattgttgaaatttgtgttgcatagtcatcgacaatactttgctgcatcgtttttcgctctgtttctcttcgcttcgctttctccagtaaaaccacctgccatttagtttctcatcattcctctctttcttcttcttccttcttccttcttttttttttttttccaaaaaaaatttttccccggcccaaaagggccttttttttgggaaagggttttaacctttttcctttgaaaaaaaaattaaaaattgaacctggtttcatttttaacccccccctttccggggccttggacttggaaaaacccttttccccaaaaaaaaaaaaaaaaaaatttttttttttttttttttttttgggggggaaaaaaaactttnnnnnnggg

SEQ ID NO: 1097 - DNA, 610 bp, Gossypium hirsutum
tagctactgaagatttaaagaaggggaaggaattttaccttgaggaagggttgcctgagttcgtccgacgagcgttggagaggaaacggcagagggaaccagattaaaggagtttttgcctggaaggggggctagaaaaggaacggacaacagacagaaagtaaagatactggtaactactgtttttggaagctagaatcgcctaataaggttttggatgaggattaaatggtgtggatgttagctggtgttggactggattaggattttagtttttgggccttatttttgtttgtcggttggggctcttttttagtctgttttttgtttcggtttctattttgtttatgtacattttgtttttgattatttatccagtctgatatttgtcaaaaaataaaaaaaaattatagaagataaaaaaaaaacacaccaaaacttaatattagccaccactagattaaaaatcattattcaattaataatgagtttattcttacacaattgaaaaactaattttcttaatagtagactttgaaaaaaaaatctctctttcacctctttcaactctccttatttattttttcatgttccctcaactctcaaagct

SEQ ID NO: 1098 - DNA, 450 bp, Gossypium hirsutum
tgcacagagttcaggtctactcatgatgtattggatcaagtctgtcttttggtagaaagaaagcctttgttattgctaatgtcacaattatcgttgaatataggctgtcagctacgatgaagcatttttagatgtcacagacttagaaggtatagatcctcagcttttagcttcaacaatacgaaagaaaatatctgaagctacaggatgcactgcaagtgctgggattgcagagaacatgcttatggccggtctagccactagaactgccgaatggtcaatgttatatccatcctgagagggtatgctcagctaatttattattattattttattcattttgataattttgcaatttccaagctgtggggtttgaagatgttaaatgttgggttctcttgtactatattttactataagaaactttaatgacaataacacatcaagaaa

SEQ ID NO: 1099 - DNA, 584 bp, Gossypium hirsutum
gatgaaaaaaagttgttttagttacataagaccaaatttacagtggtaaaaaaatactttatttttttttttaccaagtaaaaaaagttcgtaccaatgtgatggcaatgcacaagatactaaacccagggaaatgaaatggtgcctcttcagataggaacaatgctgggatgaacataaaggaaatgttcaatggttaattgaggttcaacagttaaaagaagggttaataaaacttttagtccttgaatttggcaattaggtctgctttgatactaaacttggtaattaggtctattctggttccttaagttgataccaaagtggatctaattgtttagttcagggactaaaagttatattaacccaaaaaaactataatttttttggaaaataccaatctttacaaacctgtaagaggactaaatattaatggagcaatgatgttggccaaggaagtcacacctgatatgcatccttgagctttcccctgatttccaaaaaccttttaaaagttcatgcatgaaaaaaaaggattcaaaaacaggaaaaatccattccaaaacaggacagatccaatccaa

SEQ ID NO: 1100 - DNA, 542 bp, Gossypium hirsutum
gagcttgatagactatgttgccatagagcatttgtaggtcaaaagttggctagaataccttgatcctattcatagcactaccgtttagtagctgcggttttaacgttcttagggactatatctatggcttattttttatccaatgatgatcccgttatacgtgggtgaattgatacacagaatcaaagtggatgtattacattgtatatttttattttcttcatttactatattggatgttttcttgaagtttaatggctaatatgacattaacttaaataatgtgatatcctttaaatgattgcttctacaatggtggccttgttgatgctaatgtagctgttgtgaagataaatttctagcttaaggttgacataaaagatattctttattattgcccttgttatgtgcttatctttatggtgtctggacttgcaaaatttacttaatgctgaaattcaaggctttatgtacctcattgattattgagtggtgattttaagtttcctttttactttgtatttacaccagatttttttttt

SEQ ID NO: 1101 - DNA, 623 bp, Gossypium hirsutum
caaagcagaatacaaagatcatctagttcaatcatttgttgaaagaattaggtgcgtgtgctgaattgtgtaccagttatttagtttgacaatagcagtctgtccagattacaccaaatctcatattctacatactaagaactcatctgtttgttcttgatttctttagttctttagattctttcaatcttaactctatttcttgttcaggggacttcatttcattttatacacatatatcatggccctgcttgattaaagaacggatcatgttaaccttttaccatctcaaaataacttcatcgaaactcaaattcattatatatacacacatacagaacaaataactacgaaggggaagcgaagaaaggcaggttggcaggcacaaacaaaagagaaaatcatgcattctttttatttcataacagaaaatgtttggagtgaacccaccccaacttatcatcatccatccctgataacataaacaagtattcgaatcccatatcaaacaacatacacatcactcgattctcacccacacattctgccaccaccataatcccaacccaactgctcaaacccactgatatgccgatcctacatacctaggagaggattggtcg

SEQ ID NO: 1102 - DNA, 632 bp, Gossypium hirsutum
ttaattatcataggatgacacattatttctaaaactagaagtagtcaggtggtagaaattatattttaataactttatttaggtttaattaaattttaattaaaaatattattccagtcatcaaatgtgaagatcctgaaatggctgagtattcttcacctttttccctagaggtcatgctctcttcctccagctacattgcagaacatatctataacttcaaaccaagcctgctagaaattgattgaatttaggtacttgtaactaaacttaaaaaataccaattataccatgaagcctactatgtagaaaagaagtaccaatgaatgtaaaataaccaaagaatcttaattagcctaaacaatgtaaagattacaatcggacccataaaatataaagtaaaatcctagaaaacttaaatttcaaaactagcatatttttattttccgtcggcctcttactcgtgtttcatgatgtagatggagcaaaaacaaattgcaggtcatcgttggtacggtaagtttaccatcagccctttttagatatcttgtcggttctctgttttcagttgttataccttcacttttatgcaggttgcatttggaatgggaatcaacaaacctgatggtaag

SEQ ID NO: 1103 - DNA, 642 bp, Gossypium hirsutum
tttttgaaaatatttataaaccaatgacgatataggttgtctcaaatttaaatttaaaaaatgaatatgttaaaatattaacattgcacctaattaatttcccctccaatttttcctcctctttctttctcttctctctatcaaacctccagcttggaagtcccatggagtttcctctttctatcttctcttctcaatgcacctgaatctttcctttttcgcttcttaacccctaaaaaagtctcctactttgttgaaatgtggtggagacataagggagttaatttccattccgtttttggaatttagtttaaggttttggatttctagggtttcttaccttaaaatagaacaattttccggtttagttttttgtttggtggtgtctacagaaaaatgccgccacatcgatccaagtcggagaaaaacgatggcatggcgaagcatcttcgtcgagatccttatgaggtgcttggggtcttgagaaactctacggatcaggaaattaagagcgcgtacagaaaaatggctctcaagtatgtttagtttttcttacctttttttttaaaaaaaaattttaattgtaaattttcggtctttttcctttataagtttaaaggtgttcctatgttcgaattcttg

SEQ ID NO: 1104 - DNA, 660 bp, Gossypium hirsutum
tttaaatttaaatattgcagacaagtgcatctttgaaatttacagtgttgaaccctaagggacgtatttggacaatggttgctggaggaggtgcaagtgtcatctatgccgatacggttggttctcttctttctgtattcagagttttcaggataggactaaagcctggtgattttgaattactggcaatgcttgtaatttactcatataatttatgcctcatcaggttggagatctcggattcgcttctgagcttggaaactacgctgaatacagtggagcacccaacgagggggaagtgttgcagtatgccagagtcgtaattgatgtaagtatcttggcacttcattcatatttctattattgtactttactagctaatgctgtcactaacttttgttggagatgctatgaaacattaatcggttctatgatgcttttactctttatttttttgaagtacttgtgtccaacacttgaatatgagattatgatatgaactccaaagggtcttttgaatacatgaaaaaactttgaaaacaattctaatcacgcccatgtaacactcaaacccgagtctgaataattttggatgcaaaaattgctgtaaactaatcagaattatgagctggtaggtgtatcagctcgcttatggttcat

SEQ ID NO: 1105 - DNA, 618 bp, Gossypium hirsutum
tcttcgaaagtccaaacttcaaataacccgatccaatgtgtatggatgcaatgttgggcattcagaaaataacatccttaagtgatttaatcatctcaagaacaaggctatttgatgtggcttgagtaatttaaattggggtggctaaaatagatatccaagattcaagccttataatgtgttttctgtgttggaaaagaaactcatttcaaggatcaaggaaaagaggaaataaactacctcccaataaagttggttgcagtccatgcattgccaaaattctaaattcttgtcaaacaagcagttcggaattttttggaagccctttgcagcttcaatggcctcttctactgtcagcggcttttgtataaatctcccattgcattttgtgcacctcgacatcagctgatcctcattaattttcaattggaaaacctcaattacctacaaaacaattaagatattttaggcctgtacagtacattttattattatatttttattttcaccttcataaacctccttattttttggtctccaaataccaatatgaacttgcaggatcacaaatctccttacaagtatgactgcaaacacacctcaagtagctgttcgttt

SEQ ID NO: 1106 - DNA, 609 bp, Gossypium hirsutum
tatgagtttgcttctaatggttcactgcatgatattctccacggtatgcatgatgatgctttgttcattgctcctgctaatcatatataggaatgtaacaatgcttgaaggaaagatctcttcatgatgttgttataaaaagtttcttcctttattgacaacaaaatatctggtttgtgatttttatgttgtgctgttaatattgcaagattattattcctttgatgcagggagaaaaggtgttaagggagctcagccaggccctgttctgacatgggcacaaagagtgaaaattgctgtaggagctgcaaaagggcttgagtacttgcatgagaaggctgatcctcacatcattcatcgtgacataaagtctagcaatgtgctcatatttgatgatgatgtggcaaagattgcagattttgatttatctaatcaggctcctgatatggcagcccgtcttcattccactcgtgtacttggaacctttggttatcatgctcctgagtaagttatctgttatatttattttgtcgaacttaaatagtgtattgatctttggtacctaaaatgaagtagattttcatatgattactgagatgtttcagggaa

SEQ ID NO: 1107 - DNA, 616 bp, Gossypium hirsutum
tatttcgattttcaagttacttttcatacccgcatcggattcatacccgagtttatgtcaaatttgttgaaatgaaatgaatgcaggttcttgatgctccatcacttcaagatgatttctatttgaaccttgttgattggtcatctcaaaatgtacttgctgttgggttgggtacttgtgtttatttatggactgcatccaatagtaaagtaagtttatatatgcttttgagggatttagaacaaatgaatgtatttagagttttaacatgtttctgttttgctcttaggtaacaaagttgtgtgatttgggaccaaatgatagtgtttgtgctgttcaatggacccgggaaggttcttacatatcaatcggtacaaatctcggtcaagttcaggtaattaaccgtcggtttcgaactcaccatccattagagtaaataacggttgaggtttaagcattttgattgttatatataggtttgggatggaactcagtgtaagaaagttcgaaccatgggtggacatcaaacaagaaccggtgtcttggcttggaattcgcggatactgtcatctggaagcagggatcgtaacattcttcagcatgatcttccgagttt

SEQ ID NO: 1108 - DNA, 654 bp, Gossypium hirsutum
attggtattgtggtaaaaagattcatgatgtatgagatccagggttcaaacctggcaaccccaaattagagtagatgttgcatgtaagtgtaagtgtactgcaaaaagaatttaagatataatggccattccttttcacatggtattttgatttatgttagtcgttaacttatgtgctcaaagcaacctgaaacatttgcagttagtcataatataaagaataagaattatcatctaaattaagaaattaagttctatttactagctcatattagccttaataatatttgaagttgaaatttcaagacatccttgaatgttataaggtttcaatcctgctttattgtttagaaccattaatatctgcgattttacattttgtacattttttttttattgttttaaccgaaatgtgatggttttcttccaatctttcttttttggacaatacaattattttctgttcctttattgcagatattgaagaccttattcgagatagttttatttgaggattgtggcaaccaatggagtcttagcaggcctatgttgagcttaattcttattagtgagcaggtaataatttgcaaattcttaagtttctctactaaatcctttttctgtttgtttcaaaaaaaggaaaaggtctaacaa

SEQ ID NO: 1109 - DNA, 470 bp, Gossypium hirsutum
atccttctgagtcataatctgaactcttggaacacttctatctctttgccctccttacttttccatttctcaagcaaggtttcaacgctagcaactactgctggagtcatattctgcaaaaaattatcaagtttgtaaatgtcccactacaataattagattagaaggtacagatgatttacttttaagctttccccatgaaaggcataattggccagtttcctttgccttgcccatttctcactttcggttgaagcaagcccgtcgcctattagcttgtcgatgaaatatgagcgctttggctttggaaaagccttttcactgtttttaaggacctctttgacccgttctgggtctgtaattagcagttgtgctcgaattccattccaactaagataagtcttccctgaaagaaaatgatttctcttcgtggaaagtggaggttaatcaaaaaatactacccaaaaaaa

SEQ ID NO: 1110 - DNA, 589 bp, Gossypium hirsutum
  misc_feature (395)..(395): n is a, c, g, or t
  misc_feature (397)..(397): n is a, c, g, or t
  misc_feature (567)..(567): n is a, c, g, or t
  misc_feature (577)..(577): n is a, c, g, or t
gttggctggttttgagcagagtaagtttgactattctctttttgttaaaaagaaagaaggcaagatggtcataatactagtctatgttgatgatcttcttattactggaaatgatatggatatgatcaatgacttgaaaggagtcctgaatcaaaatttcaagatgaaagatttaggagatttacggtactttcttgggattgagattttaaggtctcaagaggggattttgttaaatcagctgaaatatgcacaagaccttatcaaggatactggtttaagtaaagcaaaagttgctcttacaccacttgaacaaaatcaaaaactaacaacagcagagtttgatgaagtagttcaacagcatcaagacgacaagttgttagaagataaagcantntatcagagactcattggaaggctaatctacttgacccatacaaggccagatatcaccttcgctgttactcatcttagtcagttcatgcaaagtccaaaacaatcacatatggaagcagcgttaagagttgtaaggtatataaagaaagagccagggctaggaatttttgnaaggcttcanacaaacatcagt

SEQ ID NO: 1111 - DNA, 653 bp, Gossypium hirsutum
tctcttacctccattgatttatagactttgattgcatcattgatctgaccaactttacacaacccatcaaccaaacagttatatgcaaccaagtttgaatcaaagcccatcatattcatatacttcaaatgttgtgcggccacctcaaccttacctgccttgcacaatccatcaatcattatagtgtgtgtatacttatcacactccaaccctttcttttctatctcatccaacaacttataggcttcttccaactcaccagttttacagtacaaattaattagtgtgttataagatactatatcaagctcgataccagtttcaatcatgtccaccatgaattcagtcgcctgtttcacctttcctatcttagttagagcaccaataactgtacaataagcaaaaccatcaaatgtatgccctttactctttcatttccaacaatagctcaattccctcttcaaacttcttctttctaaagatgcatttcaatagagtagtgtatgtaatggcatttggaacatggccagattccactatttctctaagaaccctccttgctgaccctaatctaccaatcttgcataatccactaacaagaatattgtaagtcaataactctggcacaaatccatgacgctgtaagttcctaa

SEQ ID NO: 1112 - DNA, 631 bp, Gossypium hirsutum
tttcttgactgcgcccctagttcagattcgcgtcctgtctttttgaatttttttttaaattggtaaactacaccattagtcattaaattattaataaatttttgttttaatcacttaattaaaagttacaatttgaacattatgctattaaaaatttttcatttaagtcactgaactgttaaatttgatgttatatggtttttttctgtttacattgtttatatcaattgaaaattttcatttccctcctattttacaattcgatttttttatgaaaataactttagacatcacaaatatgtgaaccaaaattcaaataaatttttctttgatctccaacatgtggttgtcagatcaacttgaatctaaagtatatttttctacttgtcgatgggtattgattcatcgtatcgatcatcgaatcgtcgcttagagctcgctagcgaaatttttttagaaaattaatggcctaatcttttgaatagttttgcgactaaattgtaactttttttaattgagtgatcaaaacgaaaatttacccataatttattgactaaggatgtagtttaccttttccttctttgaatatctttcgattgtacgtggcagaactttatcggtcaagtggcag

SEQ ID NO: 1113 - DNA, 892 bp, Gossypium hirsutum
  misc_feature (616)..(617): n is a, c, g, or t
  misc_feature (726)..(727): n is a, c, g, or t
  misc_feature (729)..(731): n is a, c, g, or t
  misc_feature (735)..(738): n is a, c, g, or t
  misc_feature (740)..(747): n is a, c, g, or t
  misc_feature (774)..(775): n is a, c, g, or t
  misc_feature (778)..(778): n is a, c, g, or t
  misc_feature (803)..(805): n is a, c, g, or t
  misc_feature (811)..(811): n is a, c, g, or t
  misc_feature (813)..(816): n is a, c, g, or t
  misc_feature (818)..(822): n is a, c, g, or t
  misc_feature (837)..(849): n is a, c, g, or t
  misc_feature (851)..(856): n is a, c, g, or t
  misc_feature (862)..(865): n is a, c, g, or t
  misc_feature (868)..(869): n is a, c, g, or t
  misc_feature (871)..(878): n is a, c, g, or t
  misc_feature (880)..(881): n is a, c, g, or t
tacacttgcagttagaatttttttgcagtcattttaaccacggcccatagaaaatgaattttctttttgaaagatgtcctttcaagtttggaatcccattggtaactgatcttattggactggaccattttcaattgctcatccaacaaggcaattttaattccattccttgcagatatggaaattattcttaaatcagggccgtggaattcatgaaagattattgatcagtttcagtaacatttttaaggaaaaaagaaatcctttatcatacattgcatgacctttcttttttttctttttgaacgaaatacattgcatgattaattttgtacaatgttcattttcttatgcatttgctgaagccgcagcccttctactttctcctttttgcgtaaatgagctgggtggcatatatttgctcttgcacttaccatatatatattcttaacgattcacattgcaaacacttgttcaacgattctttatgtcccacttagaattcagacagctaattcttaactaagattcttgcaattgcagcagaaaatttgatgcttccttctgactttgcttgcggatattggttaagaacacacaccttggtcgtttaaannacgcaaaaaggagaaagtagaagggctgcggcttcagcaaatgcataagaaaatgaacattgtacaaaattaatcatgcaatgtatttcgttcaaaaagaaaaaaaagnnannncatnnnntnnnnnnnnaaggatttcttttttccttaaaaatgnnacngaaactgatcaataatctttcatgnnntccacngnnnntnnnnnaaaaaaaatttcccnnnnnnnnnnnnnannnnnntaaaannnnccnntnnnnnnnnannatttgaaaaag

SEQ ID NO: 1114 - DNA, 649 bp, Gossypium hirsutum
gattttatggtgctaataaacattttcattgtaatttattttgcagattatacaactttttatctatattaaggaaaatcatggacctcaaacagcttttcaatttttaagcaatgtatgttttgatatctacattacctattccaactgtaaaatttatgatttctctgtagctttgctattgactttattctaatgtttttctgttgttattttcaatattttctttaatattaattgcttggggagaaagagaagtttgagtttcaatatatgtccttgactaatttaaacttgttaacctactttttttttatccttttcttctctataattatcatctttatgtttttcagtttttgctaagcccttcctgaaatttgtgtatagaacttccagcacgtaatttgccaatgagataagaggctatatatgataaaaatttaacatagcgacaaccgtttttttgattggtactgcagtagccctttggttgggtattggagcaacattaccgattgatcaatgatctatagacatgaaaatttcactgtaatggcttgtttttatttctttcatttatactgctgttctcgttatcactttttactgcaaaaggtcatgtcttggcattggaaattactgtccc

SEQ ID NO: 1115 - DNA, 613 bp, Gossypium hirsutum
tttatagttttttcttaatattaaaaaaatatctcttttataataattacaattttaattcaactttaataaaaaaaattagaaactaatttagcttctaaaatacaatttttttgtcaaaacacctaccgagctattaagtgatgatgtgataattaatgagacagttgacatgaaaaaactgaaaatgagatgactagtgtgatagatataggcttaattattttttagaaattatataaaatcatatataaatcattaaaatgataaaaaatttataaaattttgaaagtgcaataaaaatttagtttttaatgatatttaatactttttaatcatttatataatcttttttataagtccttttataattttataaaaaaatttataatattttaataatgtctaatattttttaaaaagtgtcgattgagtcttaacttaattagtatcagcattgtagccaaagtaggagaatgtgggttcgagtgtgctaaaatatgtttatcttcctatttacgagtggtaagaggttctgtgtagttcgagtgtgctaaaggatgtgggaggatatgggcatccctatactggaacaggattttccctctttgtc

SEQ ID NO: 1116 - DNA, 611 bp, Gossypium hirsutum
atccttcccgtatgaatcttctctacatattgtgtcagctgttaagcaattaggaccaactgatttgcagagtcctttggtaatgggtgacgatagcggtggaagcaatgtcagttcatcttctgttcagttggaaagaaaatttggagtaaaccagaataaaacttgggaaagctggttttcgcaaagtaatgtcaccgaaagggtaacttttgttgctatattagggtgcattgttttaactagctgtaagttatctggaatgaacttaagtggggtcaggcgtatgtcaatatgggcctccagtaaaccacatatgaacacaagttcccttaccagtaagggagattctttcttggattataatgtaggctctcctcgtatcaaggcagttggtattggtgtaaagataaagaaacttttggatttggctaaggttcaattcatgaacccttctgaagctaggaatgcaagaacttcctgccttcctgctagcctgtcaacttcaatcacggaagttgacacaaagcaaatgtctgtggaagaagctgaagctcttgtcaggcaatggcaagcaattaaagctgaagctctcggacctaaccatcagg

SEQ ID NO: 1117 - DNA, 659 bp, Gossypium hirsutum
tttgttttcttcctgcttcaaaagcaaggacctgaaatttaatgagggaaaataaacatgccagactcgggaaaccaactatgtgatcaagttcatacgtagacgagtcgaaaacaaattagaactcactcttgtgtcactttcgagagctgctttagcagaactcatacctccgccatatctgcattatgacgctatttgagacttgactttgttttcggaatagtaagccaatgaaacacggaaaaacctaccctggaattattcgctcagaagcaatgtacgtaagagaaattgaagaacctcctgcatcagcaatagcttatttcagaaacactacaagaattaagcaggtgcagagaacaaaatgataaactgagataaaaaaaaggacatgcctggattcattaaggggagaaaatgtttgagtaaggaaacgtaggagtaacttgaagcagataaagctgcaaggtatcctttccgggatgtctccaaaagaggtttgctgacctgttaatgaataattgctcgttatgaacatagctgaaactgttagcgaccgaacctcaaacctcctttacctcggggccattggctagtgaatgcacgagaatgtcaatgcttccgaaatcttgtttaacggattcagcaacttccta

SEQ ID NO: 1118 - DNA, 469 bp, Gossypium hirsutum
tcttttagcacaatagcgaatgcaatacatgtcaatctcatttagaaagtttcttgttgttttctatttcttattttaaaggtgttctatacttcttttcatatatagaattgtttacttgcatcaaggtctcctttcaggatgtctaagttagttcaagataaatttttcatttctatttcatccttggttaacttttagtggtataaatcattaaatgaccaggcatttggtctttagctttgtttaccatccttgtatgcctattgctcagggcggaatagaggtgtgcatgggctgggccaccctgcccggctcgaaggtccgtaaaaaatgtgggagggtttgagcaaaaatataggtccaaaaaatgggcttgggcaaaaaaataaagtccgtttaaaaaataggcagggtcttgggtaaggcatttttggcccggcctagctgacctaaatgaaaaataaat

SEQ ID NO: 1119 - DNA, 624 bp, Gossypium hirsutum
attatacaggaaagtgctttatcgacatcatgcaaatccttacatattaacagcttcatcttacttcaaacgttgagaaaaacaatcttaatagagatgaagaaaaatctagacagaaatatcggaagggtaatcttttggatgtctggtgacggtttccctgagatgtttctcttgttcctcaaggtttgatggtggatgatcatacacatcggtgaacaactccgaaagtggaggcttctcagttttctctgccacctgaattgcttccaataactgcaccaaattgctttctgtgtattacaaacatgaaccaaaatgcaaatttctggtaatcaaaaccgattaatcaaatgatcacctgtttcctcacactgttccgaagctgagcttcttgttgttcactccaccagccaatattttgaacccagtttcgaaatctgtttacagggttcctagcctttttccagtagacaatttcatcaagctggcgatacttggttgaatcatcagatgtggaatggtgtcctactctgtatgtaagggcctgaaattaagtaaaataaaagcttaaaacacgaggttacggtcgttattttgctataatcctgcatgagacgtcaa

SEQ ID NO: 1120 - DNA, 599 bp, Gossypium hirsutum
agcacctaatcttattttaatttcatgcaaggaaaaaaaataatatcaaaagaaaattatttgaaaaaggggaaataggaaaacctttttttctttttctttttttgttgggaaaactaaattatttcttctttttttaatctaaaactttatttctcttttggtggataaaatgggacattcaacgaggagaaggaaaattgataatcacgaggagtcagaggatacattcattcacccaaattaattacttttttttttacttacgaccaattaaccctatctaatttcattcacttcagtgaaaagcaacatcaaattttgttcacaatatatgtcatacatcgagtaagatattcgggtaaaaaaatctgctaatataactaacacaattccatcatcaagtcaatatacggatttatttatattaataattttaatatcaatgtaattaattgtttttttcttcttctcatactgagtttttattattattaattcatcagtatggtattatgtacggatataaaggatgacatgaaactccgtttatttgttatggaggtttttgtctgcctgtatgctttggcaaacatgtt

SEQ ID NO: 1121 - DNA, 627 bp, Gossypium hirsutum
caaggcatattaaacaactgaaactgagtaaggtcctataacctgcacaattcttttttcttcctcaagttccatgaatttcttctggaaatgctgctttagtgcttcagtgtcagctcctccaacaagtttcatctcagactgcacaaaaataatggcctggattattagcccatgagaagatcaatttatttctgccagaactctaccagaaaaatacaaatttattttagaagataggaaagactttgtaagagatccaagcttgatgccattccatgcttttgaacaagacaaatgctccttgtaaaactatttgtaagcacagaaaatggttaaaaacagattaaaattccaacgctgtcatatctttttggaactcctgctgaaagcctatatagatcataaaatgagattctacctagggaaagatcaacatttatgttttataaaaatagcatctcgattggaataataaacattctctttcaagattataattcgttaattggtaaatgaatatgtctgtgcacaaaaaccaaagtttacagcagaaacctctttctgctccaagtgcttgtttaactcgttcaattctctatccatggtattttgccgaagtgcatg

SEQ ID NO: 1122 - DNA, 615 bp, Gossypium hirsutum
ggtactgttctgtattgctgagaaatttcgtttatttttagtttatgcagctttctgatcttgaaacatgcttgcctgtcaaaactgactcccggtatgggtgctttaaacaaatttatccttgtcactagaacgtgacaaaattgaatattttgttgctatagtattgggaatgtaatagaattttgaacccaaatattgggaataggaagcaatagatgccatgtgaaatgggatttcacaatcttcacactggttttacaaagagatcatccatgatatttatgtatatatttctaagttctaactactgaacacattgtgggtgataaggaatgggaatcaagtacatattactttttcttctaacagaagcaccaaaagcctcagtcatgtctagatcctcattttccattccattagggagtctcgagaacagccataccgtatgagatgccaagacacattctccttccagcaccaaaggaaataaattcgaagttagtccctttatagtcaactgaactactgatgaatttgctttcagaaaaaaaaaaactattgataaatctctctggattgaacctctcggcctctttccagtagttggaataa

SEQ ID NO: 1123 - DNA, 645 bp, Gossypium hirsutum
tgatagtcaaagcccatccatgacggcagtgcagtgttcaatttccgacttaatgccgaaggtgacattttattttgagtctttacaattcattcaattcttctttttggttaccttatcttaccttaccttacatgcagaaatcaacatcaagaatggttgaggactcaatggaagaacctgctgtggttggtccggagcatccaagtccagtttctgtccttgatacctcggtttatagagatgatgaaccatctccagtaaagcagatattgaatgcctctggaggtaatagttctgtttttggggatacttggttcggagtcggacctataaactgttgtgaattagattaaaatgcaaatgtttcttagtttacgcattcaatgcatattttattctttgtcaaacattttgttgcatgtctgtataaagttttaatgcaatgaatccaagcaatgcatactagttataatcatactcgactaataagtacgatagcaaaaggcaaaggaaaaattaagaaggaaatcatatcaacatttcattgtgattgccacaattgctgtttttgtaaatatagtataagtcctaatactttttgagtatttatatgccctcctgacgcattatccctactgactg

SEQ ID NO: 1124 - DNA, 630 bp, Gossypium hirsutum
gaatttgattaaggttagttttcataatataaccttgtatcgttttaaggtctttctgcagcatgccttagttcctttataaatcagactattccatccctttaaaattatttcattctttcacaaaattgctaaatttcataaaggtattgcatgtggcagaaaatcttcaaatagaaccatttctacaaggacaaagaaggccacctgggcttgggagtttattgatgtagatatgatatgagttatgattgatttgatagtaagattctatataattgcttttgtgcgatgagcagacacaagaaaagaagcctcgagagtcaattcttcgtcaagaatttgcgcatgtgattgattttatcaataaagatatgtcggaagagacttgtttgaggttccttcattgggatctacacaaacattttcggaggtatatgtcctaatccttttattctccacaggaacttgcatgtatttttacttttcttattcttccatttctgtttgctctttggtattattcatttttattttgagttttcctaaccagcttaaaaacttatatttttgtttcttccagccaagcgacaaatgttttgctacttttgggtaaagtggctgcatatg

SEQ ID NO: 1125 - DNA, 485 bp, Gossypium hirsutum
cacttgctgaacattaggaagcactgaaaaggaagctccatgcaagaattgaatatgccaagttccttcaagatacagttgaagaaatggcaaaggaggttcaaaattcaaggagtggagaaattaagaggactgcagaagatcttgttgaattttttaatagagtaagatcctatctcacgattttttgtatccattttctgttatttccattacccattacttaactttgaaaattgatatcttggtatttttcaggtcagaaggggttctggtgcacctaatgaggagataattggctttgccaagctgtttaatgatgatctcactctggataatatcagcaggttagtctccattttagttgtttttgtatttgaatgactattaatttaaattaaattattaattaagcaagattgtgtgattctgtttcatgtttgcatttccattttcttctgctaggccctcgattggtaaatatg

SEQ ID NO: 1126 - DNA, 646 bp, Gossypium hirsutum
tcctttctccatgcatcattttcattctgattcactctgttaacttttttttattttattgagcatcaagttatttgaaatgttttatctgtaggtgatgactattctttctgctgttgttggctgggctgctccaaatcttgtaagtggtttgattgctgtttgagaacggcttcttttgcatgtgggtaaattttagtttcttttaaaggacctgaacaaccagattaaaggccttttttgggcaactccaagcagtatttggcatctttgttttaggacgagaagccgagaactgaattgatgtcaatttgactgatgtctattctctaaagttacaggttacgaaatgcactggatatgcttcagtgtggctgtagttttgcccacttaaagctatatgctatagttaattctgctactgctgctatcagtgataaaatatagccctccaaacacagatctcaatctcttgtggaacttaaatcttaaagcattctttgcaaacatggattaaatcttttcagatgtaaactatgtatggacggttggatactaagttaagcctgtaatagccactgtattctgtagttctatctgtaaatatggtatttgtcgaactctagtgtgtggaagtgtggtttcc

SEQ ID NO: 1127 - DNA, 507 bp, Gossypium hirsutum
tctttatctcacttgggcatatgaactatgtattgttggacttagcagttaccagttaggaatctgattttttgtttgtttctttcttttatatcctgctcaaagttatgcatatcagaagtaatgatggttttgttgctatgcatggcatattatttatgttcaagtgatcttgtgctatctgcaactggatgttttatacatgacattcaaacaagcaaagttctacttctcatcaagttacattcactgcattttgacttttgatttatgccttgatactttaaatataggaatatcttaccaggagaaggaagaagttcgtctcctccttaggcaggttagcataaactccttatcactaacataaaatttcttaactagactgctggattttttggagtaaaagtaataccctattgtcttttttggattcacaaagctatttacatatgcagatccatgatagaaatttattattctctccttttttcctttttttttttt

SEQ ID NO: 1128 - DNA, 615 bp, Gossypium hirsutum
tggagtgttgttttccagtatgcattggctttggggcctattcattttctgatgtaatcatgagtagttgccttgatgattttgtaagagttgaagtttgggggaaatttttgggctttgagagttctagaggtaaagaaatttgcctaaataccatgaggaaatgagttcatgaggtattaattgttgcacgtgtaatgtaatttagtaatgggcacttttaatttgaccgaatgtcaatattttggtttattgactttgcaattgattttctgtccaaaagtgggtacttttagttgtttttatcttgacaaatagtcaccacctctcacgtagtttcattgcaggtaaaagaaaataatcagttttcttcgagttacaagctttgagatgtcattcctgtcaagatagaaaattatttagaatgaagttagcattgaaataaaattacagatgattctttacttacttcactgtttattctgtgggtgcagaatgaattagattctatgcaattgcctgagatgattagatggcgaatccaagccgcaatgcctatattatttccttcttttcacaatacagtctcctgccaacccacctctgtccctagtg

SEQ ID NO: 1129 - DNA, 623 bp, Gossypium hirsutum
atcttttcatctttcatcagtctacaaaactaaaattttgagcacatttttatgcatttacttatttgtacatcatgccttaattgtgtaatccttgttgcagggttttgctgtgccaaaggaagagcagaataaagttgctaagttcacattccatggcctgcctgccgaacttagacatggaagtgttgtaattgcagctatcaccagctgtacaaacacatcaaaccctagtgtcatgctcggggctgggcttgttgctaagaaggcttacgaactaggtttggaggttagtcttagcttcttgtatatatcctgtgtttttaaccatttaaggtatcaatgttttctgggcttggaaatttatgtgtaggaagcgagttaatttggagcggtatcttgtgtttcataactcttgtgaaaatttggccatattgggagtagttttgtattatagttgcttaccattctctcatatcagcattggaactgtaaacttgtggatcttgagtgtggtttttcttctctctttatctccccctttttttgtgtgtgcgtgtgtgtttcagttttcttctctttctttaaggaaaaaaaaatggtgaacttcaactctgctgtat

SEQ ID NO: 1130 - DNA, 435 bp, Gossypium hirsutum
tggggagaagtttgttgtaaataaaagaaaaaaagggaaaggttgcaattaaaagatagcatcaaaaagacttttgcttcaaacgaaatcagtcatcaattgttgaaagaagttggtttttaatttttaagacaatttatgtgttggcttttgggttgtttcacagatttggattacaatcgcatgagagctttttatctatataatttaaacaagttcctctactcaagcacttactttcccatcccttattatcattatttttcatgttgcaatgcagagctcattgattttgtgaatcaaacatgtgctaccaaatctaagaacaatgatttatataaaacatcaacgattataccaactttctttgtcccccttatgctgatgtgtaccaaaaccgtctggcaaaaaggttgcattggtaaagaaaaagaa

SEQ ID NO: 1131 - DNA, 663 bp, Gossypium hirsutum
cttttgacgttccattaaaccgatgtatgcacaagcaattttcttcaaatgttccatggcgaaatccaccttgaaattaatgcgtaaagcatctttgattgcatccctccacttcaatatcagatcctcggtgacgtgcttcagccgtagattgctcatctctttgacagaagcacagaacatgatataaatggtctcggtaatacttgggttcatcttacttgttgctgaaacatcaccgtagacatcgatgatgttgtttacaatcggatgtagagccggtgggaaactatatttgcctagtgccatgcgctcgccatgtaagccagtgaagtcagagaacttcactctgctctcatcatcagcttcaagtttcataagaatgtcagtaatggccgcatcattattactgcttgttccagcttcagttctggtctgattttgtgctatacagtcaatagtatcaactacatttactggaacagctggaagctgtttgccagttgattgagtaatgaaactctcttgtctcagtggagctgctgcttggagttggccattggaaagaagtgatcctatttggtcttttaaccgtgtattctcagcatttaaacgttcattttcctcttttaagcgtttaatctctgcaatctgttcatctgc

SEQ ID NO: 1132 - DNA, 608 bp, Gossypium hirsutum
  misc_feature (372)..(372): n is a, c, g, or t
acaatctggctaggcgcatgaagattctgttacctttcttcgatgagattcggcaccatggttcccccatcagccacaattgcgtcgcttctttgtctagattgaagaaagcaatccgtttggcaatgaaactattgaaaacttgcaatgagggtagcaagatccacctggtaataagaggatgtgtttaattaatttgtggattatatttggtgtctcatatcatatcatcattttttttttcttctaaatctcattgttgcttacataaatatattctgggttttgcctttgtaattcaggcattggagagtgaggctataatgatcaaatttcataatgcttacgtaaagttaacccaagctttggaanagttgcctttcgatgaacttgaggtatctgacgaagtcagggaacaggtatggaattattatctttctttgctatttcaggccttgacgaattatttggaaacccaaaactatactcaatgcctttacccatcttaacaacatatatatatatacatacaaatataataagggacaaaagctaggaattttatgtttgtgttcaaaatgaaataaaaattttttggaggccaaagg

SEQ ID NO: 1133 - DNA, 669 bp, Gossypium hirsutum
ccctaaatccatacctgacttcacctgaaatattaaatattccatttaggaatattaaataatttttatatcatactaatttctgcaacattaattaaaataaagcattacaaaatcgtataaaaattaaaacatctgagtaaaatatataaaaataataattgaaaagttataacatctagagtattttaataatttttttagaacagaaggtgcggaatcagccgaatgattagcccaaaatcgagaatgttctgggtattaatagacatgtttagcccaatgttattattacattcaacatctctcggtaacaacacatcggtttaactgttcttagattctatccttttctggttgtttattgttttcgatagaacataacatcacatgaacataccaatgtttcaaattttatataatgcaaaaattttataaaatgtttagaactcaatttcgacataatagcttaaataccaaattatttaccttcagacagcaccaaaaaaatgcacagcttagctgtttcgttggctaaagtcgagtatctcaacgttaagaaatatccgactaagtagtcagaggatatatatttagtattccctaacgatacttttgcttataatgtatataaactcgggtgtccggcaccgagcctgagtaacttag

SEQ ID NO: 1134 - DNA, 624 bp, Gossypium hirsutum
gtcttgttattcatgctaaagttgctgttagtttgtcaaagagaggtttaggtgaagagatgtctacctcggaattgtcttttgcttgcacaccaacgcacttggaggcactaatgctagcactcttgactaggctacgagcactatttggtttgttagagccattttgcccttccgcatttgcgttcgaaccatctacctgagatattgaagttgaattctcaccatcaatatcttgatcagcattctcatccttgggaacgggaactctttctctgaaaagaagagagcaaggtcattcaggcaaattgaaatacgacacatgaactagacaaactagtggtgtttccacgatctaaagcatgacaagatctactctgattttaaggtttcggaaaagaagagaaaaaattggcagaaaactaacatgatccctaaaaatttatgaagcatacctaggcaaagaagcatgatgtcttagaagcggagtacttttttcaccacctttaccataatgttcctccaaatgtgcaaattgtcgcttgaatcgatcaacaccgctatttgattgaaaaagaaaagagaatgttaattgtgatgccaggagcaaacattgtcaactag

SEQ ID NO: 1135 - DNA, 590 bp, Gossypium hirsutum
tctcctctatgatcaacttcaacattcattcttttgtctcgggccaatttgttaagagttgtatagttccgggaattggggaaaactttcatttggatacaagttagatgagattgtcggaagtgatggatttgagttaaaatttatttgcatttagccgtctcgtgccactgaggtgtgtacattagaaagagatggtgtgtttaacgtttgatacttggttcatgataatcttgtttggaaattgtcagtctagagccattaccgtctttggaaaacgtcattcgtagtcctttagccgaaaaagcatattgtgcaccgtgtcataacatcttgttttctcttccgtgttaatccatgtgatggggcgatctattgtcaccgtaagcagtgaatttgagcattcggatgaaatgtagaacagtaatgaaagcaaaagagctttctgtcataggaatggttggatgactttgttgacaaacgtagaaatcgttataaaatttaacaaaagcaaaatcaagtgatggatttgattgagttaaaaatatcaactaatgatgctggttgagtcttaaatcagttggcattag

SEQ ID NO: 1136 - DNA, 633 bp, Gossypium hirsutum
  misc_feature (340)..(346): n is a, c, g, or t
  misc_feature (351)..(352): n is a, c, g, or t
  misc_feature (356)..(356): n is a, c, g, or t
  misc_feature (358)..(360): n is a, c, g, or t
  misc_feature (393)..(393): n is a, c, g, or t
  misc_feature (420)..(421): n is a, c, g, or t
  misc_feature (434)..(434): n is a, c, g, or t
  misc_feature (436)..(437): n is a, c, g, or t
  misc_feature (465)..(467): n is a, c, g, or t
  misc_feature (492)..(496): n is a, c, g, or t
  misc_feature (505)..(507): n is a, c, g, or t
  misc_feature (509)..(509): n is a, c, g, or t
  misc_feature (522)..(523): n is a, c, g, or t
  misc_feature (534)..(537): n is a, c, g, or t
  misc_feature (539)..(548): n is a, c, g, or t
  misc_feature (550)..(551): n is a, c, g, or t
  misc_feature (554)..(556): n is a, c, g, or t
  misc_feature (563)..(564): n is a, c, g, or t
  misc_feature (573)..(573): n is a, c, g, or t
  misc_feature (579)..(584): n is a, c, g, or t
  misc_feature (590)..(594): n is a, c, g, or t
  misc_feature (599)..(599): n is a, c, g, or t
  misc_feature (603)..(603): n is a, c, g, or t
  misc_feature (620)..(620): n is a, c, g, or t
ctaccattgtgccatctcttaatgggaaagaggtatttagatgtcttgatggtttattagtggaaatcaatttgcacattaaagttcaatatttttgagatgctagttagttatatgctgttgtcatgcttcaaaattagtgaaacaactgatttgcagtagaaagttatttataattagatccactactgaaactactatactagtctcctcacttcatcttatccaaaaagcatgtgagttcgcacccattggtttgtcatggttggttgctttgggtaatgatttgcgagatgtgatagcttcatttatttttgatgtttttctcgttgatgaatcnnnnnnngtagnngatntnnngtgggcttgaaaatcatttccttttagtgatanttctttattttaccatttaccctttannctacaccttgacntnncttgttttcgatgacttcttctcatttnnnggaattctcattgttgaatgatgtnnnnngcattttgnnnangacgtgatgagannatactggagcnnnncnnnnnnnnnngnncannnactgtcnnatcctctcntgatgnnnnnnaaatgnnnnnctatnctantactgctctgctagaanggctctgcttgat

SEQ ID NO: 1137 - DNA, 617 bp, Gossypium hirsutum
acaggtagcaaaggcagatcaaggtaattaaattccaccaaacacaagggtgaacttagcaaatcatgttcaatgcatatgaatatcccatatcaatgatattcggactcgggtacaagtgttgaatacgggcatgtgtcctacatagatgtgataaattctttttgagtttttctaagtgttcagaagatcctaggaaggtcaccccataatcatatccagatatgcattggacatgggcgttaaacccagatccttggaaaaaaaataaagagtagaagtaacataggtccatataccatcctacttttggaggatagcaacaatacaaggaacagaatatggttacattttacagccaaccattttaaatggttaagcaaaatgattgtcaagctttcttttaacaaatcatatcacaactttgctcacaacaatggaaccggaatgaaaagaaaggagacttcaaaaagcttaagggcatttactgtgtcaagaaaattcagtagtgacttgtactgaataaactagttcaggtaactaggtagtttctatggttgatagaactaaaaggaaagaagaatggttttcccaaagcccatcgtaagactgaaatg

SEQ ID NO: 1138 - DNA, 615 bp, Gossypium hirsutum
ttttctcttcttctcccaaaaactccataattttctttgagatccagggtctcattctctcatgcaatgcatgctgtacaaatgcaccaaaacaaaagagtaccatcttagaattacagtctaggaaatatagatacagactaattacaattttctacattgaaaagacaagacaattctgcatcacagaattctgaaaatcctttaagacaacattctatttctcattattttgatcaagttgataacttaattacaaaactatagttttggaacaccatataatttgcatgtacaatgaacagtcgataagtaaaattataaggtgaagagagctgcctagagatgattatttccaacaaatgcagaagagaaatatagatacagcaatattcattttagtttcgtgtatgccaaggactaagaacatgtggaatacatttgggtgttgaattgattatactgctataatcaagttaacattaggcactttgttaaccagttaatcctgaccagaggatagatgtttctcaaaactaacagtctgaaaaaggacatgtgaaaagatgattacctgatcatacacattccagtttatctcgtatgagaatagtt

SEQ ID NO: 1139 - DNA, 799 bp, Gossypium hirsutum
  misc_feature (48)..(48): n is a, c, g, or t
gtgtgtgttgtgtgtgtgtgtgtgtgtgtgtgtgtgtgtgtgtgtgtntggtgtgtgtgtgtgtgtgtgtgtgtgtgtgtgtgtgtgtgtgtgtgtgtgtgtgtgtgtgtgtgtgtgtgtgtgtgtgtgtgtgtgtgtgtgtgtgtgtgtgtgtgtgtgtgtgtgtttgtgtgtgtggaggtaccatgcaaagcccaagaacttacacaatctgcaagacagacaaaattttagtccttattgttgggtatagtaaattggagccaataagtccaagtctaagccttgtcctaagttaatcaatgtaccctgggcaaacctatgctgtataatcaactaaaataaagtcaacttaacagaggcaaacctgatcgcagatagggcaggagtcacttctttccatccactccaaaatgcatgagagatgaaaatggtgttcacatttagtgataagttttggaatctctgtgccatactctgcatgtgcaaataccataagcaagccattacttatgagctgttaaagtattaacaaggaaactgccatcatttttaatatgcacaaatcagttagcagcagcacaggatacagatctagctttactggcaattaaagccttaggaaaagagattacattaccttcaagacaaataggacaagcatcctcttcttctgccattgattccttagactcggttaattttgagacttctgatttccttggcgaaagaagcaaaccagactgtgttttacagtctgattcctcaagatcttcacatgttggcagagtctcaaaaa

SEQ ID NO: 1140 - DNA, 478 bp, Gossypium hirsutum
  misc_feature (475)..(475): n is a, c, g, or t
ggcagtggtttcatgaagggggcctctttaataattaaaaatcaatcaataaaattacttagtttcctacccatttgccaaagtcctgcaacacaccatatatttcaaattcaaataattgatatccaaacacttcaaaactgttgcaaataataatctgtaaaaaaaaatattcaaatccataccagtccttggttccaaaagcttaaaggtccagactgtcgtagcctccaatcatccaaatgaacctcagtcagccaataagcatttcttcaatgatttagataataaagatatagataaacatgcatacatgctaaggtcatttagaatgtgtgctaattccaagagattataagtagattgaaaggcaaggaatggaatgaatgactttggaatttaaatccaaaatgaataaaagcacattctctctctattcttcgataccagagggattggctcactaaaaaaaaanttt

SEQ ID NO: 1141 - DNA, 562 bp, Gossypium hirsutum
tgtattagttgcttgaatatggtaaatactcattgcttcgatggtggaaaaggaaatgaggcatgtgtttcaagccatgcaaaaataagttggaaagacctcaagatttatctgataaatggctttctggtggttgtagttttggttattttatgcacatatgtatataaattatgtattaaagtttacataggattaacaataaaatttgatttttttttctttggtacgtaacaatttttagacaagaagacgctttgaattctagttacgggcaagggtgaaggtcagaatggaactgtactaattccatcattttattagctataattttacaaattttaagggcctaaaaaaattttaccaaccaaggaggagccaaggcgagcttttatcgcttctctatctaagattttgatatatttaatattttacttttatattatataataggcttaaagcatacttttttttttcattttaatcgtttaaagttctttttgatccacttctaactctaatattatcaaaagttctgggttcaccactttggtcattaaaa

SEQ ID NO: 1142 - DNA, 515 bp, Gossypium hirsutum
aatttagcaaagggaacaatctcctatataatatttcagatctcattctaacaattgatgcattagctaatctctcagctgtctaggtatgcttaagtaagcatacagtaaaatcaacaactgtgaaatattacatcaacaatagggtcaaagaaagatctctaaggagagaagttaatcaaatccgtgacattataaaatctactttctacaagcctcaaatatgctgcaaaagtaagaaggaaacaactatgcctcctccagctatataaccctctaaacaagcaactcaacgaaagaaaaagaaaagagaaaatttgataaacttcttctacaatttatgtacaaagaactaaatcaccacaacacggaacagaattatacaatatccacctagaatagtcatttgaaaaacaaggaaaagatttttacctgtaactaatgtataacatgaagagaattcaaagttcaaacaggcacaaaaccacataagttctaaggaaccacaccatgag

SEQ ID NO: 1143 - DNA, 631 bp, Gossypium hirsutum
atggtagttttgttgaggataagcagattagttccacacctggggatactttttgccttgatgcttcaagcaccattgtgccggatcctaactatgttttcgatccattgccaagtactttttatggagaaatgatgaaggatggtgaggatgataacgacgaggaaaactcttccgggacaaccaccgcaaccgcaacggcaaccacccccacaacaccaacagccacaaagaaaccaagggttgatcggtcgagaactttgatctcggaacgacggaggaggggtcggatgaaggagaagctctatgcattgcgttccctggttcctaacataacaaaggtatgtgttacgtatatatataagtataacatgtgttggatccagttgcgaatataattcgatggataaggctttattttatgttaccgcagatggataaggcttcgattattggagatgccgtattgtatgtgcaagacctgcaaatgcaggctaagaaactaaaagctgagattgcgggtcttgaagcaacattggcaggatccgaaaggtaccaagaatcaattgaaaaccctgttaagattcgagttgcaagaaacaatagccacccagtttgcaagaagataatg

SEQ ID NO: 1144 - DNA, 610 bp, Gossypium hirsutum
gggactgatatatgatagatttaacattccagctgatacctaaataatataaataattgcaaaaattaaaaaggttctttaacttacttgttcacatcaggatgataattcctggcgagttttcgataagctgaaagttaaagaagggtatagtcagtacaaatgaatcaaaatcaatatttttatagctcctaaattacatgactataacagataaagaaataatacaaaggggaatactcctactgtcccacatacttcagtaaataaggctgactaagcacagtaacagaataaaatttggattctaaatcaaagaaacttttggcagacacttaaaatgtcacaataaaagcattgattttaaaactttcaatgaggatgatagccgtaaagcatgaatgtgtaaatgaagtcataggggaagccttcgataaatgtcgacctcaagaccatatgcaaaacacaagccatcatatgcaaaccatgtcaagttgaaaaagaaaaaagcagatggtgtaaacacatagaaatcaagaataaacagggtagttcattcaccgctttttatgtctgatttgctggcagttttagatactccaaggatgga

SEQ ID NO: 1145 - DNA, 605 bp, Gossypium hirsutum
tcgggactgttggaagagtccattccaataccgtgaacggaagagctaatgatctaagctacatggaagtataggtcatgttaatttatacatgtttgatcggaaaaatcagaataaacacaaagtcaacgagaaaaaaaatcaagcactgaatttaaaccataaggtgattctgtctcaatataagagaatccttcatcttgctactttattactggcaatttgcgaagccaaatgaaatgtcataaagccagcaatcaaatcaaaatatattcatacagaaagggtatatagtgaaataaagctcactggacagcggctagaaaccacaaaataagaagttaaatatcagaaatgttacaacccatatagagaaaaccttaagtaacaatcaaacttaccataattggattttttgtcattgcccaaacctcaacaggtgcatcacgaaatacaatcagaagatacctaaaaaggttaaaacatgacagtatatcacatactttctgaggtctcttgtctaccaccaatgctaaaccactcccttaaaccaagggaccccattctctatcatcaaagctcaatacatgctagtacctcaatag

SEQ ID NO: 1146 - DNA, 661 bp, Gossypium hirsutum
ctttccatccttctggagtcaacttttttattctgtctattgaaaataagtggttttcctacaaaattgttgaggcctttggggtttgatattttgttgacctaattgcttgcttcagtggttcttagagtatgaatagtctcttaatctggagagtgatcttttgaatcctatgtcaatgtttccagcttggcgaagaattgtttttcactgttggagggcaacatattccttttggtgcatcaccacaggtaaatatcaaattgatttcatgagattaagcattatttccttttctcttgttgggcaccaactgctctctgtagtcttgtggggtagtactaattttatggtatttcctttcatgcaggatgtctggtctgaattagggcgtccttgcggaatccatcaaaagcaggtagcaatgataaactttgaattgggatatgcggtttttacactggttataagttatcacctaaggggagaaatcagcctcttatacacaaattgtttgcatgcttccgtcatatcaaaaattgtttttatccacaggttgaccagatggttattcactctgcttctgatcctcggccgaggacaactctttgtgctgattatttctacaattattttactcgtggtttggacatcttatttg

SEQ ID NO: 1147 - DNA, 510 bp, Gossypium hirsutum
ggactcccatgctttagacagtaatgaattatcctctagccaagactttctcaagggctatagtttatccagggattctattttttccatctaactcaataagaaacctaaggatgctagattagtaatcatctccgtgggaatttccatccagtctataggctgttagtcacgaaatgaaccaatccggattaagtcgacctatgctttcaatacttaccctgacccagccacttagctctagctaaggccgatccttcgtcatatgcttagtcaaaagctactttttggagggagtcccttttcgggataggcaggatatcttggttggggaaaactggtaaaaatagtaagactcccccatcaatcagtggttattgcttcattctcatagaattcatcgctactaactagaagaagttcctgggctaaggctaagagaagctctcctgtcaagccttggattcgactttgggcaatgccatttcgaaagaaagggaaccagttggg

SEQ ID NO: 1148 - DNA, 682 bp, Gossypium hirsutum
agacaatcagttctttcaagttgtgctttttccattaccttaactactaattttgagttttcactaaatcaaatcttgatcttcttactggtgctcagaatcaaggttttgcaacagcagatagagttaatgtgtatggtggcttatcactaaagctacaggtaactaagtaaatcagcattctcttatggatcataagtctgtttatggacaatcatagttttttgtatgatgtccagttttttcttgaaaactattctcatttctcacccaaaaaaattttagaaaggaacgactttttttcattgttgttgtcaaattccaggactgcctaaactttgtcaaaactcatattggtgatgaacgcattggccctttaatggaggtacttgaaataagatggagcttgttttatccaatttcttagctacatcttcttcgattgatttgttgttcttttttccattgcagaaattactggaatctcgcattgagatccgccctcttctgctaacacctcatagattggctaaagagctgctattccttgatctcgctttggcttcagctgttagaacaaccatggaaaggggacttaaagatcttaactttgcaaacccgccagtaagtcctaatatttgcaaaccaggaaataaattaccttgaaagcaaccaacctatt

SEQ ID NO: 1149 - DNA, 613 bp, Gossypium hirsutum
tggctaacgggttcatttaaccaaaaaagaaattgtttttttgctgttttcatgctggcttcgcaaagaaaaagattatgaattgtatgcttactagttgaaaaaaagggtaataaaacgttgtaaaatggcaattttaagatgcattgaaagagaacaattttttttccttcaactgctagagagaagggaagagaaacaggggaggaaagctgagacaatgctggtcgtacatttagtagactagcttttaatgctcaaagttaatgtagtggtcagggtggcaggtaatttgctgtttagcctttaatattaccctgtttcgtagaaaaatgaaaaccctagatttcgacagcaacaacaacagtacgacgagtcaagcagcattatgtaataatgaggggaagatggacatcattaatacaaagaaacaactaatacctaattgataaagcttgtaataaatatgaatgagtatataagtaggtggacctataagcaaattttctatgccaaaagaaaagttggtcgttggtgctgttgaaatggaattattgttctttcatgacaagctttactggatttttccacttgctgaattatgtccaaccag

SEQ ID NO: 1150 - DNA, 617 bp, Gossypium hirsutum
acccttttgttactggagaacctttcacatgtccatacagacctccccctgagacccctctcttggtaagggacctatgtgtgtagctctgcaattgaagaagcttgaaccttatttcataaattaaaattatctatgtgacttttatttcaatgtttggtaccatgcatacagaggaattgcctagtcctctcccgattcccatattgatttgtgtttattcatagtggagtggtcattttgtattttttcttaacactggtaaaatcctaatttatattccaagaactcctcccctaattataaaaatttaaaggtggtgaaataattcaacataaaattctggacatggtttaaaaaatttcaatttcctttggggggatgctgaacataaacttttttttggtggggtgaaaaaatttggttttttgggccttttacgggttagatgcttttttataaaaaaactgtttttttgtaaacacaaacttttccaaaaaaaatatgatactgttttttttgtggggaaaaaaaaaaaaaaaaataaactggcccaattgctgcctttttcttgggaacccggtgctccaaaaattaaagtggaacctccccccggt

SEQ ID NO: 1151 - DNA, 602 bp, Gossypium hirsutum
tacgccaataggagcaccatctctgggtgcaacagctgcaacatcgggcatgccaataggagcaccacctcctgacacagcagctgcaacaccgggcacaccagtaggagcgccacctcctgacacaccaactgcaacaccaggcatgacaataggagcaccacctcctggcacaccagctgcaacagcaggcatggcaataggcgtaccatctcctggtacatcagctggaacaccaggcatggcaataggagcaccacctcccagtacatcagttgcaacaccagacatgccaattggagcaactcctaccagtgcagcagctccagcagcacgcacacctatagaagcaccaccacctggcgctcaagctgaaacatcagcaacaccatcaagaggaccacctactgatgcatcagctgcaactccaggcatggcgacaggagcaccacctccagcagcaaagaaaggcacaacaacaggagcatcacctccagcagaaacatcaggcatgacaacaagagcaccaactcctgatgcaccagatgcaacacctggcaagccaatagaagcaccacctcctggtgcaccagcttcaagac

SEQ ID NO: 1152 - DNA, 568 bp, Gossypium hirsutum
tctctggatatccttagcgcacatatcggaattttgtaaaccttcttgttgctgctgcggctgttgattttgaggccacatactgtttgataaactcttagtattcgttgagcaatgtgtttccgattttatctcgatattgtataagctggattgtggtgcttgattttgcaaagcagccgccattaataatgggttattgagatattccggccatttcatttcgtcgggttgggtttccattagatggattggagcttcttctttctctgatgtgctgcaatctgccattccccaagtgtaactgttgttaacagtaaaggaaggcattgaaggagtgtgagagggaagtgtgacagaagggttgaatcctataggagaggaaaggaatggtgaggttgtcaatggtgggagaagtgtagacatggaaattgaagaaaactcagactgggagaaccagggtgagagccttgggttggttgatgcgtagctcaattgctgaaccggaaaatgaggcatgaaatcacaaggctggctgttggtagtggtggctgtgcttgccaatcaa

SEQ ID NO: 1153 - DNA, 613 bp, Gossypium hirsutum
aaggagaatgattaagaacagagagtcagctgcaagatcacgagctcgcaagcaggtgagttgagtgccactacactgttgtttcctttccttctgagttaccagatcctatttcatttctcctataaaatcttgctcagttgtgtggattacttgtttaaaaagttcattagttttgaattttgttgctttctacaaacatgccactcataatgtttaggacaatgcccctacattgcttgtgtgaaagtaatggtttggtatggtttatagttggctcaaatccaatgccaaacaagattgtattaattgctctgagttctggcaggcttatacattggaacttgaagctgaagttgcaaaacttaaagaaatgaatgaagaattgctgaggaaacaggtaagtacttatcacctggacttcgattcatcgtattctattgaaacgttggtggatcggcccttttcttgacagtgctttggttggtgcaggaagaagtgatggaaatgcagaaaaatcaggtaatgcaacattcctgctgcttccatcttgcatttatgttatagcattcatatgcagcaaactagcttttagatgggttccaaagcctta

SEQ ID NO: 1154 - DNA, 635 bp, Gossypium hirsutum
gtatcatgatactttgggcatagcattgtatcaccaacatagaatatcaccacagccactatattctaaagggtagtactaatcattaaaatcattgaccaaccaagggacaatctcacatttcttcattctttcatgttatttatgctacatacttcataatcatccaaatcccttttagatgcatcacacttcccttcctgaggataatctttttcataaattaatcctacatgcaaagagccttaaaaaagacaaacctgggacagtgctttcactgaaaacaggaaaaaagagtaagaaattccaccagtgggctgacagcagcaccaaactactaagataataaagcacatatttgcataattgctttgttactcttaaacagatgttagcagctgtatagggcaaatatgttgcagctagatgtctaaaatgattttgcatcatttgcagtcagtgaaaaaaaaaacaattggatccaattcgtatttccaagctagaatgcaaaccttaaacaaacttaatctttccatgctaaaaaaagaaaaagaggttatattagcgtatctaggtaaaataaaatgttactttcctgtataatcccacttagctctgcagccaaatctaataaa

SEQ ID NO: 1155 - DNA, 367 bp, Gossypium hirsutum
ttttgatggatccaaatttcttaaaagtataattggataattaacttttaagatcaatttatgtggaggaaaaccatttggtagaaatgtattcaataattcttttggataattattatttgtatcatccacgacttagttgaaatggttgaatgttttagtatcacttgaaaacatgtttaataatttctcattaattttttccacataaatattttgtaaattgaatacctccttaatttttccttagcaatttaataaagagatttttttggttccaggtaacaacctccaattgaagaccttaacaaccaagggtgaagctattaactgtagtatatcacttgaagacggtgaggaaggaaaa

SEQ ID NO: 1156 - DNA, 605 bp, Gossypium hirsutum
cactactgcatgcagtaattgtgggaagtgacatgagtgctcagacaaaatttgaaatggaattacgagattctgtagtgcagaagaaaattcaagatcgtgttcattttgtgaacaaaactctgacagttgccccgtatttagctgccattgatgttcttgttcagaattcccaggtaatttatgtggttcaaagcattttctgtttcaaatattatgtttacttcaatctgtgcaattcatctaatttgctatcttgttgattgctccttcagttgcttgtgtagtaattttataaagaagctattgccgttttctatatcacgacatataggacagagtcagaaagatatttgaaggtccttttacaattagcatttactgatataaccaataccttaccataactagacatagcgagtagttaacttagcgacattgataattgatttgatggcattggttttctattgtttagtaggcccagcacttctgagataataatgataattttggttaggttttatgttcattttctaatttttgttcttagatatgtccgagttacatgatgccacaatcaccgagttagcaagattctgaag

SEQ ID NO: 1157 - DNA, 635 bp, Gossypium hirsutum
attagatttccaggtctccccagtcacctgaataagatacagatcttatgggagattgggggaatgatcggcaatagtcaagcgaggggtcaacatgctcgcatggctttatatgtcaatttagagaagcctttaacctctaagattcttatcaatggctatctccaaaaaattgaatacgaaaatatacctgtgattttcttttcatgtggaagatatgggcacaataaggaaaattgcccgaatgttgtccataccactgaaccagtgaaggagacagagtcgaaggtagttatgtcaaaatccatggcgatcggtgacagaaactatggcccatggatgctggtagagtggcagaatagacgtaccaatctggaaaggaataaaaaaagtaataatttttctagggagaaattaatgggatcccgatttcattctcttacaggatcaacggaggcttcattgaaggaaagaacgaacatggaaacttagtagattgtggaacaggctaggaaagatattttggttgaccctcaaaaattaatggcgaattcattggagggggaaagaataaggaaactcaacagatagtgaaacggactgggaaagacagatagtgaaacggactgggaaag

SEQ ID NO: 1158 - DNA, 602 bp, Gossypium hirsutum
  misc_feature (574)..(574): n is a, c, g, or t
gaaacagcttttccgaacaagggatttgcttctattagtttcttaagctcaatcagcattatgctccgagccgatttagtatcaccatactttgataactgctcattttccctacattatatcacaaacaaaaaacttaggaagtcttaaactgcctataattttatatccaataccaaccttcaatcattacctaaagttccccagtgttaaaaggtgggtaatttccttaaaaagttcttcattaaatgtggaaaaaaccttcaaatccttcactaaaatctcaacagctttagctctatcattactgaaacacaacaaaaaaaatgccaaaacataaattaataatcctaaattccaccaaacccatccccttgggattaactaaaccaaaaaaaaaaaaaaaggaaaaaaaaaaaaacgggccgaacctttctttttatttttttttttttttcaaaaaaaaaaaaaattttaattacggtttgttttcactttaattaacccaaaccggaattttttttcttcccccccttcccccgccaaaaattttttttccaattaattttttttnaaaaaaaaaaaaaccctttttttttatt

SEQ ID NO: 1159 - DNA, 451 bp, Gossypium hirsutum
ttaaactcaaccttcctatttcattgagtctcttactcaataattgtggaagaagggtggctactgaatacatttgcgctccataaatattgtcgtattagaaaattttctttgattattcttttatcgattgtttgttggattgtctctttattgattcatttcatagcacttctcgaattgttgttttttcataaaggaaaggctcttcaacctttccctttcatctcttgtaataatttctttacttcttgtcttaatttatttttgtaataaggatgcattttgtaagcaataaattaagatgtctatgaaaatcccaatcaactataatgctatgagataattaatggagattataaattatagtattttcttataataatttatacgaagttgatttttttattgatgtaaactaaaattcgtacaccgctatatcaatatgagg

SEQ ID NO: 1160 - DNA, 630 bp, Gossypium hirsutum
tgcaggatctgttgaagatactgaagacgaatccaaaagattagccaaagccaaagcaactgctggcctatcaactttaacgggagaaactaatagcttgaataacattaaaaatggtgaaaagatacagaatttgactgatcaagaaggtgtcatggatgcatcacaatcaggggaggttcaggaggaaaatctaaaggtcattgaaagcatcctaaatgttgatagcattacaaagggtacatctatcgaccatgacatgaccatcaaagcatcaaaaccaacagaatctgaagtcaaggcatccaaaatgattaaatatgacaccggaattgatccatcaaaatcaggaaaggaaaatgctaaatcagatgatactgaaactatggtaagagaaaaagcaatcccgataattttggaaaaagatctccatacttgttgctttactcagttggcaccaaattacaacaacattacagaatcttttcagttttgatttagcagtaatttctaacattaggttattcacttattgtttttcatatatgtttctgattcatgagatgttcctagtacatctttttgtaataaatgaaaattttaaatcagctagcggtgctgtaaactggg

SEQ ID NO: 1161 - DNA, 696 bp, Gossypium hirsutum
  misc_feature (657)..(662): n is a, c, g, or t
  misc_feature (664)..(666): n is a, c, g, or t
  misc_feature (668)..(670): n is a, c, g, or t
gtcatcatggcttggtggaatagctttgtccagtggataccttctctgtcactgattttcctccttccgaagcggccaccaatgatgaaagtaggccagctccaactcctgaggtgactgccgatgatagatttccagtcatagcttttcgacgatctcgttcccttcgaattgttgcataggctgcctctgaggtaggtaaaggttctgttttcagcaaatctcttttatctgaatcaaattcttctccaattccagcgagaaattgatacaatttctggttcgatctgagtttattaaacattgtgatgtcatctgcacaaatcataggattaggttgtctgacttctatctcccgccatagtctctgcaatttactgtaataaacctccaatgtatctgtgccttgtttcattgtgtttgctcgaaccgtaagatcaaacaattgaactccttctcgtccctgactgtaggttgtagccagaccatcccataaatccttggctgttggatactctgcatagtctgtaattaactcagcttccatattatctagcatccaagaacatactaacaggtctgtttgctcccatttagtatagtccaaggtgcttttctctggtggtgctggaactccagtgatgtgccttaactgannnnnnannnannnaagaaaaaaaaaaaaaaaaaaaaaaa

SEQ ID NO: 1162 - DNA, 559 bp, Gossypium hirsutum
gtttcctttttgttgataccaaaataacaatgtttcctttttgtggtatggctaattgctgtggttttatcttttttttcaaatataaactattgaattattttacctctcagactcggtagagagattccacatttcagcatgtctcttattcgttttagctcaaaatattttggaagcagaaggtccttggtttgaaagttttctatttgtaagtcactgtataaaatcatggtactttatgttttaagatattttcttatcagaatactttagagaattttctatagtttgctcatatgtcatgtatgaactgaattctgcagaacgcgtttgtggtttttgtttgtgaaatgttaattgatatcataaagcattcattcctagccaaattcaatgatataaaacccattgcatactccgagtttctcgaagatttatgcaagcaggtacgcgcttctgtagctaatgtctgctgatcatttcccctgaaactgtcattttggcaactaaaactgccctcgtatataatttcgtctgtcatacttgtcttcttcca

SEQ ID NO: 1163 - DNA, 620 bp, Gossypium hirsutum
atcctaaagtgtaaaaaaatatgaacttttagaagacccaagcagggcagaccaactcctcagtttattggttcagattttaaggattctccaggtaaataattcagataataatgagggtagatatatatttctctaattcttttatttgcttaaaaggtcattagcccattattatttcacaagttatcttcttaaaaatctgttgttaagataacaggtttagaatgagtatagaccttgtccaaagcaagctctttcaatgttgtttgaagctcacggatgataatctgtaatcagaaaattaaaatcaagcattaacaaaaagcaacattacatagtagtttaaagaaaggtagtaacgacaggcttcatagcagactaacctttgttataagctttgtgtcatcgaccatagaaaaaataccaacgagtacctgataaaacagaaaccagacacttaagtgccttaaatcttaatgcaaggcctcatgacacactactcaaaatatcactagttccatagctgaatttactgagagcaaattacatttcagacatagaaaccatactgttaaatccaggaacagaataacttgcactttgttagtgagcatgac

SEQ ID NO: 1164 - DNA, 627 bp, Gossypium hirsutum
aaatttctactgtttaatggatcattccctgtgtccgatttagagtgccctccgccctagctgaatacccgtaactgtgatggagttttgagaggtttctttcgctattgcactattatcggtatcaccattcaaagtcccaaaaatcttgcgttgttttgaaatggctttcagatccaagaaatgcacctgaacaataagataaatcgatagatacgaaaatagggacaacaaaacttgaacagcataatgtaaggatattttgttggacaataggtatagaaattatgataattgctttgcttgttttcacctgcctcattatatgaaattactatttatccttgtctacatataactatcacatggataaatttgtaataatatattatagaaaagcctatatgtttttttttgaaaaattatgttcaaatatttatttactctaaaaagatttaaaatattagataaagtaggatgaaggatagatgcatcctctgtgaaagtgataatatttttcaatattatacatctatagtggagtaagacatgtcaattatgacgtgataatagatttgacgacatttaccccttccactccattgcttatccttagaccaaatgtca

SEQ ID NO: 1165 - DNA, 888 bp, Gossypium hirsutum
  misc_feature (495)..(495): n is a, c, g, or t
  misc_feature (746)..(746): n is a, c, g, or t
  misc_feature (767)..(767): n is a, c, g, or t
  misc_feature (872)..(872): n is a, c, g, or t
ttcattgagcacaaaacacaagatgaaatgctctttcgtttgacaaattttcatttaagagcgatatcttcatatccgtgttcagatatgtagagaggcgcctacgagtcattacactgccgcacattaaatggcgacaaggatctcaatggtttgaaacgccgccgtttagttgccatatcgatgagcattacattcaaattttcctcaacatgtttaatggatcattccctgtgtccgatttagagtgccctccgccctagctgaatacccgtaactgtgatggagttttgagaggtttctttcgctattgcactattatcggtatcaccattcaaagtcccaaaaatcttgcgttgttttgaaatggctttcagatccaagaaatgcacctgaacaataagataaatcgatagatacgaaaatagggacaacaaaacttgaacagcataatgtaaggatattttgttggacaataggtatagaaattatganaattgctttgcttgttttcacctgcctcattatatgaaattactatttatccttgtctacatataactatcacatggataaatttgtaataatatattatagaaaagcctatatgtttttttttgaaaaattatgttcaaatatttatttactctaaaaagatttaaaatattagataaagtaggatgaaggatagatgcatcctctgtgaaagtgataatatttttcaatattatacatctatagtggantaagacatgtcaattatgacntgataatagatttgacgacatttacccctcccactccattgcttatccttagaccaaatgtcagcggatcttatagaataaactcaaagataaggaagtgtcatncatctctttatgcttg

SEQ ID NO: 1166 - DNA, 652 bp, Gossypium hirsutum
cacgagcatctgcaattgcctccgaaattcgcttctcagcagatggaacaagaattgaggtccatctcattcccatttcacgacgattggtaaaccaagtagttagttgatggcgaatatgttccatcatctgcacaatggggagctcatgacattcaagggcccaattatataacatctcagtcacaccaagcgtaaagtggccatatctcactccttcaaaatatgctactgcccaaagctggggagggaagagttgaaaccattgtataacatcctgtgagatccctaccatttctgcaattttgctctcaaactctacaatcgtgagagcataaacagcgttccagaatatattaaccaactttgtgttcttaaatgtatcacggaaattttcactgacatgacgtagacaaaaaccatgaaaggcactaggaaaatgggtttctactgcatctaccatgcctcgctgtctttcagacagtatagtaagtctaggcatgttttcagtgttcacaccaagaagcttcctcaactctgacatgaaccacatccaattttcatcactttccacgtcaacaatagcaattgccaagggaaacaatgcatcatcagcatcaacagctgcagcacaaagtaatgcacccaagta

SEQ ID NO: 1167 - DNA, 622 bp, Gossypium hirsutum
ctctttacttttcataactgttcaatacaaaactgttttctagaatttttggctggctaaattatttattcaactgttataactgcaattgtttgcttgtttggtccattgtagacaggacagacggttgcaattaagaaaattcggctggggaagcaaaaggaaggggtgaattttactgcactcagagaaattaaacttcttaaggagcttaaaggtccaaatataattgctttaatagatgcattcccacacaagggtaatttgcatcttgtgttcgagttcatggagactgaccttgaagctgttattcgagatcgtaatatattcctctcaccagctgatatcaaatcctacattcagatgactttgaaagggcttgctttttgccacaagaaatgggttttacacaggtcttgttttggtttgcacttagcctagttttgtatggttgctgcttcataagttgctttacctgttgttttgctttacagggatatgaagccgaataatttgctaataggatccaatggacaacttaaacttgcagattttggtttagcacgcatatttggcagcccagatcgtaagtttactcaccaggtaaagccttaaagctgct

SEQ ID NO: 1168 - DNA, 648 bp, Gossypium hirsutum
agttctcaacgcattttggtggtaaaaagccccttgctagaagtcggatccctattaaaacttttattcatttttattgttaaaaattagtctcatagcataccacatgtcattgtccttgtgtcattgtccgattattatgtcagctttgtcggtctttaacggtataaaagatgaaatttttaaaagaaaggactaatttgctcattatatacagggactaatttgcctatttttttaagtggaaagagcaaaatgcaatatgactcttagtacaggtttccatagtacttttacccattttggtgcagcttggagttgatatccctatattcatacaattgaagcgacatggatttcatatagtgataatgaagtaaatggtgtggggttttagttaaagacttttattgattgattttctgggagttttgttgttgaatttacagaaattgcattgattgatcctcttttcattaaagaaggagagattttcgataatgccggcgaaagagttgctacgatttttcaggtttcaactccctcagagttaaagaagctccaccctgaggctcatcatgtagggaatgttgttattgatttactagattggcaggtatgagtgtcagtgttcgatatgagtatgca

SEQ ID NO: 1169 - DNA, 655 bp, Gossypium hirsutum
tgaaatttgtctaatgaattcctctcccccctcccctctaattattgttttaatgtttttacaccaggcattcattcagaatttagcactgttcttcacttcattctacaaggtaagctgcctatgaaatgaacgaggctcctttttgtcataaggcgaaagatggttgatcattggtaatagtttagcacccaccaatttctgtgcctgagttggtttatgggtgcctatatgcattttgatgcaaagaatgatgcaaatattgtaattctaatggatgatttttaagattggcttttttcttttgtgattaatcatatgttaaatattggattgatcaagcttaaaatgttttgaactagttgcagtttattttttgataaattgtgttactaaaattattctttgtttttagtttcacattcgggtgctagagtcttcacaagaaaatatttctgcgctgttaatgggtctggaatatcttatcaacatatcttatgtggatgacacagaggtctttaaggtaccatggcaattcaatatcctttatttgtaaattttgttgtatctgcttgttccgtttttaaccttttggaacttggtttctgaagtattattttgctgattatctggttaaataggtttgcctggacta

SEQ ID NO: 1170 - DNA, 622 bp, Gossypium hirsutum
  misc_feature (552)..(552): n is a, c, g, or t
  misc_feature (614)..(614): n is a, c, g, or t
tccatcattctaggtaagaggcctcaactgtgtggaattagtctctctgaaaatcttatacccaccatgactttcttagaagatttgggtgttgataagaaacaatgggcaaaagttatatacaggtttcctgcacttctcacttacagcaggcaaaagtttaagactactgtggatttcctctatgaaatgggcctttcatcagaaaatgttggtaaggttttaacgcggtgtccgaccataataagttatagtgttgaggacaagctacaccctacagctaagtatttcaggtcattgggtgctgatgtttctcttcttctattacgttgtccacagacttttggtcttagcatcgaggcaaatttgaagcctgtaacacaattttttattgagagaggatacaccttggaggaaattgggactatgatttcaagatatggagcgttatatacttttagcttggcagacaacttgataccaaaatgggatttctttttaaccatggactattcaaagtcagagcttgttaaattccctcaatattttggntacagtttggaggagagaattaaaccaagaattgcacttgtaaagaaggctggtgtaagatnactgctga

SEQ ID NO: 1171 - DNA, 659 bp, Gossypium hirsutum
actagtttgttgaagggacattctatgtagtttatccatatggaatttgttttaagaaattttatattatttctatccaatttttaatgtgatgttcttttgaaaatttaaaggttggagctcaaactgaaacagagcttaaagaaaagaaattgagagtagaagatgctcttaatgcaactaaggtaatatataaatcttgaagcttgtcttgatgattgttttgtaattattgcccttcaataccataaaaaactgcatgttttgggatatttatcaggcagcagttgaggaaggtattgttgtcggtggtggatgtactttgctaagacttgcttctaaggtggatgctatcaaggattcacttgataatgatgaagaaaaggtaaattgttttgataacttaaaaaaatcttaaaacttcagaatgttttttgttgaaatatttggctgtagataaagttcgtaaaccctaaatatcttgatttactataggttggagcagatattgttaaaagagctttgagttaccctctaaaattgatagctaaaaatgctggtgtaaatggaagtgtggtgagcgagaaggtacgcgatatgatgtttcaagttaccatgaccagtactctgctttctacgcagtgtgataacaattgtgg

SEQ ID NO: 1172 - DNA, 634 bp, Gossypium hirsutum
tctcatgagtgagtatataacaaaaaggggtatgggatgaaaacaatttaattgtccttactacaagaatcaaaattctaaaatctctacagctagaaactttatttcaactagtctcttttcaactcatggtcaagtacccaccccaaaaggttgatttaggataatatattgcagcttaacagaaagaatgaggcaaagatagtcgttagtaaaagttggagcatatgaaagtagaactttaaccacctaaagttcttacagtttgtcacatcaaaacatcaattaaatattgattaaatctgaatatattgcagcaatgatgcacatttaaatctgaatctactggctgtaatttcaaggaataaataggttttacaatataactgcaaatggcgtcattttgggttaaatgaggaaagtgaaaccatccctttgatttgtctctgcattcatgaaaataccggcgcaaactaataaactcagatgagacatcatttcggagcaaggccaagaaattatcaatcatctttctgacgcaaaacactaggcatgctattattaccattgagtgtagcaagataaattcgcttctcagccagtccaatatccgatagtatcaaattaccctgcc

SEQ ID NO: 1173 - DNA, 654 bp, Gossypium hirsutum
ctccttagtgcccgagatatcccatgtgagggcttcgacatgtggcctgattttgatgctcatgaacagattctaaatgatttaacctgtgtttcccagtctcataacagtccagtgtctgtgagtcgctcttgtcgatccaaaacattaactccttcaaaccttgaagagctattttctgcggagatctcttcatatcctagatatactgatcaggcagctgcctctgcaatattttcccctacccataaatcagctgtccttaatcagtttcaacagcaacagagcaagttatctccaatcaatacaagtgtttttgcaccaagaaatgttgaacacccactgttgcaggcttcattcggtgtcgggtctcctggaagaatgtcacctagaagtactgagccaatctcccccatggctgctcgcttgtccgcacatgttcagcttgagaagcaacgacagcagcagctaagctgccttagctctagggaacttggatctcctgtgaattgtccttggtccaagtggggttcgcctaatggaaagttgaactggtcagttagtgcagacgaactaggtcaattacgaaaatcatcatacgagcttcgtaacagtagcgaggggcccgacttatcttggggccagtctcttgaa

SEQ ID NO: 1174 - DNA, 628 bp, Gossypium hirsutum
ttgtattaatcttttgagattctacattgatattcacagtaaaatatgttatttctgtcatatctagactgaacaaatgagcaggatagttaatgagctggattctatccatttctcaatcaaaaaagcatctaaactggtcaaagaaattggtaggcaggtcaatctccgaaacatccactccctttcattcatatgatctgtctagtcttaaattgtattttactaattttatattctttttgtgcataggttgctactgataagtgcattatggccttgttatttcttattgtcattggtgtcatagccatcataatcgtgaaggtaccactgtatttctcaaccttgctccaaaccactgaactaacatctaaaagtattttctctggattctaagtgccacaattccatgctgaaagctgtctatgttaatcattcgtttcttgtttattgcacacggtgtctatacctatgctcaatgaccgggttttctttttcagctggtgaatccaaacaacaaggacatccgagatattccaggtttagcaccacctgcaatgaacaggcggctactttggactcctaattgaagaatttgaatgaaccaccgatgatatttcaggac

SEQ ID NO: 1175 - DNA, 636 bp, Gossypium hirsutum
aattgtttgcataccccggtatccatgttgtaggacacaatcccttcagggtccgaccgcatgaagcaaagtgtgttatcaacagaaacagcttgagacagaaagttaagtgatagtggcaccttaatgtttgagggcatgcgtcctggccgactccatgaattcttcactgagtcataaacttcacactctccgtcacgtcccacccacatgaccttgtagcctccagtggttgagtttccattcagagtcattcctacagtaattcgcgaccacactttaactgacccagttggcaactctttaaatgaccgagtcaaagggttgcagacatagattttcctatgaccaatatcaagaaagcaaactagaccacctgcagatgcaactggcaaagcaatcatttttgttggcctatatgcaggatggtgccatttcctcatggaagggtcataatacatggttccggagttcacattgtcatgagtaaaagcatagaaccaggtattgccttgtgggatttcagcacaacgctgagagaaactttgcaactccaacaaggaattccatttacggcaaacagagcgaaagcggaagaatgaggctatgggaagtcttgcaatgatggcttcaaaa

SEQ ID NO: 1176 - DNA, 575 bp, Gossypium hirsutum
ttaatgttttagtttagaaaccaacaaccatcattcaaattgaataagataaaagaggtgaattgcagctcaatcaaccttggaatgtacagtgagttgcgcattctgtatgaatttctttagaaaaccagaactagagattgcattctgtatagctgttgtctgatttcgtaggtggggttcttctttatattatgttaacataagcgaacatgttcctggcatcagcatctctgcttagggctggtgacatataaccaactcatttggctgattctatcattagaaaggcttaactttgatgctatagcatagcagctcttatggttctaaggacctcaagtttattcctataaacgaatcattagctgagatttgacttcggaaaaagcttaactgtgtttcttcctatgcattctatctgtacaaagtttttgttcaaatggttgtactactctttaatgggagaatcttgtaatgcatcttcatcttcatcttcatcttcactctttgttgcctttttcaaccgtattgttctgtataaacacgtgttttcaagagactagaaagttata

SEQ ID NO: 1177 - DNA, 612 bp, Gossypium hirsutum
tcatctggtatatgcatggaatacagttgcgacataaatgaagcaaggtatgcataatgtagaacattagtattacagcttcgacaagggattagagttcatagaaacaaaatagggaggtaactgctgagaaaagaaaagaacagctcagatatataactaaaataaatcaagatgtgcgatgggaatacctagcagctcttcctgaggatgtgaaacatataataactgatgccttcaccttaattgctgctcgtacctaaacaagaaattcatgctatcagaacaaagttgcagatgcacagttgtttagctaaagttggtaaagactaatgtggcaagaatacaaaaagcagcactgggaaagaagaaataccgcagaggaagcaatggattccaagtgggtcattggctctccaacatatttgacagtcttcttgaaatacatgtcctggttgaataccttctctgcctgggaaatttaaatagaaacaaaaaaacacacagctaaaatgcctaggaaatggattagaaatattattgacttctgattttaacagttacagaagattaagtgatccatgattcttatagacagacaagcatggccag

SEQ ID NO: 1178 - DNA, 622 bp, Gossypium hirsutum
tttatatagattttgataattaatgaaagaggaagatcagcatccaaaagagcttaagaaggtaaaaatggaacttggttaagaccagttgttcactctcttgtgcagcaatatctggaatacaattacaaagtgggtcaactctggcactgccatctagctgcactccaatgaaatactggacttcaccctgtttcataaaggccaaataagaaaacaaaagcagaggctataatttgattatctgcttcacaaaggagttaaataggcaagattcaacattcaactctgaatatttgaggattttaccttctggtcacgcataggctgaagatggaacaggttccagaacttcttgcctgaaattcgtaaaatttaaaaaagaaaagctttgaataattatatgaaataatgatgtatagactgtactttcaactactgaaagagaaaaacatcacatgcgtgacatgaatctggaaatcgaaatattagggtgtcatacgaaaatctagaacttgaatagtatcaaagcataccactctttgtgtagttgatgagctgcacagttacttctgtttggttatcaatggcctctcgaatcttcctcacagtagctggatca

SEQ ID NO: 1179 - DNA, 640 bp, Gossypium hirsutum
tgtattgaatcaggtaggagtatcaactttccaagttgtctacttgatgtactgctgctctggaactgcatgtgaattgtaactcttttcttggtcggtcttgttacctctctataattgcgcgagttgaagaaattttgggccccacttctatgtttgctttgattattcttggggtcatctgctatttctggctctataatctctatcatatgttcatctttctttcttttgttttcataactaagtaagagctcatatatgctcttgtttccctgttgctctgccaacacttttggtgtccttcctcttgcatctagcttatttacacttgctcctccttcgagcaaaatcttaaccatttcaatgtgccccttgcgaacagcatcatggagagctgtttggccatcctctgctgttggaattccattatctgtaattctacttgtttgactcttctctatagcctctgatcccaagaaatctatgtctgttgcttctttctttgatccatatctctgtggttgatcttcaaatccagtttctgaacaacttcctctcattgttccttcctcgggctggtcaaagctgctgctctctagcccattcaatttctgcgagaacaaccatcacgtcatac

SEQ ID NO: 1180 - DNA, 603 bp, Gossypium hirsutum
ttcttctcttctccggtgccttctctagtcccgagtaattgtcaaagttcctccagtgcaactgccaccgataatgacacttctgctgctaccatcacctctgcaagtgcaactgcgaatgccagcatcagctttaccagcagcccctctgtggaggcttcaatcccttcttttacaggtgcacctgttttcaagttttcatcctctggggacccatcaacttcagtttcaacattatcagcaacttcaggggaagcaactgaatctaagacacaggatacaaaacttggcaatgtaggtatctttccttttggtagtacatctgcttttactggctctggaagtagtatttttggtggtacaagtgctgcaagcagctctgctggtacaacagctgaagtcgcaaactctggaaatagcagttccagtggtatatcttccactattatgaactctggaagtggctttttcagcagcacattttccccaatgacaagcacaagcaatggtatctttggtggttcatctgcaagtacaagcacaggcaatggtatctttggtggtacatctgcaactacaagcacgggcactggtttatttggt

SEQ ID NO: 1181 - DNA, 621 bp, Gossypium hirsutum
tttgtgttccgtacaggaatagctttgggagtaaccggactagtgggaagaccagctgctagtatacttgaggttactggaaaaactgcacagagtattagaaacagaagcagattataccaaatgggttcacaacgttgtagagttcgtttgccaaggcctttaagcagagaacttcctttgaggccttactcttgggaagaagctgttggaatatcggtgcttaaggaagctgatgatggcaagctcaaggatgaagtctatgtcatgtccaaggcactcaaaaaccccggtaaatatgtcatcatgacagagagacttgtgttggttgttaattgcctgagtctggtggacttggggaaacctgaattccgaggtgttgcagctaatcaagagtgggtgatagaaacagaaattagcctgcatagtgtaatccacactgatgctgatgatggggtggtacatattgttggaagcagttcagatgcattgttaagacagaatcagcagatgtcgaggaagggtggtggtggtgggacgaagatgcggtggaataatccatcaactccgcttccactttttcagaccaacttggaactggaatcagaagaagacacaaag

SEQ ID NO: 1182 - DNA, 564 bp, Gossypium hirsutum
aatgcccgactactctcaccaactccctacaaactaggatgcatcattggacccattcattttgctggtttaggtcaggggacagatcaaatgaatacttactacattcagaaggcaagtaaaatttaaaaccacatggatttaccatttccagtggtgaaccaataatgcctagaggcaacttcatgcttccaacagtgcgagttccatgaatgaagccaggcctcaaaatcactcctgcaatagaaaatgcaaaatctttaaagggtaaaggaccataactactagatgatgatagtttcatgctattactagcaagctaccagccaaaccaaaactatcagagcttactattagcaatagaagaggaaataaaaagcaatgtggaagttaggtgcagaatattgcacaaattacagcaagtgaatcacaaaacccacctccatacggaaatttcgtgagtaactctgtctcagcagctctctgagccaaacaggaaaagaaaaagagaattttccatcagcaggcagtccacaagacttcttgagccatatattccatcag

SEQ ID NO: 1183 - DNA, 631 bp, Gossypium hirsutum
  misc_feature (624)..(624): n is a, c, g, or t
catatcaattattacttaacccttaagccatcacattattttctactttttcgagtttccctcttgtatttgaatcactgacatattcattagagttaacagtatacataagaaaatctgaaaagaattaatatttttaaacccaaagcatttgccaacaggaagcttaggtggaaatatgtgcatctgttacaactaacaatgaaggcaattaatcaagacttttcaataccacaaaaaattcaaatttaatttgttaaactttaagcaaagataaattttgatcaagcattactcacagaggttgaagactgtgtaatggtaccattagtagtagactggcctccaactccaaaagaatttaaaactgccccaataacctataagtcaagcaacaaacaatgaaataatactcagcattgcttcacacacattgacgtacaagcaattaaagaactcaggttatgaaacagatttaaaggtgagttgaaatgcttcacaagtaaaaagagaaaaagcacccacccgactaaggtctggagcactgccatcaccttgatctccaacattaaaggtcccaagaaccacactgtgcgaaatctgcccaactcgataacaaggagncctgaag

SEQ ID NO: 1184 - DNA, 614 bp, Gossypium hirsutum
atgcacaattaccttctgcatttgatcccccgaaaatggcctatccgggagaaacagcgcctgcaaatgccgattcacaaaagtgttgctgcaaatgcaattaccttgttgctacatctcatgaaacagctgtcgatcactacccaagcatcgtagagctggtgttgtcaaagccacaaggcgcaagctagaagctagaagctagaatccttgcatttccttaggcaaagcttgcccaagttgtatgagtataacaagcttaaagctccattaccagttgcatcaaaaatgaattcatcactcaaatacatataatatatacactaacatcaatggcaaaaactaaaacatcgtacttaataaatactcataataaatcacaatttattacattataaaattacaaattaacttcatattaactaaaaacccccaaaaagtacaattttttttttcaattttgaggtgaagaagattgagaaggtagccaaacactaactttttctttctcgtacttaacgaacaaagccccaactgcagctacaaaataaatctgaataaagataattgctggcgtatgataacttatcgcgctctttaccgtacccaattca

SEQ ID NO: 1185 - DNA, 635 bp, Gossypium hirsutum
ttttcttcaagaaaggagaatcatcagtttgctgctgggagttaggctgcacattgccatcttcacctcttccgttgacatcttccacgtacctcttccctttcttcttctttgtcactttgttgctccctagcaacgaaacttcagacttctcacagcgatcatatgcttcagtgttctgtcttttcttcccagttctacccaggttaaattcatctgccaatgatagtgccacaggcgaaccatcctcctcatcaagataatcatgctgattatttgactgagtcataaaatgatcataggcaagttcaccgttctgccttttctcagtagggtaggccctcaatgaggacctacgtaacctgtcaccaggttcccctcgtaaatggccattcttgaccaacttggaaacttgtttcccaccaacctcatccaaaactctagaaccagagttaggtaagggactgctttcatgcatcttacccttctgttttctttccgaatagtagctttctactcctgccacgtgcacattttcctcaaagctctttttggagtagcggttcattccatcaagaggccatccatccttcatagtatatttctttgaagatttggtctttcctagaatcaag

SEQ ID NO: 1186 - DNA, 619 bp, Gossypium hirsutum
ctactccaagttcaaacacgtagagttggatcattttttttctgtgaaaaggttgctgatggatcggttcgggttgttgaagttcctgggtctgatcaagtggctgatgtgcttactaagccactttcgatttcttatttcactcggtttcgaaatcttcttcgggtcttacccgtggggaggatggatgaatgttaaagatataatgagtcggttagggaggtagttagagttagctaaaattgttagctagatgttaagaagagcagttatctcaaagtctatatatatacagtcttggtattgtatttggtagctttagtagtctaaattcagaattgataaaagagaagtttcaatttagttccaaattattttcattcatagattcacaatttcatctgtacttcttcatacctgtatttcttcacggtcttattccatgttgaagattcttgacattttaaggctgtagtcttagatgtctgtttaagattcttgatatgttaaggttgtagtcttacatgtctggtttataagcaaggtagagataatgtctgtagggttttattctagacccagaagttcatctcgaacaaatagaggatcaaacggagca

SEQ ID NO: 1187 - DNA, 636 bp, Gossypium hirsutum
attctatgatgattgtctcttagttatcttggcctctttgcctttctattctgtctctagatcgttgttatgtatatgtattataaatgtgttcctcctcctcctcctctctctctcagtcttcatgattatattggggctaattcgctggcttgcccctttttatggatagccatatctattccctgtaggggacattaaagaacatatttatttttttcttttcatatgcatgatagccagttatgcatggtcattgccgattaaattttaatgatttaggtatgcaattatctcaacaaataaaaactgtccatcaattaactgcatcttgcgaccacatcaactttcagtaaaacaattttccgtttattttgagggtagcaggctcgtttttaaacaccacatcaagttctgaattcattagtaaattcagtagtgttatgccatcatagtaggtttgcactacagtttcccgtgctgtagaaagcttgattaatttcagaaattccgtgttcttataacttgcaactgttgtaggcttggttaacatatttctggagaagagccaaagtacatggtatagaggaggatattgcagaagatcgacttcagttttggatcagccgtagaggg

SEQ ID NO: 1188 - DNA, 605 bp, Gossypium hirsutum
tgattatccagccctgatattccccaagctgctcgatttttgtttatgaagaataaagtccgtatgatcgttgattgtcgagcaaaacatgtgcaagtatttcaagatgataagcttcctatggacctaactttgtgtggttcaaccctgagggctccccatagctgccatttacagtacatggaaaacatgaattccattgcttctctggttatggctgtcatcgtcaatgatggagatgaagaaggtgatgggactaactccgagcagccacaacaaaagagaaagagattatggggtctggtagtatgccataacaccactcctaggtttgttccatttcccctcaggtatgcctgtgagtttctagctcaagttttcgctgtccatgtcaataaagagttggagcttgaaagtcaaatcgtcgagaagaacatcctgcgaacacagacccttctgtgtgatatgcttatgagggatgcaccagtggggattgtatcacagagtccaaatataatggatttggtgaaatgtgatggagctgccttattatacaagaataagatttggaaactaggtgcaactccaagtgatttccactgatg

SEQ ID NO: 1189 - DNA, 639 bp, Gossypium hirsutum
  misc_feature (538)..(538): n is a, c, g, or t
aaggagagcgagcaagctgtacattatcaagcgttgtgtgttgatgctgctttgttggagagaccccaaggataaataatacctttttttctataattcacctcacttttatctaatcaattagacatagatgagtaaggacagtgtataatgtcaaactcaaagcattctcaacttagcctttcttttgtagctgtagtatcaaaatgctttctctgcataattttatatttttcagacatcagaatcagaaagatttacaattccatcctgaggcctttgtttgagctaaaaatctcacaagcaaagttttttaatggaaggactgtggtcgccattttcttgaaccagttcctagttatttccgacgcatgcattagtttttttttttccctttttttttgcctttggggggaggaaaaccccttgggtccacgggcgggaacatatcataggaaggcattttttgaccccaaatttccaaccataaaaaatatgaaaggctgggaaacaaatttcacccgaattaaaactgaancccagctttaaaaaactcgaagaacatcgaaccatttatttgttttggaaaaaaaaagaaaaaaacggtttatccaaaaaaaaaaaggccccaacggaaaa

SEQ ID NO: 1190 - DNA, 592 bp, Gossypium hirsutum
tcaactcccgctttgggttttaacccacgcagttttgagacctaaatatctgctactttttttcaaataaaaatgttaaatttaggtcattttttaatgaaagtattgattaaaacgttaaatttttaaatatgataatcctcatgtacttcttgcttctttttttgaattttttttataaatcttaaattatttgttgatgtaacatataaaataaattgcgtcgtgtcgggatgaagtatacgagaattgtcacactgattttcatgctaacattattaaaatttaattttttagtcagcattttcgttaaaaaatgatttaattctttttttgaaaatttattagccaaatttaattaaaataataataaaattaacaaaagaaaatgtaaatgataaggactaaatttgagattatacctaaaaaaataataatgtattaccttaatagaggttaaagtttcagtgttggtgtagaagtgggcgttaagagttgaaagaaaggcggggaaaacatagggaagaaactcccagttttggtgcccgtgaaatggtttggcagtgtagtgagcaaaggtacagaaaacaat

SEQ ID NO: 1191 - DNA, 1271 bp, Gossypium hirsutum
  misc_feature (446)..(447): n is a, c, g, or t
  misc_feature (450)..(452): n is a, c, g, or t
  misc_feature (476)..(479): n is a, c, g, or t
  misc_feature (488)..(488): n is a, c, g, or t
  misc_feature (496)..(501): n is a, c, g, or t
  misc_feature (505)..(505): n is a, c, g, or t
  misc_feature (507)..(513): n is a, c, g, or t
  misc_feature (531)..(532): n is a, c, g, or t
  misc_feature (541)..(543): n is a, c, g, or t
  misc_feature (545)..(550): n is a, c, g, or t
  misc_feature (554)..(558): n is a, c, g, or t
  misc_feature (560)..(564): n is a, c, g, or t
  misc_feature (573)..(573): n is a, c, g, or t
  misc_feature (575)..(581): n is a, c, g, or t
  misc_feature (606)..(612): n is a, c, g, or t
  misc_feature (614)..(619): n is a, c, g, or t
  misc_feature (625)..(637): n is a, c, g, or t
  misc_feature (644)..(649): n is a, c, g, or t
  misc_feature (654)..(658): n is a, c, g, or t
  misc_feature (668)..(677): n is a, c, g, or t
  misc_feature (679)..(680): n is a, c, g, or t
  misc_feature (682)..(687): n is a, c, g, or t
  misc_feature (690)..(695): n is a, c, g, or t
  misc_feature (697)..(697): n is a, c, g, or t
  misc_feature (699)..(699): n is a, c, g, or t
  misc_feature (701)..(701): n is a, c, g, or t
  misc_feature (704)..(711): n is a, c, g, or t
  misc_feature (716)..(727): n is a, c, g, or t
  misc_feature (732)..(735): n is a, c, g, or t
  misc_feature (741)..(741): n is a, c, g, or t
  misc_feature (751)..(751): n is a, c, g, or t
  misc_feature (755)..(762): n is a, c, g, or t
  misc_feature (770)..(776): n is a, c, g, or t
  misc_feature (778)..(780): n is a, c, g, or t
  misc_feature (785)..(803): n is a, c, g, or t
  misc_feature (805)..(806): n is a, c, g, or t
  misc_feature (809)..(809): n is a, c, g, or t
  misc_feature (815)..(819): n is a, c, g, or t
  misc_feature (822)..(826): n is a, c, g, or t
  misc_feature (828)..(834): n is a, c, g, or t
  misc_feature (841)..(841): n is a, c, g, or t
  misc_feature (850)..(852): n is a, c, g, or t
  misc_feature (857)..(858): n is a, c, g, or t
  misc_feature (860)..(873): n is a, c, g, or t
  misc_feature (875)..(885): n is a, c, g, or t
  misc_feature (889)..(892): n is a, c, g, or t
  misc_feature (894)..(895): n is a, c, g, or t
  misc_feature (899)..(904): n is a, c, g, or t
  misc_feature (906)..(911): n is a, c, g, or t
  misc_feature (914)..(916): n is a, c, g, or t
  misc_feature (918)..(923): n is a, c, g, or t
  misc_feature (925)..(940): n is a, c, g, or t
  misc_feature (944)..(947): n is a, c, g, or t
  misc_feature (949)..(952): n is a, c, g, or t
  misc_feature (962)..(962): n is a, c, g, or t
  misc_feature (971)..(974): n is a, c, g, or t
  misc_feature (979)..(983): n is a, c, g, or t
  misc_feature (987)..(991): n is a, c, g, or t
  misc_feature (993)..(1000): n is a, c, g, or t
  misc_feature (1006)..(1008): n is a, c, g, or t
  misc_feature (1011)..(1012): n is a, c, g, or t
  misc_feature (1014)..(1014): n is a, c, g, or t
  misc_feature (1016)..(1033): n is a, c, g, or t
  misc_feature (1042)..(1043): n is a, c, g, or t
  misc_feature (1046)..(1047): n is a, c, g, or t
  misc_feature (1050)..(1064): n is a, c, g, or t
  misc_feature (1066)..(1068): n is a, c, g, or t
  misc_feature (1070)..(1084): n is a, c, g, or t
  misc_feature (1088)..(1094): n is a, c, g, or t
  misc_feature (1097)..(1114): n is a, c, g, or t
  misc_feature (1120)..(1120): n is a, c, g, or t
  misc_feature (1124)..(1127): n is a, c, g, or t
  misc_feature (1130)..(1137): n is a, c, g, or t
  misc_feature (1141)..(1143): n is a, c, g, or t
  misc_feature (1153)..(1167): n is a, c, g, or t
  misc_feature (1169)..(1173): n is a, c, g, or t
  misc_feature (1176)..(1176): n is a, c, g, or t
  misc_feature (1182)..(1188): n is a, c, g, or t
  misc_feature (1200)..(1209): n is a, c, g, or t
  misc_feature (1212)..(1212): n is a, c, g, or t
  misc_feature (1218)..(1218): n is a, c, g, or t
  misc_feature (1221)..(1223): n is a, c, g, or t
  misc_feature (1225)..(1240): n is a, c, g, or t
  misc_feature (1242)..(1256): n is a, c, g, or t
  misc_feature (1258)..(1258): n is a, c, g, or t
tactgtacttattggtgaaaccggtaattctaatgttggagaaatatgcattagaggtgtatgtgtttctactggttacctttttgaaaatgctattatacctttgaacaatgcaaagttgcaccagaattcaatttgcaagtgttctacggtggagtgtggaggtcagatatattttaggactggtgattttgctcacctgttatcaagtggtgacttggttttcctggggagaaaggaccgtaccataaaagttaatggccaacgcattgctttagaagagttagaagatacattaagggggcataatgatgttgttgatgcttctgttatttctcaaaaggaccagggagacaatgaattcattgtaacattcatatcattaggagagaaggtaaagtctgctgaaataagaaccaattggaacacttgtatatcataaaggnnttnnntagattttgataaggacatgaggnnnnatctaatgnaaagccannnnnngaangnnnnnnnatataatgctcattctcnncataaaaannncnnnnnngttnnnnncnnnnnttcactctntnnnnnnnttcatcccgaaattattttaatgcnnnnnnntnnnnnnaccttnnnnnnnnnnnnnccctcannnnnntcccnnnnnaataaataannnnnnnnnncnncnnnnnnccnnnnnnancntnacnnnnnnnnttcannnnnnnnnnnnttttnnnnttcccnttactttaantttnnnnnnnncccttacnnnnnnncnnncctcnnnnnnnnnnnnnnnnnnncnnttnaccttnnnnnttnnnnntnnnnnnncctcttntttctaccnnntctcnncnnnnnnnnnnnnnntnnnnnnnnnnncccnnnncnnattnnnnnncnnnnnnttnnntnnnnnncnnnnnnnnnnnnnnnngttnnnncnnnnttttttttcnccccccttnnnnttatnnnnntaannnnntnnnnnnnntatgtnnnctnncntnnnnnnnnnnnnnnnnnnctatctcannatnntannnnnnnnnnnnnnncnnncnnnnnnnnnnnnnnnttgnnnnnnnccnnnnnnnnnnnnnnnnnntttttncctnnnnctnnnnnnnnattnnncttttacctnnnnnnnnnnnnnnntnnnnnttnatcttnnnnnnntcttttttacannnnnnnnnngcnttttcnttnnnannnnnnnnnnnnnnnnannnnnnnnnnnnnnntnttttatttttatt

SEQ ID NO: 1192 - DNA, 516 bp, Gossypium hirsutum
actcccttaactaatttttctttcccatctccacgacgagaagctaatttgttaaaagtcttcgatggaaaacaggtaggtaactccatctgaagaatcataaataacagctacaagctacatcagccaggtcaccaatattaattggttagagcgccaaaaagatctctaatagtaagtttccacaatttttatggcctctgaagatagactaggtacctccaaaggtaatgaaagttgcagacatagcaaaatataacaaagcaccagaatctatgtcgaacagagatggattaagctattgctttctgtacttcattgtgcacctggaaatggaggatatgaaaacccgcatgaagtgaaactttaacaaacagcaatagtattcgtgattagagaacacatacctcacaaggtttctgaatgacaccaacacaccttgaagcactgatgctattgcttttcaacaggcaacgggcagtacttgaagtaggtttcccagagggttcctgagtc

SEQ ID NO: 1193 - DNA, 647 bp, Gossypium hirsutum
  misc_feature (639)..(641): n is a, c, g, or t
acaaacccttcctttatacctcttataacactacaatcaacaaatctgggagatttctttttcggaaaaaaattgagagattaattgcaaaattccaaagtaaaagaaagaaggagaactacattgactaccaaaaatatttcaagttttgagtgaaaaataataatatttcgtcatacaacttaccagtcctttatcatcagttgaggctttgaaggtaatcgtaaaaaaatcaattaattttctttttaaattatttgcgataaatatgaaagtcgaagtatcataaaattacagggtagaagccatgttgtttctcaagaaaatcatagtgatgaagctacaggattaatgacagtaatataccagtttatgatagaaaaaaattgtaccaatggtttatgatgtctagtaactagggaatctcactcattaaacaagtacacgcttttacctcgcaaccagaagccgcttcaccatgattgatatgttatagtccctgtccctactcaactcaaaacattctaatttccacggatccctgcttttcacacagatccagtctccttactactattttataattttcaagtttcagttcttttgtctcaattaaccatgattctgactaattgatgnnncgcttg

SEQ ID NO: 1194 - DNA, 797 bp, Gossypium hirsutum
  misc_feature (648)..(656): n is a, c, g, or t
  misc_feature (658)..(663): n is a, c, g, or t
  misc_feature (665)..(668): n is a, c, g, or t
  misc_feature (672)..(677): n is a, c, g, or t
  misc_feature (686)..(691): n is a, c, g, or t
  misc_feature (696)..(711): n is a, c, g, or t
  misc_feature (713)..(719): n is a, c, g, or t
  misc_feature (721)..(732): n is a, c, g, or t
  misc_feature (739)..(740): n is a, c, g, or t
  misc_feature (743)..(745): n is a, c, g, or t
  misc_feature (748)..(754): n is a, c, g, or t
  misc_feature (756)..(760): n is a, c, g, or t
  misc_feature (762)..(766): n is a, c, g, or t
  misc_feature (774)..(774): n is a, c, g, or t
  misc_feature (776)..(779): n is a, c, g, or t
  misc_feature (781)..(784): n is a, c, g, or t
  misc_feature (787)..(789): n is a, c, g, or t
tttttgagggatttaataattatattttttacttgcatacgtgttttattgtgctaaaaggcaaactcgtatactgatgatatttttgcaagtactgaaatttctctttaattgattctttttggtgttaaaagtttcatgattgatgaaatggatacacaaaatttaatttggaaattcttcgattgatagaatacccttaatgggcttttcttttcataacaatttactctcatgtggtatttatttagttatttattgttttattttattacagtttcttctggtcaagtttgcaaaaatgattagtgtaactgtatccaagttttggaggccggatgtcactcatgtgattgcctctatagatgagaatggtgcatacactaggacacttaaagttctcatggccatttcaaacgggaagtgggttcttaaattaaattgtgagttcgttgttcttttcttgttttagaaggtagaacttgctttttctctgtatatctttattgtaatagtcatatgagctcttttgagtttggtagcaactaattgaacttggatagggcattttcatcattacatgagcaaagttattttttgacttgtacaataccattataacagccatgaactggaattacatgaggnnnnnnnnncnnnnnntnnnnacannnnnntttataatnnnnnnttttnnnnnnnnnnnnnnnntnnnnnnnannnnnnnnnnnnatgatcnnttnnngtnnnnnnnannnnncnnnnnctttcttngnnnntnnnngtnnnaaaaggca

SEQ ID NO: 1195 - DNA, 648 bp, Gossypium hirsutum
tattcgttccgtctgtacaggtagcatgagccaatatattccattacttgaattttatggaggagggatccctttagtttcaccaagttatgtttcttcggaagcttgttttgggatcaatttgaaacccctaagcaatccctttgacgtctcttacacctttctcccaaatacggcttacttcgaatttctccgtgtgaacaaagatggtggaggaaaggctcaagaaactaggactatagacaaaccggtcgatcttgcgaatgtgaagcttggtcaatactacgaagttgttgtcacaactttggcaggtaggtttctttaactcggcatcaaagctatacggtggttacatcaagagacacagttaaaagtctcacattgactacctcttctgcgcacctaaatgtgttgtaatcatctttttcaggtctatatcgatacagagtcggatgttctgaaggtgaccggattctataataaatctacacagtttcaatttgtagaacgacagaatgtggttttgagtatagatgcagacaaaacaactgaagaagaccttttgaaagcaatcacgaatgcaaaactcatcctcgaaccatttggcatcatgttgactgcatacagtagctattccgacacctcgta

SEQ ID NO: 1196 - DNA, 589 bp, Gossypium hirsutum
ttttctgtctttaatttccttttgcttttgtctctacaacaataggaagtgatcatggagtgaaagcacaagggaatggatggttactaacagttgccttgattgagggaagtaatttagcaactgtagattcaagtgggtactgtgatccatatgtggtgttcacttgcaatgggaaatctagaaccagctcaatcaagttccagaaatctagtccccagtggaatggtgaaaactagattgccctttgtctatgtttgaattcagtttgcttgtttgcactagcatcctatataataatgattcttttagtttctttagatcaaaacctttcaaattttgtccaagaattatttaaatcttacttcaatcaattgcttaaatgagctcttatctttgcagaaatatttgaatttgatgcaatggaagagcctccttccgtactggatatagaagtatttgattttgatggactttttgatgaagctacatccttgggacaagctgagattaactttttaaaatctaatatatcagatctagctgatgtgtggattcctctgcaaggtaagcaggctcaagcagtcaa

SEQ ID NO: 1197 - DNA, 642 bp, Gossypium hirsutum
gagtggactaatccatgacattccaatctgcccatctcttccatattagtctgtaaatgacttggctcttccttaattctggcagaaaaagaaccaagatgtgctgaagcttcagacagacgcatttgcgaaaatgcctgaagaaaagagaaaagagggaaagggggatagtgcagggaaaatagatcagattttatacaagatcaattaaattgtcaaacttagttcaaacctgaacccacggtaaaattattactttacaagaccataagcactatttgcagaaactgaaacgcataatgcactacattgcacaaaggaaaaagcacatataagtaatgtgcacaggaaataagaacactcaatttaacaaaaaaaaatccctttcctgatttgttcccaaaatcatcaaataatcagttaagatcactgcttacaagacaactcaactcaattgagccttaatccctaaactatttaagagttagctacatgaataatgaacctgttttctcctggccctccatctaacagaacatcctctaaaagatccaaatttgccaaactcttcctatcactttaatatattttatttttggtctgcctctactttcttcattcttggaacatgaatacaccccc

SEQ ID NO: 1198 - DNA, 604 bp, Gossypium hirsutum
agaaaaccgtgagcttataaggaatataattcaagcacttcgcatatgatttcctcatgcattcagttatgcaaagcctaaatattattaatatttcactttgttgtacctacagttattattagacaattactgtgctattgtgtcattctcgtataacagacacagtcacatagatgatctttgtaagtcatccttgtgaaatctagagatagtcaaatgggaaacagtcgtaggcagtctaagaagaggtctacaaaaccgactcagagtttgattagaaactgccaatggtgcgtctggatttaaccttagctattggttgcaactctatgtcattgaatgtactattgcggggttcatgcgtatcaatcgaatggtggtaatcttcctcgactgatgttattgtgtttgtatctgtcattatgattgagcatgtttctgtgtctatggttgacctatcagtgaaacgcgctagccttctccttctcctcctccttgcctccttaccccatccatgaattgtgttccttatcccctgcggaagtagggccgccttaaagtttgttcccatctgaaaagagagttgctattggcataaacg

SEQ ID NO: 1199 - DNA, 629 bp, Gossypium hirsutum
acagcagatttcttactagatgatatctgtgccgcaataccatcagatgaagaatttgacttgtcttcaggattcattggagacctaactgtgtcatttctttctgacttaagtacctagcattaaacaaatcaataatgtataagtacaaggaattcaacaaataaagaaaaaagagatcagctaaacatataccaaacgatagcaatgcagaccacatggtgcattctcatcatctgtacgattccatggagtttgtttatcagcctgaaaattataggactgagaaaataagaatctaggagcctagcaacatactcaggcaattataaacatctagaattgcatgaacaactcacaggaaatattaggtcctgagaacatccatgtaatctgcaatcaaagacctgccaaatataagaaaaacggatacaattaaagaagataagaaaacaacacagaacatgataaagaacaagaaaaatgcttacaaggcaccgtctacaaaataaattgtcaaaagaatcaagagctgcttcaagatccttatcaagaaaggaattccaattttgttcttcagtatccctattcttagaggccccagtgtcctcctccttcatagaagtttc

SEQ ID NO: 1200 - DNA, 613 bp, Gossypium hirsutum
atatcaatttataagatgaacaaaatgactacttaaaacaagcaattatagtcctcagattaaaacacaagcataaaagtgcaagacaattaaaccatccaaaaccatttgcagcatcaaaatatcgaagtaaacactagcattactttaaatcacattgcaaaaactatagctagatctacctggagtacaataaaaccatttgcatcaagtaccaaaatatttaatcgtcttaaaacaaacttatccctaatcaagttcgcggtgatgcatttccagctccaccttgctgcccggtttgagcagctggcgctgcctcataagtcccacgagtgcccccacttgcattgctgtcagaaggatacgctggaggctgtgaataactgctataagaggcgttatattgtgctgcatagggtggggcaccatatcccggctgcgcagctgcagcaccaccataagtagatgattgaggccgttgcaaacctgattctgcttgtccatagccagaagatggaggctgtgattgatatcctgcctggccatagcttcctggggtggtaggagactgctgtgtctgcccataggcagggtgattgaccagtggtttctg

SEQ ID NO: 1201 - DNA, 633 bp, Gossypium hirsutum
acacgcccttctaatggggaaccaccaccagtttttgttgggcagcttagtgttgtaaaggcacccaacatgaataataccgaggttagttcttttccaatcctggttgctacttgtttttgtggtttttttatatactagttgctattgtcacatatgttggacttgtatactttttatttattttaaaataatcattatatattaaactaatagttactatgttgtgtagaaatgactggattttacattttaccatagacttactttggcatttatgtcacatttacattgaattagaattcttataaattggttaaatcttattatcgaatatttcatttaaagaaaatcttttaatggaactatattcttatttatcagattgggtaaattttattaatatctgtttataataaatattttaaatggcaatgtagaaatataatgaacaaaaatgtctatatcagttgaaaagtatttcgttatatgtgcttttacattataggttataaatatacagatttatgtatagcttttgtttttaagtgtaatttgcactaatgtatatgtgtgattgtcttgacaggatcattattcaacagagctagttctttctcaggagaacggagg

SEQ ID NO: 1202 - DNA, 681 bp, Gossypium hirsutum
cttatgcaaccaagtttgcacacttttgttgttattatatactatactaaatgttttattgtgtccaaaaatattagttgggaaattgattttaccaatagataaaaagattgtactgttatgcttgtagaagtccattttggtaaaaggaagtcctttctcagtgaaagagggcctgggggatggaaagctaacattgatttccttaattgtgttttctgttaattttgttggtaagacacaagaagactactttcgacaaggattaacgttttgttttatttgacagaccctgcattgcgtcgtggagattctgtctatcttgtgggtttaaatagaagcttacaagcaacatctaggaaatcagttgtgaccaacccatgtgctactctgaacattggctctgctgactgtccacggtacagagcaacaaatatggaagtagttgagcttgatactggtatgtttattgctattacttaagaaggaatctaattttaccattgttgtcaaggtgtgtgcctacgccctgtgccttagtggtaaaaagcaaaagtgtctcggaccctttcgtgcaaggcgcatttgatgaggtgcatacctagtctgcctaggtgcactttttttaagtcgataggcataataaaccccacctctctgaaactctcttcgaattgcttc

SEQ ID NO: 1203 - DNA, 615 bp, Gossypium hirsutum
tgtgcaaatttattcccttctggacgagtttattctcaggcattccatctgggtggacaaggtttcttcctctcagcccattgcaacatggaccagcagagctctttccattgcttcgggttgtttttaggaatgcaggaaaagggttctgttagttttgcagtggactatgaatttgcagcaaggtcaaagccaacagaggagtttgttagcaaatacaaaggcaactacacattcaccggcggcaaggctgttggctaccggaatttattcgctataccctggacatctttcatggctgaagacagtctttacttcataaatggtatactccatcttcgagctgagttaaccatcaggcactaaccaactcctgtttgatccatcgaatttctgccttctaactccccttttgttgttgctctgctcagataatgagccaaaggcaatgtaaaagtaaatggataaacttttgtttttgtttcttcaaggatcgtgttgatgggtttgtttggctatggaggtggattaacgtctatgttaacttatttatatgtatttaagcaaattactttaagatgatttttatttgtattggaagccgctacctcagta

SEQ ID NO: 1204 - DNA, 622 bp, Gossypium hirsutum
atttagaagatgatatccactattcatctctggctcaaccaaccaaagatagtttaagtttcgttgatttaaccactacaccagcttcttcagaattcagtgataaagaatcagagccgaaatatttgagtaatccaatggaaagtagggaagacatggtgtcttcacatacccatcaccaattagaaaaacaaagttcttcagaaccgtcattagacatccatacttatcaacatgatgtggaaaggctgcacatagttgaagatagttcaaaacggatgcaatctttggatcacatagatcaggaacaatgcttgcaaacttcttttgaaccttccaaagaagtgtattcaagtgaacctttgtcagatttttcagaacaatcaggtaggcaggatgaacaagaaagtagtcaatatgatcttgttcatcctgcctttggcctgcaacctgaggcaactaaagctatcatggaggaaatgccaccattgccgcctcttcctccaatgcagtggaggatagggagagttcaacatgtttctacggttcctcaaagggaattggtagaacatggtcagcggtcattcccaatgatgccacaatctggaactggtgaggaaac

SEQ ID NO: 1205 - DNA, 664 bp, Gossypium hirsutum
gtcagttacgagtttgttgcttgccaagaggcgaaaaaaggggtcctcgttctcagtgaagtaattacttgctagttttaatgtttttgtaccctgctttttggggttgaatgaaagtagtttccaccgaacttgattttcttgctacatagactccttatatggtaatgaacattcttgcttttgaagtaacagttataatgctttcaatatccttgatgtatcttgcagtttgctggtgctgcacaatctctgggtgctggtgcggtcttagtgaatccttggaacatcactgaagtggctgcttcgatcggccaagctttgaacatgccggccgaagaaagggaaaaacgacactgccataactttcatcatgtgacagagcatacagctcaagaatgggctgaaacatttgtaaggtatgcatacaattcgaaatatatctttcagttttctttttcttgtattagagttccgaaactctctacaatatgtccgtttgcctttgtaaccaatgttcggttaggttggaatctttatcatggtaagtatttgacttgctcattttggcaaatttatttagtattatcccatattagttgatgaagtttggaattgccaaattcagcctccgcgtctcggacatttgcttgtagcttaaaaa

SEQ ID NO: 1206 - DNA, 462 bp, Gossypium hirsutum
tattaatattagcaccagaccccagtttgagcaaacataggtcatcataagctaggcctgagaatctttggcagacttcaaaggatgaagtctcaaatagtgctagtagttttgagtgtttcgttgtgcatgctttgaggttgaataaggaatttattttttttgtagttggaactagatagtgatctattcgtgataattcttttctgttagttctataaatggatgaagcacgaaagatctctacattgttacttttttgttcctagatatctaaatgcatttatttttatatatatattttttctgtgcttgtaggattgctatcttgtttatattttgactgagatgtctggatgtacatctatggttttcactcgaacttgtgatgcaactcgccttttggcttttattcttcggaatcttaatataagggccattcctattagcgggcaaatgagg

SEQ ID NO: 1207 - DNA, 523 bp, Gossypium hirsutum
tgtcagcactcaatggtaaaatcacacaactagagcgtaaccgggggactttaacttgccataaatgcttaatataggctataagtagtcatcgagctgctatgactatccaagctactcttcacatttatattgagttctgatggatttatgcagttgctatccatgcctgtcttcaatacaggctgaatatgtactctccccttttttaattgtttcttctgatatgttgcataaactctaattaatttgtgaattttccattgtcttcattttcctgtcttccagagttcgaagatgatccagacctctatgtgctgagaccaataaaatacgtgggtattgaagtctggcaggtaagcatcaaacatttcctcatctgcttttggtggagggtgatttaagatagaactaatcttttcaggaacaaaggaaataatcccattgttctgaagttgattacttccaatcttgtttcctttttcgataatgtaaagtaaatgacaagttaaagaggcatacc

SEQ ID NO: 1208 - DNA, 621 bp, Gossypium hirsutum
tgtatgatggtatactcgatgctttcttgaaaatactgcaaagggagggccctgctgaactttatagaggtcttgctcctagtctcattggagttattccgtatgctgccactaattattttgcatatgatactctacggaaggtttaccgcaaaatttttaaagaggaaaaaattgggaacattgaaactcttttaatcggatcattagctggtgctatttcaagtagtgcaacgttcccgctcgaggtggcacgtaagcacatgcaggttggagctctgcatggaagacaggtctacaagaatgtgatacatgcactttcaagcattcttgaacaagaagggattcaaggtctatataaaggtttgggtcctagttgcatgaagttagtacctgctgctgggatatctttcatgtgctatgaagcatgcaagaggatactggttgacaaagaagaagatgaagcatagagtctctggttaaaaggaaaaaagaactcatctttttgggattgaagaatgagatggcatacattttaggttcatctttttattttttatttttaaacaattttctcctgttaaattatttatttttttgttgagggatcagtttcagcta

SEQ ID NO: 1209 - DNA, 394 bp, Gossypium hirsutum
  misc_feature (10)..(10): n is a, c, g, or t
cggaaaaaanaaaatagacgtagaactaaagaaaaaagcaagaatttatagaaaaatgaataaagcgtgccacaaaagaaaagaggattttttggtaaataatacataaaaaaaagttactataatagttgatatgtaccaaaataataaaaatgaataatgcaacatttttctgacactagatcgccataccaaaaggcgatttagccttcttttcccaataatgccggtcaaaaagtgagccaggaaagagtagccgatttagcccccaaggcaacagagattctctgtccctcacagggccaaaatgacccctccctagcactaattagactggccagtgcgttcctcactcggcttccagtccctccctacaccattctctttttttttt

SEQ ID NO: 1210 - DNA, 550 bp, Gossypium hirsutum
gcacaagatgctctgatatgatacctttttgacaagtattattggtagttgagattatgcttgcactagtactattaatcttccgacacttagatcattagttgctgcatctgtacaagttcaatatcgaataatttgaattacttaccgtttggagttgatcaaagtacgtaatattgagttttgtgttctgctaattgtaatgatagttataaccagagtttgtttagctttaaatctttgaaatttttactaatatgacttgttgcaccgagttcttcgcgatgctaaatatctttaatcacattgaaagcttaacatcatacgtatactataatagtttcaatgcatttccttcttacatctttgttttaggaacaagtagtgtctcaatacaacagcatcatgttaaagatttatgtctatctatgtctgttttcctggcctaacatacctaaatgagtgatctgtcttgttacagaagttgagccgtatcaaatccgagaagagcaaccaaccgactatttatttatcattccatttgcagtgc

SEQ ID NO: 1211 - DNA, 616 bp, Gossypium hirsutum
attcaagggcagaatatttctggtcccatggattgatatcggactcgacctacaaaatgttcacttctgtctgcaactattctcgatatgtcagcgagtactatagagactcggtttcaccgtcttgttcgaaagtgatgagtcaagtaagcagagaaaccagtaaatttgtggacaaatatgatgttacacttgatgtctgcatatcatcagtgctctcacaatcaatggctataaatcctcaggtaaactcttccctgcaaaaccatgcatggcctcgacttatttcaactgagatattttgttttaccatacagcaagtatctgaaagggtagacgtatgtgtcgaagacaagatcgtgaattatctaaaccaaaaggatgtccaaaaagctcttcatgctcggcttgttggagtccgccgatggaccgtgtgcagcaagtaataatccttgaccaagctaaaattacattgtaataatcctggatttttctggttatgatcttaagcttcttctatcatttttgttgacagcatactggattatcagctgctgaacctcgagatgcctacaatctccattgttggttcactaatcaaatccgggataccagt

SEQ ID NO: 1212 - DNA, 408 bp, Gossypium hirsutum
gtagctttggaggcatgtttcggagcatgagcaacgaaggcttgtcttatttgcaacagaggatcaagaaggtatccattaactaaacaaatcataaatttaaacttctagtgttgatataaatgatttacaggtgattgagactcaagcaatggtacatcgatgtactgcaaccatagacttctttgaggaaacaatgagaccttaccctgctactgtcaacgatgaatcaatgtatgaacatgcgaaaaaggttggagaatatgtggttgggaaatctaatgtactaatgatgccgatgaccatgggagcagaagatttcagcttctattcgaacaaaatggcggctgccttcttcgtgattgggacaagaaacgaaacacaaaaaccaaactacggattgcactc

SEQ ID NO: 1213 - DNA, 637 bp, Gossypium hirsutum
tgctctctttctttctttctgttcattctctactttaccccaaaaaaaaagactgattctaattagcaaggccttcatttttctgtttatcttatcaatctgtagacccttctgtactatgattggatcagaaaggaagttatgaactatgatcgataacctagcagctacttaaccaacctaatggaattccagagtcaaagtggattaacccaaatctctctcgaagaggttccacatatctaagactcaagatccctccaaacgtggtcgtactagttgatgccactaaggcatggtgccaaagtatttcaactcatatcaatcagcaaaaagccacacaaagcaaacaaaccatacacagcattttactgcactcatgactcatggtatcattaaatactctgaattcaccaaattttgaagatgtcataatttagaatcaatttatgccccttgccccaaacaaaaaataataataaattaaggcacattactactttacctgcataagatatatttcttcatcttctttaaccacaaaaatctcaaataatggaattccaggtgacgcgctgaccaactgtctgcaagcaatcagtagtaaataattatcaataatttacggtagaagaac

SEQ ID NO: 1214 - DNA, 617 bp, Gossypium hirsutum
aatcagcgtgaagtcagtctgtttccagagatcttagagaggctgaacctggcaagtattactcctgaagttcagttcgtcaagcgtcaattgttcaagctttacgctttggagcaaactcatcattgatatcgccatttggtaacgttttctaatcttatgaataaaatgaacattctcaaatgaagactgaatctctttttcatttgcaggaaacattcacgggtgaaatcattggtgcaatattcatgggtggagatcatcacaatctgaaacctaccattggagaaatgccaatcaaagtgattgctgaaggtgttgaatccatggatggacagatttggataaacgacaagcaagggaaatcagcaaaaatattgaaaaatgtcgacactatggcttattgcaatctattggcagatcaattgggtaatcaaaaccggtccgctgtattaggaagctatgatgaacagagaacaatgtggtatagaccaaatcaaactgctttatggttaaatctgatatattggcagccgataaagagacagtcccaacagatttatagttgacattttgtgaaagacatcttcaaatggattcatattcagacagcatgg

SEQ ID NO: 1215 - DNA, 644 bp, Gossypium hirsutum
tgtggaatgaggatgcgatcggcattaatggtggcagtctatcagaagcagctgaagctttcgagtttaggaaggcagagacattcgactggggaaattgtgaattacatagcagtagatgcctatagaatgggggagtttccatggtggtttcattcgacttggagtcttgtgttgcagcttttcatgtctatgggagtgcttttctcagttgttggtttcggtgctatactcggtatagtccctcttgtcatatgtggattccttaatatgccatttgcgaagatcatacaaaaatgccaatctgaagtcatgatctcacaagatgagagattgagagccatttctgagatcttaaacagcatgaagatcatcaagttgcagtcctgggaggagaaattcaagagcttgatcgagtccttacgtggcaaggagttcaaatggctttctaaacaacagtttttgaggccttatggcactgtcttgtattggatctctccaaccattgtttcttcagttgtcttcttgggatgtgctctatttgggagtgccccattgaatgctggaaccgtttttacagttcttgcaactctaagaagcatgtcagaacctgttagaatgttacctgaggcactttcgattct

SEQ ID NO: 1216 - DNA, 668 bp, Gossypium hirsutum
cccagaaaatcatggataatgaaggaaatggagaacttggcggtgaagaagaagaagattcccctgacagtgatattactgattcaggtaaattcataatcaaaagaaaaacaaatatcatttcgatcgtaaaggttgattcttttatatatatattcattacgtgttctttgtctgtctgattgtcaagtttgatcgttaggtaaagcttttacctttcgtgcgcgcttgtgtaattttggagttgtcttgttggaaatcgtgacgtaatttcgggccgagttactgggatttttcttatcacagtcactgttctaaattttttttacgaaaatagcttgatttccttcaataaatgccatgccacacaatccgatccgatccgatccttctctatttcattacttgaattcttgaaatttccttcctttttttatcaaaagattacctttttttttggcatcttctctggctacgtgaaaggcagagaggcctcaggcgttgaatctcgaatctcatgtgtttggtaaagcgagaaagtgaaagcttatgttggtatacagcaaacgcattcaaccttatttttcctccattttccgaggaaccaaacaaaaactcatatttttccacggataaattattcaacgtttccaaagcctttcccaaat

SEQ ID NO: 1217 - DNA, 579 bp, Gossypium hirsutum
tttttgttttggggtggaattggtatgcatttttcctgttgagagttaagagccatgagatagttccaaagtatccaaatacgaataccaaagagattgttgttatataatctggcaggttcatgtcaaacacaatagatcaaaaggtatgttgaaattggaccccaacaaaagggtcaaacctttgagcaagccaggaccctactaaaggtttttgtttttgtttttttctttctttctttctttctttttggttggacttaaggccagattcaacttctgggaagaaaaagggccagatttaactagcaagaacttaaatccagttgacccgatggaacagtagcacaacaacagcttgcatgcaatgaaattcaccatttcaatcatgacattaaatacgaagaacgagacaccatcatttccccatttcaaatttccttgttttcagaaataatgagaaagaaactagcataatttaaagagaaaacaattaatacaagagataagtgctcaatgcaaagatataaccgtggtttacagtgaagaatcatacgaaaccattcaagctcaaggaca

SEQ ID NO: 1218 - DNA, 604 bp, Gossypium hirsutum
gtgaagttttggcacccttacaagctcccttcacttttttggtcgtggaccaaatccttcatcactgaagctatctgattcgggccatattccagtatcaaggacaccaacaatgacgttactctcggcggtagcattgcgtttaacagtttgattgagccccaagaaatcccatgatcttgtcgtttgaaggtgataaactttacttggaaaaaccgaaacaacttctttaaagcctacataacaaagaaatggtgaaatcatatcattaagaaaataccattgagttttagagaaaaaaaaagacagctcttcttctaccacttacttgcaagtttctttgcctcttcatcagttaacttagcagcaaatccattgaagctccttttataacttttgattaagtaattttccacagagctgctgagaattaaaaaaaaaaaaagggccaaaaccgggttatccttcaaaaaagggagggccccccctaataaaagggaaaccattcccaatatttgccaataaagggcccttttgaagggaaaaaagggtttaaaccttacggaatggttaaaaaaaaccattgccccctttttcgggaaaa

SEQ ID NO: 1219 - DNA, 594 bp, Gossypium hirsutum
gcatctaagatggttaaagcgatacatacaccccagtcgctcagcttcaaccatacgtagatcaaggggaatttcttggaattgagcagcaagctgtcggtctccaagagctaaattgacagaaacgtaggcctttatcgtgccctctccattcctaaatcctgtatccactgtcaaatgaacagggttcgggacttccctagaataaaaatcgtggatcaatgcactaccacctgtgactccaaggccagtagaatacctggaaaagttgcaaagaacaaagagctaagttggaagtacggcaaaaaatacacaaacttgcattcgattggtaatcaattaaaccatgacagtgggaagagacaacctttatacaaatagtcttacatttgtataacacctaaaggggactaaagagctttcaacaatttttttttacaaactcgcattcgattggtaatcaattaaaccatgacagtgggaagagacaacctttatacaaatagtcttacatttgtataacacctaaaggggactaaagagctttcaacaattttttttttctgttttatgagaaagaaaatataacttggt

SEQ ID NO: 1220 - DNA, 656 bp, Gossypium hirsutum
acttctggtttgacatcatgttgatgatgccccccaccaataccagcaaggatttgggagtttccttcatgtcacactgcatactccaaaccctattaacgggctagtttctaaaattattggaatcatcattttttttatgacagaattcatatgatgagaacatgatggaaatttgcagactagggtcttcaacaatgtcataacacgtcagttttgcttatttatcactagacaaaatctttaaaatctaaaacagcattgccaaaaacaagatgaaatgctgacatccactttttcgtttccacacacaggccaaagcttgcacagcctcatttacttccaccaccagcctttgccttgttcctagcttcttctcgcattactgccttgacataaatttcatagcaacaacctgaaacaaatgaacaaaacaccatcatcatacaacaagtttagtcatagatgctcatccatttaagcagaaacactatatttctttctgatcttatgcagggtccagtacagcgaactctagaaatcgtagcactttctaatccatcgaatctattaagattgattcaacatgcttcccttgttcgcgaattggttcataatttcacaatctcattgaatgggtaagagagggcataaga

SEQ ID NO: 1221 - DNA, 605 bp, Gossypium hirsutum
aagtataaaactctatcagggccgtaccatgggcttccagaggcagcaggcttggtggcagttttcctcatggaaacacgcccattgccttggatttcaggagtagaaggagagaacttgacagcctttccggcaaaggatggggaagaaagagccatggttgctgctgccattgtacaattgagtgataagcaatgaaaggaacttcaactgagcggtggtgtggtagttgggatcatgggatggggttattaataattttgcaaggaaaaggggtccttatcttaggatatccatatctcaattcccattggtttgcaacatttaggaagttcgattttgcaaagtctacttggcacctttagccccacttatcagacgtaggataattggggtgaacaatctctaccaattctaattgcttcttgttgctccaatgatattaggccacttgtgataccggatagccccatatccatttggaacaaacatccaactcttatttgcacgacaagatggaattaatatcaattatatcatattgcttaacaaatgtaactttctgtatccattcaaggataagtttacattatttttgtaacttt

SEQ ID NO: 1222 - DNA, 622 bp, Gossypium hirsutum
agactaattgatttctcagttttcccacgctttctctctggtttcttcaagtctttattctgtagaggacaatcaagattgtggctaccgctagcgacaacccttcctccatgagctggagggtcaaaattcacaattaatttttgctttgaagaatctaattgcaattctcctgtattgggtgaggtgttattctcaggtggtgacttcacaggtggaggtattggaatacattctagtcttgtgacgaatctctcttctgaagaagctccaatgatttcaatagatccttcatcctcttccaattcagctccagaagcaaccataagactttggaaatgctgcttcattgttgtcaatatggaacccaataacgcctgttgttcattgcggtcggcaatagcagggggcaaaaagaattcgagaacataatcatcatctcttgtataagtactccgtaagcagattgcaaaacagctggttaatttaaacatacgagcatagtgtactaagggatactcaggtttggagaactggctgatgtctgaacaaaagcatgagttgagtgaaaaaaatgccctcccagcaaccccttgacccttctgtaggtgatgctcaagac

SEQ ID NO: 1223 - DNA, 605 bp, Gossypium hirsutum
cgtaatgaatgaagatacgaaatgagataacccagtatatattgttgtccttaggcctcaatcccccaacaaaatcttctgttttcttgcacaacaacgactagatgaggtgcaagaaacacctttccgacctgagtagcagcgtcggcgtttgcgccacgtgtctccgggagcttcttctggttctcgtcgccgcccaggctcaatcagcctcctccgctgccgcatctgaggatagtcgcccaccaccgctgattttcccttgctctgtttctccttacattagtcgacggaaatctgacgacaacagtgcaacgtctatccatcacaagagattctacactcttcctcaggtggacctcaccacaaccgccgccgagtttggtaccgccacatctttcaaaaagaaacacaggttctttcttttttcaagtttgttcagggcgcggtccgataaattcaatttggatcccagggttcaccatcgtcgagactcgtgcgatgagctgtctacgtcatcatcttccccgtcctggttctcggcaatctttaccgtcggtcgaaaaaatcagcaatcttcgaggacatcacatgtggaatattat

SEQ ID NO: 1224 - DNA, 684 bp, Gossypium hirsutum
ttctacgtcatatttgcaaataatattttatttttttaggcaagaactatcattcaaattagttccagggattatttacatattaaaatggacattacggctttaaaagaaataataaaagattaaattaagtgataattgccgtgtttagaataaaacacatgaatgatagttgacgtagatattgcttaaaaggaaaaaaagaaaataataaaaacataatttagcacattaaatatgtattacagtttaaaaataataaagtagattatatattatttttatagtattatatattatgattttttaattcatataataataattttattaagaattttattaaattatatattattttattaaattatatttaataataattatgttaaaatatagttaaattatttattatttttattaaattatttttaataataatcttattaaaatttaataccaataacaatactcatctacctaaaaaaaattatgcaaatagtattctagtcattttgattttttttccttatgctattacaacatcatttcattcaactaaatacaagaataactattccatttcattcaactaaacaattgagttactgattacagctttattccattacaactctattcaattacagctctattccattacagtgaaccaaacgtactcat

SEQ ID NO: 1225 - DNA, 663 bp, Gossypium hirsutum
ctacgagtgattaattttaagagtaaaaacaattgagcatgtcagctctgataagagtggaatgatcgggattaataaattagaatcaaaatttgcattcaacctatggctcatgcaaacaccttcgagacgtggcatctgggattcaaatcccaacatcataaccattttagtatatctaatgttatataaaatggggtacagcaaaagatgagaaaacttactcgttattattggcagaccccattctctttatcgtttatggaattgccataatgaaatgatgaatccaagcatccggtagtctttgctttttcaacatatgctagaaactgttttcgggcatcaggcacatcaaaagccaagtcattaaatgattcttctacccttgagaaaccctttgtcatctggttcatggttttatatattttaatggtaaggtttcaaatctcaacatttataatttaaaataaagcattgattgtgtaataatattagtaattgagattttatatatgttaatggtatggtttcaaacctcaacatttataatttaaaatgaaaaaaggcaaaagaattcttgtaagaatataagttatttctctaactgacttaatgtacaattgacactaattcagtgaggtgaaacatttgttgtagtgg

SEQ ID NO: 1226 - DNA, 536 bp, Gossypium hirsutum
  misc_feature (504)..(504): n is a, c, g, or t
ttctatgtctgcatatgaatcttctcaccagtgaactaattgataatgagaaagttaaatgtatagatcaactagtaaagtggcccttgatttgttgcaatgttgtttctttgtttattgccacttagattgtctgtttatgtgtgtgaacactatgggtatgaaaacctcttgaaaatgtcatgcaacaattatacatttgatatgattcctattcttgtttggtcaaaaggctagcagtttatcttttatgttattccctctaacatagcaaatcatttgatggaaaaagatgaaattttcttttgctgtacttaaattgatacatcaacctggattttctggatgtttgtttctcttgcctgaataatcatatcagtactatcttctgagcaataagctttgttgtcatatttttggattttacttttgacaggtcaagccgtggattaagacaagtctagctccgggctctggggttgtaaccagatacttgcagaagangtgattttcataatatgtatacactccataca

SEQ ID NO: 1227 - DNA, 631 bp, Gossypium hirsutum
ttactctcttctgattcatacaatttgcatccattagccactaaacaaacaagtatggttagcacaaagatttttatcagaatggcaagaaagtggaagaaattgtctgtcattgggagaaggagaattacttcatcacttgttgataatgggcattttgttatttacacaattgatcaaaagcgatttgtgatacccttggcttatctaagaaacaccattttcatggagctcttgaagatgtctgaagaggagtttggattgccaagcgatgggccgataagatttccttgtgattcagttgccatgaattacattgtctcattactacgaaggagtttagctaaggatttggagaaagctgtgctgaactctgttgcaagctatcgttgttcatcaaatactagttacttcaatcgagcacatacagaccaacaatcacttgtttctggattctgagtaaattattctttgttattgtaaatgctttattatttatgctataagatcttgtaaatgatgaaaaccacagtttatgaaatgtgatagtcattttttaaggtttatcatcaatagttaccacactatatttccccatattgtcgggaaaatttgatgctctccaaggttc

SEQ ID NO: 1228 - DNA, 582 bp, Gossypium hirsutum
  misc_feature (314)..(314): n is a, c, g, or t
  misc_feature (337)..(337): n is a, c, g, or t
  misc_feature (372)..(372): n is a, c, g, or t
  misc_feature (389)..(389): n is a, c, g, or t
  misc_feature (531)..(531): n is a, c, g, or t
  misc_feature (573)..(575): n is a, c, g, or t
aaaaggtcaggatataatcatatgacaacacgataccgaaatatagcctttttagtctcttcgaaacaaatatcgtataacaaccatgcagcacaaacacaaagcaagacgattgcaacatgaaataaaggattaagagtaacacaatcatttcaataagaactcgtaaaccgtattacttgatacatgtatgtgctagacacatatgctttaagaaaaatgaataatccaagcaacatagcttataaagaagctcgaaagtagagtggagaaagcaatgttgctgaacttatgcatcaaacctaagctttttntgcaggacagcggaaccataacnctccctttttgagtaaaaactccattttcatggtntaattagctattggttngtatatgaaaaaaagaaaaaaaaaacttgaggtccatagttatagcatcaaactaagcttttctctagaacagcatcagccaaatactttcgtaaatgtaaagaagagactatggacaaaatcagacgatatttatccgaanaagctagtaactctaaactctttggatgtttccgataataannnaatgctc

SEQ ID NO: 1229 - DNA, 612 bp, Gossypium hirsutum
aatggcatctattttaatgacttcgcagccagccatataaggaccaagttacaaacaagacagagagagcagaaattaagacgagagagagggaaaaaaaagttaattcaggttagcccttttccattccttttactcttatgtccatttttcttggatgattaactaggtaaaatagtctgaaaaacaattaaggccagcaaagacctaattatgatcaatcagaaacattcaatatacaagtaacctatattccccattctgtattctaacaagccaatatgctatctggggcctgcttcattgagtctatccatggtccacaaaattgcaataaatatgatcatacatctctgtttatctttgacacaagtaaataactatgattaaatatctatatctatctttaaaaaaatacattttaggaaatcaaatgaacaacaacaaaaaaacagaatatagaaaagggattgatgatcaaatttaataaaagggtaatcaaaactggtacaccattttagcccagaagcctatacttaaaattgccaagatgtgaacaattaccttttagtttgttgggaaacaaggttattggcaaagacttctgggaag

SEQ ID NO: 1230 - DNA, 611 bp, Gossypium hirsutum
aactacggccacaaaactcatacatttgagatattgtttcagcatgcaaccttgaattagcaaatgcaaaaaggtgccgatgcatcttgtatcaaatgttagcagtctctaaacatgcggatgccagcaggattttagatttcttacaagaaagcatgtaggaaaagtttaagtctaacatcttacttgtttaggattacaaaaactccacaaaggatgaaagtaatagcaactagtaaccagccgctcactatgaatctgcaacaatttgttggtagtgtcagaaagagatgtgaacttgtagaataaccgaaagagaaaaattcccagactaagtgccatttaattttagaacaagtttcctattttccatttttgtttatattctaaatgtgatcaataagataaggaaaataactaatttgaaaattcagaaaacaagggattgtgaatgtagtaaaaagtttgatgtttagttatttcatcatgtaaaagtacagacggaaaatggaaaaacattagtaggccccgaaagaacttacatgtgaatgacatgttggtgccctagaatagacaacactgcaacaaaattatgaacaaaattttagatc

SEQ ID NO: 1231 - DNA, 652 bp, Gossypium hirsutum
ctttattatactatttagaagttaaaaatctcttgctacttccaagttttgttcttgttgttaatgttgatggattcatgtaaaacacatctgtctagtatctgatgtgattatgtgttctcaggtgtatgcagtggatgcaagtgatattgcgttgcaggtacttcagaagttcttaactgcttcttaccaattcatttttatattttgtcttgacagtgcagattgagcactttgtcttcttttcatctccattattattttctctctgttttatttacgacaatgagataatgagatctggttaacagagcgattagattatgaaggctatttatctatcaacattatggaaatatattgttctaaacttctctcctccttcctttaactggcttctagtattggaaataaaactggctgttgggtatgtgttaatctttgctatctgcaagcaggcaaatgaagttgtgaaagcaaataacttagctgaaaagatcatcgttttgcatggacgagttgaggtaggcttttccgctccggcttattgatgtgtatgctccttaaatggtttctatgttttaactggcttaatctgtttacatatttgggaaaacaacaagcacctatatatgttaacgcttggcaactt

SEQ ID NO: 1232 - DNA, 567 bp, Gossypium hirsutum
tgcactgagccccccggtcctccctccaatctcagtccgaacataagatccagagagtgagattatctcaaatcggccctaatattatatcatcaaggaaagaaattatatttttgacagtagcaaaataagtatattctatacaaacaagttgcaagtttcatccaagatatcctaaaggtgagaatattaacaaaggtgagcatatcaaggcacttatacaagccttttaggcatatgggcatggcaataacatcacaataagcatacgaataagcttctatttgtggttgaatatttatatctttctttagaccctttatttactttgtattgagtaacaaacattcctcatgttccctaatccttgcaaactgtaggtaataccaaatactctgtcagctcttcaaagcaatgtgggtttctctatcaaaacgttattcatattttcatgtgtactttctttttcctgtcaggatgcagtaataatttgaagatcacagaacatataaacaaggaaaattatagcaaaagaagaaaatgaagtggttacctcatacgctatgt

SEQ ID NO: 1233 - DNA, 590 bp, Gossypium hirsutum
  misc_feature (517)..(519): n is a, c, g, or t
atatataaaaccacttctaagagacgatgcgaggtccgaatcctagtatcttcttctgcaattaactgggaatgataagagaaatgaattgaaaacctactaggatcaaaaatggatattgctgatattagagggccgtaaatgcctctctcgggtatagaagttgtcccttttccggtccattggaaacgaatctctaaagtgccatcggttacatttgcattgaatggttctactgttggtatgcctgcccctcctgttttttctttaatattgaaatccttcagcatccgctctccctgcaattattatccgttccatttaaccttactttccgtgcaagcacatgttgtaaagcaacatttgtgtatatttatatcgaaaatccaacactcatccaaatcaggataacatgtaaaccaattaagctaaaccaaattctaacctatggaacttagtggtaacaagaatgatactaaaaatatacctgaatgtaaacatcaaatatgcgtctccnnnaagctgctataatttcgatcattagtgaactgaatctcagcgaaatggaggtttactaagtaagtgcatgc

SEQ ID NO: 1234 - DNA, 663 bp, Gossypium hirsutum
aaaaagccatggcaaagttatgtttccgcaaaatccatgacatgttcatagtacgcattaatgtggcccctacctttgctgtttacaaaagtaaaacaaaaatgtctttgtagaataatctcatgtcacactcacatccattttaccatgttagcgaaattaatatgaaaagttgagaaagtattacaacttttctggcacaattaaaacatcagtgaatcttattctttcagcagtttaatcattgatgagacccacaaagaagtagcaaataaacagcaagaaaagaagagaaaacacacactgagagttctccatgccaatgtaaaagctgtatggttatatatattgagaagttgattatatcataagaagagattacctgactcgacaatttcttttcccggataataaaaaataatgttgcaagtaacaagcatattccatgcccccagtcaccaaacatgacggcaaaaaggaaagggaaggtaacaatagtgtatacacctggatttgcttcctgatactttgccaccctgcaattaaatgtaaaaaggtaaaatggagaatttaccattttctgatcctagtccgtttggcagtcggataatttattaagctacccattagaattaggtaaaagtatcatggttgcccatgtac

SEQ ID NO: 1235 - DNA, 594 bp, Gossypium hirsutum
gatccctttctttctcagcgttctctcatatatgttttactaatatgactgaatgtcttcataaagatgattgccaatggtgaagcgctatattccagacagattgtgacagtttcaaacagcgaaggaagggtaattgcctatgataacccatgttagagtcactagattgtctttcacagtgaatctcatttatttatcatcctgggtcagataaagagtagcgacacatctacagctgaatcaggatctgaagtggaagaaattgtttctcctatgccaactaaaagctatttacatcctctattggctcctgtcagtgaagaggtatgtgcttgcaaattgtaatgaatgattattggcataaaaggatgtcattcattacattccagatgtttgaaacatcaccgaatacaaggatggtcttttcgtctgtgcaagagtgctttcactgaataaaataacacttagaatctcatgctataaattctcaaatcttgaactaactactatgatggttgtatatgctatgatgggtggtgaggcggctgctgctggtggtttgttgtattgtgatgattatgttctgatgat

SEQ ID NO: 1236 - DNA, 583 bp, Gossypium hirsutum
  misc_feature (14)..(14): n is a, c, g, or t
cctgcagtatcggnctttttctcccatacttgtggcaggagaagaatgtctttggcatgtacaaacttctgagaagagtatcaaagccagaatgataaacgacatgttggttatttcctcgtttctcatgttctttcctttcagaattattgtgaccattgactgcttggaactgtattatctatttttcccttttttcatgttattccaagcgcatgcttatccggaagggtaaaaagaacggaaaattttgaacactaacatgcattgttcccaatgtttggacaattttgtagtattttcttcatataggatatatgttctcttgtttacttggtttgttggtttacttaatggtttataaatcttaggtttctcttttcttttgggttagcaaggaaagtttggaaatcagcggatcaaacgttttaatgcaggtggttttcatacagaacattattatcattttacaaagctgcatatgttgcaacaagcatggatttcgaagctaatctaaacaattgaaatccataatttattcttgaactgccactctttcattacaacaacgaaaagaataagc

SEQ ID NO: 1237 - DNA, 640 bp, Gossypium hirsutum
tgtaaacttacgtaaagtaacaacaaaagcttataccttccgacaaccacggctagatcacctctgatggttccaggctctgatttttgaggatctgttgctccaatgagtttccggccgtatttgatcactccctctccttcccagacctgcatgtgaatgagattagcttagctcagcctgaagcaaatacgaagagatgataaggtttctagtttctttttaccatggcaagaacagggcccgagctgaggaattcacacaggccattgaaaaagggtctttccttcaagtcatcataatgtttctgggcaaactcctttgaaggaactaccaacttgatagccacaagcttgaaccctttgcgctcaaaacgagagatgatctccgaaatctggaatagacacaggctttagttagctatctgacatgtttcaatccaaaagaccaaaaactgtaaaacctgaaaaggagagaaaatcataatttgcagtatatattttccgtcaaccacaagcagaatgcaagaagtatggataataataaaataatacaaatttgttgatgttccttatttcaatatagaataagatgattggaagattccttaaattgacgagaaaggtcagatgaacctcac

SEQ ID NO: 1238 - DNA, 811 bp, Gossypium hirsutum
  misc_feature (643)..(643): n is a, c, g, or t
  misc_feature (741)..(741): n is a, c, g, or t
  misc_feature (775)..(775): n is a, c, g, or t
  misc_feature (801)..(801): n is a, c, g, or t
tcaagctcatatccatggtgaacaagttcatgcaatgtaaaaacttacgtaaagtaacaacaaaagcttataccttccgacaaccacggctagatcacctctgatggttccaggctctgatttttgaggatctgttgctccaatgagtttccggccgtatttgatcactccctctccttcccagacctgcatgtgaatgagattagcttagctcagcctgaagcaaatacgaagagatgataaggtttctagtttctttttaccatggcaagaacagggccagagctgaggaattcacacaggccattgaaaaagggtctttccttcaagtcatcataatgtttctgggcaaactcctttgaaggaactaccaacttgatagccacaagcttgaaccctttgcgctcaaaacgagagatgatctccgaaatctggaatagacacaggctttagttagctatctgacatgtttcaatccaaaagaccaaaaactgtaaaacctgaaaaggagagaaaatcataatttgcagtatatattttccgtcaaccacaagcagaatgcaagaagtatggataataataaaataatacaaatttgttgatgttccttatttcaatatagaataagatgattggaagattncttaaattgacgagaaaggtcagatgaacctcaccagccctctttgcactccatctggcttgatagcaatgaaggtgcgctccatctgaatgaagaanaatggttcatcacacacagagaagaaaaaagaangagagaaaaggagatgaatagcatanacaatgggaa

SEQ ID NO: 1239 - DNA, 609 bp, Gossypium hirsutum
ctggactctggaatctgaacaagaacgtgagttcagcagccgaaactctctcagttcctaggtaaagttgattgttcaggtccttttccacgcccttgattcaactgtcaaaaaataccattaaccaaatccattgtagtattatattggatagaaatgatggcaaaaatactaaatcatagcacttctccatcataattctgtttcaatttttcattcctagcaacacaccacatagagaaaaataatagggatacatgaatgtctcaaaatttatataatatgaattactagcgtatcaaaatttatataactataaaatactttaaacacaattataataccacaaaacacttgaacactacatgaatgcacaagtgtccataagaaccttatgtggaggcctccctgctgctcttattcttttagctcataaatgtgcttgttccttggaaacctctccaaattaagcatttgagtggttatatatgcttagtgtagaactgtcttactaacctaaaataaaagcttctattacgagggttttgagaaggcaatagttgcgtaaataaaatccacatatctaaggtctgtgcatgtagatttcca

SEQ ID NO: 1240 - DNA, 467 bp, Gossypium hirsutum
  misc_feature (439)..(440): n is a, c, g, or t
tgtcaacctttatataacatggactgttatctacacccatgaaacaaggttgtttaatcttcaagagaggttctaaattgttttccttctttcttcaagaaaccaaaacattttaaaaataaagtaacttgaatataaatcatggattaattttgtttttattctaggtttaagcaaaagccaccatggccatggttaggaataaccacttcaattggcatccttgtgattgcattacttgttgggcatatattccatgcaactgtaaatcgaattgccaaggtggaagatgactgccataagatgatggagcttaaaaagcaggctgaggcagctgatgttgccaaatctcaggtatatgacaaaaacaattcaacatctaaattgtacgctggccctgaaattatgaaatattttcgactgaattctaccaaagtgnnaacatatttggacaaaaacaattcttt

SEQ ID NO: 1241 - DNA, 1169 bp, Gossypium hirsutum
  misc_feature (641)..(645): n is a, c, g, or t
  misc_feature (647)..(814): n is a, c, g, or t
  misc_feature (816)..(924): n is a, c, g, or t
  misc_feature (926)..(947): n is a, c, g, or t
  misc_feature (949)..(951): n is a, c, g, or t
  misc_feature (953)..(960): n is a, c, g, or t
  misc_feature (962)..(964): n is a, c, g, or t
  misc_feature (969)..(1018): n is a, c, g, or t
  misc_feature (1020)..(1146): n is a, c, g, or t
  misc_feature (1148)..(1149): n is a, c, g, or t
  misc_feature (1154)..(1166): n is a, c, g, or t
atacaattgttagtagtttcaactatcatttgtagcaaaacttaaagaccaaaagaaggatctgactttctcagagctgtattatatttgaaggatgaactccttgcagcaacaaatttagtctcttagtgacaaaaatttgagagggatctttgcattattgtattccgtgtcattgttttaaaccctaatattttagtttgacagcgtgattggttgggccgtttaataacttccttgaatctgtgaattgtctttatgatttagagcaatatataaataccattgtaggcataatgatgaactttcaccctttaatggctcccaaatctcacagataattcttctgtctgctaggatctttgggtagaaataagagttgctagattgcattatggatgtgtgatgtgcctgctaggcaggggtttggcttttatcttgatcatcaatttataaacttgcacagaagttgctcagctaaaatttttatatgctttgacctatgttctgctttcttcctatgagtctgatataatgttgaagaaactcattactgatccttgctttagttttgtccatgaatcttgtattcaaatcttaaataggaaattattgctgaaccatgcatttgatctctaaannnnnannnnnnnnnnnnnnnnnnnnnnnnnnnnnnnnnnnnnnnnnnnnnnnnnnnnnnnnnnnnnnnnnnnnnnnnnnnnnnnnnnnnnnnnnnnnnnnnnnnnnnnnnnnnnnnnnnnnnnnnnnnnnnnnnnnnnnnnnnnnnnnnnnnnnnnnnnnnnnnnnnnnnnnncnnnnnnnnnnnnnnnnnnnnnnnnnnnnnnnnnnnnnnnnnnnnnnnnnnnnnnnnnnnnnnnnnnnnnnnnnnnnnnnnnnnnnnnnnnnnnnnnnnnnnnnnnnnnncnnnnnnnnnnnnnnnnnnnnnncnnncnnnnnnnncnnnccccnnnnnnnnnnnnnnnnnnnnnnnnnnnnnnnnnnnnnnnnnnnnnnnnnncnnnnnnnnnnnnnnnnnnnnnnnnnnnnnnnnnnnnnnnnnnnnnnnnnnnnnnnnnnnnnnnnnnnnnnnnnnnnnnnnnnnnnnnnnnnnnnnnnnnnnnnnnnnnnnnnnnnnnnnnnnnnnnncnnccccnnnnnnnnnnnnnccc

SEQ ID NO: 1242 - DNA, 611 bp, Gossypium hirsutum
attttatattgttttaagaaaatgaaaatcttgagaaaagagaaagggttggtcctcctgatgcttcatttgcttggcttgatggaacgtcagtataggtacggtaggcttgttgacacttctgcatctgtgttcgcatgtacaaaacgagattcttcattagtacgtttataatttccatgtattgactcttataagatctcatcactaaaagaattgtggcgttatattatgttatatggtggcctaatatcatgaacttaagcatcaagcagtataatagaaatttacctcttcaggactaaattgaagaagcattcctacaacaggtagtagagcttccatttcgcctattcaaataattagcaaaggttcaaaaaacaaattatttgcattgattttgatacttgacattttaatggaataaggcaggtgaaattaacacaacttctaaggctgactgtaactgtaactctgaaaggtggtacctgtttcaagaagctttatgattacatttttcagatacgtcatatcaacaccttctctccttttcgacctttccatgttgcgaagttcctccttcagcatagcttcctgtgtgatgcatgtaa

SEQ ID NO: 1243 - DNA, 650 bp, Gossypium hirsutum
tatgtttttgtaggaaacgataatgccttataattttacattaagcactctcaaatgtaggttttaggaggtggacctcctttatttacttcaatcacttttataaaatagccactctcagacaccagcttacttagtaattacaaatagtagagaatctatcaaacataggaaacaccatcggtgttcattcatactaaccggggatgataattggaaaaccacacacttgaaagcttcttctgcctttagagctccaacacgaggtctacagacacaaagcacttcacaggattaggatatatgttttgacaactcaaaatagtcacaccagcatacatgcacaatgtaacaaacaattgactgctcctgctttttggtattcgatttcatgtgccaacaatgtaatgacactttgacactaatgcttattgtaggatcagttatgcaagaaggatcacaaggcatcaaaattaattaagtgccacttggttttgttgcatggctataagcaacttcattgggatatcaattacggaaactagttattgaaaaaaataagcaaatattcttggaaagaaatcaagaaacaaaaaacaaagatgagtgatatttcatcaatgaattcttggcagtccatgacagggttt

SEQ ID NO: 1244 - DNA, 655 bp, Gossypium hirsutum
cgtgatccatatctgctgcctcaaggtctgaaggagttagctttctattaagaacccatttaaccagtgatctttgtcttttctcagtgtatagcgctgctagatagagaaagaactgacctaagcaaatcgtgctgctcagtatccacaaaatagcaaacatacgtccctcttgtgttgaaaaacttttatccccatacccaagggtggtcattgtggaacatacacagtaaaaagcatcaatgaattccattccttcaactagaattaagaagctgatcccagaaattataagcaccacaagtagcagtgacgtcatcaagaatttatatttgtctctgttggtttcaacatccataagtacctcagctgtattgaacttttcgttcttaagcatggatttaaccaagagaattccctgcttttccgcaatgtaatcagctgcattacttagaattaaaccaacaagagccacaccagtgaaggcataaatgcaggaaagtatcttagccaatgtgctgtggggtacaaggtccccgtatcccactgaggtcattgtcacaacacagaagtaaatagcatctatgaccccattggttttcttaccataaatctggttcttgataaggaaaaaccaagggtgcctatacctaga

SEQ ID NO: 1245 - DNA, 636 bp, Gossypium hirsutum
  misc_feature (53)..(54): n is a, c, g, or t
aacctttgttacgttcgattcagttaaaggttcgagagataagataaccaccnnggttcaaagaagtaaatcacaatttaggcaaaaatgtaatacaaagtacatacatcatgacaaaaaaggatcaaatattatactttgctcgtacgaaagtctatctcatcaaaaatgtcattttcaagctgcaagatattgtctcccagaaaagaaaccggcttctcaactttaaaacttgctactatatcatgatctggacaataaaataaccaaatgttaaatcacttccataattataaattcaatattggtcaaccccacagcaaataccaaattgccaatcctacggaccagcttcgatcagaaaaccatatataaataactacaacaattattatatgaatgcagagattaataaccaagttgatacatcaaaaataattctcaaaccaataccgattacaggtacttatatgcaatatacgtgacataacatccaatagtaattgatctatgaaatgttgaacaattcagtcagaaaaccgtataaacaacaacaatggttatatgaatgcagagatcaataaccaagttgatacatcaaatataattctgaaaccaacaccgacaacacatatt

SEQ ID NO: 1246 - DNA, 557 bp, Gossypium hirsutum
aaagcattgaatcatatttcgcttagcatttcaaggagtttgagtaataggagttgaatggtggcattgcttagagaaaattatgagtgccagaagtttgatatacttttttaagccgaattaaatgtgacattgcctagacccctaagtacacatgtaaacattttgtttaatttgagttttgtcaacagtaaaaaaggccattacatctctaagctccccctcccccctcccttaagaggaatatattatgtcctcattttccgaagctgcacaaggtctaaggtgaaagtatcatgataaccaagcattaacggtgtagcttttctttggtactgctgtctgactcacatttctctttgaaatccttgggttgaattttatcctgtaggttgattatgcatgcacacctgaagaagtgcagcagcattttcaatcttgtggcactgtaaacagagtaactattctgacggacaagtatggtcaaccgaaaggatttgcttatgtagagtttctggaagcagaagctgttcaagaggctcttgtgctgaatgaat

SEQ ID NO: 1247 - DNA, 340 bp, Gossypium hirsutum
ggattcggcaatttcatgttcttttcttcctcatcgtcacattcgatcaatggtcctcagttctccgccaaagacatgaccaccaccgctgccgccgccaacgacgacgacgacgatgattggggagatttcatcaactccagcaataatatctcttgcactgaatctcttcccgtcaatgactttcagtttgattcctctcccggctcaccccctctaactcaatccgactcggctccgagccgagtggaatcggtgaaagcccaatgggacaagctgactggagctttaccgttgtcgattttcggggaagaagaaaaagaggatgggggatctgacg

SEQ ID NO: 1248 - DNA, 668 bp, Gossypium hirsutum
ctttgtgttcgaattggctgccttcatctgttttttgggttgttctgtcactgtaagcttttcatgttcttctctcattcttcttctctgttctgctgccaattttggtttcttttctttatgatttggatttttttccgtcattcttctactatctaccgcagcacagccagatctcaccatatctattgttgccaaaaataaatcataacacaaatttaaaaacaaaaacagccagattgaacaccattttgccaacccagcttcaatcaccagtttgaatctttgtagactcactcacagaaacagattcaattaatcaaaatttaaacaaaaaagcaaccaaacaagccatgattgattcataacaaactaaaaaaaaatatatcaatcagtgaagcagaaatcataaataatgaattagctaattttgtaagaatataattaccattactgcaaaataagcaaggccaagatgaatttggagaacaaacttaagactactactgaatcaataacattcccacacttgtttatatagatgatcgttggaaagaaaaaatataaaaaaaaggtagcacgcgaccactgttacacataacatctaaaactgtagcaaatatatttatttattcttgggtgagagaaagagcttaaagcctgaggac

SEQ ID NO: 1249 - DNA, 620 bp, Gossypium hirsutum
aactgttgctctgggaaggatcaaatctttttagtttgtagtctgtcaagtattggacatttttagtgtctattttgaatatgctatttctatgcaatttgtgcaatatctacaacaaaacactgagaatgagtcaaatgaatgtattttgcccctcaaagagaagcactgcattttacatcttcaattgtagtgcaaatttgtttcgaagttatatgagaagtatcatgctatagttggttaccattatagctccaaatccatctttttcttgcttctaaccttctagtttgtgccactatttattgtttattctggttgtctcaattaggaaggaggtattcttgattatctgatgggactgttgggtggtcaaatacacctattgtggaaatcatctcctgctctggcagcagtttcacttccattctggtactattaatctgtgtggctttggataatatgaattgtctttgttggaccagataattaggacaatttgtatgttacattgtgagcaataacacttattttatgcatgtctaaaattttggagattgcacaaatttacatcattttaaatataatgcctattgtatacacctactgaacattaatgg

SEQ ID NO: 1250 - DNA, 878 bp, Gossypium hirsutum
  misc_feature (161)..(161): n is a, c, g, or t
  misc_feature (845)..(846): n is a, c, g, or t
taactgcatttcttcataccattttttcatctggataaatgcacaaaaacatttcaaaaagatttgtttgattgatgctgaaaagaaagctcctgttagcctaattgttgtggttagctatagcataaaaactgttgctctgggaaggatcaaatcttttnagtttgtagtctgtcaagtattggacatttttagtgtctattttgaatatgctatttctatgcaatttgtgcaatatctacaacaaaacactgagaatgagtcaaatgaatgtattttgcccctcaaagagaagcactgcattttacatcttcaattgtagtgcaaatttgtttcgaagttatatgagaagtatcatgctatagttggttaccattatagctccaaatccatctttttcttgcttctaaccttctagtttgtgccactatttattgtttattctggttgtctcaattaggaaggaggtattcttgattatctgatgggactgttgggtggtcaaatacacctattgtggaaatcatctcctgctctggcagcagtttcacttccattctggtactattaatctgtgtggctttggataatatgaattgtctttgttggaccagataattaggacaatttgtatgttacattgtgagcaataacacttattttatgcatgtctaaaattttggagattgcacaaatttacatcattttaaatataatgcctattgtatacacctactgaacattaatggcagaaataatatagtaagtatgaacgcttgttggtattgagaatattgatgatcattgaatgtctcctcattactgaatgagtccatttccattgnngcattggatatttctgagagtgcttgtagttt

SEQ ID NO: 1251 - DNA, 580 bp, Gossypium hirsutum
ctgcattaatgctacaactgcgaaaatgcctacaaaaataacaaatatgtacaatccatcctttataccctacttggttggggtctccatttttaattacataagagatatccatctcttccaatttgaatatttgtattattttttaatttttaatttttatgtaaaaatatacttataagttgaatcataactataattaatacaatctaaataagtataacaataacatataatattaaatgattggaattaattaagcgatttcgaaataaagacaacataatttacttagattgagtaggttgatcacttgaattaaagtcacttctcccgactcaatttttttccctttaaatcattattcaacttttactttgtccctcccaaatgcaacaaataatcacaaaaacatttcttttctttgtaaaaacagaaataaataaataaaattacccaacaacaaaaatccaaatttaaaataaatgaaaaccttttggcaattatgaaaattctttcttttttttcaaaaaataaagaaaatcaagtattagccatagccaaacaaataaaatcacac

SEQ ID NO: 1252 - DNA, 653 bp, Gossypium hirsutum
ggttatgtgtgtagaatttgcggggtcattcagagaggattgagactataattgacatccagtataacaaggtaagtcaagcttatgctattgagcagtatgacttccctgcattatattacaaattaggttttaagtatctgtaatttggttctagccttaggctgtgtttgtttcgttgaaaacatcttctggaaaatgatttttggaaaatggattgattttctggaaaaattgatattttctagtgtttggatgattccgcgtaagattttgtctgttgtttgacaaattttcttgaaatcattttataaaggttgttcttagtaaaacaaacacgacaaaaatatatttgcaaaatattataatacaatttctttttgtcaatcaaaatttattttataataagataatattttgtaaaaattaatatcatatataaacttaataataaataatgcttaattacaacttaatttaaattacatatatgagagtgcatattgacacattaaagttagaagggataaatgaagctaatcatgatttaaacaaatattcatatttatataattaaaatattcatattttatactagattaaaatatgtgataagtacctgtactctttgtaaatttagaatttagtcccgg

SEQ ID NO: 1253 - DNA, 641 bp, Gossypium hirsutum
gggatttgtcacacctgggagcattggcatagtgtactgtattagaccggacagtagtttattgttggacttgagctatcttccaaatccttggcattgtgaaccagaggaagttgagcctgtttctccgttcagggtatataagagacttcaaattttttttgttatcgatggtgttgatagagcttttctatctatttttattcttattttgtcttgaattgaaacttgttttggacataaagaagtaatctaatgtttgattttatagattggtgaccgggtgtgtgtgaagcggtctgttgcagaaccaagatatgcttggggtggtgagacccatcatagtgtaggaacaattagtgaaatagagactgatgggcttcttataattgagattcctaatcgacccatcccatggcaggctgatccctctgacatggaaaaacttgaggatttcaaggtatctgctgtttttcttaatgtagtcattgaactatacatgaaggggtttttcattgggccagatgcttgtgaaatttaatgaattttaattctgtatatttactgttgtgagcaggttggggattgggttagagtaaaagcctcagtaccctccccaaaatatggatgggaggacatta

SEQ ID NO: 1254 - DNA, 623 bp, Gossypium hirsutum
cttttttcgtgatccggtagatattctttatgggccttcacaattcaaattcttcctgtttgttgttgcttatcctcattgaaaatgtaaatcagcatgtaccaaaaaattgattaacttaatatttcaattcaattatagaaatggatcgataaagatattaggttaaaaaatggataattgcataaatttcttaagatgtggatgcttcgatgtatttctataattgtcttctttaaatatatatgtttttggggctttttttttgggtgtggggacaacatggtaattttctttagtagataatttataatttgtttatccatgtgctaaaattgtgttgatgcaaggttacttgattgtgcaggcgatacaggttgctgctgctaaactactggcgatattgttgcagatggcagagccacatccttttataaattcatgcttctgtcccgatgacaagcgggttggcaatttatttcgtgttttaaagttattaatttgctaatttgttatgtggcttctaaataaatatctttttcttctaatctattttgattaaccaccttttttagatggcagatttaaggctttctattaatagcattctacttgaacaccgg

SEQ ID NO: 1255 - DNA, 608 bp, Gossypium hirsutum
tttgaagttgaggtcacatttgcgggattgttatgaggttgaagttccaatctttcatcaggttccaaaggatggggaagagggtgttagagataaggatggatttattacgggatatgtgagaatttctcatcaagtttataatacattggaggattatgagaagttaagggatgctattaatcagttagtcgaggatgggaaaacttgcaaaatgctttttaaggaatgaagaggtaatttctttgacttaatttgctcaatgttggattgcttttatggcattttctgttaagaagtgttacttgtctgcttaaagctaatcatcgttgctctttacctttaatgagaacatatataatgttgaaacctaagaccgagttagtgtttcttgttattattaattgtgttcctgtagaaagtcttatgctcctgaatctattactaggaaaaaccaatatttcttcaatatctctatgcctgtggaagtattctgattctcatttaattgcaccatgatgaaattgcatgtgaaatatcgtaacctgcctattcctcttggatcttttctctgctttcttttttgtttatatcgcaatactaatgga

SEQ ID NO: 1256 - DNA, 611 bp, Gossypium hirsutum
  misc_feature (561)..(564): n is a, c, g, or t
  misc_feature (599)..(601): n is a, c, g, or t
tctctggtgtgctacaatctggtaatccccaagaggagctattattgtcgtagaaggaactattgctttgcagctcagtgctgttgctgctgctgttactgttgttgttagcggaggcacccgtttcccaatagcgggaaccattcacggtgaacgaggccattgaaggactatcagcgacggaaggcttgtaccccatagaagcagacagaaacgaagccgtcaatggtgggagaaaactggacatcgctgccgaagaaaattcggaattgatatcgaaagcttgggtagtttgggtgaaccagggagtagggttggaggtagatgagagcctggcattggacgcatagttcaattggtgaattggaagatgccccaccaaatcagaaggctgactgttggtcgagaatttatccagaaagaagcctttgctggctgtagtagtagatgccatcaaattggtggtggtgttgccattgttatcgctgctgttcactgtcttggaggtgggagaaccttccatttccagttggtaacctcgtggagtaactggtgatgttnnnnggtttaggattgttggtgttgatgttcaattcacnnnaagccatatc

SEQ ID NO: 1257 - DNA, 666 bp, Gossypium hirsutum
gagctttctgataagtttcccaatatagaaaaagattgggacttgcaattgttgcccattacttcttccaagacttcttccgatggggcttaccccaaatccagtgggtatttttactttgattacagtgcttcaatcatctttcatatggatatgtaaccatgtttttttgttattgttaaaaaaagaaaaagttggttctctcaatattgccacttgagttgtgattttagcgaaaatgatgaataattgaactatatatcgtgagtttttaaattataatttttttattttaaatgtttaaagtaaaaattttggatagttggatgactagatgtacagtttaccctttttaaagttaaaaggttaacatctccattagggcaggatagtaaaaaggacataaaaataggacaagataaatgtatccttaaaaaaataaaaaagacatttgtttccctttccccatgtttggtctgatttccacctcctttccttgctgtctttatattctgtgtctctctcctcctccttttagttatctgtgtgaggtaagaaagagaagaagacagtacaactaataaaaagttttcatatgggttggttcctttgtggtggaaattcaaaccaagatgaaaagaagaagctgcctatcacaataacacc

SEQ ID NO: 1258 - DNA, 611 bp, Gossypium hirsutum
attactacattgctcagaacaaaggtggttatcataattacaaaacctttcaacattttgtagacttaataatttcatcaaacctgtgatgctcatacacaaatcaatcagttttgagtgaatgcacctattctatatacacttggactttcaactatctttttaccattgcgaccagcgtctcatacttcctcaatcaattcatcttattaaccacattctattcttgtcccccattattctagtccttaaaaagacactacaaacaacttttacaaaatcctcaactacaactaacttttaagctccctcaccaatcatcgaacatatccttccaagttttaagatatttcagcctcacattgccaaccaattgaaccaaattgtttgatgctcatacaagtacacaatgtgaaaatgttaactaaaatgagtcaagttaagcgtaatatgtatacatgtgtgtttatgtatgtaattgtgtttgcaaataataagcttaaggcatctaataaagtctacagagtggtctattttatctacaaaacgatcaatttttttgttggctaatatgcataatttccttatggttgatgtccgttgttgactac

SEQ ID NO: 1259 - DNA, 646 bp, Gossypium hirsutum
ttatcagcatcttttacctgatgaggatgttcaatttactgacaacttatttgcaagagatgaacttttgcagggaaatggcctttcttgggtattagaacctcaattgaaggtgggaaaagatggtttaaaacaatcattacagtctccacaagagttggcttatcaaattgaagcagaactctttaaattatttggaggtgtgaataaaaagtataaagagaagggcaggtctcttttgtttaacttaaaggatcgtaataaccctgaactcagagaaagagttgtgtctggtaaaattaccccacacaggctttgttctatgagtgctgaggaactggcttctaaagagctttcagagtggcggcaagcaaaagcagaagagtttgctcaaatggtagttttgccagatgtagaagttgatattagacgtctagtaaggaaaactcataagggtgagtttcaagtggaggttgaacaaactgacagtgcttcagtagaagtatctgctggaacttcaactattcggcgaccaaaaactgaggcaaaagaaactcctagaaccattaaaactgtcggaaagaaagatgaatcagatactggaagtgaaaagagtaatctagaggacccaaatcttaccattacc

SEQ ID NO: 1260 - DNA, 597 bp, Gossypium hirsutum
tcttttcaattccgaatagtttgacccaacccaaattaatatttagaaaacagaaaaataaattaaatactcaatttggattacataccataattatttaacttctttatttttttacctttttaactatagaataaaaaaggcttaacacaattattagtaaaaatgtattcatttaattgattgaaaagattaatagagagaatcaagctaataataatgaatggatttaacataaaagtgttaccaaattagttatatcaaacaaattctacaaatgaaatcaattattttttcaaaaaaaaaagataattttactttgttttaaaatgataatgtaaaatatttcaaattacttaaatttaaggggagcaaacataatttttcctttttttacttaatagtatttagaatacttagaaattttgaaagggggaaaggtacctgcctgccccaggtaggagtgacagatgattatattctaacacaggtatggtctgattattaagtttttccatgtatttggagggccttgaaggtcatatccttatatctatgtgttggacacatgcgtagaacatggatacttcaagataa

SEQ ID NO: 1261 - DNA, 608 bp, Gossypium hirsutum
gtgatgaacgaaaggcggcagggagtggctggccatgtaagtcttttcccgtaaaaaattcaatttcaaagaaccaattaattctatttttttttcattttttaaaacctaaaaacatgagaagggaacctttctcccatccattgaatcacgtctcaaattctgacacattttaataccttcaggtagagtaacaaaatactacagaatgaaaatacatgtattaaaataaataaattaaaagtataattactatattaacaattttgttaaaatacaacagtaaaatttgacttttgaaattttaattttaacacaaataatcatcgttgatccattaattaaatttttagtgaatattacttagagataataagttaattttggaaaaaacataacttaatgaattaacaataatagtttagtgagtaatgaaattttaaaataaaaaaaataagtataaggactaaaactaataaaataaaagtacatcaactaaattcataattttgacaaagtatagggactaatattaaaatttaaccaaataaatatgtgatttctaggcattaaaagagtcaacaaaagccctaatcagttgcttattt

SEQ ID NO: 1262 - DNA, 638 bp, Gossypium hirsutum
attgttttcatactattatgttattactatggtaattgttttcttcttcaattttttattacattgtcaaaggttgtcgctcgcttcaatgagattgtgacaaggcagctcttggagggcgctctggacactttcagaaagtattcagttaatgaagaagacattgatgtgtgtaacaaccacaaaccacccttctacttaatttactaaagtaaaagccttctttaatatcatgctgtttcatatctctatctcgagttagacgtctgctttttctttgaatctatctacatgtctgagctttctcttctgctatggctgcaaattctaacaattatttagacaattgcagctcaaaagacaaggatataggagtagggtatctctgccattctcatttgatggcagtgctatcaaagtctttttcttctatgattcatgatttgctctgtatatcatcttacttattacaagccctttttcagcatatgaatcttttgaccaagtccttcaattaatatttagacaatgcttagccaactttttggatggcttgatcaattcttcactttcttatcaggttgtttgggtcccgggtagttttgaaataggtattgttgcagaaaggcaaaagggaa

SEQ ID NO: 1263 - DNA, 648 bp, Gossypium hirsutum
ctttaacacctggaaatccaatcgtttttcgtcattgccaaccattgatttcacttctttcaccatcattttctcggcgtttggatgcttagaaagcaaccaaaagagccaagtcaatgccgaggaagtggtgtctcttccagccatgatgaagctaatcatcatatctcttacaacttcctcgtcatgcccagccgacaacaacctcgacaaaagatcttctgtttcagctgatgtttcaacttcaagagccctctttttgtttcggatgatctccaaaacgcatccatggacgaattgaaccgcttgtttcagtttcttttctgacccaatgttaaaagctctcttcattttccatacaagaaacacgggtgccatccctcgcatggcgctgatctccgatgcgctatcgaaagctttcacgagaggtggcactggtctcgaaagatccaagcaacaagggtcttgaccgaatgatactttactgacagtatcgaatgcaaatcgtctcaatacatcttgaaaatcaataactttctcagtcaacattgcttcttcaagcaatggtaacagccgattctcaacttcttcgtgaagcgatttcaccacgaattctctcaatgatttggtgttaaactcatggctagc

SEQ ID NO: 1264 - DNA, 572 bp, Gossypium hirsutum
tgcttcctcattaatgaaggtacccttgaaaaatcacttttgcctagtttttctaaattcaatagttcctgttcgagcagctttagtttagaggaaactccagttgattcaccatctaccttccaaggtgattcccttctgatgagaaaacataagttgcgccttcatcagcctcagcatttcatatagacatatttcaagaaccaataacaagactgttatactgtaccttgcaacaaaatgcttcatatgatacaaagattcaagagattcacactgtatatcctgcaagcataaacagacggcaatgaacctttaacagtcacagacatagcaaattattcaggaagcaattaaaaaagggcaagcccaaaatatccaaatacaaagctgataaatcctcaccatctgtcatgctgaacataattttttttaaaaggtttaaacagatatgagaatacttaacaatctgatgaaagatggcaatattaaacaatttctcacaaatggcattcaatttcacattctcatctctcagctattcattctctcccaaaagccagtagaccaag

SEQ ID NO: 1265 - DNA, 463 bp, Gossypium hirsutum
gcagcctaattgcttacacacatttaccatggttgtttccttgccctattcttttttgtttttgctcaaggtttcgatttcaaattgcattccctattaacatggtattttcctgggaaggatttagtaccattagttacatacacaagtactattcttaattagtttttttgttttttttttttaacttttctggaaatgggacgccaacggggaccgtttttttttgttggtgaaattgattttgggaattttttatgtggttggcagggttacaaaatttgcctaaaaccggcctttggcttattatcttttccggggttttatctataatggggttaaaaacatcatattgggggttatatcaagaatggggcttaacataccaaaaaaaggacctatttatggacccaaactttaattttcccaaaaaaaaacccttaccttttaaaaaaaaaaaaaa

SEQ ID NO: 1266 - DNA, 395 bp, Gossypium hirsutum
cagtggtggtggaaaagtaaatattgccatcccctttcccttccttgacacttcttggactaacaaattactgaaagctgaatctccaatctgttgcagacgacaatagcaaacttaatcgaaaggttttacgatcctctcaagggaaagatcttgttaaatggggtttctttactggaaatatcacatcaatatcttcatagaaaggtggagtcctttttgctgatctttctcaatgtttgtttgccttccatacaaactccactcattttctcgtgtttatatttaaggtgttatattttcagacctttattgttggtcttgttttactaaatacaggttagcatagttagccaggaaccagttcttttcaattgttccatagaggagaacat

SEQ ID NO: 1267 - DNA, 657 bp, Gossypium hirsutum
  misc_feature (32)..(34): n is a, c, g, or t
  misc_feature (618)..(624): n is a, c, g, or t
  misc_feature (630)..(634): n is a, c, g, or t
  misc_feature (644)..(649): n is a, c, g, or t
ctcgaacaaagtttctcgaaaatatatttatnnnggagagtttactttaaattttttaatttgataaactattagtttcgtaactttaaggtaccctaagtttaataataataataaatctttcaacccttctgtctgctctatatagtaataatgcctaaaaacttacgttttcgtgtttatattcattcgataggaatttgacgcagcagagcttatatcatagaagcatcaagcatgtttagtctaaaatgtttcattcaatattatattgcttttatcgcgcttctgttttatctggatggtcttttccttttcaatcattaataccaagactgggtagtgatgaagtgacaaactggaatatcaatgaatgaatatttgattctagcggctacaaatgaaacaattccaatgagtatatttcaatcccacatccaaaaacaacaaaacaaaaactttcggaaaatatagttacaaaggctgaaaaacctgaaacccatcaatcatgaacactatggaaataatcctctacactaaatgcaaatagtttcagtcacatttctaacttgtatagaaaaaaacaaaaaaaaataaatggtaaatacgaatcaattnnnnnnncaagannnnnaaaagaaccnnnnnnaaaaaaaa

SEQ ID NO: 1268 - DNA, 661 bp, Gossypium hirsutum
tttgatactaaaactccttcaatttatttctcaggggaaggattgagagtaaaaacatactgaagaagcctgtgaaagaaaaactgccacgatgataaatggttgcaaacttcgcgacccagaactatatttatagacaaattatgctggcgttagatggttgacctttggcaggcccgctagacttaaaatttagaccaaagagtgaaacagcgtatatactaaaattaaatattttaaaaagaaatgttcatgttagattgtgtgtgtttagatttaataaaaggagtaaattttgagaattatatttcgaggtattcatgaataccatcaataggactcatatattttaggtaaagatataaattcaaatatgttagtgttgagttgctaggaacacggttatgtagtttcaatttctattgggctttacttttggattctgtaggttggtttttggtatgctattcacagtaaaattttgattgttggatcaatacattgaaacttattagatattcttaattatgatttcattaagggactcatccattaatccctctcaatcatggcacttcgattttttcacaaacttcagaaaacgtaaaacaaaacaaagtatcacaaaattaattgtgcttgctagaactgtccctcatga

SEQ ID NO: 1269 - DNA, 627 bp, Gossypium hirsutum
tgatgggttgcggcactgcctagggctttggtttctggctttgttaaaacagataaacacttccacaagataggtatgagctgttttggtaaacatatgttagtatagcatatgttttatgggacaatcattggacaaaacaggagtatttgggtaaattcatagacacaagcacataatttcttctccccaatggagcaattgggatgaagaaaacttatttttaagtgggtattttcttttaatttgttaagtttttggtagtaatttctttgggcttctcacgcacgtttagtaaatgatatgcatgttatgcttttctttccaggaaaaaagtcagggacaactgtaacctttgtgataatagaaggatggtttataacagttgcatctgttggtgattcccagtgtatatttgactcagctaatggtggaatatattacttgtcagctgatcataggcttgactgcaatgaagaggagtaggttaatgacagagtttttttgatttgcaagtttctctaaatactgaggccttactctctgttttcatcttattagaagggaacgaatcactgctagtgggggtgatattggtcgattaaatgctggttgtggtacagaggt

SEQ ID NO: 1270 - DNA, 668 bp, Gossypium hirsutum
caggtggagaaactttttttccatagactctcttcccacctgtccccacctcttcaagagttggaaaatgatttatttgttgtttccttgttcagaagaagagaagagagctggccacttctcacttcagtttgatcaaaatttagttgaaccaaatctttgtgagaattcagatattctgaggaataacaacacctctgctcatctccaaatggacgggcattcagaaagttgttcaaatattttggaatcatcatcattcagagattcacctaaaacaactatggaggatgaaaatggcataacgagtaattcagagagtcttgaagttgatgcaattgctttgaaccaaggaaagacttcgctaagcaatgattctgaacgtagagatgaaaaggtggtttctgttgctgatttactctgtgctgcatgcaataggttgctctttcgaccagttgttctcaattgtggccatggtagtttatatttctttccatttgtgtcaaaaggattagaggatattattgtttaccacatgcttttctctcttctttggtgcagtatattgtgaaacttgttttgttattccaaaggatgaaatgctcaggtgtcaagtttgtgaaagcttgcaaccaaatgggtttccgggtgtttgtttgattctacac

SEQ ID NO: 1271 - DNA, 619 bp, Gossypium hirsutum
gcatttttgttggctgtttgctgccatttcaacagatctcaagtttttcttgtaatttacagccaatgaggaggaaaggtaaaattacttatctaagagatgcaccattgttctgtatgtaattttaaaatctgagaattgatttgagttactaataaaaaatcgacatctattaaattgtccattgtggtttatatttagattttcccaccacatgccccagaaaaatctatttgttaagctctgattttatgttcttgtgtagcttatgtatatatgcatatagaattaacatagcaagactacacattagttatgagatgctcatgctgagcttaagaatgtcaagcagtgactgttctttttgtaaagaggcagttcttatttactaaaagaggcaacagtttctcagtatttggacctgttcttttggagcagatacacttactagtgttgtcctttattgttgagctgattttcagtacaattgttttcttttttttgtaggtacaattgagaggcatgattatgaagggcctatgttcgacatgaggatacatctgaggtcttgtgcttatcaatgtaagtccttgaactttgaagcaagggaggatgaatg

SEQ ID NO: 1272 - DNA, 642 bp, Gossypium hirsutum
tgcttgatatattgctgatctgacttccttctgcattttctttttcaaggccattcaagctttttgcttttatatttttccaatatgtatgcaagcttgaatatgtttgttcttgtcctaagtcctaacatgatttcagggtgaatcatgtctttttcttaaacaaatctttattatttctatgaaggtggctaactgaaagataagttgaatatgataattgcagttgctctactaaacctcctttctttacctgaacttcttgtcatttaagataacaggatagactttcttatttatgtaagatgcatgagttgttaattagaaattcctaattggttcagagctttgcccatttttgagtaatggatttgttgaattttatttatttcaatggtggtaagtggttgatatacttttctgtttgagattgcttatgtttcatgctgtgaacaaatcttttcaggttcctctgctgctgactgggctcaagatggagaatacgtaaactggatggatcagcatctttttgatgcagatgatgctcaagacggcaagagatggtcttcgcagccacaaccatatgctcgtgtttctgactcaaagcctttgtatagaacttcttcatatcctgaagcagca

SEQ ID NO: 1273 - DNA, 671 bp, Gossypium hirsutum
  misc_feature (662)..(663): n is a, c, g, or t
ctgtaagtttttttatttaccttcccaggtatgtatcaactatacattatttcactaatttaatcaaattaactactttcttttttaagtaaagttgatttttgtattgtacatgatatttttatgcaagttgctgaaaggaataaatctcacattataccactaataatgtcaatttatcaagattgtctctttcatttactaattactgttgtttgtgtagttttatagtctttctcagctgttttttttttcaatctgtgctatttttaagtgattttttgtatgtatatcacagtattttgaggtcatacttgatcttataggctaaccaatcttattaataccaaggatcctggccttgatttgattggctctttgtgatcatgctgtgcctctaaagtggaattgcattgctcagtcagctcagcagctaaaggggttccacattatgaattaataaatgcttgtttgacctggccactttcaatggtcgatattaaacttttaccctaatcttagtttcataggcagtagcatcttcatgcataatgaaactgatgaaccttaataatttgcagattcacagtaaaaaacatagacaaaacctttatgtttaagcatgtttaacgtgcgtggaaatcatcaaaatcattctttannacacactc

SEQ ID NO: 1274 - DNA, 614 bp, Gossypium hirsutum
gagaaagggaacataaatgaagagttctcgagcaccagagaatgcgtccatcatcttttccatagttacatatattgggcctagaggaaaaaagtaacagatgcactatgaaacgaattcgataagtaataaagtagttaaccatgagtagatataaattaccactacatgtatcaggttcaaaggccacggtttcagactgagagaactttgtttcactgaacttagcagttttactgaatgtttctgtgcgtggaaacttaaggactgatggtctatatccataaatattgaactccagtgtcaggtcatgtgatagatcaatatgatgaaagaaattgattatctgaaaagacaggtatatgcttttacattagttcagagcattatatcctaataagtaaactgatgcacaaaactacatttgtcacagtagaaatgaagcacagacctttgaaagcaatgcagtacgtgtaattccaccactttcaatcgtcaatgatattgcctcaggaagatagttattaatgactaaaggagtacttaaagtcatttgatgaatataacgatcttttgacttgcacaaatcttttatatttttgctgctactttgg

SEQ ID NO: 1275 - DNA, 366 bp, Gossypium hirsutum
gcatctcattttatttgcatcgaaattctctagccttgcatcagcagcctccaccacaataccaccaaggtatagctgccacaccacccttaccaatgcaccatttcgaggctttctcccacagcaaatttctaaggccacaatcccaaagctatacatgtctgtttctttgcgagctatttgttcttgcatatattccggtgctaagtatccaggtgttcccacaaccatcgttgtttgagtcctctctcctcggtccacgagtttcgaaactccgaaatcacagagcttagttgtgaaatccaggtctagcaacacattatctgatttgatatctctatggagaacacactgctcttcgccttc

SEQ ID NO: 1276 - DNA, 734 bp, Gossypium hirsutum
  misc_feature (538)..(555): n is a, c, g, or t
  misc_feature (558)..(563): n is a, c, g, or t
  misc_feature (566)..(567): n is a, c, g, or t
  misc_feature (573)..(584): n is a, c, g, or t
  misc_feature (587)..(590): n is a, c, g, or t
  misc_feature (598)..(599): n is a, c, g, or t
  misc_feature (602)..(612): n is a, c, g, or t
  misc_feature (614)..(636): n is a, c, g, or t
  misc_feature (639)..(672): n is a, c, g, or t
  misc_feature (675)..(681): n is a, c, g, or t
  misc_feature (683)..(687): n is a, c, g, or t
  misc_feature (690)..(695): n is a, c, g, or t
  misc_feature (697)..(701): n is a, c, g, or t
  misc_feature (706)..(706): n is a, c, g, or t
  misc_feature (713)..(713): n is a, c, g, or t
  misc_feature (716)..(718): n is a, c, g, or t
  misc_feature (720)..(720): n is a, c, g, or t
  misc_feature (722)..(727): n is a, c, g, or t
atagtaatcaattcttgttcgctgtggatttagagcatgtacgccacatttaccaaaagcttccctggcagggcggggcatttctgagaaccatcggttcaagtcaccaccaacaagcccaaaaactctctgcaatgctgggattatctgtttgttgatgtaatacaaatcatttaatctgtatggggagttaatagccaaaatttccaatggatcaaccaccatgtcaaccaggcgagccccaggctccccatggataacaacatagggtactcgctctgcatatcgtggttctgctctgggatctgctctcattgctttagctgccacaattgctgctggtggtagagaacttacttttgtactataggttcccaagcgaacttcttttgcaaaaacaaaatcctgaagcgaaaccctacccgacaaaatccttgtccattgacgatgcaaatatgctctaacctacacaaaacagcaaaatgtaaatttcattatctatgataaaagaattttccatctcttaaggcaaactatnnnnnnnnnnnnnnnnnnaannnnnngcnncaaaannnnnnnnnnnnaannnntcatagcnnttnnnnnnnnnnncnnnnnnnnnnnnnnnnnnnnnnnaannnnnnnnnnnnnnnnnnnnnnnnnnnnnnnnnnccnnnnnnnannnnntcnnnnnnannnnnctatnttttttnccnnncntnnnnnnattcact

SEQ ID NO: 1277 - DNA, 667 bp, Gossypium hirsutum
attgtcgaagttctccaattcatgggatttgcagaacagacccctctcttggacttgttcatgttgcttctgtttttacatcaatgctgaattttatttttatatatattttttggaaggccaaaacattactaacaaacacaccgaagagaagaatttagtaataaagaattttgcattaataaacaactccagtttaagagggcaaaatttactaacaatccaatcaattcaaaagctcattttagaaataaaacagagaatttagaacccaaaaataataataatattcacgagaaaactgcttcttttgtagtcattcagttttgttcctacaaacatcttcctgcatatccagcatttctaaacaacgtttgctttatgtcttcagaacttatcaatgttctctgttccgagtcctgcaatgatgaccaaaatgtctgtaagattattgcaagtcaaaagcagagacaatcaaaacaatttctgtctgacgttttggttacctctgagcaagaagcttgcattgcaaaatcattgaaacagctaataacacattgttgaatatcaaggcctaatgcttccaacgtcgttagtgtcgacaacaacaaacctggtttccccgtgcaacaaatctcaatcctcgtatcccatttctctttccaat

SEQ ID NO: 1278 - DNA, 652 bp, Gossypium hirsutum
aatagtgaagaatgaacatgctattaagtgaattgctcatggtaactctttaacttttgctaaatatggaggaattatctcaaagatttatggaacattcagccattaaatgtatacaaaattacaggtatgatgatatagcagctgtacaattgagttctaaatgcttttccctagaaatttgaagaaagaatacagacacaagggaacttacatttaaatctatgttgcacagtggagaattatgactttccatcagtagtgatttttcatgctgagatttgtccctgccaaatgtcaaaaaggaaaattaatcaacatgatagcatcattccccaagttctcctcccattgcatagcagcctatgagctttatcttaaggctcatgattcataagtaatgatgacattagataccaaaagttttcccgaaaaacagagacattactactaggaagcttttgagattaatgtcatgccttacatagaagaaatgtaccttctcttaacctttctaagcggcattgtcaaacttcataatatattcagtaaaagcacatggtccactcaattatattttcataactggtagattctgctgcaacttaaatattattgtgaaatgatttacctattaagttgttcgtgctgc

SEQ ID NO: 1279 - DNA, 570 bp, Gossypium hirsutum
  misc_feature (163)..(163): n is a, c, g, or t
  misc_feature (546)..(546): n is a, c, g, or t
  misc_feature (548)..(549): n is a, c, g, or t
  misc_feature (558)..(562): n is a, c, g, or t
aaagttgtacgagcaaacatagaaaaattataaagtccagaaggcacaaagcaatttgaaactcatgccacaatctgtaactcagctataagatgcaaccattatgaatttaacgtttccaagtaaaaaaagaaagactcatccaagatcctaaaatgacgcnttttctttatgagtcaatagaacattcttaaatgaactcaggaagtaactgttcaccggccttcgctcacaaccgtaaccctttagaggataacatctgcaatacatgtttcctcaacagacatgacaaaataaacaaacgctcatttcattatttcatataacattacttttacttattcaagagaaaaaatatttatatatatgtatcgtcaatagttggaaacaatatagcttcatctagtcaagcctctctctccacacaactcacgcaaaagaactgatgcacacaaagaaatcagtgcctatcaaaatcaaaagtggtcctattgtgttacaagtctgccaatttaactatctctcactcgagtgatgaaaatcttncnngtgcccggnnnnnaattatac

SEQ ID NO: 1280 - DNA, 599 bp, Gossypium hirsutum
  misc_feature (590)..(593): n is a, c, g, or t
tcccatgagcgatcccagttttttccacttttattcagcccagaaagttgcttctaactttcccactataatagatctgggaggcattttgcagcagcagaagatttgactttgcccatatatagttcagttcgatatgaatcttattttgcaagtctatattgagaggggacttactcttaaaactatcgagtattctgataatgccattgtttcgcaggctggttataggcacattgattgtgctcatgtttatgataatgaagaggaggtaaaatcctcctcccccttcttttctgaaattttctaaattgattaaggtgattgcttcttttatttatggttcatgctatgtagattgggcttgcattgaagggactgttttcctcagggcaggtgaagcgcagtgaactcttcatcacatctaaactctggtatctattttaatctcccttttagctttaaaggcatggtttgtatgataatgagaaagacattagctttgaaacccatattcaggtttaaaaatttgttattaagctctgactggttaaaaataatgttaatgatctggctgatacgtgacttgnnnncttttt

SEQ ID NO: 1281 - DNA, 608 bp, Gossypium hirsutum
ttagctcataaataatccccaagcccccaattattagtgaaatcctatatactagcatgtagtgaactacatatgaagcacaaagaaccacaaatgtttcactattaaaagatagaaggaagaattttgcagtttagctatccaaaagtacaaggatgtatattgtagcttaaccatccagcaagtattgtatggctaaattcatcaattctgctatcttggagaagcttaatactagatttcatccagaaggctattagttggtcattatgctagacatataaaacaaaagttttaaattaaataatgtaacaaacaaatgaaacaatatgctttcagaaaaatacgggatatagttcagaagtatctattgaaaactaagataatcaaaaacagaatcaagttgcagaaaggaagaaatgacatacaatgccaaagcgttgatgcacagcatgtgatgcccaattataatggtgtgaatcctgatcccagagtggttgcataggcggcatcctgggtgaaggaagggtgagtggaggagtctcagcatccccgtggccatcattctgatccccactttgctgttctacatcttgctcacgagatcc

SEQ ID NO: 1282 - DNA, 462 bp, Gossypium hirsutum
tccttgtttcgaccttcctttgattaaactacttgtgttcttgaagaactttacctggtggagtaccacagcacatgctcttaatattcaagtgctgaacctcgaggccgataaaccatgaaccgagggacacatcttcattagcatacttgtgcaatatatgcctgcaattcagtcagaatcaccctgaatgttattaaccatgcctgtctttttaaggtagaatattatcagtgccgaggatcaaaggtgcaaagtcactacatcaaaacaaaatgcaaattcaacagtctgagactgccatttagctctacgatataaaatataacagaatttatgcagggtaataaccgatcttcaatgttttgatgacatgctttaagtaaaaagaaactgctacatgatctaactggtaaaaaacaaaaagaaaaccaaggggaagaaagggatgaaggtgacact

SEQ ID NO: 1283 - DNA, 621 bp, Gossypium hirsutum
cttgaccgggtttgcacctaaaccaattgtgtaaaatagatggcggtcgacttttagtgggacttttaccgggaattgtggggtatttaggcttttaagtcttttgttatagcttatggccacattggtgttgtttggtgcaggcaatttgggcatggatggaataacagtcttcgggatgtctttgtaatgtagaattgctgtaacagttttgttatccacgggaaccggtgcatccttgaaaggcctggctgccatgaaatatcgacttggaggttgatctgctttgattagaacattggtagtttgacctggcgcgattaggatgaccctggttgtgaagggcttggtgtagacagcatcaatctctaccacagtcatgttatgacccgcgatcgtgaaaaacagttcatcattgagtgcagcgttgataatcagtaacaagtaagttttgcctgcctcaacctccatcgagaaggtatctaaaattgaaacaagtcacattgcattacattagcataattcttgaagatgatcatttcttaaaagttgttctttttggtctaaaccatgaagctaaaacttacgtttcaacgaacatggaaagagagaccctggttt

SEQ ID NO: 1284 - DNA, 621 bp, Gossypium hirsutum
agtcttgaaattaaatcatggtgtgagcgggcatttatttattatttttcgggggcgaggatggccaagaggttgtttcaaaaaatattctgtcaaatggccgattgcaacacctgagctcagaaggccctaggaagagagttgatagcttgaatatgatgatagaaagcaacttgagggataagaaaaatagctatgatatggacatagtgagagatattgagataacagaagctagtaatgaacaagaagcaaaagagagcattgttgaaaattctcctacaaccctaggcaaagaaaatggggcttctcagtccattaatgttgaaatggatagtcaaatttgggaacctccagagccagaatatccagtggatgacttggagggaaccgtggcttatgatgatgatgatgatgaatgtggagatggcacagaatggggaaaaccaagttccttgagtcatattatagatgatgacaatggaagatacaggtttaaagaggaaaaaaaaagagcaatggaagaggtaataaatgggaagttcaaagctatcatcagtcaatttcttaaatctgtgggcgttgcctgttctgttaatgacagcaatagttggggtggat

SEQ ID NO: 1285 - DNA, 618 bp, Gossypium hirsutum
  misc_feature (63)..(63): n is a, c, g, or t
ttattaacaaaaaagggtattacagatggaaaaatattgaccgaataccaaacgtaaactaantaataaaagacaatggtccaaagccaattaacaaaaatcatcttggccaagtccaaattttagtacaagggatgaccaacattgatatgtgacccatccccactcaacaatttgactaaaaagtactgaacaaactcaaacgaacctaacccacctagtgtcacatataagcacggagaaagcaagactaaaaaaatgaaaaataatcaaaacctgaagcatggtgaattgctttttgacaccttgaaactcaagttccagcacggtatcctacaatgaagtaaaagggtcagtcatagcaaaaagaaagttttgtcccacattaaagcatatagatgtcatgataaaagagttaaacagccaaaccttcaaagaatattgaccaggaggagcaatgtaagttatctttcccattgcatcaggaggcagggcaacatgatgttgcatcaaactgttttcaaagacggtctgcattgaagttaaagtattaattttcaaaaaggaaaaggaagggatccaagtaccatcctatttctccataggaactgggtgtac

SEQ ID NO: 1286 - DNA, 538 bp, Gossypium hirsutum
  misc_feature (47)..(48): n is a, c, g, or t
  misc_feature (57)..(59): n is a, c, g, or t
  misc_feature (326)..(328): n is a, c, g, or t
  misc_feature (347)..(347): n is a, c, g, or t
  misc_feature (349)..(351): n is a, c, g, or t
  misc_feature (358)..(360): n is a, c, g, or t
  misc_feature (363)..(364): n is a, c, g, or t
  misc_feature (367)..(371): n is a, c, g, or t
  misc_feature (384)..(385): n is a, c, g, or t
  misc_feature (387)..(396): n is a, c, g, or t
  misc_feature (409)..(411): n is a, c, g, or t
  misc_feature (425)..(428): n is a, c, g, or t
  misc_feature (430)..(430): n is a, c, g, or t
  misc_feature (432)..(441): n is a, c, g, or t
  misc_feature (443)..(443): n is a, c, g, or t
  misc_feature (445)..(445): n is a, c, g, or t
  misc_feature (447)..(448): n is a, c, g, or t
  misc_feature (454)..(457): n is a, c, g, or t
  misc_feature (459)..(463): n is a, c, g, or t
  misc_feature (472)..(476): n is a, c, g, or t
  misc_feature (479)..(480): n is a, c, g, or t
  misc_feature (482)..(488): n is a, c, g, or t
  misc_feature (497)..(499): n is a, c, g, or t
  misc_feature (504)..(509): n is a, c, g, or t
  misc_feature (511)..(512): n is a, c, g, or t
  misc_feature (522)..(530): n is a, c, g, or t
accactgaacccaggaatatatcagaatattgctaggataaatactnntcaagtttnnngggagataaacaagtaatgatttcagcaaaacctttttcaaatataatcctcttgagcactagaaagctttcacaactacatccaaattaggcaacaaggtacttcaagtagaatttccaataaactggagagattgcaacatgtatttaccatgttgaatctataatgtcttttacatgaattctcagtttgcactactgattcttttgagtcatgatatgtttttctaaaaaaaagctgttgtttaattgtttcaaatgactagnnngaaaagcatatccttttcncnnncttctgnnnttnncannnnnattatggaacatnncnnnnnnnnnntatatatctcacnnnatttaaatttggtnnnntnannnnnnnnnnancntnnaaactnnnngnnnnnaataatggnnnnnctnnannnnnnnaaatatccnnngtgannnnnntnnaaaccatatnnnnnnnnngaaaaaaa

SEQ ID NO: 1287 - DNA, 709 bp, Gossypium hirsutum
agtacaggccctttggcaaggtagatagaaaggtgctattcgcttttatatgatatctgatgaagtggtggttccacatacacaggttgaaaaggttggtttctcttataacactagttatttgttggcaccttgtggaatgtcacggtaaaggacttgtcttgcatgaaagaggaatggagcctaagagcaaagtttttttcccttcacaatctagttggagttttctatctcagtcctaccttcactgggggaaaaacgaattaaccatttagacttggttatttttctaagggttaaaatgattctaagtccagatataagttgtttctcaaagaaaatatccatatgatatctttgttacattgattatttaattaatagttgaaagttttcacatcaaccccataaatagacacttttaattatgtgaataaagtactagattattttttggtaaagaaagaatatccactggagattacactcttaactaatcttgcactagctcttcccattgcatcatcatcgagcagtgagcaaacttcagctggcggtgtcctgagagtatgcaatcctctagcatgttgagatgcccccaattaaggagcctcattcgagaaactgtctgagccactgcattagatatcatataaaagcgaatagcacctttctatctaccttgccaaagggcctgtacttgcctttt

SEQ ID NO: 1288 - DNA, 575 bp, Gossypium hirsutum
  misc_feature (537)..(537): n is a, c, g, or t
  misc_feature (567)..(571): n is a, c, g, or t
gcttggctcgatcctgatccgaaaccgtggtatataggatagaaaagaatacaccaatcctaaggatccatacataggattaattatggacccaggagaaaatttgagttgtgtttagtcttttatttttgtatttaagatcttgtatatctagataaaaatatatctatcaaaaatatagacaatagaatcggctcaatccttttagtaaaagattgggccgagtttaattgcaattcaacaaaccgacagtaattactggattacaaagtatccattgcttcgaattcaaatttgatttatgaagctggtttatctcatttttccactttatctaatttatccactgcgtcgaattcaaatttgatcgccttccatacttcacaagcagcagctagttcaggactccatttgctagcctcgcggataatttcattaccctcgcgggcaaggtcacgtccctcattacgagcttgtacacatgcttctaaagctactcgattagctacggcacccggtgcatttccccaagggttnctaaagtcctccaccgaatgtagtacggannnnnccaa

SEQ ID NO: 1289 - DNA, 620 bp, Gossypium hirsutum
actggggagtgagtcgctgaaccgctcttataattatctttctaaatgaattttccatggaatttagcacacataattccccttccattagtaaaagaagaaaggttcctgctgccatcagctctgttgattcctacttttattattttagtccactgaatatacatgtgtatacttcttcacatttttgtaattgactttgattttatatacttctcatagttgctcgaagactccttagaagaacgcttggagaaggccggaggtttgctttctgattctgaaaagacagaagaagagaacaaagagggggatgtagatgagactaaggtaagttctgctgtaaaagtgcctcttacaattcattattttcccttcagcatttcaccgtatgtattttgcttttgttagtttatacatgattttcaagtttactataggatcatgaagttactttttgattaatgcacaaatccaatctttgttctttgatttgtcttatctgtttcttgttcagaaaagatcaattgaaggtggaaagcaaggtgcttcaacaagagagtcaaaaaaggagaaagctcttaatgcaacaacaaaaaatgctcgtctagaggctagca

SEQ ID NO: 1290 - DNA, 614 bp, Gossypium hirsutum
taggatgatttctaaaaccctaggtctctcatactaagttgctattaaggccattttccctcgctcggcactgccttccccctcgtatcagcttcaccggccatggtatctctttcctctcccaaaccctcacttaaagccatttctttatttttctaatatttttttgaacctttttcttttcattgcaatttcagggtatcgacttggtcgccggtggcaagagcaagaagacgaagagaactgctcccaagtccgatgatatctacctcaaactcatcgtcaaggttcctgctctgttccagtcatttcattgtgctttttttttggtttaatgaaggaaatttgaatgtttttaaatgtgtttgcatccattaccagctttaccgatttctggtaagaaggactggcagcaaattcaatgctgtgattttgaagcgtctttttatgagcaaagtgaacaagcctcctctctctctatccagattgattgaattcatgaagggcaaggtaactcatttttcttttgaatttgtttctaaggtttttccaattttttatttaaattattgtgtgatgagtgattgatcttattattggttgatcgagtagag

SEQ ID NO: 1291 - DNA, 627 bp, Gossypium hirsutum
atgtcagttctttcatatgaacttgagcaaatgtaagattcaaggttgattacaatagaaaatgtaaggtcagggtgattataatcagagactgattcaaccattaaatctcagtgctttaagcaatttagggcgaattttagataaagtaaaaccacttacacataaatttcttactcttaacttcaatttgagaaaaagatatggatcaacttttctttcttttttctaacttgttaggtacatatctgtaatggaacaaatctaaaaagaaaagacagggacaactacatttgaacagtaactgaaactgcactcagtaattaaattttgaaacaagcaagcaagcaaatcacattttagctataggacattcatgatgtccatcacaacttcacttgtaatctcctctacaatagcgtttccaattactatccccacatccctcttctgggattcacaaccattcttccattcctgggttgaattaattatatccagctccaacaattgcttaatgttggatccatctccacatcgttttccccatcccttcatattctcacatctaaccttcctaatctcctcaccagattctttaaaacttttccctttctgttccttgtc

SEQ ID NO: 1292 - DNA, 633 bp, Gossypium hirsutum
tttgttgctccgttagagagattaaagctggaatatatagttcgtggtgaacaaaggaatatatttgagcttgttaagaagattgctttgacgcaaggattacttggattttggaaagggaacttaattaatgttcttcgcacggctccattcaaagctgtgaatttttatgcttacgatacgtataggaaacagttgcttagactgtctggaaatgaggagaccacaaattctgagaggttcattgctggtgctgctgccggcattaccgctaccgttctctgcttaccacttgatactgtatgtcgaaacctaagattttgttcctcctttcattgttctatcttcaatttgatcttactcttgtaggcatgttctgcgtatggctgtatgtacttctatattgtacatcaggggcaactgtcgtaaatagcaatgggcagtcgttaattctttgtgttattagaggctgaacaaagttataacagaccaattttaatgttatcctctagtcttaagtcttaggagaacggtttctggaccaaaagatcgagataatttcccattattgccattgcaatgtcgagtctaacataatattttttggcctacctaggtgaagatagtggatag

SEQ ID NO: 1293 - DNA, 596 bp, Gossypium hirsutum
  misc_feature (470)..(470): n is a, c, g, or t
  misc_feature (472)..(472): n is a, c, g, or t
  misc_feature (509)..(510): n is a, c, g, or t
  misc_feature (571)..(572): n is a, c, g, or t
  misc_feature (575)..(576): n is a, c, g, or t
  misc_feature (586)..(592): n is a, c, g, or t
tatgtaattgagaaaagttttattattaattaagttttaattatggagaaaagttttaattaagttttataattaatgacttatgattaatactaatatggagaaaaaaaggcgggaaccaggcaatggattaatgaccaatggcctgaccttcgttggaaaatggaaaggaatccaaaaccccctttgggaagaatccttggtggaacctaatttaaaaatgggttaaaaccccaccattaaaaaaaaaattccttggaaaaaaaaattggacccctggtttccggttgaaaaaagaaacctttgaacccatttaaatggccggaagaacttggaatggtcccggggggaaaaacccccccagaagggtaacccccaattacctcccctaaaggtttggtggcatccttggttaataaaaaaaccaaaaccaaggtaacccaaaccctccttttttttttcaaaactcntncccccacccctacaccaaatcttaaaaaaaaattttnncatgtccccggtgaaaacaaactcccccacccctcctccacgcctgatgacaaaatatgcnnctnncctcttttcnnnnnnnctaa

SEQ ID NO: 1294 - DNA, 603 bp, Gossypium hirsutum
tatacacaatggaaatgcatataagtaaataattattgatttgttgacacccttaatgtttatcctgcaacttcatagattcattaacattaattgcttcatttattcatatcttgattgtcaataataatatcagcacacggagcaacagccaggatcattatatactttaaacagtaaataaaattattttgcatctattcaaattaaattactcatagaatatcgtaggatggaactagactgtgtagaactgatcataaccatgcaggtcagaattcttaccttcaaactctctacctcagcagttaaggaattgaccttttcagtgtcctgaactataacaggagtctccttaatgattggaggagcttcctcaatagctttccgagctgcttcttgctctttcttgactctagcatttgcttcttccacttgtaattgcattgcttgcaaagattcctgtaacttggcaatttcttgtgccttctcctcttctaaatcagtctgatataaatttagaaagtaaaagttttactggttaaaacagatgatgactacgctttacaaagactgcaacaattgtaatttaggcataaatac

SEQ ID NO: 1295 - DNA, 566 bp, Gossypium hirsutum
  misc_feature (361)..(361): n is a, c, g, or t
ttcggaggataaggtggcggtgaggtgactatactccaaaactaccacttttctaataggcagagaacacaaagtatggtcccgactttattacatgtaatgctgattgtatttataatgcaaaatttagagtatgttttaagttggaatttgtgtgttattttctttaaatttatgcatgcatgccttgttaaggtttttcttacatacagtaaatgtggtggatgctttggaaagttctattttgataaaggaatctctcagcttttattgtaattacaaatgaaaaggaaaaaaataaaaaaaaatgattattctctatataaagatttaccctttgttttttttttaataagagaanttctttttctataagataaaaagagttaaccaagtaaatataaagagtgagaccatttttgtaggcttaatgcttaatatatactgcttttttcattttgctccttcaattcttaatgttacaaaacattcaacggttcaatcatttcatgttaaaaaaattccgcgtgacctccacattcaattattaaatgatatccgtcttt

SEQ ID NO: 1296 - DNA, 507 bp, Gossypium hirsutum
aagagcattctcaaacactaccgatgatgtatgcacagtactctagattttcatacttggtaggtggctgtgcttgtgatgcctggtttcatttgtctttatcctgatatgatttgtgtgaaatgaaaagggattttttttatcaggagtcaatgtcaataatgtcattcattttaaaaaaaaaatttgacattttatgtatagctgttcacttctttgtagctagatatttacttcataatattatactactactagagttctttatgtttcttgttgattttctagtatcaaataccattaatttcaacctaatgagcaatatgttattagctctttaaagaatattccccctgtttatcgttttgtttgattcccattagttccaagtatttattgtcattgctacttgactcattatctaatatctttcttattccctttggttttgtttgtaggtttctggaaatgcagagaaggctagggaaattcttattggagcacttg

SEQ ID NO: 1297 - DNA, 633 bp, Gossypium hirsutum
aactttgaactcactttgatcatcattgcttctctttgaagagccagagtttgtttccgattgtttcatattgttggtatattgatccgaacaactctgggactctccggatgagactggagtagtagtactggtagtagcaacagaattccataagctcttgcaatcagagaatatcattgagagcccatcatcttcaactgatgtatcagtgttgctattagtagctgagagcaagcattcaagggtctcaagagagcttgctgttgttgttgtagcaccagcggcagcgtttccatttggtaaaccattgatgacttgtgagtgaaccgccatgcttccaatattagaaactgaagcgtttgatgagctcaaaccataggctgagctattcaacaatggagaagagcaccattcttgtgttaagccacaagctgatgcaggaactggttgtggattaaccatttcagatactatatccgcatctggattcacaagggatggctgagcttcttggagttcttgaattgaattaacgaagatatcatctggcagattgatcttgtcaccataaacggaagaatttgagttggaaattaggaaactgtcttctacatcatttggctgactgtt

SEQ ID NO: 1298 - DNA, 515 bp, Gossypium hirsutum
cagtgtccgctttcttcttatcacaaaacatataacaagatcagaataagaaaaacgctgcttgcagttatatctcactacaaattatctgtcttctttgttttccattttttaatttaaattttcaatattcgaaagatggtgggttggatcctcatccctccaccggaagatgagtgatttgagttatgatcaaaccagtcaccctttaagtttaggaatggtagtagcaaactagtatatgaccttttctttttgatcgttacaatgttattgccgttgttaacttgttacagtatgagaaattgtcatgtctgaaacaatgatgatgatctggatctggatctggatctggatattttggctgctgttcttcacttcgatgatttttatgtctcagatcactatctttcctttgtgttctggctggctccatgtttagtgtttagatcaaatccttaatattaagactctcttttccagtcccaatcttatataatccccctggccagtgt

SEQ ID NO: 1299 - DNA, 615 bp, Gossypium hirsutum
tagatttgcagtcatggtgactgtagagggattgtcgcaccatactactggtatctgacaaactgacatgccaatttcatctaacagcagcttaacccatagcaactcagatacacaattagctaagatgcggtattcggcttcagatgaggacctggatactactgcttacttcttgaagcaccatgcaatcgggtttggttctaggtaaaccacatatcctgtggtagaacgtcgatcttcaacagaggcaacccagtcaacatcagagtagcacactaacttaaactgaccttttgagaggaacaaaccatgatccatagtccctataaggtacctcaatacacgcttaactgcctttcaatggatatcactaggcaagttcatatactgacttagtttgttcacgcaaaacgctaagtcaggacgtgtaatacacaaatactgaagcatgccaactgtactctgatacaagtgaccaccagcaaatgatggactaccatctgaagcaactagtttgggagtgctcaccatgggtgtaggcgtaggtgcagctattgccatgcctgttttatgaagtatttccgagacatatttcttctgattaaggaacag

SEQ ID NO: 1300 - DNA, 544 bp, Gossypium hirsutum
  misc_feature (463)..(467): n is a, c, g, or t
  misc_feature (478)..(480): n is a, c, g, or t
  misc_feature (482)..(483): n is a, c, g, or t
  misc_feature (504)..(504): n is a, c, g, or t
  misc_feature (506)..(509): n is a, c, g, or t
  misc_feature (521)..(523): n is a, c, g, or t
tttcacatcaactgaattcccaattgttttcatggacacatgtagtaacaaaaccgaattgagcaaaatcaagcagaagatcattgtgtgtcaagatccaggcaaggaagattcgctcaacgatcaatttaacaacattcaagccgctggtaacattgccgctgtcttcataacgaatagcagcagtgtcgatgtattcgcccaaagcccatttccagccattttcttggtacaaaaagatggtgacacagttgtggatttcattaaaagcaacactgacccaaaagccagcattgtgtttaaaaaaacaatccttggtattaagccatcaccaagggtgactagctatacgtctcgaggtccttcctatagttgtccattggttttaaagcctgatattatggcacctggtgactcagtcctcgctgcatggcctccaaatgttgcagcagctcttgtaaannnnnaccttgtgttnnncnnatttcaacttattgtcggganannnnatggcatgtccnnnatgtttcgggtatagcagcac

SEQ ID NO: 1301 - DNA, 654 bp, Gossypium hirsutum
ttgtacttggtgttgattattatcactgtttgctcattagtttttgaatatgttgtacaacagataagtttatgtgttattttatcatttgtaagttccttaaagtatacttttctgctataagtatccatatgaaaactctctatttagcaaacatttcagtcaaactttttatttttcatttgaaatggattcctatgtatttaaggtcatcatgcaactcctgttagaaatgggttaagttgaaaacttgtaccatttgtttgtccatcccatttaggtatggctgcaaagcaaaagcagcttgtccttattatttccattggtccatgcacatattcatttctgatcttttgtctgatttcttatacagcaaatataccaagttgttgtcacataaaaaagtcaaaatgaattttatttaaatgccatccatgaattaggctgcttatgttaaagatgaatttgagacactggatttggagttaatttgctatataaaatgcgagaatgaatttcttactgtatgcacaatttagtgaagattaaagtcctatatattttaaagttataaaaagatgcattgtaaattcgcaaatgcctataggcatttcaaattcttctataaatgggggtcaacaaatccatgaattg

SEQ ID NO: 1302 - DNA, 660 bp, Gossypium hirsutum
ttttcaattttaagagtgattaaatcatgtttaaatatacttgtggaagaattgatcatacacgtttttatttaagaaatgctgacttcatacacgtttttatttaagaaatgctgacttgaatgcttatgtgaaacttttttatcattttgacatgaataaataattttatttaatattttatttatagtatatatacaatgtagttagtactgcgagtcaactcgatcaaaaaaattaactaaggattgaatattagtataatgatgtttcctcttttatataatatatataaataaaacaattaaaaagtaataatatctaaagatagtttattcataaacactacccttttatctataatccagttgttgattaatttctttataaggttttctttctccccattgtaggtgtcgataatagaatcgattatgtttttcaaagcaattttttttaatcattagaaatttctgaagtttaaattcaatttaaaaaatagaagagtttgctatttaaaaacagacatataggtaggttaagttagtttttaacgaagattaaaaactgttttattttattttgattccaaatttagggtaatgcctatactacctcctttaaattttaccaattcacccgatcaacaccattaatttg

SEQ ID NO: 1303 - DNA, 612 bp, Gossypium hirsutum
  misc_feature (601)..(606): n is a, c, g, or t
catcatgaaaagggtgttacatctgaattttgtattaaactgatgcaatgcttgcccctaactttctaattctcttgtcgtgttttgtttcactatattataaatcttcaagatacttgatgctcttcatgaatgaagtaggttaacttccttctgaagttcagaaaactagcctttcaaagttgagaaatactattctgagtaatcagatgaaccgaaccagcttatatcttatgtttataaaatggtttgacctttggcatcctttaatcgttgtattattagacttatgggaattgaccagttgtttattggtttgtaaatatcttattgtgtgaaagaaagaatggttgggtttatatgtacaaaaatgacaacataaatgttgcatttatttctcatgcaatatgaggagttaagtccctgggtaattaaatccgcttttgttcacagaggtcgtatcattcttttgccccatcaccgacatgctaaatgggttctttggtgtatctcgtggatatctgtatgcagtgattcatatcatatctcttcgtggagattgccagatctgactcaaattatggggagatggtatcacagnnnnnngctcag

SEQ ID NO: 1304 - DNA, 486 bp, Gossypium hirsutum
ggaaaacagatggaacaatatcatattgcagccattattcaggttgcatatgacaaattgagttccgaatttccgatacacaagttctctttcatgctgtttaaaacacattacacttctggtaggagacaatcttgagaaaaaaaatgttggcaatggggtaaggtaagttaaatgagctgtaggggcagtgaatctggtgagatatcccatatacagagtgagaatataagttcttggaaacatcgagtcaggattgacattcaatgccattatttcctaatcgagaggagctcaaaacttctaagaggatgatcatcacggcttcctctaacaggggtggctcggctagatgtcttagattcaaaggcaagttgaattctttgtgtggtagacatgcggccaccacttgatgttagtcggttttgcgatgcgtcgttggcttcaacggatgaactaggcctgcttgctactacagctcttctt

SEQ ID NO: 1305 - DNA, 657 bp, Gossypium hirsutum
  misc_feature (617)..(618): n is a, c, g, or t
  misc_feature (622)..(622): n is a, c, g, or t
cactcacgcgaattcattatcaaattaaacccttaaccattaaattaacacctgtgagtactgttaaaagtagcagcatatcccaatctaaatcccattaccaaaactcgaaacccctaattattattgtaatttccaatcctttaatctaaatcaagcctgaaatagtaatcagccatagccctacatcagcacaaactactagtcaattttcatatcgaaacattagcaaaaaagataaacatgtccaccaaataggtttggcatgaatatgtacttacagaaagatctctaccaccactgtaaacatgaccaaatgttggggtgcttgcaagtgcccaaacagaatctgtatgcaccgcataagagtgcacgcaacgttgctgaccaagatcccatagcctacaaaatagaattagccatttaaaaggcaatgccttagattctatatggtcaaaaatggcatgtggctatataacagctaaaccaacaaattgtgtacctgatcatagaatcagaggacccagataaacaatatctgaaagaaaacaaaatatctgtcaaaaacatcactggttaaataaatagagcagaagagcatgcaaccaaataacagnntaantaaatagagcagaagagcatgcaaccaaataacag

SEQ ID NO: 1306 - DNA, 637 bp, Gossypium hirsutum
cttgtgtgttgacgattttcatcctctaatgccatatatatcatcgtttttatggttacctagttcagggggggggttgccaaaataggtttttactatgtttgaaggaggggaagggggtggggcaaggcccctgtctgcctagatgtatattgagtctcatgaaaaaaggttttacatgaacacttggcaatcagtgtgcttaatttttttgaaaagagctagggaacttgccatggaaaaatgttcttagcatcataatagctagaatcgggtgtggtttgctgttggccatttgtgtaatggtatcagatgctgctttctgtgaactttttatcaagcacatactgtatgcatttaaaccattagtgtgaccttttgatgtgagccttcgtaatgtgtaataattcagaagccctatttagaggttgaaccgtccaataattcatgtagttgaagatttcatcttggatagcttaggactaggagcattggcagagctaactgatgttcatgaggttttctttgtataggataccttttcgaggaatttgctatctcataaatttagcaaccacctgtcctctagaatgtacaaaaatagaaatgacttttcatgaaattataccagcatctg

SEQ ID NO: 1307 - DNA, 621 bp, Gossypium hirsutum
ctgagaggtcttgtgttacctgtcggtggtattaaggataaggtgtgttttatttcatgagctactgtgtatatatatagcaagagaataatatgttcatcatcgataataatatttgcttatgtttgatcaaaatcttttctcgtcatagaatatgcaataacaaaaagattgactgaaactgcttttatttctcattcttttcaacattttttccccgaatatcaattgtgcagatactagcagcacaccgtcatggtatcaagagagttattctaccagagagaaatctaaaggacttagttgaagtacctgcgtctgtgctttccaacctagaggtattttttcccacgtatttgaagcaaacattactctaatatctctgcacttctatattttcagtcagcatcttaacatgtagtttgaatttggttctgtttgcccataagttttggcaattactgggggattcaggcattctttttcgaactagaatctggatgacacctaagaatgatttgagtgcttgcattagtgataacatttttcccattgatcggattttttgtctcaaacatataaataaggcaactgagaaaacaattgaccatcttccctcac

SEQ ID NO: 1308 - DNA, 1198 bp, Gossypium hirsutum
  misc_feature (578)..(595): n is a, c, g, or t
  misc_feature (603)..(615): n is a, c, g, or t
  misc_feature (617)..(617): n is a, c, g, or t
  misc_feature (621)..(628): n is a, c, g, or t
  misc_feature (630)..(634): n is a, c, g, or t
  misc_feature (1188)..(1188): n is a, c, g, or t
gacccatagctaccttcaatgtggttgaggacttgatgtggtgggtatggaccacggtctctaagggtcctatatgcctcaatgatgaacattgcttcattggtgccccttgatagaccatattgccttaagaggctacatagattgttcaaattacccatgaatatgcaatgcatttcatccactccactaaacaacctgcaatttcagtcataaaacattaaacaaaagaaaaagggtttccttttttctttttaatgtattgttgaagtatttaggttaaactatagtttagtccctctattatactcaaatataagatttaatttttatactttaatttacgataatttgatccctctattattgttataatgtcattagtgaatcctagatcccctaataatttgatccctttcatattagatccctccataaaagttatactaaatttaatcaaaatcctttctaacgtaaaaatttaattttaaccccacctaaaaacttcttttaatacaaaatttctaactttgcacatgcaaaggttgaaccccaagggcgaacttaggggttgacannnnnnnnnnnnnnnnnnccccaaannnnnnnnnnnnngnttcnnnnnnnngnnnnncaaagtttgaaattttgtattaaaagaagtttttaggaggggttaaaattaaatttttacgttagaaagggttttgatgaaatttagtataacttttatggagggatctaatatgaaagtaatccattttagtaagggatcaaattattaggggatctaggattcactaatgacattataacaataatagagggatcaaattatcgtcaattaaagtataaaaattaaatcttatatttgagtataatagagggactaaactataatttaacctaaatacttcaacaatacattaaaaagaaaaaaggaaaccctttttcttttgtttaatgttttatgactgaaattgcaggttgtttagtggagtggatgaaatgcattgcatattcatgggtaatttgaacaatctatgtagcctcttaaggcaatatggtctatcaaggggcaccaatgaagcaatgttcatcattgaggcatataggacccttagggaccgtggtccatacccaccacatcaagtcctcagccacattgaaggtagctatgggttcgtnatctacaaaa

SEQ ID NO: 1309 - DNA, 616 bp, Gossypium hirsutum
tctcctttcatcatcatcatcataagtcatttcatgcccattatttcatttctctactgtatcatcctattacaacaaacgggaaaatagatgattataaaaacatgaatagtcatgtaaaagcgctcatcaatggatgatgcaacaaaggtaaaataaaaataaaacgctgctacactttgttgtagaattaaaagggaaataaaaaatcttttccgctcttatgtacaatggtttttctttatgggtatttgtaaggtttgtataacagtcattcagtaaactcaagacgaacaagatagcatacacacaccaggccggtaagcccatgctggtggcaagcgagcgtatttttccattcctggttgctcatcatacggcctctccattactttaagcagtcttcggacctctccaaaatcaccaatttcggctgcatcaatcgcaatctggcataggtagttcctcagcacatatttaggattcaccaagtccatggaggctttcctctcctcatccgagatgccactggcaacaagctgcataaagaaaaaagagattttgtgagattacagcagttgataccaacaaattagaagatgaggaacgcacacag

SEQ ID NO: 1310 - DNA, 653 bp, Gossypium hirsutum
gggtgcatgaaatctggtcctgtcctctctcaaaagtgagccagattatcaatgttttgtttttcttctgcaaaagacttttgagaaggtatatatatatatatatatcagttttcttaatcgttatgttatggaacaggggagtgagatgcaatgaacctgaatactggcaatttggtgagtcaggaaataaatatttccggcatgctaccagaaagttttatgccatttcaaaagatttggcctcatatatatcgataaatcagtaagatcttatatccttgtttaagatgaagcttgtatgtgaatctggaggcctgtcccttaagtgttttcattgtttgctgcactaatgatgattatacacatgcatgattatgtcaggcatgttctacactagtctgctaatgaggatgtttcactgggatcatggtttattggacttgatgtccagcatattgatgatcagagattatgttgtggcagaccacccggtaaacatcttaaatgctcccaaatctttagaattgcgattagtttgcacagaataagatttaaaatccaactctaaactatagtaccttcgctaagaatactgattcacatgtcgtagactagttggattctaaaacctggcgaaatatgctaaacac

SEQ ID NO: 1311 - DNA, 837 bp, Gossypium hirsutum
  misc_feature (575)..(576): n is a, c, g, or t
  misc_feature (612)..(626): n is a, c, g, or t
  misc_feature (628)..(638): n is a, c, g, or t
  misc_feature (643)..(644): n is a, c, g, or t
  misc_feature (646)..(648): n is a, c, g, or t
  misc_feature (653)..(653): n is a, c, g, or t
  misc_feature (655)..(674): n is a, c, g, or t
  misc_feature (679)..(682): n is a, c, g, or t
  misc_feature (684)..(689): n is a, c, g, or t
  misc_feature (691)..(691): n is a, c, g, or t
  misc_feature (697)..(700): n is a, c, g, or t
  misc_feature (712)..(716): n is a, c, g, or t
  misc_feature (718)..(721): n is a, c, g, or t
  misc_feature (728)..(730): n is a, c, g, or t
  misc_feature (732)..(734): n is a, c, g, or t
  misc_feature (736)..(747): n is a, c, g, or t
  misc_feature (749)..(753): n is a, c, g, or t
  misc_feature (756)..(758): n is a, c, g, or t
  misc_feature (760)..(765): n is a, c, g, or t
  misc_feature (768)..(773): n is a, c, g, or t
  misc_feature (778)..(798): n is a, c, g, or t
  misc_feature (805)..(805): n is a, c, g, or t
  misc_feature (807)..(807): n is a, c, g, or t
  misc_feature (810)..(825): n is a, c, g, or t
  misc_feature (827)..(834): n is a, c, g, or t
gacacttgtgatattatttgttgctgctcatgattttttttcaaaaccttcttctaatgaatggttctcaaaaaaaagtagtttgatgggtttgtgttcttttgtgtgaccctctgacagtctacctttgcattttgctaattattgatgtggggaggaaaatgcacttctgcattcattgaattttttggattgatccaatttattttggcatattttttcttacctgcgacgattttctgagattgcttgccaactgtaacttgtcttagggtttaattgcttcagttctttaaatctttaacattgtctatgttctgtgaacaaagcatgactctttttcttgctaacttccctttcacattgcaggaaagcgatgatagtgaggatgatagctctgatgaaagtgaggatgaacaaccagctgctaaaaaggtcaaattttcttgatcacccacatttttctagatcttttttattgttgttctagcatcaattcactaagttgtctaattctataagctgcagtccaaggttgctccggatagtggtaaagctgctaaagttaaaaaggnnagcagtagtgaagaggaggaatctgaaaaatcatcnnnnnnnnnnnnnnnannnnnnnnnnnaaaanntnnnaaatntnnnnnnnnnnnnnnnnnnnnctaannnngnnnnnnangcaacnnnncataataatccnnnnntnnnncaataannnannnannnnnnnnnnnnannnnnatnnntnnnnnnttnnnnnnaatannnnnnnnnnnnnnnnnnnnnaaaacgnantcnnnnnnnnnnnnnnnnannnnnnnnaaa

SEQ ID NO: 1312 - DNA, 646 bp, Gossypium hirsutum
tcacttcatttttgtgtgatgatgctttcatttattttgcatattggtacaagcatttcaatttgcctattttgtcaagaaactaggtttaaaaccaccgtttgataattagtgctcgagcttttgggttagtctataccttatgcatgaaactctgctgctggcttatggaatgatgtcaaagcaaaacagtaactgttcttttcttatgcattgttcaaattgtattctaaccaaagcctaaacttggaatttgaattccatgttctaaattcctatctatttttcctcatgttttacttgactgctgtatttgacaccccattttgattgacaggactcgaatttctgtctacatgattcatagaagctctggtaatttaataaacatagcaaagtacggtgaagaataccagaaggagaaggagaatcctattaatgtgctttttcatgggtatggtcactatgacatactggagtcattgccggaactaatttccagcaaataaagacatagaagtttggtcttgttatatgattatgattgcataaaaagaaataagcttatcttattttaaatggaggaattccattgaaccaagaaatagtctgaggttgataaattagtttgcacctacctcggctt

SEQ ID NO: 1313 - DNA, 531 bp, Gossypium hirsutum
tgctgagctcacaaactgaacatcacaaacagcacaaatcatttcaccttggaatgggatgaagccaacatttatgaaaatccatcttgctccctccctactgacgggtcttcacatttagttttgactaaattcattgtaagctaatctactttgttattattctcatgctcccatgtataatatttctttttctttcttagcttcatttcctaacataaacaatcttttttgagttttctatcttgggatataatgaacttaattctctaaacaagctaatatatgtttaagcttaagagtaaagaggtttatgcaaagatcaggaattatcacatgcataaaagattaaaaaaaaatgaaaaagcgcatatacacatgtataagattccaaggaaaatcacaaccactgaaataagtgagggatgagaccaaaaaccacaatctccaaagcaatggtaaccatgttaagtattgcaggaggacatcaaggttagcattcaatgacaacactgaccattcatcatttta

SEQ ID NO: 1314 - DNA, 622 bp, Gossypium hirsutum
atctgctttcattggacgagttaattatgttgattccgaaactagaagctgtaaaatttggttgtcagagtcttctatggtcgcttcttatctcgctcctggttcattagtatcggtaattcattatgactgtttctactttctagtatgtgataggaaatgttagtaacttttcaaggattgcattcttacccttgctgcaccaccgcttttctgctgctgaattatattctaatcccattgctaggtctcactttctgctttgaagaataaacattcaaatggatttcctttaagttctgtaacagatgaatatactctaccttttggtgttggttcggccaatgaaactacaaaagaagttggaaactactttgcacttgctacagtttttccatcttgtaaggttcgaatgaccatcttatggtagtctaactctctttatatactatcttctcctttttttggtatgaatttaaacaaaagttaaaaggaagcggatgcttccgctactgttatacctaatgtagatgcattacaattaaataaaagttggttacttctgaaaggatacgggtaactacttatgaagtttatgtggtagatatatttcagagggtcc

SEQ ID NO: 1315 - DNA, 601 bp, Gossypium hirsutum
gcagcggggaagggggatggttggaactattgttgtaggtagggtaggacttctttctgattcggtagcagtacttagaatgcagtactcgaaaactaagaagccaaatgacgggcagaatgagagcatcatcagggaagaagattcatggaataggtaagggggacataggtagatagtagaaaccaaatctttctttgctgcacgcaatacaatagattttggtactgtatgcgttttaacgacacttgatgactgcgcagtgtacagttattaagtccagtcttttggtagtgtatgtgtgcgttttaggtcatttgtaatgttccagcatccttgtataagttgtatttgatggaaaatacacacaaaataataataataataataataataataataataataataaaccataaaagttaaaaggaagtcatttgaatgggtttggatatttttttttttaccttccttcaatataatccatgcatagtcgattttcttattatcactctttcttaagaatggtctttcttattatcactacatccaccatggatttgatggttgtttctttttttttaattaattcaatttaatt

SEQ ID NO: 1316 - DNA, 624 bp, Gossypium hirsutum
actttctataattatgttattatggaatggtagttggtggtgttaattttgatcttggaatatttgatccatttgattttggcttttagaagctgataatggagacaaattacatgttctaaaatgccttttggcttctgtaatacatgttatgtttcatttttctactatcatgtttgaactcttttaatttcgctgtttttgcctgactagttttttattaatacgatgtggttccaggaccatattcgatgttgacattgacagttttgaggaaaagccatggaaatatcctggcgttgatctctctgacttcttcaactttggtctaaatgaggagagctggaaagattattgcaaacaactggtaatgattcactttaaatgattccttatttcattgttgcaggaactgaggtctaagaagttgtattttaaaattttttaggaacaacaccgcttggagaccaccatgcaaagcaaaattcgtgtttatgaaagtgggagaaccgagcaggtaattttgcgtttgtttatatctgaaaaatgtttccttttaacagtttaatatttggcttggtggtatggcttctgcagttctgcaactgctgttaaggacttgac

SEQ ID NO: 1317 - DNA, 614 bp, Gossypium hirsutum
  misc_feature (226)..(226): n is a, c, g, or t
  misc_feature (232)..(232): n is a, c, g, or t
  misc_feature (237)..(237): n is a, c, g, or t
  misc_feature (263)..(263): n is a, c, g, or t
  misc_feature (267)..(267): n is a, c, g, or t
  misc_feature (320)..(320): n is a, c, g, or t
  misc_feature (325)..(325): n is a, c, g, or t
  misc_feature (329)..(329): n is a, c, g, or t
  misc_feature (331)..(331): n is a, c, g, or t
  misc_feature (337)..(343): n is a, c, g, or t
  misc_feature (345)..(345): n is a, c, g, or t
  misc_feature (349)..(350): n is a, c, g, or t
  misc_feature (354)..(354): n is a, c, g, or t
  misc_feature (358)..(358): n is a, c, g, or t
  misc_feature (367)..(367): n is a, c, g, or t
  misc_feature (383)..(383): n is a, c, g, or t
  misc_feature (386)..(386): n is a, c, g, or t
  misc_feature (554)..(554): n is a, c, g, or t
  misc_feature (564)..(564): n is a, c, g, or t
ttaattttgttcatcatctcatggcccccaccaccaccatttttgcctccaccctttttagctccatggccattattgtttccaccaccaccattgcctccatttccattgtgggaacctttgtttttaccaccactaccatcccattcatttttacccttacttgaaaaatctttttcacctttatccttcttgaaaaatccaagcaaaccaccaccacctcctntttttncactntttttattttcttcttcatcgttgcntttntttcctctgttgttttcttcacctccttttttttttccttcatcatcatgctncccancatnanaatccnnnnnnntnttcnncatnatangaatatcanttcctcctcttttatnatnattatccccaccaccaccacctcctttcttaccattcatggcaagaccattaatcatgccatttggcccttttccccccatagctaccatcttgttttgcatttgatgattccctttcccatggccatgtccatgaccaaattcctcatcatcaaaatcatcatcatnatcatcatcnaactcatcatcaaattcatcatcgaactcatcatcaaaatcatcatcact

SEQ ID NO: 1318 - DNA, 660 bp, Gossypium hirsutum
ggggttaaattttattaaaaaaatttcatacaaatcaatacatgcaaaaccctaaacacattaaacactcgtaaaacctaaaggtaaaatatgtttaaagaagtgacaatgctgaaagatcaattagccttttttgaatctgttcattgatgatgttcatcaactgtggggctgctgcatattttcctctacagaatcaataaaaagcaggaactaagaaatgaaagaaatcctgaccctaattttcctttgagatgggaagaagatgaaagaaaaagagcgcaaaagtgggctgttttgccccatatttttttgtcaaaaagatcaatttaattctttagactcaaaaatcaatctagcttgaataatattgactgttagtgtcacttgcctaagttgaggcatgacaaccaactataaaaaacatagttgtagaatttggattgaacctgctaatcagactttgcaattggatggtaaacagatccggaggaagaaaattgaatgactcactaatcgaaataaaaattcgattgagttaatagttgaattaatttatttaaattttaaaaaaattataaattttttaatttaattaattaaaatcgaatcaatgatgtaattggctaaatcaagaatttggtgactgctcgattctaa

SEQ ID NO: 1319 - DNA, 613 bp, Gossypium hirsutum
aagctcagaatctgtgaaaacgggtgaaactatttgaaatcatacttacttgaatctttttgtgtggggaacctttctgttttcataatcgttcaaaaggctggggtgagaaggataagactgattcctcttcttcagtgccaaaaacagaaccctccataagatagttaaagggcttccctgaggccttttaaacctgtaccagggtgttccacaaagcaaaactgctagtgcaatcaccattgttgctgctgaaattccatatcccaaccctcttcctatattgtcttgtatatataccagtacaatcacgccaaataaagatccaatgctgatgccaaagtagaacctacttatgaagaaaatcatagcattctcctccttgggatccgtcacgtcgaactgatcagatccgaaactagagacattagactttattcctccacaaccaggtgctattgtgtatagtgccacatacagcaaagccagttgccggccgtttgcctcgatgcactcatgatgctgtcttctatagtcatcgcagggaggaggcctcatgcttggaattgttgttgcgactgttagtaaaatcactccctggtgcaagatgata

SEQ ID NO: 1320 - DNA, 582 bp, Gossypium hirsutum
gaacatggtaaaaatatatatacatacataaaagatttgtataaacttaaaaacaaatacaaattctgttatgttaccgattattctgtgacaagagtatatatttaatatctaaaatttgtttatgtatttcgagaattataccccatgtctcgtattaaaacatgttttgaacacagatatcaaacacaggtattttttaaaacgaattgaagagttccgagtaacataggtcgtagcacataaaaaaccaacctcttgtgctggttaggaggctccatttcagacttgttggcagctgggtcagcacttatagcagcatggattttcttgtaacaaggcctcgattttatactcattaaaataggctaaggcctattttctcaacaaattcatccaggaagtaagatagatcacttaaaattctcaagggctcaaatcatttattacaccaatagatattaaattgttaatttctatgctaatatacaacatacacatatatgaatatgaaaacaagcacaaagaaacccaaaaccaatctttaaacccattttttccacctgggttaaagtaatgtca

SEQ ID NO: 1321 - DNA, 679 bp, Gossypium hirsutum
tggcatttggagcagttaattctgtaagacatccaggagttattttctaatagttcttctctgacggttgtataaaaacttttgttaattcatgaaatgctgattgcaaatgttgtggagtctgatttattttcattacaggcattcgttgctctgaatagtaatttgaaggagcagaatgtgtccattttatcaaggtatttattggttttaatagcttttctctgttgttcttttatcaaaccaaattgcttagttatctccttgttttgcattttgggaacaggctactttctatcgtaaagggttttgatcctcctctgtttcctcttgacaagatgaaagaggtgtgttgttcatgacttactagtttataaactattagctttgtaagattgttgtgtttatggcaagcttaaacacagttgtctgtttttacagatagaggtgatgctgctatcgctgaattcccctgctagagcaattgactcggagaaagagattaagattgttaataagaaggatcctgatgctttagctgaaaatgttggtcatgatttgaccgtcacaaataagttgcctttatctgttgattccgaaattcataatatgccaaatatgttaacagaagctttgacgcctggagtacctaattttaggaacaaaggtctttcactac

SEQ ID NO: 1322 - DNA, 648 bp, Gossypium hirsutum
aattttgctcttattgcaacccttggtctggttctctttgcgctgctcattgggaatatgcaagtaagtcctttcccccaatacttttcatggaaacgcaagcatctagctttaattcgtaatgattgattaataacatatagacacatctcaaaacaatccttgagtgaaatgtttgacatgatcttggagttaccaaaaaagtttgacatcatggttgttagcaatttctaactctgataatgtttcactggcagacatacctccaatcgacaactgtcaggttggaagaatggagaattaggagaactgatacagagcaatggatgcgtcacaggcaacttcctcctgagctaaagcaatctgtaagaaaatatgatcagtataaatggctagctacaagaggagttgatgaagaagctttactcaaaggccttcccttggatctacgtagagacatcaaacgccacctctgtctcgaccttgttcggcgagtaagtttttaatatctgactacactagagattagacttcatgcaataactaagcttggtacgtaatgcaactatatttacggattcaacaggtcccactgtttgatcaaatggatgaaaggatgttagatgcaatctgtgagagacttaaacg

SEQ ID NO: 1323 - DNA, 618 bp, Gossypium hirsutum
cagttgcgggagctggcaatgctaaattcaaacttcagagaggatagtccgggtccaagcggcagtgtctcaccttttaattcaagtggaatgaaacgtcccaaaaccgggcgctgagaaataaaccaggaatcatctgaaattgtttctaccggcctggggtttcgtcatagccaagtatatcttctgatgcatattggttgggtgtaactttggaaagattaggctaacagttgttggtggtgagctttctggtgggaatgtcatcgttaaactgttttgccttttgaaaaaataacaaaaagaaaaaaaagaaaattgggtcttggaggtcaatactcagttttgctgtaaactctgaatacattcattggatttattcttgtgttagtaggtttaaggagtgtgaaatatataatataaatataaatatattaatgatgaggtgggattcatctgagttttgtagggatgtgtatttgtgtcatgttattttgattccttttgtagtttacatgaagcatgtaatgtaggtccagatgggttgggtcgggtcaggtatattatattctttttttgggtctgagtatccgaagcacgtggatcttctctcttatg

SEQ ID NO: 1324 - DNA, 647 bp, Gossypium hirsutum
tcattcttcatacgctcattaagtatgtgctacttgatgttagttgatgtctcttttatattcctggttgtatttgttccattatatgtatactgcttcatctagttctaaaattttataattgtttttgccattttatcaatcgagttaatcccttgtggatgaatattggaagacattcaacagctttgatttattccaaatggtgttttacattcgtaatatattataatcatttgatacacatctgacattctggcccttgaggcttcacttggtaggaaccacgttttgagcatgtaaatcattccaggagggatctgtcgaaggaagctgatactcatcaggttttagggacaacacaaagtcaggcaatgctggagctacatgcttaatcctgcaaccactaacacatcacaaaaataagttcactttctcatttaaccatgtcaaaggttagaaaatggggtcaattagaaatataaagtgacagaaaaaaatcatctccagcattatcttcaaatttgtaatagttaatttctacacaattgaaaacggaatgaaactgaaccattgctttaaaaggtgacatgcgatttgaatttcagcatctataaaacctttttggctcgatcccgtctgtatat

SEQ ID NO: 1325 - DNA, 615 bp, Gossypium hirsutum
cacgacaacggcaaagaaggcgtggctgtgggctgaggctaagtaggcaagggaagctgagactgagaggaaccgtcgaatgaaagctattccttcttcaaagtttttcttcagcttagggtttaactttttagtattttatatatataaaggtaaattatgctattagcccctatatgatgcacaaattaaggatttaatccttactttgttgcttaatatcacaaacaatcattctattttggtttgaatcaatttattttctcaagttatttatcgaagctagctcaataactaatcatgcacattcaacaaggctattaaggagttgatgctggccacaagttttaaaactgctctatacccaagataaaaatcgaaccattaaccattaattaaagtaagagaaacatttatcatcgcacaaaactctcgtggttatgaatttaattgctagcacgaggattaattaatgaaattagggtagtgactaattaatgttaatggattcgggtcgggtaatatcatatcttcgggtttgggttttgaatagtagtaagtcacatcccacattaaagaaaaaacaaaaggcagctttatcgtcgaaagtgaaaa

SEQ ID NO: 1326 - DNA, 625 bp, Gossypium hirsutum
tgtacaaataaaccacccactgctggtggagtgaataatcgcaagcgcacaatatcaactcagtcttcatcaccacctgttgctcactgggccagtcagagaccacagaagagctcccgaagtgctagacgaacaaatcttgttcctgttctttcacataatgatgaaactccattactggatacagtatctgatatgcctggaaacgaaattggttcaggatattctagacgcttgtcaagcggttctccccaacaagttaaactaaaaggtgatgccttatcttcagctgctctttccgagagtgaggagtctggggctgctgaaattaaatgtaaagggaaggtgacaaagtttgatgaaatagatgagaaagctggacagaatgttcaaaaagtttcaaatttgatccttccatcaagaaagaataagctgataaatggagaagacattggcgatggtgtgcgtcgacaagggaggactgggcggggtattactactacaagatctcttatgccaatgacggttgagaagtatggaaatgtgggaacagctaaacagctcagaagtgctaggcttggcttggataaggctgagaggttaaatacttcttcctacatgccca

SEQ ID NO: 1327 - DNA, 646 bp, Gossypium hirsutum
tgattttattggcgtcttcagctggaataaatctgtcttttttttttaaccttccctttctctttatatccacttggtttggggaaatttctgatgtttctaactaatgtttagcttaagcattatggggtaaaacaatgtcaggttgttgattttgatttctattgtttaacctggtttcttgcttagcctatacagttatgttagcattcttctcttcatggctgtttttaatcaactttgacttatgatcttctgtcaggctttattcattaatgatccttcactaaaagcatgaattccatagtttcctcttttggcatatatttatatttactgcagtttcaaatatatatgtatgtatatctttgtttttatttgcttcaatgcatgttgtacttgcaggcagaaaccttattgattatgagcagataacaccctgcattatggattggattaaaaaaatttttaagggctctggccaaaaaaactcagaaggatattatcatggggattatgcagaggatcctcaattttatgcaccatctggcacaggggtattatatctgttactatttctattcctacatgttctcgacctttttgatgacgggattcccatcatgctacctgtaaggccgttaaa

SEQ ID NO: 1328 - DNA, 614 bp, Gossypium hirsutum
ttgtgcttacttaaaacttccagttttggtgattacaaataaagacaggatcaggaatgttcatatccaccacagtttgcatcattatgaaggatatgtaatagatattcaggttaagctctacaatcatgcatgcagtagtgttctaaaatatctgtaaatagtaaaaatccaaacctttccttcgttgccttcctcagccaattgtcgtaatagttccagggctccacatctgacatctctatctttgtatccgagtaacttaataagcaatggcaatattccaacattaagcacttgtaccttattgtactgtttccttttgcagatatgttgcagatctgttattgcctctagtatcatattatccgaactagccaaagataatgccacacgagcaaccttgatccttgcagcttcgttcctatccttccattgctctattgtggtctttagagcaacattggtgcttaaaaccctgctcgtgagcttcatccctgttgttggacagattatatcctctagatgactgaacgtttcaaaccactccattatcgccttcctctcatatgtcactccactctcaatggtaactgggtcatccataatctgct

SEQ ID NO: 1329 - DNA, 160 bp, Gossypium hirsutum
tacaatgaaatgcaaaaaatgtaaaattgatacttttcaattacatatttacatgaaatagcttttaatttttaaaaattatttttgaataaaaaatctattagaaccaaattgctcattgtttattccgcatttgagagaaaaagcaaaaaaaaaaaaa

SEQ ID NO: 1330 - DNA, 634 bp, Gossypium hirsutum
tagtaatcttagtgcccattcagttcgaaacttcttcaatgccacattgtactattaacacaaaacattttctttttcctcattgagatgttaaaggagggctcatacactcacctagtcctaatgtaagaacttcagattatatcaaagtgaagaaatattttatacagcattaatacagtcaccagaattatcttttcagactaagctgaaaaccatttatagaccagcaactacaaactagatgttgaacaactaacagaaaattagaaacaaaatgaccccacagtctaggggcatttccctcgttaaggaatattaaagttctggtctgagagtgaaatagcaagcagggctgggaatggaatgagagcaggctacctcccacaaataatttgacaactcaacggtaaaaatatacataaaggtataaaagaataaatacaattttttttcttttacaaaagaactcaaaacacattttttgacatgcatcagtttaaaaatgtgggacttccaatgtttacagcagtaaaacagattggaatctagtccaggagagaaatatcacccaacaactccagcaatctttacatcttacaattgatcatatgctcttattacttgccttggc

SEQ ID NO: 1331 - DNA, 604 bp, Gossypium hirsutum
gctgcttaaattatttcttttgcctttgctttttgttgctatggttttgattctcttctctctttttttaattagtcctcctagtgttagaccaccacttgccccagaagacgaggaactcttgcgtgatgatgtagctataacccctataaagaaagatggcataagacgaaaagaaagacccactgataaaggtgtttcttggcttgttaaaacacagtacatttctccacttaatatggaatcaatgaaacaggtaattgctaactacctgtgttcatatttcatcttctggatgattacttttggaagctgtgtcaaaactaaatatatgtggcacttgcagtctttgactgaaaagcaagcaaaagaactgcgagaacttaagggaggccgtaatcttttggagaaccttaacaataggtttgttttattcaaacctcttctgaagagaaattttattgaaatcagatttgctagaaacttgtgtacttccacgaccactgcttgctgacattaaatatgttggaaattgtatcagggaaagacaaataaaagaaattgaggcatcattcgaggcatccaagttacgtcctgtccatgc

SEQ ID NO: 1332 - DNA, 1199 bp, Gossypium hirsutum
  misc_feature (618)..(619): n is a, c, g, or t
  misc_feature (622)..(626): n is a, c, g, or t
  misc_feature (629)..(649): n is a, c, g, or t
  misc_feature (651)..(653): n is a, c, g, or t
  misc_feature (656)..(663): n is a, c, g, or t
  misc_feature (665)..(675): n is a, c, g, or t
  misc_feature (678)..(678): n is a, c, g, or t
  misc_feature (681)..(683): n is a, c, g, or t
  misc_feature (686)..(689): n is a, c, g, or t
  misc_feature (691)..(700): n is a, c, g, or t
  misc_feature (704)..(705): n is a, c, g, or t
  misc_feature (707)..(708): n is a, c, g, or t
  misc_feature (710)..(725): n is a, c, g, or t
  misc_feature (730)..(744): n is a, c, g, or t
  misc_feature (747)..(749): n is a, c, g, or t
  misc_feature (751)..(773): n is a, c, g, or t
  misc_feature (775)..(800): n is a, c, g, or t
  misc_feature (803)..(810): n is a, c, g, or t
  misc_feature (815)..(816): n is a, c, g, or t
  misc_feature (822)..(846): n is a, c, g, or t
  misc_feature (850)..(850): n is a, c, g, or t
  misc_feature (854)..(860): n is a, c, g, or t
  misc_feature (865)..(871): n is a, c, g, or t
  misc_feature (873)..(879): n is a, c, g, or t
  misc_feature (894)..(912): n is a, c, g, or t
  misc_feature (914)..(928): n is a, c, g, or t
  misc_feature (930)..(935): n is a, c, g, or t
  misc_feature (940)..(942): n is a, c, g, or t
  misc_feature (944)..(945): n is a, c, g, or t
  misc_feature (948)..(950): n is a, c, g, or t
  misc_feature (952)..(958): n is a, c, g, or t
  misc_feature (966)..(966): n is a, c, g, or t
  misc_feature (968)..(968): n is a, c, g, or t
  misc_feature (977)..(987): n is a, c, g, or t
  misc_feature (989)..(996): n is a, c, g, or t
  misc_feature (1000)..(1000): n is a, c, g, or t
  misc_feature (1002)..(1010): n is a, c, g, or t
  misc_feature (1012)..(1018): n is a, c, g, or t
  misc_feature (1020)..(1020): n is a, c, g, or t
  misc_feature (1025)..(1032): n is a, c, g, or t
  misc_feature (1035)..(1035): n is a, c, g, or t
  misc_feature (1039)..(1047): n is a, c, g, or t
  misc_feature (1050)..(1052): n is a, c, g, or t
  misc_feature (1055)..(1060): n is a, c, g, or t
  misc_feature (1062)..(1064): n is a, c, g, or t
  misc_feature (1066)..(1066): n is a, c, g, or t
  misc_feature (1074)..(1074): n is a, c, g, or t
  misc_feature (1082)..(1098): n is a, c, g, or t
  misc_feature (1100)..(1100): n is a, c, g, or t
  misc_feature (1102)..(1105): n is a, c, g, or t
  misc_feature (1107)..(1109): n is a, c, g, or t
  misc_feature (1117)..(1128): n is a, c, g, or t
  misc_feature (1134)..(1136): n is a, c, g, or t
  misc_feature (1138)..(1143): n is a, c, g, or t
  misc_feature (1145)..(1145): n is a, c, g, or t
  misc_feature (1147)..(1154): n is a, c, g, or t
  misc_feature (1156)..(1182): n is a, c, g, or t
  misc_feature (1185)..(1189): n is a, c, g, or t
  misc_feature (1192)..(1195): n is a, c, g, or t
aaaattgaaactcgactttgtttaaaatttcataaattgttcaaagaaaaaagatgaaaaaataaataaataaataattggatattcaataagtaacataataaatatatttataatataaattcaatatttaatttccgtatttaatttttcccacacttaatactttgaaaaaattcacaaattcttttagtttattaaaaagcgccttaaataatatcgatttttttccaactctcagtctgtctattattttagttttccaaatataattaattactgattctaaatatgatttttaaatttataagtgaatccaacatataaataaatcataatatgattgcataatagacgaaaattcgtttgaagtaatgattaacacttaaaagagatggagattcaaaccttgttaatcacaagtaaagtaaaatgataattaatttattattagtttcttcatcaataataaaaggtttaaataaaattaaaattattagtttgagaaaaatataagcctaaaatataggcttagataaaaaaataatgtctatttaaaaaatgggcccgaccttagttaaagttttttaaacctgggtttaactcgaatttaaaaannaannnnnaannnnnnnnnnnnnnnnnnnnncnnntgnnnnnnnntnnnnnnnnnnntcncgnnnaannnncnnnnnnnnnntganncnnannnnnnnnnnnnnnnncgttnnnnnnnnnnnnnnnaannnannnnnnnnnnnnnnnnnnnnnnnannnnnnnnnnnnnnnnnnnnnnnnnnaannnnnnnnaacgnnaatacnnnnnnnnnnnnnnnnnnnnnnnnnaaanaatnnnnnnnaaacnnnnnnntnnnnnnnaaaaaattcagaaannnnnnnnnnnnnnnnnnngnnnnnnnnnnnnnnncnnnnnnaaaannnanncannngnnnnnnngaactagntntacgcttgnnnnnnnnnnnannnnnnnnttcncnnnnnnnnncnnnnnnntntctannnnnnnntcncccnnnnnnnnnctnnnatnnnnnnannntntctcgatnttcacttnnnnnnnnnnnnnnnnnanannnntnnnactaaagnnnnnnnnnnnnatattnnnannnnnntncnnnnnnnnannnnnnnnnnnnnnnnnnnnnnnnnnntcnnnnnaannnnctca

SEQ ID NO: 1333 - DNA, 813 bp, Gossypium hirsutum
  misc_feature (139)..(140): n is a, c, g, or t
  misc_feature (150)..(150): n is a, c, g, or t
  misc_feature (306)..(306): n is a, c, g, or t
  misc_feature (620)..(620): n is a, c, g, or t
agtcataacatttatttcaagcgattaagtacatagcaaacacaatgaggaatcttgagattaaggacttaattaaaaaattgaaactcgactttgtttaaaatttcataaattgttcaaagaaaaaagatgaaaaaannaataaataantaattggatattcaataagtaacataataaatatatttataatataaattcaatatttaatttccgtatttaatttttcccacacttaatactttgaaaaaattcacaaattcttttagtttattaaaaagcgccttaaataatatcgattttttnccaactctcagtctgtctattattttagttttccaaatataattaattactgattctaaatatgatttttaaatttataagtgaatccaacatataaataaatcataatatgattgcataatagacgaaaattcgtttgaagtaatgattaacacttaaaagagatggagattcaaaccttgttaatcacaagtaaagtaaaatgataattaatttattattagtttcttcatcaataataaaaggtttaaataaaattaaaattattagtttgagaaaaatataagcctaaaatataggcttagataaaaaantaatgtctatttaaaaaatgggcccgaccttagttaaagttttttaaacctgggtttaactcgaattttcgataaaacaaatcctgttgtttttcatgttttattgttgtttcactttttgtcactattttgctattattttattattatgttgttattattttattgttaatgttttaatttattgaaaaat

SEQ ID NO: 1334 - DNA, 394 bp, Gossypium hirsutum
gttatgtcaacctagaggggtaacatgtcattatgcatgacacctagttgtttcttaacatgtcccatcaagtacaggcccatatccccaatcggtttgatcattgccctttaaagcagtctccagcaacaaagttctttcccttgccgggaaattaatggtccgcttcttgagaaacttcctcaccagacaaagctcatagatgatatcatcctcaagattgacgtccaactctaccactaatttcgtgtcctcctcctcagccaaggaaagattactagaatacaactccatgacaaaacaccacccaaaagaacaatgaagcctgaacaactcattccggcaaactaagaaaagaggagagagagagagagagagagagagagagagagag

SEQ ID NO: 1335 - DNA, 499 bp, Gossypium hirsutum
actatcacaagtctaaaccaggaaagaaatatgtaaatatacagtaggacttgtggacggtttacctgacgcttgaacttcacagggctccagtatgtctgtcgatgacttagaatttcaccttcttgaaattgttgatcatcggtggactgttcaacattttcttgaaatggtgtgctagtttggtatgtatctttcagcttaagtacctgggaagtaaattactcaactgatgatgtcaaacaacagtacttgggtgtaagttgaggaatgtgcttgatataggtatggttagaattctcttttaagttttttcagatatccggaaggtctttggaggcctacctccacatccatttgtcggatacgagtgtcaaacatgggcctttagttgagataggtatgctttatttctcaaagttttttcatgtgtatcgaagatgctaggaggtctattcctatatttgatgtgtcagacataagtgttggatacaaggaa

SEQ ID NO: 1336 - DNA, 609 bp, Gossypium hirsutum
  misc_feature (91)..(91): n is a, c, g, or t
  misc_feature (126)..(126): n is a, c, g, or t
  misc_feature (129)..(129): n is a, c, g, or t
  misc_feature (214)..(214): n is a, c, g, or t
  misc_feature (266)..(266): n is a, c, g, or t
  misc_feature (318)..(318): n is a, c, g, or t
  misc_feature (357)..(357): n is a, c, g, or t
  misc_feature (378)..(378): n is a, c, g, or t
  misc_feature (499)..(499): n is a, c, g, or t
cttttttgccgcaatatctgaagatctttacatactatcacaagtctaaaccaggaaagaaatatgtaaatatacagtaggacttgtgganggtttacctgacgcttgaacttcacagggctccantangtctgtcgatgacttagaatttcaccttcttgaaattgttgatcatcggtggactgttcaacattttcttgaaatggtgtgctantttggtatgtatctttcagcttaagtacctgggaagtaaattactcaactgntgatgtcaaaaaacagtacttgggtgtaagttgaggaatgtgcttgatatangtatggttagaattctcttttaagttttttcagatatcnggaaggtctttggaggcctanctccacatccatttgtcggatacgagtgtcaaacatgggcctttagttgagataggtatgctttatttctcaaagttttttcatgtgtatcgaagatgctaggaggtctattcctatattngatgtgtcagacataagtgttggatacaaggaattcaacaataatcaacttgaacaagggaaaaaaaggagatagataagagtagattgatataattttggtgttcccgg

SEQ ID NO: 1337 - DNA, 459 bp, Gossypium hirsutum
caattgaaactcaggccctggctttaggacaattgaaacatgaatggatgaccttggcaatgacagtaacccgtaggctgcctcagctccttgtcttgaacacctatcactgcaccatatgttgattctctccatcacagtggcctttgttatgagatgcctcacaaattccatctctctctccttccctttgaatccctttaccgttacttcggttagggtgcgcgttatacagtcgcaaagctcccttttatcccacagcatcgattccggatacggcaatgagcaagtccgagtggcattctcttctgatttggaatgcaatattccactgaatttgcataagctttgatctagagttgtatcctacacttatttgatgcgggaaaaaagttagaaaatgggactagctttaacaacaatggatgagatatagtcttctctaatgcatgcaacctt

SEQ ID NO: 1338 - DNA, 611 bp, Gossypium hirsutum
tcgcaaaggccatatctgtcactctctatatttggagaaacaaaatgaatgaaaaggttgagctggtaataagatgtttcataataggaacttgataatagaaaagtgggtataaagagatatacctgagtgtggccacgaagcaaggaccggagggcggtgttgatgttgaggatacggatattcccaagcttaagaccatagcaaatgtaattcctattaacagcaatctgacgaccaagaacaaggccaggatcagaagcatacttggtaatgggagtgacctcaagttggggctgtacttcactgggcagcctgacatgaatatcgtaaaggagattggtcccaaaaagatgccttcccttgggggccttgctgctcaacagtcgggcaggtgagggagaggaggagggagagggcgaaggggcagatgggttgacattcatattaagaggtggggcagaagggacaggagcaggagcttgtgactgagactgagtgccaaaaaaggccatcaaaatgtcatttccagaagtaggagtggtgggtagttggggttggagatgataaggaataggtccagaaggattaggatgaggatgcaaggggtg

SEQ ID NO: 1339 - DNA, 607 bp, Gossypium hirsutum
tcccattgcccatggtaacacaatttttacctgtatatgatgaggcagtgtgaggttgacatctcaagcgttatatgatttgttgctccagaatcagggtaccaaatagatttagcttatgaagctagtggatatctaagaggaagttgactagaggaagtcagaggaatcgagccacagtaatgagtcatttgacaagaaggagtggaggacaaacatttagagccatgcaactgatgacaatttacttgcactgagttggcctctgcaccaccagaaaaggtttcatcaaacctgtgataacaagtctgtaccatgtggtctatcttcccacacaactgacattgcggccttgtacgagaccaaccccttccagttctacgagatctgcctcgagaccaaccttaaccttatcctctataaccttgcttggagtcttgagaataccgagtagactcagctgaacgtttcaacccatcgtcgttgtcttgctgacgggttgctaagtttccttgacagggagcttctattaacgactccaattggtgtgattcacaatcaagtaacagttcattcaacaagttaagagataatggagtcgcagaag

SEQ ID NO: 1340 - DNA, 609 bp, Gossypium hirsutum
gcacaggttggaacaccattgacttgattgtaagagcacataacgctggctacattaccgtcctgtacacacattttgaagggtacatcgaatgtatcctcgatgtcctgcttgcttacctgctcaaatgtgtggaaacccacgtgagaattaaaaaacgaaaaataaaaaagattgcttttctttgtttaattgttcgggttattatgttaaaaaaaataagaacaaaaagcagaagtgtttgctgataagaaagctctaagctaaagacaaacaagtaaagaatcttcagccttttgcggcacattttacatttttttgtccaaatatcatcttaattcaaacaccgaaggactgcaatgatacaatattaatattataaggacttaaaacattttaaagtttttaacaatgaacctcgaatctgggttataattaaggatgtttgatggaattaagccggtttcatatttgcagcaataaaattcccgagttggatcccccacctatatccaaaactggagctacacgacacaaaattaactaaccttggcattaaagtggaacctatccactccattccagttatccaggtcataggccgtaaaa

SEQ ID NO: 1341 - DNA, 539 bp, Gossypium hirsutum
tgatctacacatggagactagatcaccatgtaggtaagtaagaaactcacggtcttctggtggcactgatctctcagaatgtgatttatttacgatgcttattaccaacgagaaataatatataaaattaactatactggtgaaacccttttctagttaagagttaaaaacctgttccctttcaaaattgtaatcgttttatgtatgatattttacctttttaaagtaatattagttgtagaaaacttaaacataaattgcctttttggctttctaaatgtcgtataaatttaaataaatatttttctccttttgataaaattttaatagatctaattcaatttgtttacctaatttattttataaaagctagtttatcccttgatgttatattttctaatttaacagttcagtagcatttatgattattaccaaagtagatttgaaatcacaaatgataagatcaccataatgctttgattaccatattaatcttgaaaattatacaaaaactatctataagcattaaaggacatggt

SEQ ID NO: 1342 - DNA, 493 bp, Gossypium hirsutum
gtcttcacctcataaagtatcagacgctggatcaacacttggcgaagggtcataaagttgcgatgtaaaagggcatgataaaaaacaccaatgtatgattgcataaaataaagaccaaacacctgaaacataactgttatctgtcaaataaaattcttaacaagaaaaaaagaaaaccgaatgatatcacttcctaatcatactttgtagaccaagctgtcagcctgatattcagtattttcattgttttcatgcttaatgagtcggattgatatctttcccccaatctttgtgaaatactggattacaagaagataaaccacagttaacccgaacctgaaaccaaaagcatgacacacataaagtaaaacattgtggatttaatcagcatatgagaaaaaggaagttccctaacaaggaatgaagtagctgccaagggaaataaattaacactattaatcaagcataacatatttgattcaagttaaaaaaa

SEQ ID NO: 1343 - DNA, 667 bp, Gossypium hirsutum
ctgtagcttagatccgacgatcagatcaggccaggagtgttacaaatcaagttaagaatcgagttcccggaagcttcgattactcttgtagacatctataccgctaagatgcaatgattggcaatgctaagaatctaggtaatcatcatcaccatcttggctgaccctttaatctccatgctatgcaagggtatctttatttatcagtttatgcttattttttacaggaatggcggatccattaaagccctgctgcggatatcacgtgaactacgatcacgtatggtgtgggatcaaagcaatcatcaacaaaaccgaagtatttggagcttcgtgcaaaaacccgtctatgtttgtaagctgggatggagttcattacactcacgctgcaaattaatatgttgcagatcgtacactcaacggctcattatcagaccctgcaattcctattactctagcatgtcataagcagtaagtaaaagaatcttttgatctcaaatgtattgaaatctccattttgatgtatggaaagatctgttacgtgcaaattgatctcaaatgtcacattaaaaagactttaatgagaagttttaataatgttggggaccaatataaattattgaagcttacgtggaatgtcatcacacgaggctcacataacatacgt

SEQ ID NO: 1344 - DNA, 1001 bp, Gossypium hirsutum
  misc_feature (641)..(925): n is a, c, g, or t
  misc_feature (927)..(946): n is a, c, g, or t
  misc_feature (948)..(965): n is a, c, g, or t
  misc_feature (967)..(997): n is a, c, g, or t
gcttactatcgagctgatataccgacaatgggtgaatgtagtgcattttgggaaataaaggtcgtgcataagctgctagtaaacttgtataagatggggatgtaaatctcaaagccaactgaatttctcccatctttttaactccacttggttgaagtgctatgagaggatacgaataggtgtaaacccgattagtcgaaagggtggacaatcggatccttagcttcccaatacttgggtcttttggatttggacctttctctccgttgaggtggcagttatcgaaaattccgataaaaaggaccgtatacggatcgtaaacctcccaagtgtattgttcattccattttggagaaaagctgttgactacagttcttgtccttgcccatttaggtccatatttggccacacaataagcatcagtagtttcacgtccatctcttgacttcattggaaccaaaacactggcacctataatccccaactccaacacaccaattgctggtggccacaaccccttaaacgtcgctcggtaatcactgctacaatcaatggattcatcaaatacatgatagccaccatccaaagatattctcatgttaagcttactagcaaactttagctcctccaccacatctcannnnnnnnnnnnnnnnnnnnnnnnnnnnnnnnnnnnnnnnnnnnnnnnnnnnnnnnnnnnnnnnnnnnnnnnnnnnnnnnnnnnnnnnnnnnnnnnnnnnnnnnnnnnnnnnnnnnnnnnnnnnnnnnnnnnnnnnnnnnnnnnnnnnnnnnnnnnnnnnnnnnnnnnnnnnnnnnnnnnnnnnnnnnnnnnnnnnnnnnnnnnnnnnnnnnnnnnnnnnnnnnnnnnnnnnnnnnnnnnnnnnnnnnnnnnnnnnnnnnnnnnnnnnnnnnnnnnnnnnnnnnnannnnnnnnnnnnnnnnnnnnannnnnnnnnnnnnnnnnnannnnnnnnnnnnnnnnnnnnnnnnnnnnnnnaaaa

SEQ ID NO: 1345 - DNA, 610 bp, Gossypium hirsutum
ctggacggcaaacattcatgattgcatccatggcaaactatggcctgtgatgggtgctgggtaccacactattcaccacactacgtatcgccataactatggccattacaccatttggatggattggatgcttggaaccctacgtgaccctagtgacgaagaaggcaagaaggtcacgtaattcccttcgtgctcatcttgacatttcctgtttttgtcgttttagattctctctttttttgaataggtccgcatgttaatggagtctgagatgttgtcgtagcctgtgttggtcgtaggttttttaaattatcctccactgcaaacattgttctgctttaagctacattggtgtttattatgggagctcggatctcctgttttcttgagttttaaatctagatgttgcttttggaacttgaaactccaatagtcccagccagtatttaattagcaatgtccttggaatttgtgggggcacaacccatatttaatatttctctcctaattggagattatgttagccacaacaaaaggttctacttggaatctaatgaacatcaaatttttacttggatggaaatacgaatgcttctgaagcttacagttt

SEQ ID NO: 1346 - DNA, 655 bp, Gossypium hirsutum
tgatagctagagtttaggataataataacggctcaaactttaacagtctataactaagctaaacactaatcaggataataataacaatacaaataaaatatcaatatcttatcaaacaacacagtagccttgaaaatttaatgcatcttagggctaaagtgcccatgtagtaaagccagctttataaatctacaatctcaaaaacctgattcactatcagaaaactaatgttccgcattgtgcatacatccaattcttgaacagaaaaggaaaaaatctttcgtttttttctttgtttttccatctacattaacttgtatgccccttttattttttattttttcacaaaataatagcttaagggtgtgggaaacaactatgttacctttttatctagatttaggatatatggcttcaaccccacccgtgaatggccttaatggatgtggaatactaacagacccatcttcttgctgaaaattctccagcaaacatacaagcatccttggaactgcacaagctgttgcatttaatgtatgaacaattttggttgcagccacgtttgttttacccttcttggaagttgttgagggtgattccgatggacgataacgaatgccaagccggcggctctgatagtcggtacaattcgatg

SEQ ID NO: 1347 - DNA, 658 bp, Gossypium hirsutum
gatactgccctttatagtttcatctgattctttttagcattttcgcatgcagagttctacacctgcctaatgcagtttcagcatcaactccatttttatttcattgttttcagagatttaatcccattataatcaactgttattatttcttaataccattttccttcttgtgtacttgatacaccatcaagttcatacctgttacatcataattcaagaacaggacaataaatctgcaagtggaccaggaccatcacttactcatgtagcactgcaaaacctcaagaagagcagtaccatgactgtcagcatattcctgtttaattttgaaaaggaattaatatgtttatacagaagaacggtttacaagtatcatcagaatctagaggagttagaggtacaaacacacacacttcttgcactgttctttgaagaagagtggaagatgttgattaaattatcataactatggaaacaaatgaagggggtggtaatgtcaaatgataatagaagtccatactaagctccttttactacatccttattatatttaaaatgttatatagtaccttatgtagaattgatagaccttcaatcaaaatgatcttgtagagacatggatctagatattttctttacacaggaacatccaaagagc

SEQ ID NO: 1348 - DNA, 616 bp, Gossypium hirsutum
ttcttcctcaatttgttggtcttatgtacgagttcttactctgaatctggaactttttatcaataagtacaatgataaatctggtgatttcttctttaacagtcaatgcaacaatgtttctttgtgatgttgaaaccgttaacaagtacgtcttgttattctgtatcacttgggatgcaagtgttgaatatatagtgttattccggctggttttctgttgtatctttcgacatcttgcctgccataacactgtcactgcaatttataaaaattgtccacataaatatacatatgtcttttcacatcttttaattttattcatcttctttattgttattattatttatttacttatttacgtgtttattatcatttcaaaaagatattttaattctattcgtttatttacttgttgttatgtgattgattcgtctcttatatttatttatttcatttttgttgtttatttatattgtttatgcttaacttgtcgtattcattatcgttttgttatgcatattaacaccatacatcaaaaaaggaatttttctaaataaggcaatattttgcgtttggaaaatcgagaaaacgtgccctaacgtgctgggagctttaa

SEQ ID NO: 1349 - DNA, 613 bp, Gossypium hirsutum
atggttgcttatatgagacagctccggcctatgtcaccgatcagcctcgatttctgaactctgcagttagagctgttacaaagctggggccacatgaacttctgggtgtgcttaagacaattgaacgcaacatgggtcgtagtggtggaataaggtatggtccaaggccaattgatctggatatcttgttttatggaaagtaccagatcggttccgatatacttaccgtcccccatgagagaatttgggagcgaccttttgtgatggcgccattaatggatttactaggatcggttattgacagtgataccgttgcttgctggcattctttgtcaacagattcagacggactatttggtttgtgggataaattgggtggtgaatccctcatcggaaaggaagggatgaaaagggttttaccaattcggaatcacttatgggagtggtcaaagaaaacctcagtcatgggtattcttaatctaaccccagatagttttagtgatggtggaaagtttgtatctgtgcagaatgcagtttctcatgttcgttcgatgatttcaggaggagcagatataatagatattggtgcacaatctacacgaccaatggcttc

SEQ ID NO: 1350 - DNA, 649 bp, Gossypium hirsutum
tgaggatttgttgcatggaagctgagagaaaaacccaggtcggtttagaggaaaaaagctcagtttcgccatatgggatgcaactgccattgtttgagttttccttcaaaatttttctcctctttttgtctccaatctcctctttcagaagcgatattcgaaattttcttttattagttttattattattattattattattgttgtttcaggctgctctttatcggatatgtttatacaagtgggctgggttttggttgtttgcttgcaaattgaaaacctgactgacccaaaactgtggggtttgaattcttcgattggttcaaatataatagtttttcatttttctcctcaaaatcttactgcaaatttgggaataacatatcagcatagtgaaaggactttaatcaaaatacaccgaaaaaaaccagtcctagcttctaagaggttgctgctggtgcaatgattttctccctccgggacttgaaaaaagtcaacattttgtgacggtcgggaaggttgtccttgatcaacggcagttgcttaaacctttcagcccatgcctgcaatcgagggaagctttgaggtcccagcagttcaaccccagctgcttcggccaacacatccaaccaacacgctatccatccat

SEQ ID NO: 1351 - DNA, 624 bp, Gossypium hirsutum
ctatattgaaaatgagttagcataagaaattattgttatatacatatatatatatcttagtttgttgttatacctctgattgcttctttgatggatcagttggcatgttgtactgcaaatgcctggtggagaagttattgatcctccccattctttgaaagctactgaagattgtcattttgatcaggtagcaacctctatgctttaaaccctctgttttacttgcatggctatattaccaaggattgacgtgaagttgagtcctttggatagtatttaagttgtctgttttgagtttgtagactttggctgttaagctacttaatttggtattattgagttcaccaaatatcatttgtgggctgttaagctacttaatatggtattattgagttcaccaaatatcatttgtggataacatcatataattatgtaaggacgttttatctgtctatttttgcctgttagtaaacttatacagacaagtttttttaaagaaaaatgtaccttttaggtcatagatcagtttatgctttaatgatttgatctaatatattgcacattatcaaatgaactatgacatcatataactaaaacctcttccttctaaatcctagtgccctg

SEQ ID NO: 1352 - DNA, 649 bp, Gossypium hirsutum
attgcatatgtatcttgttaagtaccagtgctgttgaaaattcatctatttttgtatagtcaaaagtgccatctttggtaccatgtgtcttaataataccatgaggagctgcatttctttcattttatttactttcatgtttgtagcaaacccacttttcacttcctcctgttactgcaccatcatttttaaaatttacttctgatgagatcaaaaggtgatgcttgtattaaggtaactgaccaggacatctgccaggacaatgctgtttaaatattgtttgcattatcgaccactgttactaaaataactgtgggccaagctatatatgacatgggtgcattgttaattttcatagttattgagcaatgataaagagacaaagatatttttctaactgtagaaggatatatgattgtgggtgttgtgctcgataacattagattggtttaacttcaaacaatttggaaaagctatatgcaaactgataataaaatcgagagtttctctgtatataggttagaaacgaattttgtaacactgtagtttttgtgtatttacttgtttagtttttattactatgtttcatagtagttgactaacatgtgcatacagatcttatgcttgcagggatcagtatatggaccta

SEQ ID NO: 1353 - DNA, 615 bp, Gossypium hirsutum
caacagaagaaccttctggagaattggttggctgaagataaattggaatgcagtgaagaattgggtgaccttgtgaaggtttgatttttttacccactggaatagtagtctatcagtaatttattcagttttatctgaatttaaacttcaagaaaattggaaatgatttgacactttttttgccttattctaattacagctttgtttttgttgtagactgtggataatgatcttgcactgaaaatatatattaaagcaagggcaactccaaaagttgttgctgcttttgctgaacgtagggagtttgacaagatcttgatttactcaaagcaggtgattaccacaatattttttggcattttctggagtgatgatatctgatctcctttttcacagcataattttttttgtgggtggggtggggtcaagtatttctcctgcttgttctttatatttcagttattgtatgcgtcaaatattcatgactgaattgttttcctcaggttgggtacactcctgactacttgttccttttgcaaacaattctccgtacagatccacaggttcgtttctgttttctctactttttattgtttgaggtgttgaagcatgtca

SEQ ID NO: 1354 - DNA, 613 bp, Gossypium hirsutum
atatcaattttttggtctcttgattgtgttcattggtaaattgaattttccttttgcattaccataaaaaaacagttttttgaggttgcatatttggcttcttcgaaattatttatgcttgaactctttctggttttgtttgaacagatctgatatggtccatttggtcccgagattgggtggctgatatttgaattttgatctctaaattgaaatatattttttgtattagtaaacggcatggtataacttgggttagaattcaccaaggatttgaggatctcaaatccatgtactttaaacacccactgaagtgatgttattgtatgcattgttggccttgataacttgtccattacacttttcatctcctgctctttcccttgtcatttttatacatactatcagctccggttagcttggatttaaatctctatcatcaccatgatttgaacatttacctcacagtgatcccttcccctaaggtgccatatttgttcctttgattccattctcttgaattatccctctgctttcttcctgtaagattttcaactgttctggaaaattaatgccaagaggaaaatagtagataacgactggcagaaattgg

SEQ ID NO: 1355 - DNA, 594 bp, Gossypium hirsutum
taaagtagattttagatgatttatttaaagtacaatcaataaaaatatgtccctgcatctctacagcataaaatcctctacccctttttgtcattttgggaagagggttgtcaatttggcatggggagggatatgaatgtacgtgaatcatccttcattcttagtatttgtcaaaactagaaccaatgactcaagtaaatgttattgggaagctactagtccagctccacaacatatattgtactagatatgaataagccctacaatttccacatacactttcactatcatcttaaccctccttcatttttacaataaataaaacatcatttggtgaagtgtaaatgaaaaattgctacatacatatctacttgaaaataaagtgtataaacaagataaaatgcatcaaaaattttatctgggtattaattaaaaggagaaaagaaaaaagctggttgctcatcacaaacaaaagttcttttctttctttggatggaagaaatgaaagactaagacatttcatttaagtggggataatagccccaagtttccatttttcattttctcacaatccaaacaaaagtccaagtttcc

SEQ ID NO: 1356 - DNA, 604 bp, Gossypium hirsutum
taccttctctttggacttgtatctcaatttgatcggcagcaccagcagcctgtgtggtagcaaggcccctagctactagggaaggagaacccccagcatcagcctgaaccaaatacaaacattaagttaatgcaacaaatgaaggatattaattttgacagtagagggggaaggggagggacagggtaaataatgaaagcatggagctagatattgattaacaaatttcagaaacagcatacaacctctgctatgacagcatttataagcttctcagccttgattatgctactcaaagtcccgataatttctacaggtcttgtaggagcatcccgatcagcatctgcatccctcatgatttgaatttttgccccagagttgtattgcaggtaccttatagtatctcctgccttgccaatgagaacgccaacctatacaagcatgcaagaaataaaaatcacagaacaagatgttccacaattatgaagagggagtaaggcattgcttggattacaagatatttttggaatgtgtgtacactaaaaaaggtagacgtcaccaaagatagaacaataaatgcagataaaacattaaaggtagttta

SEQ ID NO: 1357 - DNA, 621 bp, Gossypium hirsutum
ctcattgctagaaccagtgctgagactcagcataagcatctccattcaaggccacttcactcctattgtcagctggcaagtcagcaattgagatctctgatgatggaacacccccatcctgcagagcaacagaagtgctggaatcttcagtgccaagttcgtcagacttctctgagacaggtggtgacacagcagagcctgaatcaaggacagaggaagcagaatttgaagtagatttcttctttaaaagattgaagaagtcattcctactttgggcttgagcagttgctctcttctccatggtcatccgtactggagtctgattacgctcagcggtggcaagcctggggctattgcctgaactcctaaagggaacagatgcagcagctgatggagtgatgtttattggactatttgcaaatttgttgcttccattagtaggactcaagttatcccttgtggttattgaggagacaccatttgattctcgtgatggtttgagtataagaagcctgctctcattagaaactttttgactgtcagatcttgaagttccaccacgcgtggaactaaaagagagtgaaggatgcagctgctgtccaactttaggccttgatttct

SEQ ID NO: 1358 - DNA, 637 bp, Gossypium hirsutum
cattgcagcgaagctgcatacaggagttgttaatgtcggcttcggtctcggtttcaccagcttcagagacggacaagttggggaatcgcagtgatggatggaaggttctgacccttgaaaacggagtggagatatcgaagcgcaggtctggatcgcttcacatgttccgaagccgctgggtcctcagatctgtctcgccccagcagttcatcaccgtcgccaacgccatagatgctgccaaggtgatccttcatttgctgcatgctcaacctttgattttttctttaatttggtttagtttagattagatgtctttattgggtggaaaaggaaattttgtctgcaaatgcaagcactgccctgcctattgttttatttggaatatattctccaatatatgtgatgtggttgatttcccctacaagaggattcacacgaatccagaagacaatacaaaaaagttaaagaaatattttaacttttactatttaaccaaaaaatggcttgccgtttcctatattttcatcctttctctaaattgaggttattatatattttttatgactatatatagtatattattgcttcatattaaagaattttattgttgtgtgaacaggaatgggacactgagctg

SEQ ID NO: 1359 - DNA, 550 bp, Gossypium hirsutum
  misc_feature (534)..(534): n is a, c, g, or t
  misc_feature (543)..(543): n is a, c, g, or t
cttcgataccctaacttctcttgactatctgttccataatttttaccctaatatatatttttaaaatttttttttccgattgaaactggcccttatcgccatagactcgaaatgccgtcgagatccggccatggacggggaggctaaccttccggttccaccatccggcaatctggtccgctcgattcccaatcaagacacatcatcatcttcctctccgcccggtctcatccgtgatgtccaagccgccttcaagcgccatcgctcactcggtacacttcatttctctcctcttcgaatttaatgttcttcagatttaaaccccaaacttttacgtggtttctattttactttattttttgtttaagggttcttttttttttctgttatattcatccccagttaaggaagtctagctcggttcatggaattggaaatttagggtgtccggttttagggcctactcaattttgcttattggatggaattgttgttagctaatgtgattatgggagcggttcaaaggaaaataanatgtggaantttggga

SEQ ID NO: 1360 - DNA, 560 bp, Gossypium hirsutum
ggtataatataaactatttaacaagattaatgatatgatgaaatgcgcattaatttagttatattttgcattcattaatgaggacaggtgatgatacctttggcgaatgtgggcagtgttaatccggtggtgatgaaagagaatccagtggagagctatattcaggtagttacggtggatgggcatgacttctggttcatgggatttgttaattttgagaaagcatcgtttcatcttttgaacagtctgcaagataccaagccgctaccctgaatccagcctagcctaggggcagactatatgtgtggatgttattttttaaaattcagatgttgttattagtaggaatatgaacacgtagattgaggggtttgacgagttggtttgatttttttttggtctaatagatataaagattgatgtttccagaattttaatttccacactttttactttcataacaaaattatggggttccattttctttaagtaaaaggaattaatccaaattattattataaaatatcagacaatattttccggattacttgacaaaaaaa

SEQ ID NO: 1361 - DNA, 628 bp, Gossypium hirsutum
  misc_feature (162)..(162): n is a, c, g, or t
agaagttatgatgtatcatttgattatggcaaaggaaatatgtgttatttatccataatgaactctttttctttttttttccccaattctagggggagccttttgtgatttgcttttaaatgcattttttcaaagatgcagctcgctgtttgaggaccgaancaagttgctactgtagtcatttattcgttacgttagacctgctggttgtagaaatatctttaagtttcacatagatactagatgttgtgatttattactgaaattacattccttacaaagaactctattcactattttgggtgaaaatttgcccgactcattatttgaaaacgagtcttgtcaaacttgcaagtaggccattttgcttaaggaatctgagttaaatttatacttttcctatttggtttcagggatcacttgcattttgcttttcctatgcaaactattgctattttatccttggtgaatttggaaatgttgaataggaaaaatgatataataatattaagatcaacaagtgcccccttaaggtcaataattttcatattttcactgtcctcttaacactttcaaatttcagtttgtgcagtatgagtttttaggctttgggaaagaaatatgtctt

SEQ ID NO: 1362 - DNA, 699 bp, Gossypium hirsutum
  misc_feature (668)..(668): n is a, c, g, or t
  misc_feature (670)..(683): n is a, c, g, or t
  misc_feature (685)..(685): n is a, c, g, or t
  misc_feature (688)..(693): n is a, c, g, or t
  misc_feature (695)..(695): n is a, c, g, or t
attgtcgtcttttgagcaagcaatgttgaggactcgtaaagggggcgcaacacttcgggaacactccaaggctacaaataagcaagttgaacattgaaactattgcctcttgcaggggaaaaaagtaaagtttgcatgtttaacaatagaagcaaggtgatatacatacctccaaatccatgtgatcaactatgtgaatgatggatcctcccccttcacaaggtctaatcagataaccactaggcaataattctgctctcacgaaatttgcagctggcggcatacttggaccattctgagtgttgttaagtgatctttcacatacctagcagcatatcataattataacaatcagaatataaaaaacttttctgaaaacattaagtcaaaaggaatagcaaaagctccatggttaacatgtataccacaagactaccgtcctccataacagatgtataacgcagcaaccaaaagtcacgagctggtgccagtgttgttggggcatagagctgaaagaaagcaaccggaatttagaactttttaccagaagcaattgcaccgttaattccaaatattgtagatcaaaaggaagagaaatgggatcttaattagcttacctgcatataaagcagttcaatggttccaccatttccagtggaccacacgtntnnnnnnnnnnnnnnanatnnnnnncntttt

SEQ ID NO: 1363 - DNA, 610 bp, Gossypium hirsutum
gatattacgaagttgtaatgtctaattaatgccggttttatcgacattcaaatgtgtaaaatacagaacatgtacgaggaaggagatgaggaaatgaaaagaacaattgctaaagcatggactgatgcaaggtctggcaaaacaaatgatcctttgaagggttatcgttgaatcccatttgaaaactgagatgaaatggggttcgttttgggtattttagcacaatggtcttgtttttatgctttttttgtttggacttgtactgaagttgcagaaagatttgtttctggatatttttgttctcgctataaaaagtataattgaaatttggagatggttggatttctttctctatgttaagccaatgtttgtcggacatattatagtttccgtagtctaaactcactccaagtactaagtcggcattgataagactagaaaatctggaaaattaagaactatcttggcggcggcagccatcatcccggtatttgactgccaaggtctgtattgaacttctcgtagcgatgagcatgtaaatgagctgatggtcttgtgttcttcaaggcaatttctatatcatcaggtgtaattagcccaaccttaaggc

SEQ ID NO: 1364 - DNA, 631 bp, Gossypium hirsutum
catgcatcctccaagctttggtcaaagaagagttgcaaaactttatagaaacaaggggaaatccctaaaccacacctcaaatcacactaaaattatcaacccttttctgatcagtaaacaaaattaatataccatggagacaaatggtcataacacataagctaattaaaagtcacggttaacgggttaagagagttttcgttgaggggttagattgtaataaaaaattgcaataaaagtaattttgtaaatatttcggagcgggtttatcataaacttgaccttactaagttttaaatttaacctaatccgaacctgattttagtaataaaaaaaaaactgaccctatagagttagattaggtcagaatccgtcagttttgagttgttttctacccctaatatagagttgtgcagaaatcacgtcaataatcacgtcttacaaaacataggtttagttgatagctttttactaagtctttgtattcttgttgcttatgcattttttatatctcccctacaaatggggacacatggcaagacaaaaggtcacctaaggacacactccaccagccacataatgaaaggtaacgagaagcctcactcctcatctcaaccactcgactaaaaaa

SEQ ID NO: 1365 - DNA, 410 bp, Gossypium hirsutum
cctttggattttaggtttttcatttttatttttaccatggatatatggttaagttcacgtttttcacgtgatacaataaccttcaaaaagatcttttgttctcaattacacttttaaagaattgtacctaaaagcagcttaattattacgtcaggtaaggtgttaacttcactcaatttatatatataatttaacaataaaatactattttaaaaattagattttaataataattcgagccatcacataaatctaagcggagttaaatgagtacaataaattatgtaacaaattttaaaaaattggtattgtttattagtaaaattaacaaaggaaaaaggtggtttacacgatgggctgcttaggtgaaggtaaggaaatgagttttcttggtgatggagtttgtgggt

SEQ ID NO: 1366 - DNA, 609 bp, Gossypium hirsutum
ctcttttgtgaacttgttaagggctctccacggagttgggagaaaaaaaggggataaaatcgagcacaaatactctaggcacaatacctccatcgttgagggggccgacggctctcaatgtacgacacttagaagacttctcttagagaaagtctgacttcacctcaacaataaccatgctcaattacatactagagatggatactttaggagtgatgaagagtcagggtaacatagggctagtccacatcacagaaaaacaagtatagactgaaaatggtgacattaacatccagaaactagtagatagtaataattctgactatagtaagttagagctaatgtgcacccatcagattataataataggcggtaatttggtgggaggaagagtagatcagaaaaccttcggtggaacatctaagttggcgaagtgctttatggtcccaccaagaagaccaatgccatctaaattacaaattgataggataactcagtgaatatatttgtaatactgcaaaaccagacattaactatcttgtgataaggttaaagggaagataccaaccttctgtcagggttcctttaccaaattcatccagcaaacat

SEQ ID NO: 1367 - DNA, 618 bp, Gossypium hirsutum
tttggtatttaccagctcacggacaaaaggattccgaggaagaaaagagctccttgagtatcgatccttgataaagcttgtggaactttcagtttttgcctttcggattcaccgtaatgaatagcatcggtcagaatccaaagaactccaagtccgaacaacatgcccataaaaggaggcaaaccggttaaagccttgaacactggaacaaaaaccaaagcaccaataccaacacagaaaacaagttgccctctcggagccatttgttgagatgccaaaatattgggagaatcttgtcctttcccgtttacttcactgaacgaggaaagaaaacatgcatcatttcaacagtattttgtgaagtttaaggtaacctcttaaaactgaactttcccaacatgtcttgcccatgcaaggaacatacctagtcaatgacataagcgccaacggaacagttagagaaacaagtgaaggtattatcaaaccctgttagcaacgaaatcaaagttaattaactccacctaaagtcagtaaaaacgaaaaattggtgaacccttgagaattatgaaagaaccttcatagtctgcaatgtggatatttgaccgtgtatccagagca

SEQ ID NO: 1368 - DNA, 460 bp, Gossypium hirsutum
atttcatttttattacagttcttatcaacatctctatttatgttcaacaattctactgatcagtcatttcttcatcaaaaaatcttgtataatatttttgacgagggacactttgatgaatggttacatcaaaagcttccaacagagttctgttaatacaaaaacgaaaccaaatacaactccccaggaaaagtggaggatctctggggctttcggcattcaacctacccaattcaatcagcaatttgcaacatctcgtgggaatcaaatattaatgttgtttggtggaggaaaacaacttgtcagccatgaagcaagagtatgatcatataatcgatatcagatttgacttcaacattaaaaatatatatgtttcatatgtgagtatgtaaaaacagtgatagcggtgagattaaatattgtagcgtgaaataagaaaatgagtttaagacaccgcacc

SEQ ID NO: 1369 - DNA, 502 bp, Gossypium hirsutum
agcctgggaaacaagaatgtagatagaacaattaatatttaacatatacaaaaaaataagacaattttagttcaaatcattaagcaggaaaacagaaaagggcaccagtttaattagtactataccagtcaaataaccgagaatatactgttttggccaaagcatccctgctggcaactgcattctcagggtcaaggcttcttgtgataatttcttctggagttaccatgacacgtttgatgagggcatcttccaagctctgggcatcacacctattaatgattttgattgatgagtaggaaaatataactgtttaacaatcattaagagaatgcaacatacacgctgagaatatggaaatgttaaagataaatacctaagaagttcggcggtcatattaaggtggaatctagacttttcatccttgacgactgaggaatctatttcctttcccttggcaaaattaatgttcccaaggtgaagaatcgcagcaactactcta

SEQ ID NO: 1370 - DNA, 645 bp, Gossypium hirsutum
atcatctccaagtagtagggtaattccagataataactatagatctagtacttacagtgcagaagcacggaagtcactatttgatttttttgttcagcttttggagcctctcctgcttgagatggatggctacatgcaatctaacttggcagctagggtctcattggtagatgttcattgcacactgaagtccattaatagtttagttgccagttttgtacatgaaaaagtatatgtaagaacagaagatatctcagaaggagcttgtcttaatttcttgaagaaagtttataatacagtaatctcatttgctgcgaaattatttggcctgtcagaaatggatatagatggcaagacacgcaaggaaatgtttcctttattagccaaggagttatttcttgctgtagggcacttcttggatattgaatatgatgttattgggagtgatttaattagcttatggctcatgatactttcttacttgaccagtctctcttatttagatttaccagatcaatccttattgatttccccaatacttgatcttgggtgccagctggttaatctttatagcgcacttcgccaggttagtttacatttttcaatatatgcactttctaactgttgcagtcttgaatgacactg

SEQ ID NO: 1371 - DNA, 624 bp, Gossypium hirsutum
tgccttctctgttacatgctgctggctgatattggaaccttcaacatcgatttgagaacctttcgcacacttttttgactccactgcctcctcaatgacttcaccttcctcaagaaaggtggcttcgttcttcttctctcccctattcgtcacaggatcaccaccagaataagaccatccccaaggcttccaaaactgggtcttagtagaaaggttcttagtttcagcaatattaatgagccgttgcctaacagttttccgtcccaaaagaacatccatgcctcctaagaaccatttagcctgcatcagcaatgaatcttctaatgaccttccaaaaagatgaaccacctctgagaaaagaggagcagcatcaggtctgaccaacaatctggtgaggatgatctcaatgaaaactttctcattctcagaaggagaagctctttcagaactgggtgaggaagagcgaagtgcatccaccaaggacatgtcatgattctccatcttatcaatgagtgcttgttcatttaaaagaagccttaattcaacccactgccaatgaaacttagctggttgcaaagcatccaatgcacgaataagcttaccttgctttgaatcattctctcc

SEQ ID NO: 1372 - DNA, 403 bp, Gossypium hirsutum
ttggagttgactggaaaacaaatgtactacccaagtttcaattcaactgcttttatatatatatatatatataaactacaggtggagttaggaaatttggatggtaggatttaatttttttaaaaataaaataaaatgtttataaaaattatataaattaatgtataatacagatggatgtaagattattacacaattttttgagagaaacaaatctagactgattgtaaagttttatagtctaaacttaattcttttgacttttttttccacattgatttcattagtgaactttcttttaaaatattttttattgatattaaacattaggacaaataaatttaagttttaaacacgaaagtttttatgaaactatcatacaacttgtaattttttttcaaaa

SEQ ID NO: 1373 - DNA, 341 bp, Gossypium hirsutum
tgttgttgatatggaaacaaaactacctgttggacatcccaatactattttgacatctcgtgttattcctgcaccttcccctattcctcggcgcttgatcccagtaagcggaactgatatgatggggcagcttgattcagatggccgtatttcatcttctggaacttttactgttctgtcttacaacatattgtctgacacatatgccagcagtgagttatacagttattgtccttcatgggctctttcttggccataccgcagacagaatttgttgcgagaaattgttggttatcgtgcagacattgtttgtcttcaagaggtaatactttcagttagca

SEQ ID NO: 1374 - DNA, 623 bp, Gossypium hirsutum
aattactcttggggtagactgacctgctatagtatatttttttgtaaacgagtcaaattcgttactgatgtgaaagttaactgaagagaatcttttccataatgatttacctttcactgttgtatattggctttgatgtgcggacagatccatgattattctgttctgtttttatatttgacagtgcggcaagtccattaccctgaattgggttatattgctatactgttttattctttgttccatgcataatgatctggtagcagtttgggcccagaatcgatcatatgtgggaacagtaatttagagacactgttcctatggtcctaaataatagcttgtgatattgcattcggttatgcttttacatcctttgccctcttccatcattgaatccaagtaggtccacaagcatttgataccttcttgcagaggcactctgcaattgcacgtttagcctgactgtctgtgaaaatttagtagttgaattattggttcatactcatctgctttcgttttccttagcagattatcaaggtttaacaaagtcttttagtcatggtaaaatttactgctcctcaatcacagcacggcttgtaaacttgaagcttggaatcccatgg

SEQ ID NO: 1375 - DNA, 440 bp, Gossypium hirsutum
cttacaatggcactggttttaattatcccaaaaaacaggaacctaagatacctgcaactgataccaagtgggaaacaattgtcaaaacttcttacttgcatccgctattctgaggtaatatcaacattctttaagaaggatattattgtgttcagaaatatgagtttcatttcgtaaacactaacactcattgtcctttataggaattagtaactcacctttctgagtaatccaaaacttaaaaataaagagggctgcattcaaatacttgcactcaacatggtctgagctggttaagattttgcagcagcctaccattttcgttttcatctctcctccaggatcttttttttaacttcaatttgttagaccttgttattgtataagtttgtaagtggttcgtttctgttttcctacatcatcccatcagtgaatcagag

SEQ ID NO: 1376 - DNA, 627 bp, Gossypium hirsutum
acatggccgagaaccaaggcaaatgcttcgaatgtggcgccattgtcacccgcttgattcgagttcatttcccaatcttcaaatcttcttattctaattcctctttcgataatagcttaatagcgattgggttaattgttggacataatttttggaatttaatttaatttcggggttatttctttttggaatttaggaatacaatgttagagcaagtcctagcaccgacaagaactactttattggtaggtttatgactgggttgcccaatttttcaaagaaaaaaaatgctgagaatagatggtctctgcaaaaagatgggctacaaggacgccaagttactgatgctttgcgggtattagatttatccttcttcatctgtttcttgtatgttcctagctttcaccttaaaacgggatagctattatatggtgtctgcatactccaaattcctgaaaaaaggttgagaacattggcaagtaaatttttagagaaagttctatgaagttttttctggattctgtgacgcagacccatattttttattttggcatatcatgtaattgttgtacaagtaaagtaaaaagtagactgaagcagttttttgctatgttgcggaacaaaaaa

SEQ ID NO: 1377 - DNA, 222 bp, Gossypium hirsutum
tgagcgcactgtgtatagatccaagatccttttgctgaatgaccactcagaccggttctaggctatctattacctctgctccgcatgctgactactagtcttccttgtactggtagaagctttctgcttaaagctgacaatgaaaaatcaacttaatgtcgtcttgctcatgcatcttcatcatttagaagtttgaatctgcaatgaagttttaattaagtt

SEQ ID NO: 1378 - DNA, 644 bp, Gossypium hirsutum
atttgatattcacaaatttaaggtgtcaaattatgattttaattattgtaatatcatcaaatttgatatttaatctctttacttatttattttcgatcccttgttattattgacgtaaggaattagttggaactattaacaattcaattttaacattttcattattcatcttatgtggatttatttatatttgactttttgatttgatttttttttcatattcatattcgcaatcatatacggtaagaaatttatataatttatatcacgcttactcttttagaaatgaccccatttaaagatttatatttttgactttttgaaggagagattgcaagagcactttatttgttcttaaaggaaatgttatttgagtgtaaaatttgtaagtaaattattattgttgattactttacaactagacatttaaaggagaaagtcttagtgaaaagctgatctaagctatatataggaatgagattacaatttgatgaatgacttaaactcattggatttataaattctcattaaaaagttgatttatcaaaatttttgaaatttttcattaaatcctttaaatattaaaatttttaaatgaaccccgaaaaagttaaatatgattgattgcatcactctattgagga

SEQ ID NO: 1379 - DNA, 585 bp, Gossypium hirsutum
attttctcgacattttgttaaacttaccagggccagtttccccaaggttccaccttcaaaaagcggaggagactgtatagatcctccagcttgttctgtgacagtaaattttcttattagaaagcatacaaaaccttgggaatcaataggttagaaagcaagtgagaactgcaaagttaaattaacagatcatcaaaaaaaaaatttttacataacataaaaaatgaaattctaacatgaagataacatacactgataggcacaagcaaaattagtatttgttattcacattcttcagtataagaaatctacttttccaataactataaaagtaaaaataaaaagcttgagaaacaattgccataaatcaaataaggctttgcttaaagcacaaaacaatgaacaaatacaaattagtgcacttatcatttaattataccaaaacaatgagcacatactaatattgatgaagtgcaccataaaggatttcatatacattagagagaaattcttcagaattttgaagagaacagattattgaccagcaatgcatgaccaaaaagaagtagacagaagaaattcaaa

SEQ ID NO: 1380 - DNA, 375 bp, Gossypium hirsutum
agggagaagagatatctttccacaatctgtcaaaagtttaactatcaacactgaggcaacacagaacacaaataaccaatttgtgggattagaatacttaagattttattaatggttaatttagtattttacagtaccttactgtaattttctttatcctataagattttgtttttaaatcaagtttattagtagagtttcaagtattttctcttaagttttctacttagaataggaggtctatttctacttagaatgcttaggtttttctttcctagggtcaatcgatgaaccctatgtctgaagcttcgcttatcttttatttctgttttccaaattatttatccaatcttcacttccctgaggacttcacat

SEQ ID NO: 1381 - DNA, 615 bp, Gossypium hirsutum
tattttcttggattttgttacctgctaggtttttgctgaggataccatttcttcttttccgtttgttaagtagtcgggaatcgaaggcttctttggatacaggaagcccccgtcctaggactttccatccctttaggaaagtacacagctcgaaggaccatgttgtccagcgcaccattgacaggagacgtggagtcattgaggtttatacaaggacttacatcttactgcctcttgaaattttctgtttccatatcctttattatgatatttccttagctttttacttaactcactgttatgctatgccaatcaggaccttcatctagcaattgagattttcatagaagccatatttgatatgttccacaaggctgcatattttgtgttctccccgttcgcagctttcagaatctttggaaaatggttctcatctcctagtgctggtgataaggatattgactataatgtctcaaatgcttcagttcccactgctactcttggagctaatgatccatctcctagagaaaggaatcttacacttcaccatactcttaatactgatgcgcggacttgtcgagatgtcataacagaacttgggtaagtgcaagggta

SEQ ID NO: 1382 - DNA, 624 bp, Gossypium hirsutum
taatcattgtcaatttgatcctttgcagttgcaatttttgtctttaattttgaaccgccaccgtgagaatctcagtatgaccgttcaaaagctaatattgttgatggtggcggcggaagtggtggtgccgcggcggcgactggcaacgacatgaataaaattttagtaggcagttagtagctactagcttaagccctccacaatccatttctgttatataaacatcagccacgatcacatgatagcaaaactataaaaccataatatgaaccccacctccctatcaaatcaacgccaatacgacacgtgtcccaccattatttctccctccctatataaacccctcccggtcctttccctcttccgatttgcattgatccactgtaacaatggagatctcagtggagaagattgagggcagcacggacgtcaaatatttctacgattcctacaccgtccacgtcggaaaccaccgtatcctcaccgtcgttacctactgcgagatcaccgccggcaagtggcttaaacaagccaaaaaagctaacaactccaagtccctccctaaaacccttgtcgttggcttctccgttgaacgccaaaacgattactactcccgttacggcc

SEQ ID NO: 1383 - DNA, 637 bp, Gossypium hirsutum
  misc_feature (475)..(475): n is a, c, g, or t
cttctgcatttcctcttgaaacaataaggcacaacaccaaattatcgtttcatgtcaaaatttaaacattggaattcatgctgacagcctgtcttcttttccagtgacacctaaagcaagatcaacaagacctccaacgaatcagcgtgtccgcagtttcagaatgagttcagaaagccagctgctcctagtgagccccagactacggagatcatcatccggccatgtctcagactctgagctctcctagcctttctcaacatgttgattgcttagacacagaaacaatgtttgatctagtttgcagtgatgaaatgctttgccagatcaataattacagggaaagaaaagttcaactgaagatgaaacagagtggaaaagatagtattcaaacagacaatcctcggaacaagtgctcagagcttatcgagttttcaaagttttaagggcgggaacatgtcagcttacactggcngcaccttacatctgtaaatttggtaattgtactgaacaatcataatctttgatttatgaaagacaaagacattttttgctacaactttagcagaaacaattcattaatgctcaacacatagcatacaaattctttattccagttcaataagcagttcaaatt

SEQ ID NO: 1384 - DNA, 646 bp, Gossypium hirsutum
gggggtcttcggagactagcatacaagataaagaaagctaagaatgcccactacatcttgatgaactttgagttggaagctagatggattaatgagcttaagaccatgttagaccaagatgaaagagtcattcggcatctggtgataaaaagagacgaggcaatcactgaggattgtccacctccacccgactggcacactgttcgtgcaggtggtgatgatgaagctgaagtcgaagatgatgaagattatgatgatggtgatgatgtatatgaagttgatgatgatgaagagctggaggaggaggattgggatggagaagatgatgtggatatctttgaagatggtattgttgctggagatgacgattacatagaagaatcaaagcacaaatcaggtagtgttgggaatgaaggtagaaggaatcttaaagctcaaaaagtttctaaataggtaaacattcttcttaaatctctctcagtattcaggtttgagaggggagagcaggtgttcttgtaaggtttgtatgtttatgaaatttcatgactatttttagtattaaatgaagaaattatatttttgagacgagcaatggaaatcatctacaaacctcaagacccacacttgctatgacaacactaaaaaa

SEQ ID NO: 1385 - DNA, 559 bp, Gossypium hirsutum
  misc_feature (506)..(509): n is a, c, g, or t
aatggtaggttggatttatttaattgcatgactagttatgctttggtgatatttcttattgtaccaacaaatttccatttgacctcaattctgtgcagttaaaagtaatggaagagagaaatctgaagcctcatgattcaacccttgcagctctttcagtgcaatgtagtaaggcattagaacttgacttagctgaggctctattggagcaagtttgtgaatgcccatatccatatccttttaatgcttttcttgaagcttgtgataatatggtaagtggacataaaaccaaattgtttgttttctccctggcttgtttaaattttctcttcaatttcattgattatgcatccatgagtgcataagcaagtttttgctcatgaaactagaaaaacagtaattattcctccattctatttctgagaatgtgggaatattggtagagtaagttaatcaatcagttctcttcttttttcttttcttttttttccctctcgcacttaaannnntaaaatgtgttttaggggtctcctgtgataaaaatgtgtcacaaaacttt

SEQ ID NO: 1386 - DNA, 649 bp, Gossypium hirsutum
tatacattctgcatatatgaatagttcaaataacatatttctttcttaatccattacagtgtgaatatcactgaaggggaaaaagaggagcgcatgatgatgactggactgcacactgttgttgatatattctgtgttgggtgtggctcgattgtgggatggaaatacgtaagaactagttctgaaatttcaagttcttctgccagtttgatttcatttcaagggttagttgcatgaggtaatttcatggaacattttccctttttcctaatggcgtgagtgattctaggaggctgcacatgagaaggctcaaaagtacaaagagggaaaattcattctcgagaggtgccatatcaccgtttccttttctcgcttatagtatatcaatgttctcaaatgtgcatttaaccgtggagcaggtttaaggtgttgggtcctgatggaggcaattacttggccattcaggaatctctggttggtggaagtagtgatgctgatgatgcttgattgccatttaatcacttgttctagttgtacatatctctgcttctcctgcgcttgttgaacttttttggccttgaaattggaacaatattctgtcaccgaacattctttacaaattagtatcagaataacttcgcagagctgc

SEQ ID NO: 1387 - DNA, 611 bp, Gossypium hirsutum
  misc_feature (486)..(486): n is a, c, g, or t
ttaacaacttcttgaagggccctaagtaataggcttttttttcggttcaactccgaagggcttttttgggctgggcgtaatcgtaagaaacactgttcattgaatctctatagttccccttcttgctctaaaaatgaagaaggacttgtcggaaatcctcggttgggttggaaaaaccagcgatttcctgaggaagtctcccttttttttggggggagcagaacaaaaaaagaatgaaacaaaccaaatgattgttctagaatggttattcctcacaatggctccagtggagattgaatcctggcccttaggattgcagggcgaaatccacctttttagtatatatataaatatatatatatatatagtatatatacttttataatggatctcttttcaccgggatccaatcccggaggagatctttcatggcagtcccatccaacttctgggtcttattctatctatcgttggaataatcagtcnggggcccctcctggagatagccatgtgcgacgtaagaagtggttccccgtctggcgcagcggatttccatcaagcggtccaaccgcgcgctcccgaggcccctgactgatcctgaaatagcacaa

SEQ ID NO: 1388 - DNA, 609 bp, Gossypium hirsutum
tctttatgctgcaacagagagttggcaagatgttgcagaaatgaggagaaagatgagaggcttgatgttggaaaaggatcctgggctaagctggattgaagataagaacaatattcacatgttcacgtctggagatcaattgcatccccgggtttacgatgcagaagctgaactccataggttgcaagggaacatgaaaagatcagtaacatacgatttcctttcatgtttctagtttaacaacagaaattcagaactaaatgtgattttgcccatgatgttttatatcttcacacgaataatagtttcaaatattacttatcaaaaaagagaaaaaaaaatcctacaatgtgttctacaatgttacagtaacaaggatcttgtagcaaacaaatcaatgctggaatgactgaaaataagatcaggatattcgtcaaagctaaaaatcttgttttcctggatatcaacaacatgcgtacaagatccttgaactcaagagctaatgacattgcacttaaaggaatataatgggtacggatactgtcaaaacgaaatatgtggccccttcatgttcaaatgatcatcgcagtgaagagagtagcgtcagga

SEQ ID NO: 1389 - DNA, 616 bp, Gossypium hirsutum
atgatggagtgaaattggtccataccagttacaacaatacacccagtagcatgatcccatattttctctcgataccctttgtgaggaaaacgcagatatatggctccatctcctctggacagggcaccatattttgcctgactgtcaattctaaccggcagtgctttgacaccaagtttctgtttacatctcaacattttcagtgcattattcatgtgctggtctatatgtgtctgtgtgtgtgtagagaaagagagagggggagtacttgggcaatcaaactagataaatcatgcatggagtgtgctgcttcatatgactcaaagaatgatgcttcttcaggattttcaacagcacttacttgcacctgaaacccataaaattgtacaagttgcaaatacgtactcagattaatagtaataaattataaaatcattataaccttcactgccgaagaactatcaagtggctgcatataagttccaccaccaactttagcaaagaaaaggcagccaacttcttttacaccaaattgtaaagaaatccattcataacatatatcaaaaccaagacagacttgtggtttatcttgcatgaagtactgtttagggtagcc

SEQ ID NO: 1390 - DNA, 629 bp, Gossypium hirsutum
aattttgcttgaacttttagcccagttaagctatccagtcattttaacttgaaaaaccttaattctattattggatgtaatttttgactagtaaggttatgatgaggcaggtaatcttattgaacgagcatactgaaactcgcacaattaaacttgggcttcatttgtctgagccttgtttggacatgatgatcactttaagtactactgagcaaagcaaagttaaacaagatcttctccttctgattggcaaatcaggaaatatgtatatgtatgatgattgctcaattgagaagtatcttctgcaatgccaatcaaggtctccaccctccctcccaaagaaggtaatggtaaagatgccatttgtagattcaagcatcaccatagcaaaactcatcactgaaaacccttatgcattaagttcggatgaggtaagttaattggaatattcgttttctgttctgctgcaattgtcatttctctcttttaaaagcaacttgtctaaatttggttgctgctacatatgcattttctcgggtcttgcaggattacattctagttgtcaaggatattccatcacttgttcccttggagacaaagtcaaaagatggaggtcattcaaacacgta

SEQ ID NO: 1391 - DNA, 656 bp, Gossypium hirsutum
aagtaaaatttttatttataaatgaaattaatttttttaattttagaatttatttatttattttggtagtaactgttcaagttcctttttccccaaaaacctgtttaacattttgtctcgtctttaaaggaaacgttgtcgtttaaagtagtagtaaactttttcggcgtataaatcggatcatggcgcccttgcaccgttaacacgtgtaataagttatcttatgaccgtgtagatctattgtactagtagatctcaatcgttcattgtaccgtaaaggtctcaatttaaattttcgtttctcacgtactaacactatgtcgacggtccaaattaaacccgcatatcccagaattacccttccttctttccgcatattacatacacattttgatatttggtttctgttttcagctattcgattttgctgataagtacagaggcaaatacgacagcagcatcacagttgcccaaaaatactaccgatccgtcagcggctacaatgtaagcttcttcttttaaaaaaaagaaaagaaaagaaaagaaaagaaaagaaattgttaaacaaactatttgatccatgttactacaaaatggggtgctcatttttattgattttgggatttgaaattttgtataggacgaggggttggggg

SEQ ID NO: 1392 - DNA, 608 bp, Gossypium hirsutum
  misc_feature (54)..(54): n is a, c, g, or t
caactgataaagccgttagttgttatcgttaaagtgattatgcaatttttttanaaacaatctaaagcaattggttgacatgtaaatttattattaatttaacataattgactggattttcatgtaacattgactgtatactcaacaataacaaaacatgtccatgtcattcctttaaagataataactaatggtgttatcactttggacctactaataatataaaagtaatgggatcaacttatgccaaactaaagggactaaattctcagtttcagcataataaaagaactaaaaccataattaaacccaaattgtttccaaatggagcaatatatctgcaatgataatgacattgactatccaaatcacttatatgttagctagttgggttctatttcctacataggtcttaaataaaccaagtccacaatccacaagcaaaatcgtgcaagttttcacacaaggcattatcagcattggaaattgactgaataaaatgactaaggtctcaagaaattctgctctaaactgaacaatgtgagtatggtgcaaacatcttcttattccaaaaataaagggaaagaaaggaaatgaacctgctattt

SEQ ID NO: 1393 - DNA, 594 bp, Gossypium hirsutum
  misc_feature (430)..(433): n is a, c, g, or t
  misc_feature (437)..(438): n is a, c, g, or t
  misc_feature (447)..(448): n is a, c, g, or t
  misc_feature (459)..(459): n is a, c, g, or t
  misc_feature (461)..(463): n is a, c, g, or t
  misc_feature (465)..(465): n is a, c, g, or t
  misc_feature (566)..(566): n is a, c, g, or t
ttcttgatttaggaacttactcatttccctatcaaattttggacaaatctcaaaattggctcgttcatttagtttatcttaaggaatttggatgtctggtttcttgttgcttcaccacaatagatacttatgttgcatatgccttttttaactcttggcaaatttgcagatgattgagagtagtgctcacggtgatgaatatgatggagtggtcttctctcagcttgtatgatttaattcatctgtcatttttcaagaaagaatattgctctctgataaatggcttgacttgctactttcctggttcctttgtccagaacttgattgatttagccggatctgagagttcaaaaactgagacaactgggttaaggagaaaggaaggatcttacataaacaaaagtcttttgactcttggaactgtaggtgnnnngaannagctttgtnntgaagaaagtntnnnantttcccatgctgcatctgcactgtagtctaagggcaaactatagaaagccttgagtatgtcccttaaacagcactgtaggattacagtttctgttaagtgngcaggaaaaaaatgaagagaatcttcaa

SEQ ID NO: 1394 - DNA, 518 bp, Gossypium hirsutum
ctttcggccggtgaacgtcacgcgctggttggcttctatctcttatcttttattcattaaactttatttttgttttgtttccttttcccttatctaatatctctgttattaagtatatatatttgttggagaattgctattctgctatgctagaataaaaagaaatggaaatttctgttagaaacaaatttataagaagcataattaccttgtgaaagaattaagttgggttagtatttgattgcccatttgcttttgagttgttctgttgtaatctggtcaaagttgtcagctttatttatctgataaaattttcccttaaaagaagttgaaaatttatgttaatttctgtacatcagtgaattaattttccctgttatgcattgtatttagtgtatggaatttgattacttttttattttgtttttttaattttttttctttcaagctgatgttctgcaatgattattgaactcatcaaaagttcgttggttttttttatggagggcaggaaggag

SEQ ID NO: 1395 - DNA, 647 bp, Gossypium hirsutum
actgatctagaaacaaaataggtcagagtctcataggttttgctggcatctgcagaaagaactactcttggaggagcacgaagtagttgctgcataagctgtgttgtcaaaacaagccttcttttggatctaaaaactggcagccaatcttcaatcatttcaggctcatcctcaacctgcaattaagatcaatgtctgtaagctgagaactcttggagttttaagaaggaaaaacaaacattcagagctgacattgaacacaccttctcaatcaaccaatttgctgcatgagcccattccatttctgcgacactgtaatcaatagataattccaaaaagaacaaaaaacaataggatagtgagaggagagcaattatattttgcatgttagcaaattatcaatcagaaaattttgagcactttggaccatcaacatgtataatgttaaaagtcattgcaacaaacgggatattgactccactcgcctgatgttctgaggcccttgagaaccttgagtcacctctctatgccatggtagaaactcaaacatcatacttttgcgcttctttgctctcacaaccaaattctgatttgcaatatcaggtggcagtgagtgaggggagatgtactcgcttgctattggcata

SEQ ID NO: 1396 - DNA, 648 bp, Gossypium hirsutum
tttaggacaatttcttacaaattttatataattttaattagtataataacgaatttagtcttgaagtttacacattttgtttattaaagctaaatttcttttatatattctttttgaatttttagattttataaaactgtatccattttttaaaatagcttttctagatcaaattgacagaatatgtaaacattgaaagcttaatttgttatgatatcaattaaaattatgtacaatagattggaaaatattaattgctgtgatcaattgtcactcaccttcaaaattgaaagagattaagatgctctaatttttttagagagagatcaatttactcaatattaaaattgagagggactggatacgatttttaccaaaggctattatggtagaagatagtgttgcgggttaaacaggaaatgaactagagtggtccgggtttgggtagaccgagagggaactgggtagtttaaaatgttgagaatcgaaccggttttaacagcaaagatcagcctcgtgttccttatctctttcccttccaatcccatactcccattttattttttattttttatttttatttttgggttccaacttgaagaatttctggattccaatgagaatacattgagagggtgttgaacattc

SEQ ID NO: 1397 - DNA, 659 bp, Gossypium hirsutum
  misc_feature (428)..(428): n is a, c, g, or t
attgcttccataccccagaaaccatgttgtaggacacaatcccttcagggtctgactgcatgaagtaaagtgtgctatcaatggaaattgcttgtgaccgaaagttcagtgatagtggcagcttaatgttagagggcatgcttccgggtcggctccatgaattcttcactgattcataaacttcatactctccatcacaccccacccacaggatcttgtagccttcattggttgaatttccattcagagtcattcccacagcaacacgtgaccacactttaactgaccttgctggcaactctttaaatgattgagtcaaagggttgcagacataaaagtttctatgaccaatatcaagaaagcaaactagaccacctacagaagcaactggcagagcaatcatctttgctggaagaaaagagattgtngggtggtgccatttcttggttgaagggtcatacatggctccaacattcatattttcatgagtaatggtataaaaccagggattggctagtgggatttcagcacaatgatgagagaaactttgtgattccagcaaggaattccatttacgacaaacagagcgaaagcggaaaaatgtggcaatgggaagtctagcaataacagcttcaaaaaggtcttcagggaattctttc

SEQ ID NO: 1398 - DNA, 331 bp, Gossypium hirsutum
ttcaaaccagaataaaagaaaatttaaagaatagtcaacgtatcataaaaaattaagttggtaaaactctcgaattctgaggtattacttatattcacttgcagcaacaacattaccttttccccagctgcaagaaggaaaccggctagattgtaggcatagcctacacagtgggtgcctacagggcttttcaagctttccatggtgtcatagatagctaagcttggagtaagctgtaaatagggccagtccacatcagatagtgaccagcaataacaaactagaaatagaaatatatatacatcagcaaaagctttaacaagaaaaaaaa

SEQ ID NO: 1399 - DNA, 625 bp, Gossypium hirsutum
agttgctcaaatgctgtcccagccattaatagctcttcatagctccctgattgagtaatttgtccaccatccataacctaggcaaaaaagaacaaataattcttttgataaagccagaaaaacataaggatagattaagaaaatataaacatagatccgaactccgtatttaccaaaattctatcaacttgtgagagaaactccacttgatgagtcaccaagatgacagttttcttctctagtgcagtcataacacaatcctgcaatcataaaagttagtttgattatggtataaagaaaattaaacttgtatctgttgagagttcttcggttgaagcgttataaataagtgacatgggatgaattgaatgacgatgggaaggaagactagaacagactcggtagttggtaacaatgagtggaaatacaggtggtggttataaggtggattgaactggaggaataggctaagcatgaccgagcaatgactgagaaaaagtagagattgagagagctctagagccaaaactaagtgaagaagctttctcacattgaacaaaacagaagctgtatgtgcatcaacagcactgaaaggatcatcaagaagatagacatcggcatcatc

SEQ ID NO: 1400 - DNA, 608 bp, Gossypium hirsutum
  misc_feature (379)..(379): n is a, c, g, or t
  misc_feature (411)..(411): n is a, c, g, or t
  misc_feature (575)..(575): n is a, c, g, or t
ggtagaataatatgaattaatataattttcattttgcagatttcctttgcactttatgctcatccacactagttacttagaatgctacctcaatgaaatcattgaattgcgcttgcttctctccagctttacttccccaagcctcatgaaacatgcgcccaagaacaaaaacaccgacagcagtgtaactgcagcataagagtaaatctataagctgcaaagaacagaagaaaccataacaacaagggagaaaaataatatgcatattttactcaagaactcagggccccggggctcttttctgctgtgtgttgataagagatgaccccccccccccaatgaactggcctcttgaccctaggcaactatggtatttttntaaaggagaaaaacatataaaaaccaatctcnttgacacatcttctcacgcaatttttatatttgaataaattgtactttgcaaaaaggggcacacctatctctctgcaatatatattataaataatactttctctttttcagcactacatcgtgcacgaaattctgatttttacactacatcacaagtattcacngataaagagagagagaaaaaacaaagtatatat

SEQ ID NO: 1401 - DNA, 584 bp, Gossypium hirsutum
  misc_feature (75)..(75): n is a, c, g, or t
gaggttttcaagcatccgtgcttatcatttaaaggtacggagatattactaatggttttattttgtgaaatgtgnggagctgatcaataaagacagcttatgtcttctgaatggctggcacctggtaactaccatgtatttattcacagaagtttaatgtttcatcttgtatcttctgcatttcctattctcattctcctattccttgttggtattgtttgtttgtttttttgttttgtggatcagtggatgtgactttcttcttatcaggtgaccgatttgctgaatgcttttttgtttgtttagatgataaacctgttgtcgttatcacacatggagatttactttcaattgctgaccgtgttcgcgcccgtgtttatttgggagagctgcttggtattccacctgcaaaacaaatttttgatattccaggtgccttcatcaagttatttacatttttttctttgtaatttattgattactttttgccatcccattatttatgcaattgagtgtaaacctttaagtttgcagaaaaccatgatccagtaacagagttgacaattgtgatatgctgcgctact

SEQ ID NO: 1402 - DNA, 658 bp, Gossypium hirsutum
tacataccaaatgttctttttgaacctatcgatatgttttggcagtcagcagtctgttctgagtttaagctttaatacttaagaggcctgttcctgataacgagtccatgggataagccacctcttgtcccgcttgaagaaagtgttttgaacctaaggccagcgttgtcaaggtgcacgcctaggtgctgcacacataaacaaaagcgcctacgccttctacggctatcttaaataatccaatgtctgactttgtgacgggagcaaaggaaggttgtttcatttattgagagataaatatttcacttctttgttattttgcagtatgcacatgccctttcaaccgctgacggttataggggctatggagctgagcaagggaatcaggtataggtctttgtttcacctgttctggtttattgtaaagaagacttgtttgttagctgattactctatcggattcatttcttgaggttcatcacatctgttactaccattagttatgagtcttagacctttttgtctctttgtagccgactcatgccaagtatttgacagtagtatgactttctcccgtattagatttgttttctaagcctagttggaaattcggtggataaatcatctacttatcctgcttccagtagaccggattatt

SEQ ID NO: 1403 - DNA, 649 bp, Gossypium hirsutum
atgtttgtggtgggagtaaatgagaatacctacaatccgagcatggacatagtttctaatgctagttgcactaccaattgtctagctccactggccaaggtttgactgcattttctgattttaagcatatcaatctcatcaccaagaagggcatttaaactaaaatctgttcttccattgttttttattgaggtgtactggtctctttgtaggactttcacttctccaagattttgcttttgtatgttttgagtttgtagcagatgaaaattttatctgcctatttttacagcattatttaatttaacctggccattttccctgtgaagcatctggtttgctttccttcttctttggcagttttcctcagtttttgtgatataaaatatcgcaggtggtccatgaggaattcggtatcgtagagggtttaatgacaactgtccacgcaactacaggtatcctgtcattatctgcctgtaattcttttttgctgcacatgatattgcattttacgttaatgcggtagtttttaacatacagcaactcagaagactgttgatggcccttcaatgaaggactggagaggaggtagaggagctggccaaaatattatccctagttcaactggtgctgcaaaggtattaaagag

SEQ ID NO: 1404 - DNA, 608 bp, Gossypium hirsutum
aggtgaagcagcttcgagaatttcagcggctaaaggagcctgttcaacagacttctttacctcctttatctccatcctctaaggtagtgttacatttcaatttgacagtttttcattttataaaccaagggtaacttttgtttgcatgcttgttagctatctgctgttatgcttgcatcaaatttccatttttgagctcctgacagggaaaaatcaagaatccagtttttcttctatacaatcaacaaaaacatgataatttgtgtcgatacagaatctttgtaaaatcattgttccatatctgcatgaaaagtggacaactcaagtgagtgaatgtcaaccgagtaaacgtagtgtatgtgtaagacaaaactgaccatagttttcagatgtaaccctacttattaagcataaaaatattgagaaatgactgttgcaattttccgtaacatcagttgcatgatactgccatatttattattatttccttagtagcatatctgtgaacgcatttcaagagtgtttttttgctttcatggggttggagtgaaaaaaatactctttgaaaatcaatattgtgtgatcccaaagagtcatttcttccttca

SEQ ID NO: 1405 - DNA, 668 bp, Gossypium hirsutum
ggagacatcatggctggctctgatgccaattgatagaggtctttggggaaccacactctaatagctaactatcgaggttggagaacctgcgtccatttacaccccactagaattggcacatgacaaattcttttttttcttgactttgctgaattgaccctattcaaaaatgtgtgttagcgctgattttgaatggaaatatgcaatgtgccgttggatgtagtgttttatataggtttagttgaatcaatgacattgacaatgttccctctggatggaattaattttcggagtaaacatgagtgccaggtcaagcttttggaatgctttactttttaacactaaatgatgaattagtttgatttgtaatcttttttcaggtttcttctccaactattatcgtcgaaagagctggctcttatgcctggagacacaaaagttggagagttcgggaggagtttgcccggaccgtgacatcagcaataagtctttttgcatctactgaacttccccttcaacgggctattcttccacctgtatgcttttttacatttctgaaatatattttttattgtctcatttatcaaatgtgacagattagctgacctttataaattcatcagattttgcagatgttaagtgacccaaatcttggtgttcgtgaagct

SEQ ID NO: 1406 - DNA, 654 bp, Gossypium hirsutum
attgcctcttacaacttccaagtaaaagtaaatatatcaaaaataggagtctacacacatattacgaaccccagcaaaaaggttaatagagtttaactataagaactttaagaaataattataatgacaatagcacaacaccatttcaatcatagagtctgcaaattgctttgcacaaactaagttttccatcttccttgtacttttttccttcacaaattttcaaagttaattttaagatgataaatcatgactttatgagagcagaacaagattaacagatgccttttaaagaagtattaacaaaaagagaagtgcacttcaggagaccctcttaagatgcaattcacagtaaatttcaaaataattaagccaacacagacaaataatatagagcgtattccttatagacattaccaataaagaattttgtgatgccattgattaccaataaagagcaaaggacaaacactaaaggacaccgataggaacataatttacagtgatatacaggacatacagaaaccaacacaagaaaagtcattatagacattattcattttgatggaaaaaacattttaactaaatgctaagttagctaatttttagataaactttaatgtttacaaatcactcctttacccattatagctg

SEQ ID NO: 1407 - DNA, 653 bp, Gossypium hirsutum
  misc_feature (585)..(585): n is a, c, g, or t
  misc_feature (591)..(591): n is a, c, g, or t
  misc_feature (594)..(594): n is a, c, g, or t
taaatcatttgatgtttctaactaaatatgacaaaagacagtacgaagatcctgttatatatttacacgagaggatgcatttgataccaacccgacaatgatcatctgtcaattgttggtcagatcgtatgatttgatgaagatcagtgtccatcagttcataaacaatgtagacatcattaaagttctccctctgcggaggccgtatgatgtctttgatggcaatcacctgaagaaaaaagggactgaccaatcaaactataattccacaaccagatattactacttcagtgtagtctcatgccattattaagatgcatatacaacaagtgaaggaacgttgttaaccaaacctaagagtaagaaaccaacataaaacatgtcctctgttggccgtaaacttgcaaagatgaaagcattaatcaagccagaaaaaggaattctgatagtcatacacgtggcgaaatgtaatgtgctcgagtttcattgaagcatataaagactgataagaagaattttaaaaaaacctggttaaaaaatgctttctaatattgaaaagataaagaatggtcatgcacaatatcnaaagantgncctggccttaaagggtaaaagttaatttaaggttaaaagataatcttcccaaggaactc

SEQ ID NO: 1408 - DNA, 559 bp, Gossypium hirsutum
ttcggtgattccttcaatctaaaacgtttgattcattaaatttaaacaaattgaactcctatctataatcattggttttggtgtaacaggttggtgatcttgcagaggcgtcaaagtctattgcaacgctaaaagtagtgcttgatagggatatagaagggaattgtgtgaggaaagctgggagccatacaagaaaccttttgagagtgaaacgtgggcttgacatggtcagggtactctttgaacaaattctggctacagagtaagaactaagaacctcaatacgcatactcaattgaaactaaattgttaagctgtttccaatttgttataactcaattgtgctgctaatgaccttactatccacaataatgaccttgagcaatagttggtcatccctttatcttcaccttttctttcagatatatagatggaggaatctagaacattggtagctaagagtttaacttggggtctaatatagcctttttaattcaattctttttcttgtgttattaatgctctaaatttttttttgtaccattgactcttaagctct

SEQ ID NO: 1409 - DNA, 612 bp, Gossypium hirsutum
aatttaactaaatattttcataaacaaggaagaaagattcaatctggtttgtaccaaaggaaactggtgaatatagagaaaaatagctgttattatccaacaagaaaaggaaacaaaatggcatcaacaattgagatgcctagagcactcattcaataacactgttccaaaataaaaaccgtgcctaatgtagaacataacagaaatagataatgcccttaaattgtcaagatagtgttctttccaaaaatatatatattttgtagattactttgttataaaatgcaaaaattaaaagatacaaggctactttaaaacattcctgattcaggtagcaggatctatgcccttcaatgtataactctctgcttcatgttatcaacaatatcccgataaatattatcacttaatccttaatattataatctcatcatgttttatattattgattatttttcccctttttcttttttttcctctacttcttcgtaagcaaggtactgaagtatctgtctgtaaaaactaaaattctaatccatgcaagaagcttaaatcaatgtgaacacaaatcttttagaaatatcttgttcccattttttatttcaatcaagt

SEQ ID NO: 1410 - DNA, 629 bp, Gossypium hirsutum
cataactaaccgatgattgaagttttgtatttttgtcccaataatatattctctacattttaacataccgtattccttcttgagctttgctttatgatccatagtcaggaaaaaggactgatcatgtatagggtgaaaaacctataacaccaagagacagtaaattgtatagtataaatcaatcatcaaaatcaattgcctataaaagttaacacagtagattttaaaaatatatataaaaatactaataacaaacaagtataaattcaacagctttctctgtgagttcccattagattctgctctttacccagctcaataagcacagtacatgagatgtagaagtcaccagttttccaagtctaagaatcaacgaactaaaacatttaatgcattaaagtttatagcatataaatatgctaacaacaaatagttattcaagtgccctctgtgtgaatgcccattagatcatattctttacccagcagaataaggacatacatgagattctgaaatcaccaatttttccaagtgaaagtgctgtgactttagatcccacgacatttccagtagatttgtgcatacagacactaaataaagatttctttctttggttgttctcaagtatc

SEQ ID NO: 1411 - DNA, 537 bp, Gossypium hirsutum
aaaaccagctttcgtgctggctcttgacccataataagtataatgcatcacattgtgtcattaatcattatcgcatgttttctcaagttgaaatcaatcattttgttcatgcaaacttgtttgtagatttgggagaatggttgcttgcttccggtatgcatcaattgatgtacattcggtgtaccttccacccccaaaacttgagtttgactacaagattcaggagtggatacaaaaggaaaaagataaggtgcaaggattaacagtttcggtttcttaaagaagctgatttagatctcacttcatttgtttatttttttggttattataaataggtggtcgaccgggctgagcatctgttttctgaagtactcaaatccttaaatcaaatagctgaaaagaaaatcagcaaaggggcacctaatagtaccgtgaaatcaccagaatcgaggaatcaaatttctgaactagaagggatattacaaaaggagaaactcgagttccaggtaagacttcctttatgtattatatattttt

SEQ ID NO: 1412 - DNA, 605 bp, Gossypium hirsutum
ttgcctttgggcttgtcctcattacaaagattggagaacttggacttatcaaataataggttgacgtcactggggtctcttgagcttagcctgatgcctaaccttcagactttgaatcttcaggtacttatcataactgtggacttagatttatccctatcctggaatctcttgtgaagatttaaatgagcaattatactcaaaatgttatcatcacctgttatttgcttgttctgaccagtttgtaatactttagatggtcctaattcaaagaccttcccatgattctctagaatgcattaaatttcaatttggctaaagttttattttaagatgcatactggcatgctatttctacttaagtagcaaatgctgacggggtaaacatagatataagtattgtactatgtctaattggattgtgtatttatttatccgtaacttgtatgtcacatcatacttattttgtgtgcttggatttcatcgcacttacagttagttgtcattagtaattttcctgatatcctaagtccaatctagatgtaccagttgactaaaattttatttgaagatgtgtactggcatgcgatttctacttaagcagc

SEQ ID NO: 1413 - DNA, 628 bp, Gossypium hirsutum
ggaatcgttgcaagcttgacccagctgcatgcagtgcataccagatcagtgtattgcaaggttggtttatgatgctgataaaatcaaacacacacacatatattaaaatttaaagcttgtgctaggtttgaggcgtgatatgcttgtggctctttacgcattctacaaaaattcaagaagagatgggatgtttttaaattcatgctttgctcattgccaaagtgagtcacaggacacatggtttgctgttgattctccaagaatacacaataaggtaggttcactaattaagacaatctttattatacaataaggttaacatgttttatttccagaagcaattgattatacatgatatttgatacttttaaaaacttcataatacattttttctttgacagaccattgctgaagcagttggagattggtactttagcagaaaaataaccaaagagattgattgtccatatccatgcgataaaacttgccacaaccttataccttcacctcaggtaatgtctccgtacaacctaggtaaaactgctattaatatccctgtattaggagttagattgcattttacacattttactcgaaaaatggacaaagtgagcctcgcatgttaaat

SEQ ID NO: 1414 - DNA, 648 bp, Gossypium hirsutum
gctccaattacttctgcagcgacttacttgtaacagaaatacttatagcaagtatcaagagccatgcgatagcacgtttgagaaagtttcccatcaacaacctacggatgcatgtcaatagatagaaccattacccaaataggaacttatagtgaacaaaaaatgaactttaggtgattgatatgagagttaaaggttttctaatgctatcatactaaatcctattgactaaagtggcataaacaatatattccataaaagcagcaaaacttttaagaggcaaattggttgcttacaggatattcactagcaaggttgggtttgtaaaagtcataggcatgagacatatgactgcccctaaatttgctttcaaaaacaataggagcatcaggccctattagcatagcaattgcagctgctcctccagttggccgagcaggtccttctgcatagacctgaaaaacagaacccccggtaagaaaccaaataaaggtagagcttatataaccaatgaatatgtctccattgtttatttatagttaaatgtacagaaatgactaaaaataaaaatatcttactaatataaaagtacaagctcaagagcaaaataatgtacatttggcccctaaagtgtgcaacaatcataag

SEQ ID NO: 1415 - DNA, 627 bp, Gossypium hirsutum
gaggaatctccatcgacccaaatcatggtactgtcatctgaataaaactgatgaactagatcaggctgctgttgaagtacctgatagtattgtccaacgaagtatgaaccaacctgaaatttttaaaaacaacaaaatcattgattagtaagataataaaaaaaatccaaagagaaacataaaacgttttcttttgaagaaaaaaagaatcacctgagcaggtccagggtaggaagtgggagccattgtgatgagttagttaaatgacctcaaaacaaaacatgcagtgaagaggatgtagatctaatctaaccccctcaccccccaccaaatgttataataagtcttgaaatcctacaggtgaagtagccgaagccctagtgattgttttcataaattatttaatgatttttgctaagagtttaaatgacgggggaaaagcagttgccgatttgtttccgtttcaaaaaataaataaatacggtagagtttgagtaagacgaattgatatattgttaaaaaccttcgcaatttgaaaacagagtcaaaaaatatgaatatcacagccgtccgtttaaacccagccctttgttttttctaacctaaatcatcggctattaaactata

SEQ ID NO: 1416 - DNA, 659 bp, Gossypium hirsutum
tgtagcgggagagatcactctaacctcagggtcctccttggcaggtgatgttttagaaagtggagatttggcagtagggatcacttggtcctccttgccagccagtgctaaaggagctgtcacggttgaagttgctgccgaagctggagaggacatagaagtggaaacctctgaaggctgatttttggctatctccgcagactgtggggcatcaggctgactggatggtgcaatttgagagtcctggggctcagcctcctcacgtgcttcagaatcaagagatgacttttctgagggtgctgaaaccagagtcttcagacccatagttgtcggactcctcgggctacctggtaatgatgacagttttttttcatccgaaagctttctaggacttaatctcccaaaccgagggctgtcaacactgctattccgctcactgtcggacttttcttgggctgatgcacccatttgttgaagtatattatatgcagcatctgacctgggatccaaccagtcaacattactaaacatttcttgaactttggcaaatgcttctataggaagtccttctttctcttcaaagcaaaaattatccatggaagtaatggaagcagcagcatccatttccgagaaaagtatcttcacccaacaagggtaac

SEQ ID NO: 1417 - DNA, 465 bp, Gossypium hirsutum
tgtaagtaacatcatctcatttccatttggaatcaagttaaaaaagagttaagggatgacttactgattttcacattatactttcaggtaaccaataagatgatgcgtaacgcatctaacatcttccctcacaacacaccaatgacaaaagaagcttactactacaggatgattttcgagagattcttccctcaggtgatttcccaaaactcaacatttaggatatagttataactgtaagtaacaatattagcttggtttaaacagaattcggcaagattgaccgtacctggaggagctaccgtagcatgcagcactgctaaagcagttgagtgggatgctgcctggaagaataaccttgacccttcaggcagggctgccctgggagtccatctctctgcttacaatgccgagactccactcagcaacatgccatcccaggttatcgacaatataccacggata

SEQ ID NO: 1418 - DNA, 619 bp, Gossypium hirsutum
gatctgtctgtgagggatacaaaatctattggatcagcatatgatcgttatctccagagtgcagtaccatcttcgacttttactcatgcttatttatacttcaccttgcatctccattgttgttttctaaagcattcattaaattgcttttgaagaaactttcttcttttacttctggagaagctagtgcatttggtgggtcaggaagggctgttggtggtgcaatgcctgttcatccaatagctgatcctcccctgatgggtcttcttggatctgctgctccagatctgtcatcaaatggtcataatatcggttatagtggtcaacatccagtggatgcaattgcaaggccagggcgagataccgttcctctccctccagatgcttccaatactctatatgttgagggatttcctcctgacagcacaaggagggaagtagctcgtatcctatgtaatgtagtgcttgataagatatgttgatatattctttttatgatacggtatttttactttagtgtattgcttccaactgttggttcacattccttgattgagattatagatatctttcgcccttttgttggatataaagaagtacggttagtgagcaaagaacc

SEQ ID NO: 1419 - DNA, 635 bp, Gossypium hirsutum
gaattgattaaagcaaacagtataaaataaaacttagaagaatgaactgaattggatgcaaaataaatcttacatttatctataatctataatatctatccctgtaggcaataacttatattaagatgattgtaaaattaatatttaacctgattgatttaaaaaaaaaaggataaatattaaatttatatatgaattttggtcaaatatacattttgatacatgaactttgatttgatacaattatgtacataaaatttgaattttgattcataagtatacaaaaaacttcaattttgattcaactgcatacattttaagaaataaatatatacatttattttcatattgaattaatataattgtttgtgtacgcaatatatcaaagtaaaatgatgctaatttgataatgttgtcaataatttgtaaaaattaaatcaaatcaaaattcatgtataaaattacataaaattaaagttcacctaggacattacacattaaaccaaagtttatatataattttgatatttatccttaaaaataataatgaattaaaagaaattggaattttttaggtttgcaaattaaaaaatcgtaagtattaaggtaaaagttgggcatcacaaacagcatta

SEQ ID NO: 1420 - DNA, 463 bp, Gossypium hirsutum
tcagggacatattctggtgttattgcactcgatttttctgaaaacatgctccggcaatgtaatgatttcattgagcaagatgcatctcttttagctaggtaatcatctctacctctttaattttaaaagttgaagcagtcattgcaaataccagtagaggtttatatttcttctcgtgccaagagctgatcgatacttcattggaatttgcagcaatattgctcttgtcagggctgatgtttccaggctaccattctcgtccggttctattgatgctgtacatgctggtgctgccttgcattgctggccatctccttccaatgctgtaagtatgattaaattcatgtctcgtagactgagctacaaaattcctctcagcctgagttttaagatgataaaacatctcgataatgcagtttttgacatagcatgctactacaggtcaacatctctctgagctaaa

SEQ ID NO: 1421 - DNA, 647 bp, Gossypium hirsutum
  misc_feature (617)..(618): n is a, c, g, or t
caggctaaacgctactgtgggaaatgagaaggggaaacaatagatttgagagagagaaggtgagtgagatgggggagaaataaacaagttagtgacgagctatgccaaatttataaatttgttgtaagctactaaggtcaaattcttcattactttttaggaatgtttttgagaaatttgagtgatgggtattattgtcaaaaagtatttttgaagaataaaatgtccattttagacatgagattataaagtaataaatatgtatttaaataatgttcaaattagttaatattatgatattttagtaaaaatataaaaaaataatttattataacttattgttaatattttaatatataatattaattttaaatatttttaaataattaatattaattatttataaaatttaattagaatatataaattatatttaaaaatttaaatataaaaattaaatatttgtaattagatatttgatgggctactttaacactaaaactaaacaaacataatactatctaactaaaatctaaaatctaattactaaaacccaatattaaacttagtaattcacttaaaaagagcctaaaactaagtgtgaattttaactctannacatatattaattaaacacctatcaattt

SEQ ID NO: 1422 - DNA, 589 bp, Gossypium hirsutum
gttctgcattacataaacattttctttccttttatgtctcctttttcttgtaacaaatatcaggattattggtaattgtattataaattaatgagacaatttaagtcatcttatgaacaaactctgtgtgattacttatgagatttggcttaataaatatgtaataagctaatctcaaataaggaccacagaatcttttcatctgaaacactgatgatattctttgactttgaaattgtagatcagtttgacttatcttgatggtacaggaacttgtctttggttcaaatctaattttacttggttccagttcacttcatatattgcaaatgcactaatttttctggttactttgtacaatttttgggggatttcattgacggagctgaagttgtatctatgctagaatgcatttagctcagtgctggacctttgattgctcttgctgctgtaccgtggtttgcccgagttagtcctgctccagtagtccgtgcaatatctgcagctatttcttctatgtccagacagtcaaggtacataccattgctgtacttctgccaagcggctgaactacaaatgttaatgaggt

SEQ ID NO: 1423 - DNA, 634 bp, Gossypium hirsutum
gatacatgggcttgccaaaaattaaagggaaaaaaatttatgggacatataagaacaaaaagggtgtacaaaatattacctctaacttgaatccgtagtgaaaagcaatcttctttacatcttccaaactcaactcaattgacatatcctaaaatgcaaataaagggagaaaaaggtaagggagggagatagaatagtaaggggcacggtagcaaactggacatctgtctttacaagctaattgagcttgactcgagaaaacacgaactccagttaagttgagcttgatttctcaaaggagccaagctgagctttatttctcaagggagccaagtttgagtatcctaattcatggcttaagttgcctaactcctaacttgagttgctcgtgagcctaattgagttatttatttattattttaatacatctttttattatttttaattagtgaagaaaattttcaatttgagctcatattcatgcacaaataatcaagtttgagacggagcatgagaatcaagctcttttttcactaggttaacaaacctattgaacaagctcaagtagtttggtttttatctgaaatcgagccttttcaagtcaagcttgagaccgagcttcttactgcttagc

SEQ ID NO: 1424 - DNA, 657 bp, Gossypium hirsutum
tgaatttgacatccaaggtgctccagctttttatccttattcgctaccggagtatcaaaacggtttaagtagagctattcattcaagttccaaaccactggaaataatcgataataagtcgttttccttagttagctcaacggggcactcatttgaataccgtaatgcaggtaaggatggtcaattttttttcttcttgcttataggcaatagttaatctgagttttctgaactgtctttagcaagatcttgttcattgatacttacgaaattcaaaatattggtttttgttgagtttctaggttttccatctgccggaaacgggagccaccttcctggacgtcattgttcgtggagtaactcttatcaccccgagcctccaagtatgatgtggcctaactcaccttccatggttaatggaatttatgctgctcgtccctcggcacagcttcatggacttcctacggctcacacgctgaacactggtgtacccgtaattaactaccatgttggatcggcaccaactgttaatccatctctttgggaccggcgacatgcttatggaggcgaatctcccaaggcttctagttttcatctgggttctcttggtagtatgagaggttctagcaactttccacattctaaggagctcaatca

SEQ ID NO: 1425 - DNA, 616 bp, Gossypium hirsutum
tacttcgaggaaaggatgaattccttgagctttccatggattgttggagacattttactgaggattaaatctcggaataagtttctgaatagccgagaaattcagagaaaccgaccgaaattcgataatgtctacattaagtccccaagaaggcatacttcaggtgatgaatcatccatggaatgaccaaatttaataatattctcctgtgaatgtaaactgctgtctcgctaatttgaaatgatttgaaaggatttgggtagggaaaatcaaggcatttaaaatttaagaactgcaattttatttttatttttatttaatatataattaaaataaatctaaaaatttaaaataaaaaattaatatgaaaaaattataatgaatggtccaagattgtggtaatattttcatcttggcttcttgttttgatactctggatgataatttttttgagaagatacaagttaacatttaaattaaaaaaatgtagtattgtattcagatatattaaattaaaaatgataaattaagtaggcatagaagaagattcattttgtatttattgtcaccacaaagtaaaagttgtgtagacgttaggcgggatcatttggatata

SEQ ID NO: 1426 - DNA, 623 bp, Gossypium hirsutum
gaggaggggtattatattgtagggagaatgagatagttggtgggtgtgaaaacatattatccactaacaccaccccggagtgcactgcactcaaagaaacaccatgcttgtttgtgccagcaaagtcaagcttttcggcaaaatttttatgcttaatgttttgtttgcctgcctaagctcatgcaactcgaccaaacataaaaagtaacactagccttaggataaaaccatttcttttttctttcttttggtgggttccatatatacatatgtagcctcacattttctttttttctttttttttataatattaaaaaataaaaaataaaagcatgcaggggccaaccagctttgggtcccataaagttgcatcataatcatcattgatcgcccactatataatcaaaaaaagctactcttgcaaacttaagagttgaggaaggaggtttgtatatagattatgaaagtaacatatataggcaaaacatgtgcgtttacttccataccattatcctttgtaaaagcattggcaatccattccctccaagagccatgtctttcttccaacttgccttgcattttaggcttacgccaaaactaacttcaaccctgtgtttattggg

SEQ ID NO: 1427 - DNA, 628 bp, Gossypium hirsutum
ctttatgcatgtccaattttgttgattttgcatcaaaaacttccgtttacttcattaagactattctgcttgaaaattttgtcgatatcggatcaatgttcttttgcaggtgatagagtatgtccaatttctacaggagaaggttaaaaaatatgagggttcataccaggaatggaattctgagcccgcaaaattaatgccatgggtaagatcttgtatgctttctatctacggggtttagcagttaatttgcagtttaaaactatgttgtccggactcaggtttctcagatactagtatgggtatgtttgatgtgcatgatattttactgggctaattacttatggggaattcgatttagcttgttaatgatgtacatgatattttactgggcttaacactggatttttcttttacatccatttaatctcgggactagcacattatttattttcaaagtgttaatttcttgtgttagtaagttacatggttttgaaggttttgcttactttattatagagaaatagtcactggcgtgttcagagttttgtcggtcaacaacaagctattaaaaatggttctgatccggggtcagcatttgccgggaaagtcaatgaaaataacatca

SEQ ID NO: 1428 - DNA, 458 bp, Gossypium hirsutum
ttttgttccacaagaatcttgcacaatggcagttcaattttggtttaaatttgtaagaggtgtttgtattcttttaaaacttaaaatttaatcctgtattgttttatttacaatttttgatcccttcatctaattttgcgagattatgaaattatgaaaaaggtaaataaaatttttagccctgatttttacatacctcgtaacttctccctaactcttaaataggaagataatgtatcagtacactaaaatctacattctcctacactaacaacaatatcaatgtcaatagagctaaaactcaatctacaattctttctcatttaaatttaattataataaataaatattaatataaaatattttaaaatttattattaaaaaataaaatagacaaagtcaagttgagccatggttgggttgattgagatgaacggactaccaagcccatccatacc

SEQ ID NO: 1429 - DNA, 405 bp, Gossypium hirsutum
  misc_feature (402)..(402): n is a, c, g, or t
ctaaatgataggccctcatagtagatattctgattggttgtaatcctgtttcgggtcagttcaaatcgtcacatgcatctaagattggaaaacaatattcaatattggcttaaaaagatacccaataagcgcggctaaaaatatcaaagaaaagctccttaatcccagtgaaggtccacctgattttctcctgtagacaaaggtgaactaatatgaattaatacgtgcatgatgtttgagagagacagtggtggatagagggagtcacctggagagataagcaactggtgccacagctaaagttgcgacggcttgcctgtaaacgacaagaactggaggactcatgccttgcaacatggctgctttggtgacgagtgcaacgcctgcataacctgataaaanaaa

SEQ ID NO: 1430 - DNA, 593 bp, Gossypium hirsutum
attgactgagagatcaaagattttgtctttggttagggctaaagctgcagaaaagaaaatcgactccaaaaggttctttacatttataggagatatatgtcaactttatacaaagggaggtttgtgctgcaatgtaatagctaatgctgccaactggtaagccttttgtatatataacatacttttctaatgtctggtagctaagtgaacaagtacgatagaaacttttaggtagaggaactttgctagtagttatttttcatctttctggatccttcgggttcagtgatatagaacaccatgtgcactaatgctgtagagcttatcctccagaattaataatatctaagaggaaagatcagttactggttttaactataatgttgtggaagttcattctgtctaccttgatgatgttaactatgagcataccaatgtctgaaatcaaggaatgaaacaatttgtctaacttgattttagaccctaaaaaaccttccggcaagttcattctgtctgaaatggaatctttaatcttcctactttaggatctcacaaatagttagatcagatatccaatagctatggaagtattc

SEQ ID NO: 1431 - DNA, 633 bp, Gossypium hirsutum
attttgatgtccggtaatgacaacactctcattcttataaacagacatgtatgaaaccattgccgtaattggcgactcgtacttggtgtaaaactcaaccacaacatccccattccttaaaaacacataaacccttcctttttcatctcccacagcaacatacttgctaagtccctcgtaatcacgaaatggcaaaacatttatacatgttggatcagaatctaatttcacagctgacatgaactgaaacctttccgaccaaaagggactgtatttagtaactgaaacagccctgccttttcccccatctgcaacaccaacttctcttctaacaccatatttttgttcagtaatttgatctttctttccaaaatctgaagactccgatattttcgattctaatctagaaactatttcactaagatttctaactagttcttcgagtttatgtaacaaaacttcttgagggataaaatcatgtggactattagggtcaggttcatggtgaggaatccgatcatgtcggtgctcgttttcgattggtccgttagagccagcgaaaactacgggaaaaggtgtagaagtgaagatgaaaagaaaaaggaagagataagacttgcctttgatgggata

SEQ ID NO: 1432 - DNA, 606 bp, Gossypium hirsutum
agtgattaccactcgatggtgtaggccctcttttgcctctttttattttttttaatgattaataatattattattaatctctatcattcatcaccgatccgatctcttccttccttattatctaaaacatagatcctccacctttagtggacgaagccaacaccgtcgcttcgattgctccatctttccccatgacttctagtaattgttattcatctatttatccttttcctattgacctaaacgaagatgatcaacaccaacaccaccagcttttcaacttaatatctcaaccttcttcttcttcttcttcatcatcttcttcttcgtcgccttctacttcacttacttgtcctttttccttcagcccaactgttcaacaccagcaagcagctttctatcagagcctaccccagcagttccatgatgatcaacaagatcaggtatatatataatcaccacttcatgttatctttcttttataacctagggttttctttgagtgactttttaggggaaataattattgattacttgcatatatatatgtatatgatatacaggaaaaaatacatattccacaagatggaccattgaggagtgact

SEQ ID NO: 1433 - DNA, 612 bp, Gossypium hirsutum
ctaaatgctacaaatatgttaatccctaatcctttttacttattctccaattcaatttgttttaaagataatgaaataaaagaagaccttttgtcttgcaagtgtgctccaattaatatccttgaagaaaacatgttgcttcacctatcagaaatatttaattagctgttaacattattttgaatcgtagagaggtccctgtgaagggctctaagcacttacctcgctggctcctgtggctcctagcctttgaactggattttctgttaacagcctgaaagagagtaaaacaaaaggtttaagaataaggaaatcttttccacaattcctcaatccgcagaaggactgaatgccccagtcagtactataactaacattggggtcaatatggttctgacgtattccattgactatttatcatgatcaatgaattcttccttttacggatgaagctttctttgtttccttttttttctttttttcttttttgaagaaatgacaaccgttctttatttttctctgtttagttgcatatcttaggattgattcagtcgtacttccaaaagacacatttaatcaccaaccaggcagggttatttggattccattcac

SEQ ID NO: 1434 - DNA, 627 bp, Gossypium hirsutum
atttcacacctttttttctggccaaaagaataaaaatacatcactgttatatattgcttgctaatacttttcctatgtataacacagatagatctaggtgcttcctcttctgttgctgctggaatgaaatggactaagtagtacctagtagctcttggagcccctaaggggtaaccactgtccttctggtaggggcactagcgcaggcaagatacacgaatcatattgcatgagcacaagtgatcagaccatggtcttttgtccatccagactggaacaccaaaaactgccgtctcaagtggtctgattgctttcttttcaagcttggatgtcttaacaagctagccatctgtgagcattctagtcatattcatgttgatggctgttgcacttcttgtgaggagatactatataactgcttcctcgataggaacttcatctgactggagattaaggcctcattattggacaggttacatagtaacaattccactttggttcctggggacgttgggaatatcaattttctgcccagctgaaggcaccaatagttcaggggggtcccaagggttccatgttctccattcgtgatggggtatttgaaccttaagctttaataagatttgg

SEQ ID NO: 1435 - DNA, 616 bp, Gossypium hirsutum
atcctggaaacgggcccacaaagcatctgtatttgcctttacagctttctcaatgctcctacccaaggatgcttccaatcttttcccttctttgttaacaggagcagagacaattgtgttcatctgcttctgcatttccttctgcatgctaagggactgcttggtgcaacaaaatcattatattaagaaaattatatcaaaaatgttaacacgcacatgaatgcacatgtataaagaagaggctctataatttttttttctaaaagaaaattttttcttcaaaaatttgtttatgtattctttttattaaaaaaaccctaccttctcaagcaagtcctgcatggctagcaattggggcaaaaaagcatcagctgacagagccttggaactacaccctggttcattagacgtatctgtggaattatatgcgcttgctgaaggggaagatgcgatagatacttgagaatttttcttttgctgctttttccctttagcagaagctggagatgcagaaacaatgacagcagtgtcagtttcactgacctttggagggacatctttaatcacattctggtcatccccatcaccagtattagtaagtttatcttcttgaact

SEQ ID NO: 1436 - DNA, 455 bp, Gossypium hirsutum
  misc_feature (8)..(8): n is a, c, g, or t
gagagtancaatggttcgttccctggtccttcacacaccccatacagaatgaatcccaaagacgtgaatggattctcgaaggagttgcagagattgggtttagatgatgcagcatcggcggcaaacgaagcggcaattgagcctgagaagatgaacatggtaaacaccggaagtaactaaattaaagccagatttcttcaccttttttttttttttccctttcaaccaattttttttaaaaaaaaaaaaaggcctttttttttcgggtttgaaatttttgggtaaaaaaattgggccccctttaaaatttattttttaaaagggaaattttaattttacccctggccctttttttttttgggggaaaaaagggcctttgggggggggaaaaccaaaacgggatgggggggttttttttgaaattttaagggaaaaccggaggggaccccccgggg

SEQ ID NO: 1437 - DNA, 506 bp, Gossypium hirsutum
gcttcatgggtcgtgggttttatttgatagtttttttcctttccttttttcttggcccaaggtacgaggagccaaaggtccaatatttgaagatggacccaatttcgacatggcattcaggcttttccatggatgtgacggagtagttccgctatctggacaatcatccttgcgtattgagaaagctgagaccgaaacagccccaccaaagttcaatcctttggctgcaaaggcagccaccattagtctctcatcctttggactgggagggcctttcagttttgatgcattttctaataagtggaacaatcagaaaggaaaagggaaaggaaaatcgtccaagaaagagtcttcttcacaggtaatctaacatctgatcattgaccgtgtctgttgatttgcgggtagtagtttggaaaaatgtcttgacgattttggattattattttgacatcatttatgctaattttcagggtggaaaatcgaatcatgaagctatgggcaat

SEQ ID NO: 1438 - DNA, 611 bp, Gossypium hirsutum
attgaccacctatatttgtcaatgacactaaagtcaattcactgataaaaaatataagtatttacttgaggaatataaaccattactgtggaacacaacaccataaactataaacaatttggggaagcaagaaaacattcagaaaactaagacctaccgtcggacacttgactcttctgtctcaaacagcattctaaaccgcatgcctacagaaatccgggtgtgagagatagctttaacatacttggcaagaggaatgacaaactctgaaggactagccctgcaatcaagctactgttaatgaacaagtctttgttgtactaagcatcagcctttctcaactagtattaggtagttgaccttgggttgtaaaatatagtaaaacggctattggttgcagccgcatgagctgcagcagcaagaagaccaatgtgcatgctatcacttgataaaacagaagaaggcataacagtctgaggacggtttgctctccgtatacccaacaacaattgattcttatcattcctggtaagagaaccaaaaaaacagaataggaatcagaaagattattgactgtttagcaagctcattgatcagtaacacgacagaaa

SEQ ID NO: 1439 - DNA, 650 bp, Gossypium hirsutum
cctttactcatcaacagagggaaggtatcctacagaagacgaccttgtcgaaacaagcttgcttagagaaccagtaaaagccgaattctggccaagacagagggcaaaaacatccaagaatctagcagctgtaacctacaatgcaaaagacactttttagagacaatgattaaatatgtataagcatgtctttcaagtgaagcactttcagattttccaggtgcaaactaggaggtactacaaactattatcaccaaacaaccagatatttaatattgaatagtataacatatatggatctctatttgataaatcactgactacaagcaactcatacaccactgtatatgtactaaagtaacgatggaaaaggcacatacaggagattggaggtgatgcaacagaaactgaggaccagagtaatatatcactgtaagcaattgctgaacatgtgaaagtgcacgtgattcatcactcccaagcactgtctttggaagcttttcaataagcctgttttaagaaggaacttataagagaatgccttcaaaaaggagtaactcactttgttagttaaagctcaacattatttcacaagtataaaacctgctaaaaattgcagcaatgtcatgctctacatgatgtttcccaga

SEQ ID NO: 1440 - DNA, 625 bp, Gossypium hirsutum
  misc_feature (61)..(61): n is a, c, g, or t
tctgactgttctttgactcatgcggaaaccatataatttttctatttttccttgttttggntttcatttacttgccattatttccttgcagagtaacccaatggcaagatggcatgtttgtcaaggttcaattaatagcattgctttctcccatgatggggcatacttagcaactgttggaagagatggtatcaactcaaattaacatcatctgcattttttcgctgtttttcttttctagcttttttgaactttgagtttctctctttctacttgctgagtgcaggctatctgcgagtttttgactattctaaagaacagctcgtatgtggtggcaaaagctattatggtgctctactatgttgcgcttggaggtgctctgttctctttttcaaagctctattcttttgtccaaacaaatttgtgcattcttttaaatatactgggttttcaatttgtcacgttctgttctttgtatatgaaatataaaccatcacctttggagaaaataaatggtggtactaaccaccatggccactgaacagtatggatgggaaatatattctgaacggaagtgaaaaagaattggttccagtttggaataaggaataaccccaaattgtgg

SEQ ID NO: 1441 - DNA, 629 bp, Gossypium hirsutum
gattgaagtctaggctatttggactcggttacaaatgttggacacatggatattagagcgtctttttaaggtaatcctgtcaattgggtagggtagacaggttttggatcgggtcaattcatgctttaattttactgatcagttcatgttgtttctgactgaagtcatttgggattctgtcatttcgtttttggttcatttcgggttcaagtcattcgggtttaagatctggtttttcgagtcaggggttcaggtttgacagattcaagcagttgactttttaagatcaaattgagtttcggcttaggtagatcggattgtgtttttgccttcagattaaaattaacaggtctatctgaaggtcatatccccatgcccatacctgaatatactggtgcttcaagaaacataattgacaatcactaggcatcaaatgcttcaatcgcaagaggaaaaaagcagaacctaccaaatgctaaagcctattccaatagcagcaagaccagaagcaaacagtgtaataccattaacagcaaacatgataactacatagttgtagaacgcgggtcgagctgcaaaattttgaaatgaatgtcaataagttaatagattagcatgtcgatgcagtc

SEQ ID NO: 1442 - DNA, 660 bp, Gossypium hirsutum
gaactgacatcttactaagtacttgtcctataattgtcttctcttttttggatagaaagtgtaattatctttcattttaattatttgttgtcgaatcagatagagactcgactttaggaaataggaagcgtttgtgattgacaattagatgagtgtgtggggcatatattttcaccaacgatatcattcatgcatcgagagtcatgctgatgcatgcatgtcgaagctaataaatgatcagctcagcaagcccaacaactatacaaactagtttttccaagcccaacaggccaattaaataaatggctgctttgttcgtaccacccgatgtgagcatattggacctatgtctctttctccatcgtcggagcagttgcattagatgtcggaacatcaaattcacaaggacataacatcgaatcggttatatattggtatcagaaatcgcaactttagacaggaacatcacatgaattaattactaatgtgatctgctgttgtgacaaaagttaagcagctgctgaaatggcagatcaagaaaataacatattaatatatttcaaccttttctagtcaaattccttatgctattcgagatcaaatcgtggacgttacaaggatttcgatcgactttgattcactgatggctgatgtaggaaa

SEQ ID NO: 1443 - DNA, 929 bp, Gossypium hirsutum
  misc_feature (186)..(188): n is a, c, g, or t
  misc_feature (737)..(737): n is a, c, g, or t
  misc_feature (743)..(743): n is a, c, g, or t
  misc_feature (887)..(887): n is a, c, g, or t
  misc_feature (916)..(916): n is a, c, g, or t
aagaattggaattgaggataagaagaatacccattgtaaaggcacccacgaaatcaacacccgactttcactttcgtagctttgataaaggcttctccaccacaaacacaaaaaataggaaactgacatcttactaagtacttgtcctataattgtcttctcttttttggatagaaagtgtaattnnntttcattttaattatttgttgtcgaatcagatagagactcgactttaggaaataggaagcgtttgtgattgacaattagatgagtgtgtggggcatatattttcaccaacgatatcattcatgcatcgagagtcatgctgatgcatgcatgtcgaagctaataaatgatcagctcagcaagcccaacaactatacaaactagtttttccaagcccaacaggccaattaaataaatggctgctttgttcgtaccacccgatgtgagcatattggacctatgtctctttctccatcgtcggagcagttgcattagatgtcggaacatcaaattcacaaggacataacatcgaatcggttatatattggtatcagaaatcgcaactttagacaggaacatcacatgaattaattactaatgtgatctgctgttgtgacaaaagttaagcagctgctgaaatggcagatcaagaaaataacatattaatatatttcaaccttttctagtcaaattccttatgctattcgagatcaaatcgtggacgttacaangatttngatcgactttgattcactgatggctgatgtaggaaaacagaaacgaaccacttacaaacttatacaataacaaggtctaacaaattgaagttaaaaaaaagatcctggaggagagatgaaaacgaaaatggtaggctgctgcanaatcttaacagctcagaccatgtgagtgncagtatttgatgc

SEQ ID NO: 1444 - DNA, 613 bp, Gossypium hirsutum
  misc_feature (609)..(610): n is a, c, g, or t
cggctcaatgccatttgcctcacaccattgagctattagactacgcaatacataattgggcgtaagagcagggctactgagggtctgttgtgtctttggacatgttccgtgaccttgctccagccatttctcaatgcaagaacgttcataagtctacagaagagaataaggaaacctgttaaaaatatagcacaaaagtaatggaaaacaagatttcagcatctgcttaaatgtgcaatcatccaaagtacgcatttgaagacacaagtttcttaaaaacaccttttagttagcatctgacttctgttgcaacttcaagtctagttacttaaagcaatttaaatagagaacaaatctatgactagaaccgtttcatgaactatcccttcgccaatgcaagatgctaggtgtatagccaaacaagtttagcaagcaaatttaagcatttacagacagacatttaagtaaaggagagagaagtggttttcatttttcaaggctggaaatgatctagaaataagaaaaaagattggtctatcggggcaggaaatctgcaacaaatgtacctgccctgtggaaacaatgacagggtccttcatcaactccagnnata

SEQ ID NO: 1445 - DNA, 395 bp, Gossypium hirsutum
caattcattgagctgctgcttgagcttgacaacctcgtgatcctatcggcatgacataattcaaataaatctgaacagataatagtgcccaaaataatttcaaagtaccccagaaatccataccttcacttgagattctaaattatcaagtctagccttctctgttattttctgcacttgctgattatccaacaatgactgcattaaaaggaagagaataataagataggaaaatttggttagactgttgtttattttgctgggggcagggtgtattattgaaattcttccaatgaggaaaaagtaatttcttctttgatccggaaattcaacatatattattaagttccaagacccattgttaaaatgatggatataagtaaatttggttacca

SEQ ID NO: 1446 - DNA, 614 bp, Gossypium hirsutum
acaggtgtacgtagaacagaacagacatttctttttgagattcacacctccagaccacacaacaaaaagtttacccggaggaaagcttttttgcaattttattaaacttatcacgttgaaatatcttttgattcttttcacttatagagctgttctcttttatttgcagtacgcattaaaactcctgtcagaggataaaacagtttaggtccaatttagttacagccaactctatcacagcttgaagtctctttccaaaatactgctagatgtattccctattcaattacttgctgacctcagagtaaaaaaataaacatgaaactaaatacaaaccaatacatgcaaattaaaagagaacaactcatctgccctcctcagaaaaaaaactaataaatacaaaggtcaaacaagaaaagccaacagacctgcgctatggaagtgaagcactcaagcagtggaaagagatctttgtcagaatttggaacctgatgccacttcgcaataagtggaggcatcagaatttcaagatagacgggctgcaatagacaaaaccagtagagagaaatatccctataagaaaaaggcaaacccacccaaggaaagaacattat

SEQ ID NO: 1447 - DNA, 659 bp, Gossypium hirsutum
ggtagaagcatagatttttctaacagtattggttgaaaatgattttgggcaggctgagacagccatgaggcaggcaggaaaacctggaatgtcagatgaggaggtgcatatacatatttacattcaccaaagtttatatatatatatatgttcccttttgatatctaattcaaaaactgtgggggatattgacaggtgaaagattttgtttcacgttacctacctgcttataaagcttaccttccaaccctgtattctgaaggaccaaatggatcacatccaaaccatctcctactcattgaaatcgatgaagccagaaatcccatcttagggatctaaatcatttgttgttgttgatgaatatcagtttcggatccaattttgatttcttggatgtgtcgtgtcgtttaactacttgtaaactaattatgtcatgatccacccatgtgtttgcaatgaatttgagatttgtaaatgagaaatgtttgaactctatgcccttgacagtctaataaatacagaacggcccactgcttgaaatcaagctgtcattggtatgaatgaatatatattttaatatgcttttgggtggctgaaaatgcgtcgcacagtcgctctacttcacttgaatatttgaagagaagagctcatccgcaata

SEQ ID NO: 1448 - DNA, 655 bp, Gossypium hirsutum
cattttgcttatgaaatagtaatcaaaatatagacacaagatttttttccaacctcgacatcgcaatatagctgagtgtatcgagaatgaaaagctttgaagaaaaggggcccttcagtttgaggaaggggtaaagaagctatgttgcagcggccatgcttgaatgcatagcgaatggaatcatctatttgatgtgattccgacttaactaccagtgtatggaaccggccacacttttcatcatcatgaaaagttccatcaacatcccccgtcgagtctataacttcaaaacttatattttccagtgtagaaccagcaaggcagtgctcaggtatctgagaaaacattatagtaaacagaaaagtttatggaaatattagcaatgatgaaaatgaaacaagagtgaataattactgacacttgatgatattcgtagctcccttttctcggtttgaaatgcttgcttgaaagttactttatcaccatgtaaaatagatagagacactgcaggagcaaggcatgcaggaaaaaaaatcagctaaaagtatagttacaactgatctggaaaaattaatagaatttgaaactaacaacatatgatttatattgaaaggaaattcactgtcttttcaatgggacaactttgccaagaaac

SEQ ID NO: 1449 - DNA, 607 bp, Gossypium hirsutum
attcttttgcccataagcttgaatggtaaaaaacaaggaaaaaaagttttactaatacttggacatcttcttcaaatagtccgcataatccatggggacatatccttcatatgcctctgagtgggatttaagctgccaaaacaagccattgtagtgaaagctacatcaggatcattaaatatcttatacctcaaaaaacaaatttaatgttctgtgtgatccagcaaaataaaaaactaattccaggacaacaaaccttatttacaacttgacgtctcacatttttgtgattatctggtgtccgatatatctgatctgacagtgcacggaactggaaaccaagaaattgaccataaatattgttctagaaatgcaagggttaaaccacaacataaagacaacacacctgacagttaccatctccttggaccttgagctcatcaaaaccgtatagctgcaacctggatacggaaagaaactccattgatgtaaaccttcatgctaacatatagaagaaaaacaaaaagaataatcacctgtttaacaacctttcatgatcagacattgcttcatcaattgaaggtatttcgccattgattctagggaa

SEQ ID NO: 1450 - DNA, 632 bp, Gossypium hirsutum
atgggccagagttaccaatttttaatttcggtgttgtggctgctgcaacaaagaacttttatgaaggaaacaaacttgggcaaggaggttttggtgctgtatacaaggtgagcttctttagtttagttaaaaaaaaaatgtgtgtaatgttattgaattgaatcgaaggtaatgacggttactgtttatgtttttatccctagggagagcttcctggaggtaaagaaatagcagtgaagaggctttcaggaagctccgggcaaggcttagaggagttcaaaactgaaattatcttgattgccagactgcaacatagaaatcttgttagactattgggctgctccattcaaggggaagaaaagctgctgatttatgagtatatgcccaataaaagtttggacaatcttctttttggtatgttccttgttatccttgtttagtggtttttgtaattgtctgtcataatttattaggctttgtagttgtttgattgtgctaacggttgctttctgataaactttctggcagatgcaaccaagaaagcagagctaggctggagatcccgcctggacattatcgaaggcatcgcaagaggacttctttatctccatcgagattcaagactccgaata

SEQ ID NO: 1451 - DNA, 610 bp, Gossypium hirsutum
tttgccggtattcattccatctctccaacagtgacttctaaagcctgcaaagaaagagatggtcaacttaaaataagtgatcatcaactcctccaaaaccttgattaacatttagcaagaaatcactgccaccataataaaatatctgatactctcttgagtacaaacattagtgttctcagtcaagatatatgcataaaatatgaatggaaatgaagttagaagtacactttatcataacctgagcatagtacatattatgttcaaggacataggaagtaacaaaagaaaattaataaacaagtcagaagagaaaaagtcaatgaccaatagccaagaggcccaaatgtaaaccaagttagtcaaaagcaaggtacagccaaggcaatatgccctaaggtcatcttcggctcccctaaaaccattcactagagacaatgataacgatcatattattttaagtaaataaatatttagagaacaatatatatcgtgtacgttaaataaatattatggtatagccgtaagtgtcaaatttcactgtacatggattttagtttgtagattacgtaatggcatataaagttaaccttgcaattattcaaccata

SEQ ID NO: 1452 - DNA, 619 bp, Gossypium hirsutum
  misc_feature (576)..(576): n is a, c, g, or t
tgggcaaacacacagcctgtcataaaagcatcataaccagcttcatgcttggctccagagttccaattagaagacctgcaaattaaggctatgttttagtgtgaaagcctaaaaggacatccaagttgctactcaacttggggaggcagcaagagtagcattaatgatttgttattaatgctaacagccattacaaagtgtccatgtttagataatttgccttcggggggtgatacagagtaattaaatctcgtaaatatgaaaaagtgagctaatattaagccatacaattcaaattgcaaaactagacagaacttgagggggaagaaaaaagggaaggaagaaaggaaagttttaagctactatgataaaataaatcaagggctttttaaccaatttactttagagagtttgggaagcaaaggcaaacctcatttcatccacgtggacctcaaccttaacacatggctcataagacagaacattacgtgtaaacccgtgagctatctctgggcataataatgaaaatgctgaggataatgatgtgctagatctcttcatctttcgttgtaatgngtagtcagcattcaaaagtattttggtgtcaatgatacttggg

SEQ ID NO: 1453 - DNA, 600 bp, Gossypium hirsutum
tcagaatattatgtgacttcaaggatgcctgccaataataggtgaatttcagtttttcatttaatggatgcatgaatttaaggaaaaaaccttgtcttcagatgccatgccacagaacaactaaaaatggtcaatgataataatatgcatgtgatgtgatgttattccaatactcatgatcacttctgacaaggatagaaaataaatactcacaaaaccccagccacttttggtaaattcttgacctacaaccttgaatgagcactggcttgagagaaaaagctcaacatacggacgttcatcaactacagcagcgacacctccatttccaggaccacgtttgagtgccaaagcataagcttcaggtgatccaagagatacaagcctagatctagatatgttaagttcctcacttagatatcgctcagcaaaagagccttcttgatatccaataggctcattagtagctgccaagctttgaattcctttaattgaagaagataaatgctccactgtcaggattgacgtcagacttgcagtgtaactggagttgattattaaaaccacaaagagccatacaagcaacactaaacggccaag

SEQ ID NO: 1454 - DNA, 555 bp, Gossypium hirsutum
  misc_feature (508)..(509): n is a, c, g, or t
atatattcaaaaaaatttcttaatagtttttcatgtgcttagaagactttcggagagtggtatgcatatacctatattcaaatatgcattgaatatgagtgtcaaatacgataaccttaaaaatgaaaaatgcaacatataagatatgcttagatagttgcaaaattatcattgaatgaaatcttagatctaattgtttaggatattttattagaactgtgatgccatgatagaaagctcaaatgagtacatgccagccataaatagaaaatgctagcaaacaaaggatgcaaggagacagacgaaagcccacttgtagaaagaataaggtaatgtgaacaaagaatcaaacatgataaaaaggaatataagaaaaatattatgcgatttcattagaaatttggaaatcaaagtaaaaaaaaaaatcattaaaaagaggatgagtttaccacattttcagtggtggcagtcaatcaaaaaatcattcaaaagtgattcaagcttagcnnaagccatgatgacccttatgaggggttttcagtcatggtttccagg

SEQ ID NO: 1455 - DNA, 550 bp, Gossypium hirsutum
  misc_feature (392)..(392): n is a, c, g, or t
  misc_feature (541)..(546): n is a, c, g, or t
tagccacttcatagataagaactgtagaaaatatagaatataagaagcaattttaagcacccaaaactgaaatcaatagtgcaattaacgaaagagacactggagaattccggtttacctcgacctgacgctgcaacgactgcacatagttgataatttcatcaagcataagtgctttgccagtcacctgcaacaaattttattcacaatttagtaaattcccagattaaaaatgtctgaaaatggtgtaccatcttcaaactcaccttattgcaacctggaacaagatcctgaaggaacttcatcctttcacttattttctctcttcgaacctggataaatacaagattacaaaaggataaacagatgaatacaaatcctaaatacccccngcaatgaatgactaaagatccttggttttgaagtttcttactctttcagcaagactatggctatcagttgcttgaccccttctggccctgacatggatgtagtcctttggcggcgctggtggcttgggattccctttatttttcttgcnnnnnngcca

SEQ ID NO: 1456 - DNA, 626 bp, Gossypium hirsutum
actctattaaatcgttgcaagaaatgagctgaagagctcaccagaacagaagaacccatgatcttcttcacaaagcccaccaagatcatttccttctggaatagatctgtcaaacctgaccccaattttggaggaaccattttcttcaaatgcaaggactactttgccccgaaaaccaatcatcggtcccctacacacaagaactactcaaccttttgcagaacataatgaatgcattttatgaagtttggccctagagaaattacatgtgtacttgctactaaagggaaaactgaccctggcaaatcaaagctgtaggatataaagatgacacaaatataccttaaagcaggttctagagaagaaaatccagatggcaatgcggaacctacaaacttaaccctatcacctaaaattttcaaataaatttcatttagaagtaggtgatgttccatcaacaaattaacagtttaggaagctaaggcataataaaataacaaagccaactctccagtatcattccaaagaaatgccatacctttcttaaatgtatagtttttagatgttgcagtagatacttcctgctttggcaaagcttgggagcccagtgaaaaaccaccagttat

SEQ ID NO: 1457 - DNA, 621 bp, Gossypium hirsutum
tacgccatatgatgcttctagcagacgtgatgacatttagggttggtttttttgcttacacagattgcctcctacttagcaattaaagaacagtagtgtttcttttccattattctttctataaatgaatatttagatgacattcaaatttacaggacaatgtataacggcatttagattattattgcatcagggggaagttcttggcatcacaagatttggaatccaaaaaatggacaaaagtatattgatgctggcttcatttgagaagacaggtgatcacctttttaatgcttctgttaatgggagggatgacaagattgagggggttaccgagtgcatcatcatgggcatcccgatgcaattaggcactggaatactcaaagttatccagaggtaagcaagcaacgcattttctaatattctgttttattgcactattatttttttacggtattctctgggcaaccatcaacaaattagattctctagtgaagtagtaaggcaatttgaggaagaaaacagcagaaatcaaaagaattagaactgtaaaatgtgttagataaaagttggaacgttagagaacctataatagactttcttgcatggactttctagcaa

SEQ ID NO: 1458 - DNA, 636 bp, Gossypium hirsutum
gaaaggtggtgggagtaaaaagtaaggaagaagaagtatggaggaaaaggatactaatgggagaaaagtgcaagcctctgaattaatctggtgaaattcagtatgatgacaatggcattttgttaccagagttcttcccctgactacctactttgatgatggctggctgatgataattttttcctctcgattgttttatttctttatttattttgatatactttttctgaagtatggaagctgtaaaagccagagtatgtttatgattctctcttattcactgcattaagtctgcttaacaatgaaatttggtccatgggtaagaattattgacaactatttcaaaaaaggaaacaaaatcaaacttacaacagggttttattaggaaataaattcaatagaagtcgatacagccactgttttgaaaaagaacagcactccaaaggttaatacaagtaaataaaactagtgaaaaactatcaatcaagtaggaggattatacaagaattggggcattcttaatcattcagggttttacctttttgggatatatggaacactaaaaagtaagaacctaataatctacatttcataaatctatctttgtaattgatctggtgtgtgattgcttgtgga

SEQ ID NO: 1459 - DNA, 638 bp, Gossypium hirsutum
  misc_feature (631)..(631): n is a, c, g, or t
atcctatgtgctctactcattgatgctatttgatatcaggttcccctactcgctggtgcattgatgcccctttgtgaggttttcgggtcaactgctcccaatgtttcgtggactcttccaacgggggaagaactgactagtcatgcggttttcagcaatgcattcactattctactgatgttatggaagtttgatcatccacctgttgaacatgtgatgagagatgcaacaccagtgggatctgaacgaagtcctgattatctgttgttggttagaaactctaaattatcagctttcggcaaatcagcgaaggatcgtttgaaaattagaagaatgtcaaaaattttaaacttctgtatggaacccatttttatggattcctttcccaagttaaaacgctggtaccggcagcatcaaaaatgcattgcttcgaccctatcagggcttgtacaagggaccactgttcatcagattgttgatgcactcctcaatatgatgtttcggaagataggcagggctgctcagtcttcaacttctacaacttccggaagtagttgttcttctgcatctggagctgaggatatcttggcaagactaaaagtgccagcatgggatatcctggaaggagctncctatgt

SEQ ID NO: 1460 - DNA, 605 bp, Gossypium hirsutum
caattaaaagtccatcaggtttctctttcatacttgtataagttattgatatataagcttgcagttgatattgttgtttacttgggctattcatcatttgttttgagcaagctataatttaatttgcttgattatgtcacatcctattgtactgaaaattgtcatctggttttagttactcccttttttcaatttgctttcaagttttaattctgacatagtaaacctggatttcatgagttctcatgaaaatatatgctattgctcttgattgggtctagatacatcaaaccattctcatagcaatatttttacccattgactgatattacaacgctttatgttattttgaacatacagaaggggggttggggagggtgcgctaagaaggggtttttttttttttttttttttcccccttttttgtttcgggcttttataaaaaaatttgtttaaaatttttttttcgggaggcggcaaaaaatttaaaccccggttaaaggtttttttggttaattttttgcggcgggaactgggaattcattttttggggaaaaaatttatacatccaatccaaaaaggaaattcggggaaaaagggttttg

SEQ ID NO: 1461 - DNA, 635 bp, Gossypium hirsutum
agtgcaggctgtgacagtatacgaaaaagtaaagctgcggcagcatcagcggcaatacccactctcatagacattgcagtcccgattgcacgcagaaaatgcaaatgcatccaatttcgaggaagctacatcaacatccagtaaaagcaatttgctaagaactacatgaaatcatgtttgatgccagaaggcatcattttatattcaaatatatgcagtgaaaagcgtttcactcacccttataccagttgcatagtcttcagctgcccgaaggagttccacaagctgtacagcagcatcaagtgcatccggggcccatgatggtggtgcttctagaagtccaagaagaagtctttgggtggcacttggagttgcaatggcatagtacctaattaggagggagaaaaaaatacatcatgacggacacttatactagcaactaaacatgtcaggcattcaacagtgagataaactccttcaaaactttcaaacaagatctactttcctgatataaattcgggagtgcttcactcaatgccctgtatgcatggcaaagcacagtacttacaagatatgaccatgtacacctactatagaacaaatatacttaagcaaatgtgttcgagagctcttta

SEQ ID NO: 1462 - DNA, 504 bp, Gossypium hirsutum
cagtccatggctcacggatccggaaacttacgatgtgatcatggttaggaggagcgtatatgcccgtgttgactgtggttcgtctccgagtaccagttggaggtggattaggtatgtttttgaagccagtcggaacaacaattactggcaaacctacgagatttccgatgcatactcgctcccaatccgttgcatttccaatgaatgcatcaacattgaagttttctttcacttcttggattaactttccacgagctctttgtgcctgtggaacattataaaaatagtgaaaatagagggaaaaaacatcacgagaaaaaattaaaaatgattctatcttttctctctagatttcggattaagcgctatccactccagtgctaaatgactagacgggctacttttagacctaaatccccgatttccatgcattcctgctgatgttccacatcctaaatctccatatctttgaagaatggttccgggttcctactcctacatggg

SEQ ID NO: 1463 - DNA, 507 bp, Gossypium hirsutum
  misc_feature (7)..(7): n is a, c, g, or t
ctccaancaatttctctcgctacacccatctggttacttcttagatccctcaagacctatcaacttaccaccttttttatgttttctagcttggtccatacttctttttttcctttttcagtttttaatttatttagattagcatccaaaagtcttaatttttatgggtttcgttttggttttatcttattatgtttcttgtttgattcagtgtgtttttcttttttaaaatttgttctatgggttttgcctgaaggtgcagatttggtgactttttgacgaaaaaaaagtggggttgttggaaatctgtggtttttctctgaaagacaccagcttgaattacttttagtgctttttagcctctgggttagttgggcaaattcatttgctttttgaattatctagttgtcactgaacttattagaagatgggatctcaagtttttttaagtactttggatctctttttatgatattcatgaattaggcaaatcttacaaattggagg

SEQ ID NO: 1464 - DNA, 345 bp, Gossypium hirsutum
tactgctcccatcctgtgttgtacatggagtgcaattggaaaaccattagcctctgctgataagaatggggttgtctgtacctggacatgatccgcacgggttgcgcatggaacaactcggaaagctgaagtagatgtttgatacaggtacattcattcgttttaaagctttttcataaatttgaagatctgtagtctcatacaaatgtctatatatacatatatcaaacataagcgtcgtaacatagttgaagtgtaaattattcaatcataattatgagaacgaagttggaatcagttgggtagaattttagagttcatctttgggataaaaggaaggtgttg

SEQ ID NO: 1465 - DNA, 585 bp, Gossypium hirsutum
attttgttatttgtaaagagaagacattttattgacacttaccggattatatatatttcagtttataagtgaaagttttgtttaccactgtttttgaaccattagattgtctcagatcagcttgagtcttatatatcatttttccgggttcttgtgtgaagcagagctctttgttctcagtttttgcacggtgctttgtttttgatccattttgttaattggtttctgcttccctgttctccagatatatgttcctacaaatcctcgtggtgcagaattgttacctcctggaattgtcgttccagaatctgacctttacctgcgcaggttatggggcgaacctagtgaggtatgatccataggttatatttacatataaacatcatcatccttctgctgtctttttctttcaatatcttcactgagtaggaacttttttttcttttaatatcttcaccgactagaaatgttacatgcagcttatcgtgttctttccaaattcaatagaaaagttctgatgcatgagggccattttgcccctttatcactatcattgtcagttttggaacatacacccttgcaaaa

SEQ ID NO: 1466 - DNA, 613 bp, Gossypium hirsutum
  misc_feature (52)..(52): n is a, c, g, or t
  misc_feature (409)..(409): n is a, c, g, or t
cttgctctctgcccattgctgttgtaacattttgttatttgtaaagagaagncattttattgacacttaccggattatatatatttcaatttataagtgaaagttttgtttaccactgtttttgaaccattagattgtctcagatcagcttgagtcttatatatcatttttccgggttcttgtgtgaagcagagctctttgttctcagtttttgcacggtgctttgtttttgatccattttgttaattggtttctgcttccctgttctccagatatatgttcctacaaatcctcgtggtgcagaattgttacctcctggaattgtcgttccagaatctgacctttacctgcgcaggttatggggcgaacctagtgaggtatgatccataggttatatttacatataaanatcatcatccttctgctgtctttttctttcaatatcttcactgagtaggaacttttttttcttttaatatcttcaccgactagaaatgttacatgcagcttatcgtgttctttccaaattcaatagaaaagttctgatgcatgagggccattttgcccctttatcactatcattgtcagttttggaacatacacccttgcaggg

SEQ ID NO: 1467 - DNA, 433 bp, Gossypium hirsutum
tttctcttttacatttttttccattattactataaattttttgttgcagaaaacatggggttctcattgaagtttcattgttgccttatgtctgtcatggtgttattgcctacactgtgttatgctcaggactatgtgaagtccagagcaacttactatggcagccctgattgtttagggactccaagtatgaacattgctccttatttatttatcattatcgtattgcttggactcttcggtctttgacacatattcgaacatgaatacgtgaagaaattatgcatggctattcaatgtttatcatgttttagctaacaattatgtgatgaattttagggggagcttgtggatatggagaatttggaaggactgtgaatgatgcgaatgtggctggggcttcttacaggctctacaaaaatggaacaggatg

SEQ ID NO: 1468 - DNA, 568 bp, Gossypium hirsutum
ttttcaaaactttcctttttcttgggtagagtgtattcgtctttaaaaattccaaaaaatatttttgtggggatgaaaggactcaaagtataaaattttaccttcctccattggtttcttggaaactctttgtacatttagtttggtaggttgtgatgttaggagagtgtaataacctaaatttgcccggcccgaaaaataataaacaaagaaaacaaaacaaaataataaaagtccttttacagtagcccatgtacatagcccaattagtttaaaacccaaatacccggttacacccaacccaacacctaaacacggcccaagggggcccaaatcattaacagaagacagaaggcctagggtttcagaaaccctgggcaccgcaagcgtcagacaaaggatcttaaattcacgccgcaatcggtgtgccaatcccaccaccggcagattcgcatcatcaacgtacgattgttgcccattctcttgtcgtcacctgcaaaaagagaaagaaacacacaacaaatatggcaaggaatcgaacaggggaatgcaccaaacttgtaaacag

SEQ ID NO: 1469 - DNA, 627 bp, Gossypium hirsutum
taggaaatctcgctccaatcattaatgaattcacaaccagacagatatgaagcaggaaatcattagatcatctataacaatgaaaatgtttcatctaaccatacaaatgctcgtcaaaataagcgagctctataaaaatatgtaccattgacattggtaattataagcctcaaacatcagcttgcgcgcaatacttatgaccatgtcgatgaaagtattggaataccaaccaaaaacaagatttagcataacaagttactctaaaagattagccacggaaacattcgaaaactgtctttattcttgagacagatagaacagcagatcacctttcttctgaatagtaacttcttcaaagtctgaagaacttttgtcagtattggtagaatgtgtcttatcaacatgttgtccctctttgttatttactgcttcaccccgtgtcaatgtagaaatatcttctttcacatgtgttttgggatctactggtacagttttatccctatattctagaaggagcaaaaatcaaaagaaaataaaatttcatcaacttggcattaatgtatgctgttaaaaatattgtcttacaatgcagaatgccaaaccatgttgcaatccctatgctgaaag

SEQ ID NO: 1470 - DNA, 608 bp, Gossypium hirsutum
ctatatgtccgttcatcgttcaatacgcagtttacaaaagagaaaactaggtatgaattatgatcttcttgtgcatatacattcatcaagcaaccgaaacccaaaagaatcgaattatggttcataatttgatagattttagattctatttcccagcttcctactgaagctgtaggataattcgaggaacagaattgatttgtatatctgtgcactgttcattgtaaacagaaacaattgtgttaaatatagacattttgtaagctggtttgcgtttttgctttgggaccaataaatactatgcaaattatatgggaaacaactcaatatgtacagccatcaatggtcgcagcagtgaaccgaaaaacagtgtcccgatagaccaccacctagcgagaaagcatttactcatctgcatggtccactcaaatcttggttctcgaggccacaacatgtgagcccacatgtaagagtgaccactgaccattcgaacactataatcaataagtgaaacatggtgggtctagcccaaaatccatggggtgggtcattaactgagtaaagaaaagaaaaacacacacaaagggtctattttacagataaggctc

SEQ ID NO: 1471 - DNA, 643 bp, Gossypium hirsutum
aaggaagcaaatgacatggttgtgcgcttgtttgttaatagcccccttttttaagtcatagaacatattgtagttctattttttttaaagagtatgaaagctcagccattggcatctcttttgcagcatgctggagaagtatatggggagaaggcaattctagccactgaagtgagagagcttcaaagtcgcttgcacagcttgtcagaagaaagagataaatccctttccgttctcgatgaggtattttaggaacaaattaattcgccatctagttgataattagtagaaaatcttgtcttgatataatttgctttggtatggttcatttgtctgtttagttatatgtatgtgataaattatcttgatcttggttgttcaatatgtttatccatgctgttgggcatacggagaagttgaaaaattttacaaaaaaacctttgtgcaataaaccaatttttggttgacttcatctattttgagataaatcagccatttcttgaaacagattcatcactgggtaagttttctagagatttgtacttgatcatcctttgaattaatcaattatggtgtatttaacaaggaacatgatgtttccatgaaagactttgttatactcattatttttacctgtatgcat

SEQ ID NO: 1472 - DNA, 641 bp, Gossypium hirsutum
gatgtggcagaagatttgagcaatttccacaacaatgcacacctccgcaaataggggaaactcaatcttcgaatcatttctttaatatgacaagaatggtaaatatcatttgatatgaaatacgagcgagcacaatcaaatccaccaagagcgccataaacatcagtaatcagacaatgatgagaacctaactcactgatatcataatcttgtttccgacaacatgaaattacagcctgaaatcagtatatcacattcagaaattttgtagtgccaaattagagttactagtagtttttttcatagaaaaacaactgctttgaggaaaattccgtacagaaatatgatccttagaacaaatccgtaaaagaaaacatcttttactgtttggataaagccatagaaatatcttcctagaagtttagaagttccatcattatttcatattgtttcattcgactagaaacattgtccataaccagattttgttgtctgcatcagacaccagacaatccaaaagaatattttttttctaaaaatgtgtaaatagaccaaaaggtatatgaagagaggtagcggcaaacctgaaccacagagacaacatagaagagatgcataagggataacagggactcctcaca

SEQ ID NO: 1473 - DNA, 465 bp, Gossypium hirsutum
tttctggtgtaggtggctccgatcacaagaattgtaggagcaaccacgaaagtaagtagggacacttcccaacagcatatagcagcaataaggattccagaaaagaatgttgcaaagcttgaaagaaaatggcctagctgggaaccataagtatgttagcagtatgtgaaaataagctaaaccaaggtgaatcgaatcgaatgaataatctatgtaccttctcccctattgcatcttgtatgatactcatgtggtaactcattccactaatgattttcccactcgttatatccgaatcaaatgctccaatctcctggcttagcattgctctcaggaatgctaaccgtagtcgagccatttgtctttcacttgcatacatccagcatccgatctctgcaaaactcgaaaccataagaataaagcagtacatgggagttctatggagtctgaatatcatattggcag

SEQ ID NO: 1474 - DNA, 659 bp, Gossypium hirsutum
ctgatgcttcaagaaatgaagatgaagaaatggatgctaatgctgacaatctggtattcctcaacttagttgagccatctggtatgataggtcatgttcttccactattttgtccaagtcttagccaatttgatccaaaaaccacccttcatcgattcaagcacatgtcaaaagccttaaacctaatttgtttctccctaaaatgttcagtggaagaagcaaagcatatattatatgttcttgctactccaatttccatcaagaaactttttgcaacaaaaagaaaatattaatatatgaatcatcaattaaaatgcctaaatattcaaggaaaaattactcgttaacttgcaatagttttcagcacattgtggattaaactacctctcactcataaaaaccttgcaaattctgaagcacttgggaataatggcagcccaagaaagagttcagcaactatgcagccaaaggaccacatgttaatagctgttgtatatctaatcaagtggtcaaggttcaaactagaactaacgatcgagaccaaagaaaaaaatcagaattagggaatataatcatcaaagacaataatgaatcacaagaactgaatattttaagtaggcattttctaattattactgccaaaggcttgaaacatgagt

SEQ ID NO: 1475 - DNA, 498 bp, Gossypium hirsutum
tttagtactatcttttgcttatggggcggcatactgatgttttttgggtgatcgttttttgttttattagtttataatcctttgttgaggactcattgtatgtattagtttcttgaaattgaaacatgggtttgcataagacatcattgttgcataaatcctactttttggttatgttatatcaataattgtttctttgatgcagttggcatgttgtggtgcaaatgcctggcggagaagttgttgatcctccccattctttgaagactaccgaagtgtgtgatgttgatcaggtagtgaatttctctgctctaaatcctctgttttaatccatccacttccaccgggggggtaagttttaaccaatgaaccttccatgtttaatgaatcctttgaagggtaaataaagtttaaccactccaatttaataacctttaacattaaggtacctaatttgggaataatggaaatccccctttaataacttaaaattacttg

SEQ ID NO: 1476 - DNA, 410 bp, Gossypium hirsutum
atcgtaacttagacttgaactttgtttttatttcttatatttcgatcggacggataattgtttggattagaaatgattgaccttgtactaggttttactgacaaatatattagtttgccttggatctaagcgtagtagctcaagtagtgtttgtggaagtttatatgctaaatgatggatgatgattcggagttttgaaaattttttactttcattatagttcgaactacaactgtcaatttctaccggaacccgaaaactcaacttgattaaccccaatctaaattcaaccaaatccgattttacaggcaacaacatgaaacctttcaacccaaaccgacctgaacttgagacgtatttgaaatgacccgaattcgaactttgatccagacacagaatcaactcgacat

SEQ ID NO: 1477 - DNA, 646 bp, Gossypium hirsutum
ctgcatagactgaggatcaaaattctcatatgtatcatcctcgttttgccaaaggtctacacctcccatgtagcttccaatgtttgcaacaagtaccccttctgcatcctgtatagattttgaatagcatcatgacatttacagtaagcgtaatcaatagttatttgcaccattataacgatttcgcatcaatgcataaacaatttaacaaaaaaaaggaaaagaattttatgatgggaaaaagggacagcagaaggaacatgttgcaaaaatcatttccaaaaaatgagacacaaatttgagagacaatggttgataaaaccaagagagtcagataaaaaaacccaaaacagcttttaaagaagttttcagttagaagcaacagttgcgtatttgatctgatcctttaactgtttttttaacatatacaaacatatgtgtgtgtaaaaatagagaagttaagaaagaaaaaactcttctggacaatcatcacatagtgtccagattttcacaaatgtaactaaataaaagctagcatcaatacctcagggacctctatctcaacaccatccacttcaactctaacttgccaaggaaagtctgcaaacgttctatccattatactctttgcaccctctcttgcata

SEQ ID NO: 1478 - DNA, 668 bp, Gossypium hirsutum
  misc_feature (639)..(639): n is a, c, g, or t
  misc_feature (644)..(649): n is a, c, g, or t
  misc_feature (652)..(653): n is a, c, g, or t
  misc_feature (655)..(656): n is a, c, g, or t
  misc_feature (658)..(664): n is a, c, g, or t
aagtttgtcataacattaacatcagtaaacaaaactgtgatacattatgagctcaggggcacagcttctgagctgaatgattaaatataaaaatgaaatatccttcccatttccaagaaaccaagcccttgtttcattccttaatttctgaaaaaaattaagataaagaaatgaaccaagggatggtctcacacatgtgaaagagatactgtttttaaatacatgttacttatatggcgaatcggatcaatgccagagcacctgcctgataggaatagttttgcaattaatacagaacaaaaaacactagttaattttaaaggaagagagatgcgatgccttcttgattgaagcagggtttttgtacggattgaccacactattctttttattcacacatgagtaatgttcattgggaagaacatttttctctctgtcatgacaaaaagtattacttgggccgccattattgctcacaaacaggttttcttatcttatgtcgaagggcctcatttttatgaacctttgactggaaggaactttgtaccaatctgtatgtatgtatgtatgtatgtatgtatgtagccttttttgcaaaaatgttgggcacgttttgccaggcgtatcattgccaatttncctgnnnnnnatnntnncnnnnnnnattt

SEQ ID NO: 1479 - DNA, 644 bp, Gossypium hirsutum
ctatcgacatcaataaaaaaagttctaaattctaaaagcctgctacattgtccttttatcggatgttgtttaaaagcttttggctgaaatgtacctgcctggccatctcttttgcaaacattttaataaaataaatgaaataaatcaacaataaaaaagaaagcatccaattgacaataggaaaaaaaatagttggagaacattaattaaaagttacctcccagataaattaatgaaattggtttcatgctccttaggtgtgtgagaataaacaactccttttcctttaccatagctagccacattcccaaaattttgttcaactttaaagctgtttagggattgtttgttaacttcctgtatcttgtccctgatagctatattctggggagagatacagccattttgaaccaatctttttctcccaactgctcttggtgagacaaaagaacggtgagatgcaggcaattgtttttccattccacgtagggacccatgggaaggatccaccccttttccatgatccataaccaaccctacacttttaaattctatgccatctattttctcctttcctttgcagttatttctggattttgcagaactgtttgcagagttatgaaagaaagaaccaccaattctgg

SEQ ID NO: 1480 - DNA, 740 bp, Gossypium hirsutum
  misc_feature (33)..(33): n is a, c, g, or t
  misc_feature (35)..(36): n is a, c, g, or t
  misc_feature (433)..(433): n is a, c, g, or t
  misc_feature (480)..(480): n is a, c, g, or t
  misc_feature (634)..(637): n is a, c, g, or t
  misc_feature (646)..(670): n is a, c, g, or t
  misc_feature (672)..(676): n is a, c, g, or t
  misc_feature (679)..(679): n is a, c, g, or t
  misc_feature (681)..(700): n is a, c, g, or t
  misc_feature (703)..(710): n is a, c, g, or t
  misc_feature (713)..(714): n is a, c, g, or t
  misc_feature (716)..(722): n is a, c, g, or t
  misc_feature (726)..(728): n is a, c, g, or t
  misc_feature (734)..(735): n is a, c, g, or t
ataattagcttaagatgcaaactaagaaagaangnntggtgcagcaccaaaagaaagggcaaaccaaggaagatttctaagcttctcagaattgcaagaaaactggccaagtttcagaaaactagattctctggagacacccataaggctgataccctgcctatactttctcctacttaaaccctggtcaacaaaaacaaatttcatactatttaatacagataccaacaataaaagaaaggtattaatatctcagactgtacagcaagtttaaaactcgcaggagcctatggttgatagttaatgaacacaaccaaaactaaaactatataaagattttttgaggcatgggtgatcacaagtaagacatactcacaaaaaaaaaaaaaaaaaaaaggggggtttcattttcaaaaaaacggggaaaaaaacnttccccccaaaaaaaagaaatttttgaaaggggggaaaccaaaaatntaattttttccttttaaaacccccttttggtttttaaaagggaaaccaaaaaaagaattttcccttttggaaaaaatttttttttttcttttaaaacccaaaaaccccttttttaatggtttcccttcggggaagttgaaaaaaaaaaaaaaannnncccccctannnnnnnnnnnnnnnnnnnnnnnnngnnnnnggngnnnnnnnnnnnnnnnnnnnnggnnnnnnnnggnngnnnnnnncgtnnngggggnnggggg

SEQ ID NO: 1481 - DNA, 652 bp, Gossypium hirsutum
agtgaaataattgcccgacataacttctaaattgaactttaaaaagcatatatatctcagaagagtgaaacctaattccatccatggtattcctacacaatgtataaaaaacattaaccaacgaagataagcaagtagtgaagagaatagtgtacaaatatatccaacttctaaccccaaacacaataatcaaaatatttggataaatgattttcgtattatctaaagaaagaagtaaaataatcaaattttattttctttacttttcactaaattttctcatttaccaaacagggcgatgacatggccagtatttatcgaacagttaataagctatgtgcagcaagaaaataattcttgacggctttgatttctcagattgaagaaagaagggcaataaacgaaaatgagaatggaataggttctgacctcagcgacagtgggcagggcaagaatctcggagaaggcaaagagggaaggatgtgacgtcgcttcgaggattacggaaccaagggcggttcccttctgagccgacgcttgctttacgaagttatcaattaactcagcttgattttgctcgatatccatcttcaaaacttgacccctccgagaccacaccaggagggggggaaagggaagagaagattaaaca

SEQ ID NO: 1482 - DNA, 624 bp, Gossypium hirsutum
ctttggaataactgtgatcattcaggaattgctgtcgtggaattccgtaaagactggtcagggctacacaatgccttgtcatttgagaatgcttatgaggcagaccatcgtgggaaaaaggactggggtgccaataatgatgttaagtatggtctttatgcttggattgcccgtgctgatgaccacaagtcaagcagtattattggagaacatttacgcaagactagtgacattaagaccatttccaagctcatggaggaagaagctaggaaacaagatagacttgtatcatatttgacaaatatcctcgagactaaaaacaaacacctaaaagagatggaagcaatgtgttccgtaacttccgagtcactcaaggttttaatggaagaaaaagataaccttcttcaagcatataacaaaggtgtgttttagctattgtcttgcagtttaagttttatcatgaaactacttttattaataaaaatatatacattatgtgcatccatgatccttggttttattctgtttttgaccgttcaatttcattcgcagatggtagcttgcatcaggtcttgtacatgtcattactatttttgtacaatactgtcgagcattaacttttat

SEQ ID NO: 1483 - DNA, 635 bp, Gossypium hirsutum
gtgatggcgatccgcagaaacgcttgcaagcaacattacaattggcagcagctcttcttcaacaaattcaacaagggaaagggacttgaactgctgtgggattcaacttcgatacgttgggtaaaatttattactttttaacaactagcttcatgaaatttcaccttgttttgtattctatggttcgattcacagtcttccgaaggattcagctgatcatctcagtttttagcactgtgctgaagggatttcattctcagatacttgaattgctatacgttcttagaaatgttagtgatgaagcctacttaaatatgtattcctgttttacttgagtaacaacttgtaatcctgccatgttgatagctaccttcaatccgctaaataactggtttttttttttaatttttacttttgaacaggggtataattgaaatagttatgctctcaagtcattcaagtttagcttaaaaaaaaaaatgaattcaatttaatcgttatcgagttgagcttgaacagcttgagctcattcatctgagttaaaatctctttgcacttcactaacatgtaggcctaattattgtttgctttctgttgaactcttttatttataattaaaattaaaaaaaaaacct

SEQ ID NO: 1484 - DNA, 515 bp, Gossypium hirsutum
ttgcaaggtcatgtaactttcgcacgaaactggctgctgacgttaattttggctgatgcaagttctgcaaaagttaaatgaaaatgagaaaaaccagagaaatgaatttcactgaatgactttgaaaatcagaccaagaacaaaggagtcaaaagccgtttaatcggatctgcgtgaagcagtttggcacagaaagagtagattctgaaagaaagttttatgtcagaattgtattactagattggtcgaccaagggtgtcattgtagacactcaaggtgatagaattccactgatatttacaaggaaaatgcaggaaaaacaggctccctatactgtatcaacttctggtttggagtactggtatattacaaggatatataacaatgaaaaagtgagtaccaggggaggcaattcggaacttggttcgccaggcctctcactctccaagtgatcgtaatctgaaaattcagattcttcaggtacatcaaagaactcatccggttcttcgtttaga

SEQ ID NO: 1485 - DNA, 662 bp, Gossypium hirsutum
ggaagtatcgagagcacgcgtgtcaaaaccgatcatctgcacttcgaaactttggagttttcaggacgagcttattatggtagccgggcaatggaatcagtttggagaatggatttcgagatgatcatgtctgtcatatccaacactcttgcaattgtcttcgtagtacttcaaatctttcatgtgaggaggctccctgctgtttgtccttcggtttcatttctaatgcttgtcatcctagccctgggacacttgatgcctttggttctaaatctcgaagcaatgttcaatcaagatagtgaacgaactgtctgggcaagaagcggaacatggctagaaatgaacgaggtggtcattagagcagtcacaatggtggcttttctgatgcatttccgtcttctgatgctctcatggactgctagatgttctgagggaaagaacaagcccttgtggattgcagaaaagagggggctctatgtatgccttcctgtatacatagccggaggcttaatcactggcaccacaagacagcattcgtcatactacatagagcagaccattttaggaggttcaagagcatatgctggtttgatccttgatgcctttcttttcccccaaatcatcttcaacatgttcttaaactcgagagaaccagctctttc

SEQ ID NO: 1486 - DNA, 649 bp, Gossypium hirsutum
agttgccatcttaaaaaaaaatggattgttttttcctcgccttatagtagcttgttgatgcctattaagagacatttgacattttctatgaccttgccccgttttacctttttgtgcctattagaagattcatttcaacaattatattttctatgtaggattgatagtaaccaggagctattttttatatgtatttcaagtgctgtttgttagacttgaaatttattactttgttgtcttcagctcttaagaaagttatggaagtcttagaatacaaatctcctgttaggattaaatatttacatgcgtggatattatctataccctgcaatttgttatcattatctgggggaaaacaaatctagaaaggggaactggcctcctcctaacttaaggcatctggcaggatttgcgtcaactccgaaaagtgctctgaaatgctatatgaatttatagaacactttgttaaaggatatgatttttatcgaaaattactaaatagaggtgctaagggtatactttaactaacattttgtagaattttataccagtaaagcaaattcaattttatgttttcatttctatattctttcaatttacatgcaatgggaatccagtttatctctttatctttgaccttggctcttta

SEQ ID NO: 1487 - DNA, 640 bp, Gossypium hirsutum
ttatttatgattttccccttcagacactatcctcgtgggctacttccagcgttgaggaggttgcttcaacgggacctggcattcactttttccaactctatgtgagtttgagaaatcatctttacactttttgcatattgtcttgcttgttagtgttgtgttgtatcgtctgaatcatcaaatgatcaatggttactgcttatttgttcaggtatacaaagacaggaatgtggttgcacagcttgtgagaagagccgaaagggctggtttcaaggcgattgcccttacggtggacactccaagacttggccgcagggaagctgatatcaagaacaggtgagacatcaaatgcaagcaaattaacttctgaaagtgggcgaaagaaaggagggtcttagttttggtttcattgtttcaccgtgcgaagaatatgacagtattggatttcttgcacatactcgcttgcaggtttactttgccaccatttctgactttgaaaaactttgagggtttaaaccttggcaaaatggataaggtaaattctattttatccctaatcagtctcagtcattcattatctatttactttacctgtttgttcatctaattgtggagattatctggcagaccgatgactctg

SEQ ID NO: 1488 - DNA, 382 bp, Gossypium hirsutum
  misc_feature (372)..(373): n is a, c, g, or t
aaatatgggaggaccaacaaagaagtattgatgctagattccaagagacccaaacttgtatagagaaagtgatgcataaggataaaaaaccccaatctcttgcagtaacttctgatgaaaacactcccaaccctactaccattcctttccaaaggagggatggtaaacatccaatagaagtcattgtgattgatgatcaaaagagatttacctacaagccacaacaatcagggttgctgccaaagaagatatttgactctggttacactccccaacaaggtaacacttttttcagaatgaaggggagacctctgactcaacaaatggattctctacctttagtccaaggctaagaattgaaaataaattacnntatgaccaa

SEQ ID NO: 1489 - DNA, 642 bp, Gossypium hirsutum
ttttgttttaccacctgcatgctaactagacaacccaaaggtatttatataagcttcaatctgaagaaccaagagcatggtaatgcaagtttagaaaggacattgacctccatgaaagtaatcttggtggaaggttgcaagacctcttcacaatctaaaaacaagcagaacaaaaagggagaaatagaacagaaaaaccgtggtgagtaaatcatccaatcatacatataatgatatattgatttagctagaattcattcagtcttaccttcaataaatggtctcttggagagtatgctcggcataaatcctggtggaagtttcttattcgttcaaagatatctacttcaggaaagggttccaattcctgaaatagaatactccataaataagttcaaggatatagcttccaaacgttcaaaagataaccatacaaaacaatatcacatgcatctggaaaactttgccgttaaggtataataaaagagcctccattttacagtaggaagccaaagatacttactctaatataatcataaagagaaggatcagactccactgttagctcaagaagcaaagacaaaaatagagatgatacagttgcagaacgctgcccttcagcttcaaagaggaatgcaacat

SEQ ID NO: 1490 - DNA, 634 bp, Gossypium hirsutum
ctcatgtttacatttaagtgcgtggcaaaagaccctgccaacatgaaagtttatagaaacataccttgtcattttcaatcatgataacaaagacaggtccatcgtcacagcagtgaggcttataagaaaatgggcaatcatccgaatgagtaggaaatgagcagtgaggtttgaaggaatcattataggcaattgaagaatggtccttgttcattgtttcacagtgccaagttacaacccaccgagcccactgaaccatctgaagtacaaatgaagagtgcttgcagtcaccctccttatatctccaatgagctgcaaagccaaactcagcttgcaaatgcatctcctttgttcgaatttgaacttcaagtggaactgtgccatcacccatcactactgtgtgcaaggactgatacctgcagattaagatggtgttagaaggaacttctgcattatagatttcatctaagaacaattccagggcatataagctataacacacccattaaatttagggcgagttatatagtccttcagctttccaggtacttcagaccacaactgatgaactactctcagtgccttgtaacagtcatccacattttcaacaataacacgtagtccgcagatatcg

SEQ ID NO: 1491 - DNA, 656 bp, Gossypium hirsutum
  misc_feature (64)..(64): n is a, c, g, or t
aactattcttagcagagagtacaagacccatctagaagtatataaagctttttgatgggctttnctcaggaatcaagtatagattagagaccaaagctcaaaagctataacgacagataataaacttatgttggagtttgcatagaccgagccaatgattacagcctttttcaatctctcccctcaacccccccccccccccaaccgggattaagaaaatttttgatctaaaatttttccaaaaactatccccttccgggaaaaaaaaaaaaaaaagcctattttggaaccaaaaaaaaaaaggttgataaaaagaagttttagggatgtcacccatttttttgctttcaactccaaaaaaaaatttaccttggggggaaaaaatcccaaggctaaaatcaaagccccctggggaacggccccgggcccaaaagctgaaaaaaaaaaaaaagaacagttaaaaggaaatcccaaatgccttttaaaatttcttcatgcccccaaaaaaggaatcccttgcaattaaatttaaaaaaaaaaaaaatttgcaaaaaaaaattaaaaaaaaaattaaaaaaaaatggaaaggggtaaaaccggtatgaggttaacccccttgcatcaaaagaaaatttgcaatccccaggaaaggagcc

SEQ ID NO: 1492 - DNA, 695 bp, Gossypium hirsutum
  misc_feature (458)..(459): n is a, c, g, or t
  misc_feature (614)..(614): n is a, c, g, or t
  misc_feature (635)..(635): n is a, c, g, or t
  misc_feature (640)..(641): n is a, c, g, or t
  misc_feature (649)..(650): n is a, c, g, or t
tatgcttgtgaagatttacggttttgggagtcaaggattgtgagaaattccttgttgcccctgaatctcgaaataatggagttgataggatgcccatggctgctgcaaatatgaactagcttttgaaaccaaaaattctgaaaacttggccagaatggtttttatttataaattttgcacagaagtttaattgatttgttatcaagtagttgaggaatgtaacttctgctttcattcataggccgcttagagatagttttgacattgtacattgatgtatataacgatgggattacgcactaaatatactgtcaaataatctttttttttttttaaaaattaaaaattgaaaaaaattaaaaaaaaaccaaaatttgaaaaaaaatttggatttaaaattttgaacccgttttttttaaaattgaaggggttttaaaccccccgaaccaaaaacaaannaaaatttccaatcctttcaaaattttcctgaaaatttttttaaaaaaaaaaaatttttttaccctttccaaaggaatttttggaacaagggtttccccttggtgggttaacttttggcgggttccggaaaaaccaaaagggaagggatttggttncaaaccgggaaagggttgggncaccnnggggaggnnttggttcaaaaaccaattttggaaggggtattaaatttttggttt

SEQ ID NO: 1493 - DNA, 612 bp, Gossypium hirsutum
  misc_feature (483)..(483): n is a, c, g, or t
  misc_feature (560)..(560): n is a, c, g, or t
acaagtctaaacatttttgacgaaataacgcaacaggctcttcaaaactagaaaaatcacaaaaaccatagaactgctttagttactgtcatacttctcctctgcgatgctgtcaacgtagaataccaatattattccaaaaagaactgtactcagaaaagcccaggcagaaaatggaagttccatattgctatcagaagatccctgaagtgttcaatttatgcagaggaaagaacaaaaattgtcaaacaagctaagatacaagagatgaaactaaacatgtatactcaatgaaattacgagaatgaatagaacaacagaacccttactatgattaagtcccacatggccacggggaatagaaaagaagttgcagaagcaatggttatcgcatgaagccgccttttcagttgattctaaaggcagagaatgacaacaatacaaaattatcttacagtttttttttttctttttaaaaaaaantttgcaatattgagggggttgggggctagtagctgatggttttcagttgacaaaaaggctagaaaaaaacttctaangctttaacatcaataccttgagggaaacccgccttgcctccccccttctcaa

SEQ ID NO: 1494 - DNA, 618 bp, Gossypium hirsutum
gctcttctcttctggacaatcaactttctaccccacgagctactttcccatttgttcttaacatctgtaagttaacataagagtgataagaaagaaaacatatcttcaagaaataacattacaaatgctggtgaaagctgtcgtcgtccttaccagccttctccatagcttcgatcaacccatttgttcttgggaacacgtggaatgtcaattgtgatatctgtcaatgtaagcctcttgaagttcatttggcctcttaccatatccggggcatcaacaagtgcctgccacattaaaaatagtcacttcttacacgcacatctccaaataacacctataggacttcaactagactagttggctgataaaggaacattgataattgagcagaccataatccaaagactaaaaccagcaagatgggttagtagaaaaattatgcagccaaaatctaatggtcacattaaagacatgtttaaacccttcatatgacatgtgataaaggaaagggctttcttacatgaccacaggtaagtttgcaggcaattgcatgacttgcttcatgcaagaatactgtaatgagcttaaaaggcagcaacagcattgttctccatatct

SEQ ID NO: 1495 - DNA, 534 bp, Gossypium hirsutum
ggtggcataacaatcaggcagtgagattaagttcttctaccatggggtggccacgtccttgaaagtctttgtataatgtatagtatattggtctgtcacaatttgtattgaatattggttttacttaataacagaagcaacctttcctttatcaaatacttgcaacatttataggaccagatttgaattttccttttgccttcctctttgttccatgaatgtgatttggttgatatatagagcaatcccgaaggttagttctattaggcggtccttgggacttgatgcattgctcatttctggtgtatggtagaggactacttgtcgaagcagacacatcttggttaatagtaatcagatgtgagaggtaaaattgagatctctcaagaaaaaaaaaaaagaatctggtgcaatgttgcattggtgttaaaatctgatgtgcaccgtttgagggggttagtgttgcttttaaagttttcagaaagcaggctgtctagaagatggagagatttcaacaaatccacctaatgattg

SEQ ID NO: 1496 - DNA, 554 bp, Gossypium hirsutum
tggcaaaaccccctcggctattgatcaggtaaattaatatcctcatcttgtaacttttagttaagatagatgattatgcatttcctttgctttattgatcaggatcagtttatcaaataatgatcttgttaacttgatagccaaaccaggtctgagtgtttgtagttaggaattatgatccttcttttttttggataacaaagggaactcactttaatcacatctagaggacttttgcgaggtatacggaacgaactgcttttgagagacctcttacaagtggtgtggcttatgctgtaagggtgctccactcggaaagggaacaatttgagaagcaacagggctggactattaagaggatggatacccttgaacaaaacccagttcataaggatgactacaatcctgacctcttagaaccatcgcccattcaggaagaatatgctcctgttgtctttgcgcaggatatcatatcacatgtggtttctattgatatgctgtcaggacaggttagctcttttactatctaaaagcttattgagaaacccaaggat

SEQ ID NO: 1497 - DNA, 613 bp, Gossypium hirsutum
tgtgaatttgcaggtaaatgcaaggttggatgtaccctcttagcagcagcttcttgtttggcagtttctctcctatcagcctcaagaaaaggatcattaacatctcctctgtgacggtgatcagcaagataagctgttttcatcgattcaatatattgatgaatgctctccacctgcacaatacaagatcacatgacaagtcaaatcctctttcttcagtgttttgtttggggtggggatggacaggtgttaaagtgcaagccaaagtaaagtttaagatcatatcctggatgcatgttataacataatgcatagactatatagaaaaacaaaaatatcctgacatcaactcaattaaaattaataaatgttcaaacaactagatatttatctgctccttagcatatgactacatgtgtactgtcaaccagacaaaacataacacagaatgataaaagtacaggtagcttctttaccttggcagccacatgaacaaaaaagtcatgcacattggacatgacttttggaagagattgcaacaaagaggatgcgtgattgatagagtttctatcagaattcaaaaggagaagttgttccaactcatcaatccact

SEQ ID NO: 1498 - DNA, 627 bp, Gossypium hirsutum
ttcatttttgatgagattaaaaataaatgctatacaatcttattatattgcttaatcctactgtcatcattagctaagcattgattattataattctctttggttctttttttccatccgagagagcagtatttctccgtaataaaggtggaaagggttgctgctgcagagccttcaaacaatcaaccctatgattctcaaaacaactatatggacatgccatttacaggcccacttagagatgaggaagaaacatgtttagagttacttatagaacaacttaaacacacggaacatgaagaatctaacgaccttatgactttggccatggatgctacttattcgcatggcccgcctgctgccgatgaatcccaacattttgtatccgatgccaacgtagaactaactgcaaccgaactgcaaacctcgtcgacatcgttgcgtggtaaagcgagaagtgtagatgaaattcagatcaactttgatgactgctatagcggtcttgacatgctacctgatgtcaacctttacaattttttactttgaccatgtctgcatcaaaagaattgtaacttgttcaagtcaagtagtaatttgttctttgctctgcttctataggttcttggg

SEQ ID NO: 1499 - DNA, 618 bp, Gossypium hirsutum
tggttcaaatcccaccaataaactccaaagtctattatttccctcaaggccatgccgagcactcacttaactcggtggatttcccgttttctcgtcaaatcccaccccttgttctttgccgagttgactcggtcaaattcatggccgatgttgaaaccgatgaagtatatgccaagatcatgcttacgccattacagaacaataagcctgatgttggagacgatgatggtgtttcaaatggcggctgtaataatattgaaaaaaaggctgcttcttttgctaagacgttgactcaatccgatgctaacaacggcggtgggttttccgttccgagatactgtgctgaaaccatttttcccgcgttggattatagtgccgatcctccggttcaaaccgtcgtcgccgttgatgttcatggtcagctatggaagttcaggcatatttataggggaactccgaggagacatttgttgactacaggttggagtgctttcgtcaaccggaaaaaactcgttgccggcgactcagtcgtgttcttgagagccgagaacggtggaattcgtgtcgggatcaggcgagccaagcttgggattggggatggtgattgttatggaagtt

SEQ ID NO: 1500 - DNA, 548 bp, Gossypium hirsutum
  misc_feature (14)..(14): n is a, c, g, or t
ggttgtctgagtancgtttacttcgttgtctgtctcctctgaaatgtttatatgaataggtgaaattttactgatcatgctgtgggcagttagaactttagtgcaaccggtcggttgatttgcagttactgacatgtgaactcttccatctcctaggatttgagtattttaattatttagcttataatttgcattacaaaatgttgaaaaggtttaattccttttgtatgtcaaaaaaggaggatatctgagttgttgtatggtcttttaggtaggatgggaagggggaagtaaaaagttttaataatgtttgagctacaaactagaaaatattatatatctcaaccattagattaaaaaaaaatcatccttctttccatcttccctaccacagatagccttagtgaatagctactggttttattaagtttggcttaaatttttatgaaaaggtatgcctggacagggatgggttccatggaacatcctttggcaagtttggctggtgaaggtggtgggaaggctgaaggaaaaagttttgaaaaaat

SEQ ID NO: 1501 - DNA, 562 bp, Gossypium hirsutum
cacaacacttaatattgatttcttagttcgttttccccctaagtagtgtaagacaaagttttgggtaatcttccaagatgatgtttatgatgaatttaggattaagaaattatgattttggggttttaagttatagtatgatgtggattacagttattattgctgaaatcatgagattgatctgtagtcttctgaaataactggaaaataaaatggttttgtaaatgtttcaagcatatgtgtcgacaagttttacctgggaaaaagtttcaatattttatccataagtgaacatgggactaggtgtcaaagttcaaacatgattttatcttgaaattttacactctaatggattagttttgtggagaggttgattacgtttgggctagagtttatgatctactttgtgcatgttatcataccaactgcttagttgactgcatgtgagcagctttcgtagtttttaattcacacttatcttttttaattctcaggttaaaaatcagctgattcgaatcagtatttgggattatatttttaattcacacttatcttttttttt

SEQ ID NO: 1502 - DNA, 625 bp, Gossypium hirsutum
gatttttagtatagttaattttatgggggaaaaactcaagttatatggttcccaatagaggtgcaagtacaaaaccagttcaaagtcaggtctttggggattggagctgcaatatttggcatttattgaacctttaataagattcttgatcactgtaaatcatagcaattaacagcagtctgcatatattttggcagatttcagttccaggctttccattatattttattcctaaaatattataaagtgatcacaaggtataatattgagaaccagcaacatttacttctatacttcaaaaaagggaggaaggtattggataggctaaactaggggttcaccagtaatcatggcagcacaacaggatcaatcctccatatgtccctggcatattcatgaattgtacggtcactgctgaacttgtatgagccagctgtgttcaaaatcgacatttttgtccatctctgttaaaaaaaaaggaatgaattaaatcacaaaaggtagcaatgcaagtatgatgatagagaataccaagaaagcaaatacacacttaaaagtatgcacgataaaaactttcgaagctagctagatagtttatactggagaaggtttggaactataggga

SEQ ID NO: 1503 - DNA, 625 bp, Gossypium hirsutum
  misc_feature (25)..(27): n is a, c, g, or t
cttaaggaggcgggcgctgtctctnnnatttgttactatatatatattactcaggattcatctgatctgactatcttctcatctgttaatgtcagcactgatcatgggccaaaagtttttgaaatgaggaatgtgaaaaaggaaaaaaataaaaattaatgttcctggaggggcagattctgcggcttatgtcataagaagggaaaggtgctggaacttggctcatcacctagaaaggaaaaacaaaaaatgttatcagctagagacgtggtgaaaatactgctaacaccgaagaaacatctcaagagtggtaacaagagaagtcatagtcaaaaagaagaaactccatggatattgacaattgagatgattgtgagtaagcattgaagcagtactgtagtacactgagagcatggctaaggctaagccactgcagagattgaccaactatagagatgagcaggttttgtattattattgctctgtctgcctaggttttgggtttttaaggagaccatgtacaggatgactcccccccccccctttttttttttccccaaaaaaaaaattttttggtattaaaaaaaaggccctttttaagtttttttttttgggggaaaaaaaa

SEQ ID NO: 1504 - DNA, 661 bp, Gossypium hirsutum
  misc_feature (653)..(656): n is a, c, g, or t
gtgctcctttgccatgatcctacttccaaagatcctgtttctttcttgattcttctacaagtaagtgattagtctttaggttacccatcactttcagacaaacagaatctactttctttcttttttcctgccagaattaacattttattatttcttaaaaaagaaatctaggcttttgagctttgttgatagaggtcctccatcatgggatcaatgttcagaggagcaaggttatattcccgcaaataggtcatccaatcagtcaggttcaaatgcctctgcccacaattcaggattggcttcttcgtcagtacagttgactgaaaatccagttattgagtctaacaataacaggcagggacaagatagggaggtaaatgtcattcttgagtttttcaagtctcgatttccttcagtgaggagcactcaagcacctttaacatctactgatgtgggggacagtagtatatacaatatagagaagttggaagaagatatgtacaaatctattcgtaacgaaatgtgtaataatttgttacgctcaagtttcaaaacggatgtggtatcctctgccactgaatgttctcaaggaaaccacagggatgctgaaattgacattcttggaaagtacattgttgcactttcaagtgagnnnnaaaaa

SEQ ID NO: 1505 - DNA, 612 bp, Gossypium hirsutum
cgcgtcaacggatacgtgttaaagcacttgcctgtgggaccttacaatatcatttgaccacccgcaccatcattcatcatcacctaactttcacatccgcgcctgcattatcaccgacgccgccttggtgggacttggatcattagagcgtttgaattattagcattacctcgtcaggatgcgagactggtttatggtatgaatgagatattgatattaatattaataagttatttaagttctatttaaaaaaatttaaatttgatttgataattattgagccaagtttaaattattgattaagttgaatttgagttcagtaatatttagtgtgaacagtttatgagttttatcaagttttttatattattaaattatattattatttttaatatatattattaactctaagcttaattattgaattgaacttaagcttgagtaaaaaaattggtaaatgaaattaattgagcttgagtagttcaattatatttcgagtagagttcgtatttaaaaatagatgtttgattaaacttgaatcgagcttcaaatctcaagtcaaactcaaacttaacagtatatattcaagcttagattgactcggcttgatta

SEQ ID NO: 1506 - DNA, 617 bp, Gossypium hirsutum
  misc_feature (594)..(594): n is a, c, g, or t
tctatatttccttgtgttggtttgcaagttgcaatctgtataccattacacttcatttgtattccttgcataatttttctagttcctcttctcatattaggcagccacttgctccataaatttaatgtgtgactatcttgtgaatgcatctggcctctgaagtcagaacccttcattgttcaaacagcatatggttatttattcaggaaataacttaaaatattcaaatcaatctttaaagttttgtcaaatgatgcggtcgtttccttgatctaaattcatgccgttgtttgattttgaagtttggaataagatttgccaagactgttgcgggttgatttgaagccttttttgttttttgttctttttttttttaaaccaaaaactctgcacctgaaggcatacaagagtaggaaaaggttcccttcgaatttattagcagatgatttcatttcaattagcaataaaaacaaaaacaaaattatgttcgctctttctttatctctactttccaatatagtttgttttgtttttttcacattgtataatttgtgggggtggatatagatgatcaaaccatgactacattctttngaaaacaaaataaacaagtacta

SEQ ID NO: 1507 - DNA, 658 bp, Gossypium hirsutum
tagggttcatgtatccatgtgtgttgggggcaaggatgttaggaagtacactgttcccatggtttattaatgcaccacttcaaactgaggattgcttggtatatgcatttatcatacagggtcttcttttgtctataatagcttttgattaccaggtatgtgtactatgcttctatatctatctcaataaatatataaattatcatatatatatataaattagggccacttgttcttaggccacccatagcctcagagttctgtgttttggattgtaggaaattggagctctggtgacacagtattttttgttccatgcctgcattggcctaattcttccttcacttgcaagattgaggaccatgtacgttacaagtttttgaagtcattttttccaacaccatgcctcttatttgtgaaattttagttttaagtcactgtgcttttaatcattattttttaggtatgtgccaaatgagttgcgtggaggaatgataagcctttctctagctcccgcaaatgctgcaattttgtttattctgatgcaggtgtgtccttgacccaatttatgcatccgtgcacattctatattcatggatgattcattttactggaaagagaggaaatggcagtatgaaaccagatacacctcttcagc

SEQ ID NO: 1508 - DNA, 638 bp, Gossypium hirsutum
acctcttccattgcttgactgcttcttccttcacgtttaaaccaccccctttgcctcaattcatatatatatatatatgatctttaagttgcagtttgtaagtagtaaagagtagaaagatggccaattgtttggttttattatgtttatgtttggtaatggtttcctttaatgttgcaaacaccatgaacgaaacatgcgtggacgacattagtatagtgttgcagatcgacttatataaaaatagctgctcggaggcagagtccatcatctactcttgggttgaaaatgcagtatcacaggactctagaatggcagcttcgttgcttcggcttcatttccacgattgctttgttaatgcaagtcactcttttaatttatgctactaatatttatgtattcgtgtacaaataattgatgttggatgtgagttgttttttttggcagggttgtgatggctcagtgttgttggatgatactgaggatttcaccggtgagaaaaccgcactgccgaacttgaattctttgagaggatttgaagtaatcgatgctattaaatcggagctcgaatctgtttgccctcaaactgtttcttgtgctgatattcttgcaacagctgctagagactctgtcgttat

SEQ ID NO: 1509 - DNA, 456 bp, Gossypium hirsutum
tcctcattagtagcttccagccaagtaatcctttctttgagagtctgtttaagagatattttatgcagtcattgtaaaatctccacagggaaaaaattgattaataatccagtactttcatagataacggtaatacctgtatgtctgaagtaggccctcctcgagcacaaagttctgcttgtaagtactgtagctgctgacgcattttttgcatctcattggatactaaatctctattcacctgtacaataaaaatgcaaatctgtcgggttacctaagctgatcgtctatgatctaataaaaatgatacaatccaaaaccttaatgaaaaggtaaagggagaaggggcaataatacttttcatatcagaatatacaaaactcaaaacctgaacagttttctgaagtagcacatataggatagaattacaacaaaagtagtctagaagaaacagcc

SEQ ID NO: 1510 - DNA, 653 bp, Gossypium hirsutum
taaattcgtctttttgtaaaaggtcacggttatcatatgttttttgtattgttgacacttgacacacaaaagatgataacatgaagctttagaattagaatgagtaacaacagcttgctattaggtgccaccatataattaaaaactgaaacacttcctttcttatcaaactatccaattttcatctcaaattagcaacagcttcatcaaaatcgttgtacatacaatatttgtttccagaaacaacaatataaagaagtactattttctagaagtttatgctttcataaacctgaattcggatttggaagcatacatttcagaacctttcgattgaaagcaaacactacttatacattaaaagaggatgaagttacgcttttaagaaccccaaaagccagaaaaggctgcagcagatggctctcattgcaatcttacacaactcaaagaagtgtcttgatctttgcttctgaacatgatcgaatccagatgttaatgtggtagtggtgttgggatcagttggttccaacaaggagttgcatgatatgctgcatggggataggagtgtttcagaaacatacagcaagagcaaaaccatcaggctgctgtcaatgtattcgatcagttcaccagcccatcaatgttcttcttac

SEQ ID NO: 1511 - DNA, 463 bp, Gossypium hirsutum
tcactgcctgcatgtttataatagacaatcattaaaaatatgcatgtcattggtgcttgttaagattttgaggcttaattagtgctctaccactaatggaccgagagagtttaacaagtaatactgttttcataggtggttttattctctaattttagtttttgtcttcccagatatcagtttaatatatcacatgattcgtggtcaaggaacaatcaaactctatatggtctacaatgtgttggaggtgagaatgaacagctgaacctgaatactttttcagttactttgagtgattcagtgatgggcatgcatttaagagctcatatcagaggctcaatatttactgtgaattaagctatcaactgattttttttgtcttccactctagtaatgctagagcctaatagactcatggtgattacaatgtggtacctcagtggtgtctataattggagctcaa

SEQ ID NO: 1512 - DNA, 622 bp, Gossypium hirsutum
ttagatagtacacaacaccacctacacgaaaagtctcgtgagctgcaatcgaataaaagtcttttaagatcaacatatgaaaaggaaataagatatgggggaagaacattagagattgcattcaacaaacaaactttgcccttgttaattgtatgcaattgtgtaaaagtcaagttgaagcttccccttccaagcgtaccctcttgggacctttctcttcaccttgactgccggtgttcatcactctgttttctttggcttccacagaacaccttttgtaaggtttaaatccagttcgaccagcttttagttttgaatgtcctaatccaatagtcagcaggccctcttctgtagtgttcttgtctcttgataatgcatttttcacagtttcttgatgatcagaacaagaacccaatgtcttgctgttgagatctaaagttgatatttcttcatcttcctcagctggattttgcttgtcttcacctatattttccttttgctgccccttgctcttgccatcatgtggaggagaaaagctttgcgggagtacctctcgggagaagagggcttgaaaagctagccgcccctgaataagtagtggagccatacagtgacaatggta

SEQ ID NO: 1513 - DNA, 677 bp, Gossypium hirsutum
tgggtgggaagaatgctctaaggcatgactactcaatttatttaaattaaacccattttactattcctcttctcttgtctccatccatataaaattcttttgtcttttattttattttcggggaaaaactaagatgagaggacaactctattgtgggtttttccaatagaccaataaaatcaataaaagtgaaatgatttatgcatgcaaataaaatatcttgatatttgtgaaaaatgttcccccaagtcatgatcaaaatgttgaaaattgcagtccaaaaatatagttgttgaaccccactaaaatccttctgctgcactggaattcagccggtgtttcaactctcactgatgcaaccatctttgaatatataaaattcttcataaatagattccatgattttgatctaattgaataagtaaaaattaatgttctaatacatattttgttttaactttagcacatttaatatctaaggatcataccccgcttcctagagatttcactttgttttatttctttctttaaagaaattggaatccaaggcagcagttgaaaacatcaagtgtttattgccaatgatgttttaacacttcattctctgtttacttttaaattgatgatgttaattgaggtgatgggaaattggttcatacataccaactaacggtggg

SEQ ID NO: 1514 - DNA, 657 bp, Gossypium hirsutum
aagagatgtactgcaatttgctatcaaagcaaaaactattacaagtggtcttaaatactcactcgctactggaaattgggggcaagcaaatgcagcgggtacaagagctggggtgtcacaggttagatctggttattgagtttttttagtgcaaatttatattgaatttcccaatcccaaaatttaagccatagcataaagtacctatacctccactgcttagcctttccccggttggaagtcctcatgtgatgttcttgttcaatcattctaggtgttaaatcgtttgacatatgcctccacgttgtcgcacttgcgaaggctcaattctcctataggacgtgaaggtaagaccatcgctgctgtatattaatcatctgtcctgcctacttcaacatgcattagctaattaagcttttctttgccagggaaattggctaagccacgtcagttgcataactcacagtggggaatgatgtgtccagctgaaacaccagaaggacaggtgagcattttaagtaaactgccagatatattggttgaattactgtcccgtcttacaatgttccaatcataattgttatttgtggctgcatcaggcctgggaacttgaaaaaaatctggcctggagggggaacataactgtggaatcacctg

SEQ ID NO: 1515 - DNA, 537 bp, Gossypium hirsutum
gataggcagattctaaaggacgctaagggtctcgatgatgttgtgacggtacactctcttcccatcgtacctatgcacgtaaatctcggggagtttgcataatttttctgactataaaaagtcttgtttttggtagatattgggtgagattactggaaatttggatgctaagaaagcatgtcaaaacgcactgaagattcaggacaagtacctgaaaaaggtgaggctttatttctatcaaaagaacagttagtttgatggatacactgaatatttatattttcgtttttttgtttttgcgtgtaggctaagaaatcataggtggaatgtcatcaaacatcaatttttgtacttcaaacatttttgtgtccatttttttcttccaatatttttgaacttttacctttcatatatatatgtatgtatgtatatatataatttaaaaaataaatggaatatttttttcttgtaatgcttaatttagagttctttgtattaatcaattgatttagtgttttacatcttgccctgttgtgc

SEQ ID NO: 1516 - DNA, 561 bp, Gossypium hirsutum
  misc_feature (544)..(546): n is a, c, g, or t
agagaatagaggagacgagtaagttatatgatcaatttaacatatattgtttgtttttgttcttctcctgttgacattgttgatatcaagtttccctgttccctggtttagtttccttcatgaatggtgaaatattaattaatttttgaatgtttatttcccttgagcctcaatttctgtcttgctttgaaagtttttggacatcactgtctcagatctgtttgtacaatatatacagatttcaaatatcaacattagcaacaaagcttggagttagaaatattgcatttcttggttccggacttctactggtgaattatgttgctgctgtgttggctgcaatatacatgcctcaggtgaacaagtagcactcgtagcccgtcttatcattcgctactgtttgtgcctgaattcagtgcttaatttgtgtagtttatggaagcagattgttttgatttctttacatctatcttcaagggagattatcgaaaatagtaaattcttcaattgcatatgttacaggctttcaggcgtagtttaatgnnnacctgctcatatctt

SEQ ID NO: 1517 - DNA, 405 bp, Gossypium hirsutum
gggcttcttgtggtgataactgataatcatgcgatattagatcttctagcattaagtgttatttatgagtattaatttccttttagctgctgacaaaagttcaagaagtcggaagctgaagcatgatgtcattgaagcagtcaatgagcttattcaagacattagtacttgccacgaactgattgctgagcaagcagtagagcatatacatcaaaagtatcttttctgccttaagcttttaaattttctttggttttcctcaaatttgaaacaccgttattcattctttgagcaaactacaatattcatatttgatagtctgaggtgttatttgaatttgctttcaacaatagactcttactgtcttgtaaccccccccccccaaaaaaaaaagggggaaaaaaa

SEQ ID NO: 1518 - DNA, 663 bp, Gossypium hirsutum
aaatatgctacccaataaaaaggaagactttatacagttatgtaagagaaattaacctttcagctcggaaggccaaacttttaagttcacactcttcggcaaaggtcacttcttcaggttttctatctcttccagaactaactaaatcagatagatcagctgtattctgccaaatatagcatcaattaagcaaactaagaattagtacaagcttcttttcctggaaaggaacgcatgccaaaaacagatatccccttcctcacctgtaataaaagatcatataagcggaccaactcctcaggcttggtgactttctcgtttttgtcatcacgacgtcttgtaagtttgctctttgcaatgctaaccaacaactgattgcgctcaattgttcgttgacctagaacagcactaacagccttatccagaccatttaagtcatctttcacattttcagcactacctgcactggcctagagtgtatgctaaatcatcaacatcagcctcaaagaagtgatttggaaatcaatagtttgaaaataattgcaacttttaaattctactaagaaatagtactaaggaaaaaagaaataagaagtacacaatttctacggaaagaaagcaacactacaaattaacacttcataccaagtcactccggataca

SEQ ID NO: 1519 - DNA, 586 bp, Gossypium hirsutum
aaaccttaaaaaactatttagcttaacatgatttgatttatttatcctggctcctaggatatgcacaaaattatttatgctaacaaaagctagtagcactttatggtggtagttgatagtcagagataagagttctggagtttgccaaaccagacctataactaaagaaacagagaaaagaaaggaaaattactaaaataaactgatgaacgtgaattgacacctaaggggttaagtgttaagccacctaaataattgagctcctatttagggaaaattttgattttgcaaagctcattatcaagtttatacatcctttaattcaagtattagaaagcacataccatcctcaggcactacttcctggttatcttcaaggacagccattaggcgtctcaaaggttgcatggctgcttctttgcaaagtaatcgaatatctgaacctgagtaaccttctgatctttccactaatatatcataaggaagagactcctcaccatgctgttggggcagaagctcttcaaacatcgcttttcttgcttcaggctctgggagaggaacaaggatcttactttatgtggttaaa

SEQ ID NO: 1520 - DNA, 668 bp, Gossypium hirsutum
ttgaactcgaacacttgtctgtgttacttagttcccttttctgatcctgtaaaaattgggtgagttgcagactggctggagatgccaggatcattgattcttttactggtggtggctccaaatttctttgcagtcaccttgaaggacagcttggttggtgttttcatatgcctcctcattggatgttacctattacaggaacacatccgagcatcgggtggattccggaattccttcactcagagtaatggaatatcaaacaccatcggcattatccttctgttagtctaccccgtctgggcacttgtgctccacttcgtctagttggtgcacaaacgcactcaatgcagtgtggtgctgaattgttgcaggcaaaaacttaaataaaaaacttttgctgtttttattgtatttcatatgttgaagccttcaccaagagcctgaattgtgattcatagttagtgtttagtaagccagtgaatgtatgaacgaataaaatgcccataaatttatttgtttagtatattttccaaatggcagagaagttcaatgtttagggtggcatccaaattcgaaatcgttgtttgttaatatatatgtatttcataattctcaatgttatgatgttgataattaaacactttgctgtaatccaatgtgaatcatcc

SEQ ID NO: 1521 - DNA, 619 bp, Gossypium hirsutum
atcatctgaacggaagttaaagtgggttgttataaggcgtcagcttttgcaggtctgtggaaaccatgaaacacactgtgcttagcttagcataggttaagctgtaaaagttgccattataataatgttttacccgaacttgtacttctcagagtctcgtagagttgaagtgacttttttcaattttgtgtctattgagtatatgctcatatgattagacttaaaccaagcagatcttcaagctgtttgacttaaagggactttcacttaaaacatcttcatgtaaagtcatgattttagctataaagctattagacttaaaggactgctgtgcttattataccttgtaaatttagaagcacaccatgttggttgaaagtgcatttataacgtgataaaaggtgttcatttttttggattaatatttgatttgtcaaatattctggctggaaaattcaacttgggctattatggattttgcttagttattgttctacattctggaggtggacttgacaatttagggggcactgcagagacattagaatgatttcttatgttgtattttctcttcaatgctgtatgatataataatgctattcattagggtctgtggaaa

SEQ ID NO: 1522 - DNA, 628 bp, Gossypium hirsutum
gctatacaaaattaactactactttacaacgaaagatttagtttgctctgattgcaaggcatatatgatgtggcaatacccagctttggttcttaaaacattaaagaaccaccatacatgacaagtaaaacatgaaaaaggaggatgcagtttcaactttcaactctcttgaaacataaacatcatcatcatcatcatcatcatcatcataatacaagcttcttttcaggctacaggaatcattaacagaatcagagaagcaaagaagacatgaaagttgctagaactgaagtaccaatgcagtattttcgaaggtctcagtcagtccaggcagctgccttaatccaccaccagcggtcagagaaatttttccgctagcaccttcaaagacattacattgagcctgtagtaatatgtcaatgaagaaatcaccatggttaaaagggaaaatggttgagttttattcagtggaaaacctagcacaacaaaaatgtcttgagatcatcaataatttatttaaccaagcaagaataagaaggaatgaagaaataaccaccaacatttttttgggaagcctcccccccccctctttttttaataagaagggggggcctgaaactcaaacctt

SEQ ID NO: 1523 - DNA, 612 bp, Gossypium hirsutum
agcttttaagcccaaaattaaggaatccatttacgcccaatttgaaaccactgatatatgttgcagcaaatggcttctcttttcttttttttttaatcatttaaaaatttcatatgctttcatcttactttccctagatcaccatgtaaccttcctcatatagtcacatgatcataaatttcagttatttccaactctcttattttccttccattaatctttttcagctctttaattcgtgaatgttcaccttataatcgccttctactacataaatgacctatatgctaacaacttcaagcaataactgcacatgctaattatatcagctccaaagaatgacatcaatctccaacaatatgttgcttgttaaaaccaaatccaagagtctgaaacccgtgagagagagtctatatgagatatacctggtaatacaacttcttcaagtgcacgtctgataagcaatggaggttgaggatataaacgaagagactctacgacaataagtcttatgtacctaaagggaacggcagaatccaaaataacattatactttgaaaagatccaatatacctgtaaccgatcaaagggaaatgattggttttgtgtgaa

SEQ ID NO: 1524 - DNA, 441 bp, Gossypium hirsutum
ttgtatttaatactgtaaattgtcaaaattgacttttcaatattaaaattgtcaaagtaagtatatgttgttcattattaaatttaaaatcggtatccttttatataaaatactttttgatatattgttggtgtataagtctcatatattatcagtgaattataacacattattattcaattaaaataaaaaatatgaaggatttataaataaatactaataattttattcaaacattattaaacattaatcataactattataaagatatattaataattctcgaatttaagatcttgggtttatgaatttagagtttaagattttagcattttttataattaattagtatttacttatgtttaaagaaagttagtagtatttatttataagccctccattattctttgttttatttaatgatgagatgcaatattatta

SEQ ID NO: 1525 - DNA, 614 bp, Gossypium hirsutum
aaactgttgatttcaaaattttgaagcctgaaattttgtactttagaagcaggttctatcaattttcaaaattccaattacttgaaaccacattaaatcagcataagcatacaaatttatttatttggaaattggaatttggtaacaaaattaatttttgacggagcagtgtgtgcaatttgcagcacagataagagtaatacacccgtggttatagagaaccttatccttcagagaactgtaactgtattaaaagattaacaaagaaatcacaacaaaagaaactccaactaaatttttagtctattaccaaagaacgaacattgttagcatcaaataatcaaacaaaggaaaatataattattttagcaagtaaagcaatggaacaaactaaaattaaaattagctcatactcaatcttccaatgtatgccgtctccatcagttgtgcaaagggatcaatagcttgtccagcaatcgcaggcagagaaagcataataagttccctcttgacatccacagacttcactttcacctcactgcatatggaaattttaaagttcatattagcacataacaattggtaaaatggaagcccaattgtaaataacgagg

SEQ ID NO: 1526 - DNA, 616 bp, Gossypium hirsutum
catttggtagattccaacgagggaactgggcagaatccactttttacacgagatgattttcctgatacgaccctgtctcaagcaagtggagatcaggtaacagatataggttgtgctcttcttctcttggcacatagtttttgatttcttctctaatgctttttgttaggggattggattgggcaaatttgggatgagttatgtgtggttttgatgtataattaagttctcatttgttgctgggtaggggcaatgcaggaagctgatggtttggggttgaaccaatttgataggggtggtgaaactgagttcgaaattgatggcaaacttcctttgtctgagcatggtgaatgtgctaaatctcctgaaggggaaacttcagaagtaactggcttgcaggggccatctagtgaggccaagcaggctatcagtagagatgatgcatctgtatctattggggcagccagcagttcccaaccagaggaaagtttcgctgctagttaccagttgacaaataaacttgctggagaagcaataccttgttcacatgttgatgaaaaacaagcaatgggctctccatttggtgattatggtgatgacaagactttggaagaaa

SEQ ID NO: 1527 - DNA, 615 bp, Gossypium hirsutum
gttatgagtgattacaagttcaagagtctctttctataaagtaatttcctatctagaaattattgaaggttcatgtaacagccatgcaggtcagcggataatgctagacattaagattgcatacttgtttttctttccgacggatttagtgaatgaatgctgtttatttgtagttatctcctgaacaacctgtgtagttatttcctgaacaacctgtttaaatattttgatattgcaacttaaagtattgtgatacattttgttaccttccaaagaaaattgactaaaggctgaggaatatatggccgagaagtgctagttttgccaaatttctgaagttttgtttgattttggtctcttcaatgcaatgtacataggagtcttattgcagaccttttaaatttgttagagattagtctccttcttcccctattattttcataggggaaatttttttcctgaaaaaagaaatggtggaaattcatttgaatttggatgatttgtcagttagggttctgaccaaaacatcctgttgagagaagactagatgaatgcgctgtaatttgtcaactataatatcatattaatttctactactatgctgacacaacgtgc

SEQ ID NO: 1528 - DNA, 625 bp, Gossypium hirsutum
atcttatggtctatttccttcctgtcgagtttcggagacaacacatcagaataagacaaacacttctgcattgatggacgtggtaactcaattgggtttgaagtctgaatagttatattaaacaaacaagaaaaagttagttaaaaatattcaaaaaggaagacagaaagtaaagagaatgaggagatatagaagggaacctgttgatcatcctgaagttttctgcgtaactcatccacctcagattgtgcaagatctctttggcgcttaagttcttcaatttccatttccatctataaagcaaaaacagaaaatgtgattatatatgggttcagtttcatttgcaatataaaacagttccaaatgaaaccaacttgaatcgcttattacttgttgtatttttaagtctttctccctagatagatcaggggttcgaagctctgcttctagtctggctacttctttctgaagatgtttgactaactgtttatctgaaacaacctttcatgcaaagagaaaaatgtattcatgtcaattcacttaaaagttcatgcatttggaaatccatgtccatctcattaagcaagaaggaaaaagtaagtaccatattgacttgcgcattatt

SEQ ID NO: 1529 - DNA, 461 bp, Gossypium hirsutum
tcagtcccacgccaaatatgttgcaataataccaaaaataaaatcaaatatcattgccaatctctgtaaggttattgatactgcatggaaacaaatgatgcagcagtaccctttcgcgatcacatcatatctcatcctcttcaaagggatctcgttcaggatagccaccaacctgcaaataacaagttccatcccaagttacaaataaataaaagcggtaaaacaggtaggagacaccaaatattttactgtcagaatacacctcttggacttcggatatgaaaaacgattaagctgcctgttaaacatatatgtaatgtattttctcatgaaagaagaaaaactagacaaaaatagagtccatcagctgtttggatagacttgttagatactcaacaaagaactctcacagagatcttatgaacaaaaacaaagagaactcactgatttcccttacggag

SEQ ID NO: 1530 - DNA, 557 bp, Gossypium hirsutum
  misc_feature (548)..(549): n is a, c, g, or t
ctgcctgctcagccgcgattccattaacttgtcttccaataatagtccgagatttagtgcttttttcagaaggaggtgccttatcaggctccaaaccatcctgattaagtcaacaaaaaaatatggaaagaatgaaaatcgagaggaaataggaataaataaaagcaattattccagagaaatgaccactggtagagaactacctttgctttagatacaggcaaatgaaccctggaattccttatctgctgattggcaagctctacagccttgctcccaccaataaaatttgggtgggaagtatttatgtaatccatctgtaaaatagaagggtgtgtgattgtgtatcacacaacaagtgtctaaggttctcagaaaagaccatacgagtataacaagtattgcacatcaactttaccgagttcatgatttatacacacaattaggaacagaaacataaaataataaaaaactaaatgggaaaatatttggtacactggcagtggagtttttagactccacaagtagggtcaagggattgacacatnncctatagg

SEQ ID NO: 1531 - DNA, 649 bp, Gossypium hirsutum
  misc_feature (621)..(623): n is a, c, g, or t
  misc_feature (625)..(627): n is a, c, g, or t
  misc_feature (629)..(629): n is a, c, g, or t
ttagtattaagtttcagcaaataaatgtggcaaggtaaaaggtttgcttgatagggataagaacatctacctttctcgaatgtgaacgatatcaactcttttcatctgaactagaacttgaactagaatcatccttcctttgttgagcaattgcaggaaaaagcttctgacgagggtcgggagaaggtggtgcaacacgagactcagaggaagttgatgcattggaggtctgttttttcggtggttgtgttggcttcttaggtgcatttttaacttctctgcacaccttatctaaaataaccaaaaagtcccgaacaacagaaaatattcgtaagccctcatccttctttacattaccatgaaagtaatcaccagtgctctttactaaatccattactttcttctcctcttcaagcaacgacatgacactagactcagcattcttcacaaaactctctagtgtttcatgaaaaccacttttttcaccgctatccttcatttctgtgttcaagaaattacgtgtttttaccattgcatggccaactttggcaacattagatgataagttttcagcatcaagagcggcagctttcttgacatattcaagttcactactcagannngnnncngcctggagaccaaggttgcg

SEQ ID NO: 1532 - DNA, 618 bp, Gossypium hirsutum
tttgagattttgaacttcatgttgatcttgtaaaacttaattatgtttatattttcttttcctggcctcagtcaaagctaaaagactcgcagtatcggttggcaccttggcggtcggatgtcaatcattccaatttcaccccccaatctccatctcattcccttggtccaacattgacagcttcggtatgattataatatattcttttgatctttacttctgtaccctatagcattcttattcctatgctttctctcagagcaaaaatggtcttgaattgatgccacagccggttttttcccatggaaagacacagatagtctctgatgctcaaacacattcaaattgggatctacctggtcaataccaaggcggctcaggtggtggtattgtctcaaaaaatttggaacctgatgatttgtggagatattcacccatagcaagcaggtgagcctggtcaaatggagactgctattgtgaactgaatgtacaaattacaaccatctgcatttgttggtgggttctgttttcattgaattccttttggtgcgttgtatgcataagtcatttcaaaagctagattttcaggatgagccaatatgagccttcctttgtgac

SEQ ID NO: 1533 - DNA, 661 bp, Gossypium hirsutum
tcttccagttaccgtacttcggaagcaattcactgaatagtgattgaagcacaactgctgttataattctctccacaaaaattatacaccttatgtctctcaacaccctgcattgtagcacataaccgaacgtaacaagaagaaacaacacaaaacagagcaaaaatgagggagatggaatgaatggggctgtagatcagttttttcaaattcagttcttaaaaccctttatacatttatattattgacctcattaaattaagttatttatgttttaaagtaaataaaatccaaacgaaatgttttttataaccacggtggaaagaaaacacaacaaaccattccttaaatcgtttctgtattaaagacattaatgcatcagactatcgtctcaaaataaacttcaaataattggaatgcagaaggataactttcgagggagacaatattatcttaccacttagtaaagactgtgttacctgtattcagaaagagattcaataaggcataaaacttttgtggtaagaaacccatcatccacactggctttaacatcattaacgatggtccaatctggatctatatgatgaaagaagagagagagagagtatttaagaaaaatgatagaacaacatattgctaactcgccataagaaggata

SEQ ID NO: 1534 - DNA, 634 bp, Gossypium hirsutum
tgttagaaatctagaaaaaaaagttaataaacaaataattagataaaattttatttaaaaaattaaaaaaccaaaatattctcataaagattttttatttgttttatttggttttttatgtattatttttattgaattaatgttagaatcaaataatttcaggtaaaactatttaagagttggtacaatttaaactaaaaccaaaaaatcaaactaattggactggaataaaatttaaacataagttaataagggtaccgaataatacctagtccaagttggagagactttccatcctttttctctgtaatagtaaaaatatcacgaaatgttaattaaaatatgaatcaataattataggtgcatgcaaaaatttaaaaaaaatagtaattattgaaacccaataaatttcttatttttataacataaaaagaaattttcacatttaaaattgtaaaaataacctttttataattaggagtaaggaaacttctgttgtatgccaccattaagcgccagtctatgccaccattaagcgccagtctatggaaatttaggtagcctaccatggcaataatatattattaagtctgaataacccagttcattataatagtctcaggactcggaactc

SEQ ID NO: 1535 - DNA, 594 bp, Gossypium hirsutum
  misc_feature (61)..(61): n is a, c, g, or t
gtgtagtagaggtggatgctggtgttgaactagcagtgctcttcaaaatggtgaactactnccaaaagagaatcccgtagaagaagctgagctcgatgatgataagcttggaaaagatggagtagtagctgtagcagtagaaggtgaagataaagaaccaaaagagctcatagcagcagtagtggtagtagtggtagccggtgcttgtgaagatgaaaatagaggggaaccactactggctccaaatggggatgaagatgtcccaaatgtccctgataattaaaaattaagggaaaaaaaaaggagaaaaatgaaaatcttggttagctttaccagatcagagaacaaaagcagatgagacaacaacgaagcaggttttgacagggcagaaccagggactgtggatgctgatgatgacgacgaagatgaagctgcattgccaataccaaatgtaggttgagaggctgaagaagggagggaaaaagagaagcctgaagaacttgaagaagaagaagaagcagctgttaacgaaggtgctgtagtaaaggttgctgttgtagtcgaactttcagtgctctttccaaaagatgaaac

SEQ ID NO: 1536 - DNA, 534 bp, Gossypium hirsutum
  misc_feature (526)..(528): n is a, c, g, or t
agggaaagcagtgatcttacaacaaacgaatgaagcaatacgttacagaaaaatgaagattaagcacgtgacaaaacaaaatatcattatccaaaaaaagtaccatttgatcgatcaatattaaagactaaagaaatcagtaaattatgcattatttttgtacacgacatatgatgcctttctatattttacttcaatgatatccatccttataaggaaattctatcaatcaaagtctgccaaacatatgtcatataattgaaaggcccaatcacatgcaatgccaaatatccgagtatctacgatactagggagaaaataacagaggaaagataaaacatacttcaatatttatcaagacttggtcaaaggctatacatagctaaatagttttgttccagattttcattttgactatgatgtcatagtaaaaaatccacccttcaataatggcccaaaaaatcctaacggatcctccgtttaaaaattccattttaacccaccccctctttcccccaacaataannncccaca

SEQ ID NO: 1537 - DNA, 647 bp, Gossypium hirsutum
atttatttgcttctgtattgcactgttgtgatattgatttgtgcaagcaatccagaggtctcgaggatcctgaacttcttgcaagagagacagtttgtatgtcatcaatttcctttccttctcttttttaagtaatactgttaagcatttactgtattggtagaaggatagtggcaacgcatttgcataatttaacttcttgtttggactttgcctatgttatttttgttattgagtcgttctatgggaatttgttgttttgcttaccttgatgcagttagtgtaagtgaaatagaagcactctatgaactcttcaagaagataagcagtgcagtgatagatgatgggctgattaacaaggtcttttttatttttacattttgttgtgaattaatacattttatgtttgtcgagtttttgaacatgattgttgctccgattgaattggattcttccacccatcttatccttttagtatttgacttttgtttacatactattggcaggaggagtttcaattggcgttattcaagacaaacaaaaaggagagcctgtttgcagatcgggtaattttatttaatgttaaattatattgttttcatccttgataaaagaatacttgtctatttcatcttgccaactcgttg

SEQ ID NO: 1538 - DNA, 610 bp, Gossypium hirsutum
gcaagatggctcaaaagtctttaatgtcaactctggaagttcagacaagcttaattcctttaactgagggaacgctgatgtatgtccgcccttgtggctgagtccttcagattggactaattcagaaatggaagcattgtttataacaagcttctgaagctttggtagtgagcgaatgaagcaatatggaagagtagtggatgtctgaggaaagaattggaggttaagaagtttgaggtttgggaaacattgcaatgagagttgtccatcacatatcccctttatcatatcactcgtcttcagtgttaatccttctaaaacagggaaagtgtcctggacaccaacaaatgtattaaacattaattaaagagttttaaattgaagtaagagagaaggtgagaatcttaggtagttgaaaaggcaatttacaggtaatccaatttgatttggatataatctcaagtaatgaagatggaatatcaactattagtgagaatacctcattgacgcaaaacaagggctgttggtttgagatttgaacctcaccaaatatccgtgctttggggcattcaataacctccatttgtttcaacgatggccattgggtggt

SEQ ID NO: 1539 - DNA, 623 bp, Gossypium hirsutum
atctgattatgaggcgatcggatcaacagttcaacaaccggtgaaacttacaaaccaaactccttccccgtcggttttttctcctgttgattcacctagaacatcttcctcgaagaattcatctccgagatcagatgtgacttctaaaagggaatcgaaatcgctgttgcgccttttatcgtgtcgtattgcagatacaagtgatgttatatctttgcctatctcaccgcgcaagagtactgatcatagcataagctcggtggattcggatggtgaagcgatagtaggtcacgattcagaacgtaccaaaagttgtaggaagattcgtggtcggccttcgagtacgagtaacgatcatgtgaacattcgatcattggaacataggtaacaaacttgttgtactaatgggtttttatcagtaattttctcgtgatgtttcgtattttgtttcggttttgcagttatcagaacgaaagtgatgaaggtagtcatagctgcatttcgcttcctttatctgagaagcttacatcacaatcaagaccgccgaaagatttcgtttgtcccattacaggacagattttcaatgaccctgttacactcgaaacaggacaaacatatgaacg

SEQ ID NO: 1540 - DNA, 626 bp, Gossypium hirsutum
cggacaattgaggttgagattattcagttttatcaaaatctgcttggttgtgatgatgctaaggttttgggttgtaccgatctgcttcttagtgatttgttcataggaagcacaaaatgatatggttcggcctgttacgagggatgaaattaaacaagctatctttgatcaaggtaatgacgggacctgatggttacacagcttttttcttcaaggcagcttggaatatcgtggcagatgattttgttgatgctgtgaagtttttctttatttcttcaaagctgttgggagcttttaatgcaactactgctacccttattactaactgtgctaatcctagccataccaaggaatataggcctatctcctattgttctgttgtttaaaaatgcatctctaagattttggttcggaggatcactccatatatctctgctattatttctagtagtcagtgcatttgttaaaggtaggaggcatatttctcctaggtgcgccatcaaagtggacttgcaaaaagcttttgatttagtgagttggtcttttcttcttgctattttaaggaacatgggttttcccggtcaatttgttcagtggatttcagcttgcagtattatccccaggtt

SEQ ID NO: 1541 - DNA, 632 bp, Gossypium hirsutum
tgctgatgtaaactatcagaacaattcatattatattcatcaacatgagcagtgatgtaaaagtttgcaagtgggcgggaaatcccatacccttcggagtagacactcgagatgttaattgttcctccttcaatagtcagatcttcctgttggttcactgtatcattgccaataaagcactcagtcggttgagcctcagagactggtctctgaaggggatgcacaagcatattatcacctcggatgggaagaggcattcccctgcttcccaactctggttgctgatccatagctttggacatagtgtctctgacaggatcagattctacaggattttgtgcacttgcgatcaccgtgggattgatattgatgttattctcattgaacttcccggcaaatgctgaccccggatcagaaccatttttaacagcttgttgttgaccgacaaaactctgaacacgccagtgactatttctctacaataaagtaagcaaaatcttcaataccatgtaacttactaacacaagcaattaacactttgaaaataaataatatgctagtcccgagattaaatggatgtaaaagaaaaatccagtgttaagcccagtcaaatacactgaacatcactgctc

SEQ ID NO: 1542 - DNA, 647 bp, Gossypium hirsutum
attttgtaacagataaagggtaaaggacagttctatatgtagacacaaaagcaggaactggtgatgcaatcgaaatcgtgaattatatggtaaggcaaagaccataacaaaactattaagaatttgtaggacaaagcaaggttccaggtaattcaataagaatccagaaatgcatgcacacatatccaactgtgagaatcatgttgtgctagctctgcactatcagaaagatttgaaaggtgaggaataaaatgaccagcatttttaacttacatctgaagatacactgtgtgtaccatatttgtcatcccagtacattgtacttatcctgtacagctgctgtatgctaagcacctggtatttgaaaaaaccaaaaggaaaaatcagagaaatgaagtgagaaaaggaggatttaggaggtgcaaaaggtgtgtaagcaactcacagggcaaagatcattggttatctctttcaaggtctttttgggcttctggtgtatgacctattttggaagaaaaattcaaatgaaaacaaagtttaatgagagattaaaaaaaagaaaagagcaaaagtttaaatgccatggtaacagtgtagcactaaagacaaaccaggaagccaactgcttgtctaatatgcctcacctc

SEQ ID NO: 1543 - DNA, 628 bp, Gossypium hirsutum
gaaagttgagacatcaaaaccagtgcatgtatttacaagtactataatatctgcctaagacaaagtgctattttatatatgctaaattaagtccccagcttactaaagttagttatgttccgtatactgacaatttcccatcgcaaaaaaattgggtagcatgtaaaattagaggtgattcagtcttgaaatttctggatgaaacctgtccctatgacccaacacatcctcatgaatatacatcaaatctacaaatgaacttagtaatgataggataaagggctacagtgacatactttaatccttcttcgacaagccctccataactgcaagcagataaaactcctacataagtaatatgattaggcctgatcccatgttccttcatcaacccaaagaggtttaaagcatccttagcacatccatgttgtgcgcaactacagatcatcactgaccaagaaaccacatctggattctctgtctctcgaaagatcagatcagcagagtttacgttaccacactttgcatacatgcaaatctgtgagttttgaacaattctgaagctcccaaagccacttttcacaacatgtccgtgaacctgctcacccaatcttgctgttgctagatc

SEQ ID NO: 1544 - DNA, 648 bp, Gossypium hirsutum
aaaatctcctaccagaaatatcctctgcagtgttatgggcattcaagtctttgaagcatctcaaccaactgcatctatgggattggtcttgcaatgcaatgacaataatagaagtgtataataaagtgaaatcaagtggctgtatgaccaagaaaaagatctatacaagggccatgacaagctccacattggaaggagtcttaaaataaatattacactcaatactactggaaagcactataaataagataaatatacctcttcctacacgtctaaagataatgactcatcaaaacctctgaactgcatcagaaagctatagatatcaaacataaacctaattactatggaggcagacagcttgcataagtatatatattggcaatctggcctagaattgccacagttactttgctagaagaatttcccttgattaagtcacaaaagaaacataaaaaaaatggagaaagagaatactattttttcatatcatcaaggattgctgttgcaccgctgtacatctgcaaaagcaggtgaatcacatatatcatgcactaaattgtaaaccaaaaggcaaaatgataacccagacagctcgagtgcacaacttactgttgacccacagtcaccatcaccaactttgctatc

SEQ ID NO: 1545 - DNA, 865 bp, Gossypium hirsutum
  misc_feature (621)..(622): n is a, c, g, or t
  misc_feature (624)..(624): n is a, c, g, or t
  misc_feature (629)..(629): n is a, c, g, or t
  misc_feature (762)..(762): n is a, c, g, or t
  misc_feature (765)..(768): n is a, c, g, or t
  misc_feature (833)..(833): n is a, c, g, or t
cacaaacttaaaaagttagcattgtggaatacaagcttttctggtgagttacctgcttcaatcgaaaaccttagttctttggaattcttgggactcggtcactgcaacttctcagggtcagtgccatctacgttgggtaatcttcccaatctcaaatttctggatctagcaaccaattcttttacgggtgagtactttcttttatttagacacaattacgagtaacgatttgaacttgattaaataattattgagcttgagattgagctcgaacagttctagctatcgattgagtcgaatttgaatttaataataatttatcagaatagttaatgagatttttatatttttatattattaaattactttattgaccttaatatatattattaatcttaagcttcattattgagtcaatctcgagctcaagtttaagtccgagcttgagtacaaaaattagtaaacaagtttaattgaacttgagcttgagtagcttgattttatcttgagttgagctcgagcttataaatagatgtttgatcgagtttgagttgaatatcgagctctgaatttcgatttgagctcaagcttgatagtattcgagcttggcttgaggggganntnaaatntgaaattcagagctcgatattcaactcaaactcgatcaaacatctatttataagctcgagctcaactcaagataaaatcaagctactcaagctcaagttcaattaaacttgtttactaatttttgtactcagntcnnnntaaacttgagctcagattgactcaataaatgaagcttaagattaataatatatattaaaggttcnataaagtaattttaataaatataaaaatataa

SEQ ID NO: 1546 - DNA, 642 bp, Gossypium hirsutum
gaagcaaataaagaagttaacccttgaattttacattttgcaatatcagctaaatgattcaaatatctttagagtaatcacctccctacttgataccatatagttgtaatgtaattgtaagctttgcgtttatgcaggaagactagtttttttatcaacaaattgataattttgttcccctcaattctggattcaaattattttgagtatttagtttaaagttcaaacttttcaatctgggtcattataggttcgaatcattcaaatttaaagcttgagtttagttttggtcgaaaaagttataatatattttttgggttaaagtttagatatccatcactgacagttatgactaatcttctcattataaatattttttcaagggtaaataactagtcacaaaatatgctctatttttatgagttaaaatcgaaccaacttcagagatgaagtattaaattaaaacgcatttgatgaacctgacatcccccacctcccaccctccaaaaaagtttattatacttttaagtgagtgattccttcatgttcttctcacatggaagctcctttgtcattgaaacatggtttcaattttatattgttacataagatttcaaagggtaacttcattcattgacttga

SEQ ID NO: 1547 - DNA, 833 bp, Gossypium hirsutum
  misc_feature (753)..(755): n is a, c, g, or t
  misc_feature (757)..(758): n is a, c, g, or t
  misc_feature (774)..(774): n is a, c, g, or t
  misc_feature (799)..(799): n is a, c, g, or t
  misc_feature (801)..(803): n is a, c, g, or t
  misc_feature (818)..(830): n is a, c, g, or t
tatacggatcggagatcgcctttacatgaagaatgaacttgggagcaagcgactcattgtatgaacagatgtaaaccacatgagaatatggcaagcaaaataccaccactcattgtaagaagaaatgtttagctacaatatgtgtaatgttccatttactacacgactatagggataaattaacatacagatgacgaatcttggtggccggacaggcgataaaaagaagaaatcggagatgccaacattaacttaatcaaagacttaaattgcaaattaaaagattcaggaactagcaaatcctaaggaatctacaagagaatcttgggtaaaacagcttaacattcaagttccaattctacaaaacctgtataaaggacaagaatacccgttcagcccgacttagatgaagtgtggacaaagtttttctaaaatcggatgagtccgacccgattgaaataaaatattaaaaataataatttaaaaaaaaataaaaaataaaagtctataaaaagctttaactatagcttaaggaccaaattaactattaatcctttgatttaagtgcaatgttattttttaacagaagttaatggccgagtgacaaaagggttactaatttagtccttgagctatagttaaaaaattgttaagaaaattttaaaactttttatagacttttatttttttatttttttacaatcattgttaagaaaattttaaaacatcaaaaatgatgttttaactatagcnnnannaccaaattaactattnatcctttgaaataagtgcaatgttncnnntttaataaaaagttnnnnnnnnnnnnnaca

SEQ ID NO: 1548 - DNA, 600 bp, Gossypium hirsutum
atcattttgatttgaaatatttacctactgtgtaaagatcgtcacttgcaattgtgaatcaatttgtccataaccaattgtactgctgtgataagtttaaagtttctggaagttacaatgagcattaaggtttattttcagcttagttgatgcactttgaatattatggacgaaagaaataattgttctacaccatgtttcactcttcaccagtgatcttgttgagaaaatttctcagacctctgtagtaagtaacatatcttgttcatggtaatgttgaaatcctaaaaatcgggggaacaattgtggacactctatcctgtatgcagttgtaatgataacctccacctttcttcatttggatggctgtttcctgccagttggagcttgaattcagcacccatgagactatttcagacgaatccttgacacttcaacacttcagtgcaaatgtttagaaaagctcaatgactcactcaccaaaagctgaagcagttggctggtctcaattggccgtataatactataatttaggaatatcttaagaaaacgttacttctaatatctagtgagttttttttggaaatacttagcattaac

SEQ ID NO: 1549 - DNA, 627 bp, Gossypium hirsutum
attttcacttaagacttttttgctatcattacctcgttgctttttagttctctaaatctaaaatgatactaaccagggattcaaaaattaaaacacacaaatatccttatgaatttcaaatgcacaactaaacatgcatccaacaaatccacgaatttgagaaataaccataaatgctatatttataggtgttttatctcacagctacactattttttaatctaaatttccaaacacaacctaagcatggggtttaaatccttaaattatgaatttatgttctcagtcaatcagatgaatatttcgttactagttggtacatcaattcttactaaacaaacagcattaattagatttatatattaattgctatattttgcgtacatattaattgtaactgtaatcatttcctttccttctatgtcatacctcctatcaagcttttaatttttgaaagttatgtaatggttgttccatcttttaagaattatttgtttgtgtatattcaacctctgatatggacatatgagctatgaatacaatatatgaaatttacattctatttacgctaagtgaaatgcttacatttcatctaatcattttaaaaggctccataacagagtaccc

SEQ ID NO: 1550 - DNA, 359 bp, Gossypium hirsutum
acacactcagctctcattcaatggtattggcatttttacgcagatggccaaatttcttagacctgtggccctcagcctcatattatgtgcctcacattcacgtacattctcattgatcaatggctatgctgctccaatggaggtttacaagatcttggagcaccatgatgatgcaggatctggtaatggataatctcttatatgatgcactgtcccttgtttcattttgttattagtgaacctacaaagaaaaatgaattttctttttgacagcaatgtagcgttgacatttatttttatgtagaactttatcaataatgcataacatgtttttgctttgtgtagtttttttttttttt

SEQ ID NO: 1551 - DNA, 638 bp, Gossypium hirsutum
acgaatctgtaggactttgagaactgtttcagatgcagaaattgtcggagaacggtcaaaatttgagtttcagagtgtaacggtcccgaccttccccccaatggctatgtctcagaggagctcagaaacagcattatctgctgatagtgacatgaattccaatcatagcattccctttaatgaatctaattcaataagtgatggaaaggaagctgatggtcctcctgaaaaggtattctgtcaaacattctttcccttcgtgtattatcgatagaagtcctgatttttggttcactgagcattttatgatctcaaatctgtgtgtttgtttgcatgtatatatacacacacacacacacacacaacatattttctttatgttgttaagtaattccttggtacctatatctataggcaatcagtggactgccgaggcaaaagagaagtacaacagaaaaaaatgtgagcttcagtgttcttcagcagtatttctcagggagtctgaaggatgctgcaaaaaacatcggtggtaagcttcgatgttaaagttctatatgcatcacatagtcactatatactcggatctatttcgggtttcggtaataatatgattttgaaactggtccttgcttcttgta

SEQ ID NO: 1552 - DNA, 644 bp, Gossypium hirsutum
tgaagaggcctccaaagcttacaagtcacagatctcaacttcaacattttgttcttacgagggaaacatggtatctttatcttttatttttttatgtttagttaaggttttcttttaccaggtgatgctgaagtaggttagaaaatcttgaatggagttccaatttgagttctggtaatcatttgccttctttttgtcttgctcttagcagagacgagaattgggatttttttagttaaaaagaaaggtttcttacagcttgagcaagcacttggaaccaaaacctgtactttcactcatctagaattctaggactacaagaattaaattctaaaattacaacctaatcataacactccagtactctcacaggaactacctagattggccatcgcactttgaacagacaatctaaccatattgctgcctgatgatattgaaacatctaggcattcctgaaggtcggaatcgcaagctatcaaaacccattcgttatcctcatccaaatacttgatttcaaaagtacccacatccagcttcagcctcttggccacttcctctttcagttccactataccagaagttaaggagatccgaaatctaattatatcttctctgtatgtagccttaatcatcacactcgt

SEQ ID NO: 1553 - DNA, 637 bp, Gossypium hirsutum
atccagggctgctgtttgttttggtatttcaagtacaagaataactaaaaagaaccaaaataaacagactcacacatacaaggtgcagtaattgacttgttaatgagttttgttcttttttctttggaactagctaaagaatatgattcctattgctggcgactgttgtttagtattcattttctttatacttgaagttgtttgcagcagttgattcagtgggcgaagagttgtagataagtgaatgagggaaggtgatcagaatttggattccttgaggagattggaatttgagaataaaaagagagatagcaaagactataaggaagagaattgtctgtagatttttgaagggatatctcagtcattctcaagatgccacatgttgtcccgtattagtttcgtacatcttggaacccagttgattcatgtcctgatcctgtaggtatgagttgtcatatcaaaacaatagatatatgtgatgtccaggtggcagattctttccacgtcaagagtgtggaccttagtccttactgtgtgagtctgtgaagttttgggttcgcaaagttacgtgctcgtagggttttgatctcgttcttaggtcacaaaaagatcctagtctacgtcgatgagcaac

SEQ ID NO: 1554 - DNA, 611 bp, Gossypium hirsutum
caaaacgggaagcttggatggattccggataacttgaataggggtcatcttgactatttcttttggctcctggctattctaagtctgcttaacttcatagtctatctctggattgcgaagtggtatacatacaaaaaggtagctggataccctgaataatttaagcctaggactcccacatgactcgttgaaatttgtagacttgcttttggcgatatcagtatattatggttttaatttttttttcttgaaatttgtgaattatatttcaatccaatatgccttcattgcagctcttctatagcagttccataggttcaagtagaaccttaacagtccgttatcgatgttatttggccaatacgttgcactccaacacaaactcatctctcttcctcttacagtgcccatttgactcgacgcagctcttccttgcaccgacaaatggtccaccaaaactgctcgaactcctccaactgctcctcaaatcttcggatcaaaacctcctctcacatctccgttccgttcccctctcaactttggccaagattccgaataagaccctctcgacacgtccttagttctgatatcctatctccgtcctcatcttt

SEQ ID NO: 1555 - DNA, 542 bp, Gossypium hirsutum
  misc_feature (508)..(508): n is a, c, g, or t
attgatggcaaaagcgcaggctctcatggaaaagatcacttcttctcctgataaccctaatcctaccgtgctccatgctctcgcctcccttctcgaaactcaggagtctctgtacgcgtcctctctctctttagtctgtatttttctttactaagtggttttcctcttatcagtttatttctactaaacagccatgataagtaaatgcttgtacagtttaatttaatactcttctttttgatggaaaatttaatactagtatacttctatttgtacgtaatccccatacttgatgtttcgtacccctatcattacgtccgatgcttggttatgataacaattacttactaagacttattgaacgtatagtttagagttcgaaaacctgaaaaattccaataccgtttccttagaaactaaacaagtctgaagattttaccgtggtccaaaaatgagccataacaaactgcatacaatgaggccttggctcaaattgagcaaggtcctnggaactttgaggtcccatgttcgagtcccaccta

SEQ ID NO: 1556 - DNA, 609 bp, Gossypium hirsutum
ctccgtgtcattaatataattttgcttgaagcatctatatcaaatagccgtgcaccatccaccccaagctccttctgcaagatcaaaacaatgaaggtatatttaacatgagaagaaagaaattgcttcggtaagttagtccatgttataaccacacaacaaacaagattacaatgaaacattttaagagacaaagcagactttaaatttttatttccaacaccatcttattcagataaatgtttctaatatttaagtccttaaaaaagtgagtgtgaaatagatgttgcaaattatagatagaaacaagttaaatgaaataaatttattttgagaacttttgaggacagcacagaaaattcagaaagggcaacatccaagtaatgctaaatgcaatgaagttcacacataaccatgaaaataaagtgtttgtaacttcaagagaacttcaattggcatttcatacataagctaatgccacacacatgtaagtgagttgtcaagagaaacaggaatgcaaaaaagggaaagagtaatacctgcaatattaaaggtccttgcccattgaactctgagcctaggttttggcacaacaagatgagtaagtga

SEQ ID NO: 1557 - DNA, 623 bp, Gossypium hirsutum
aaatgttattaatttgagctgatttttttctttatacatttaattcaccgacatatgagaggtataatgcttggagtttttttcttttttataattaggtatacaaaacttatgctgtttgcttgaaattaggctcttttcttcttcgttttgtgatttctgttatataaacagggatgccaagtctttaaagttttatcaccatttttttgctatataatgaggtctttgcaggttctgataaattataatctttctcaatggcggcgatgattgcaaagcgagaacgacagaactgtaatactggtcaaagtaagcagataaccttaaattcatggcctgcaacaaagaaaagaattcccatgacagtgcattgtggaaataaaagggccaaacctgaaaataagggcaatgcgaagcaattgttagcaaggaaaaagaatcagtcaaagagacaaaagctaagtaaggattttgaattcttagaggatgagaaaattccccaggctaagagacattgtaatggaatagccaagacagctacactggatgaagaagaattggatgaatgggaggaggaagctatcgtgtttatgaacatgaaagaccggcgcaaaagccga

SEQ ID NO: 1558 - DNA, 654 bp, Gossypium hirsutum
cccccacataataaaaaaaaccgatttatggaatgccatgtaagatgccagaaaaaagtatgttgacctagttgaacaaggatggactagcatagtggggtggggtcccaacagcattcattctccttgcattgtaattgctcttaagtgtaactctgcaaaagataaaaaaaaggcccatttgattaaaccggatgaaatatagtgaaactacaaaactaggcaaaagtacccttgattttcacaacaaaatcatgcactggctgttataaatctcaagtttatatctgcttccagaaaagggctgcaaccatagattatacgttctatgggttctgataaactcataatataacatgaatgaaaaagtttttaaaaataaatcataccggcttatcattaaatccccctttccatccatttttcctacatagattaagccaaggccaaagcttttgtatatacctgttgtgttgtgatgcaaaatcctcttgttcatggacactctttgcaggagagctatgtgtcagtacctgttgccaaggagatgggagcagagaagctaaccaaattgagctaatattattttcaatagtcataataattgaataagaatgaggggggagggtcttaattcacactttctccaaccaa

SEQ ID NO: 1559 - DNA, 581 bp, Gossypium hirsutum
agaagcttggctgctttaccaaaaccagagagtgattgccccaactctgagcattgacaaaaagatgaaaaaaattgttcaattggtattcaaaccaaaatgaaataaacacatgagaaggacataaacaagaataaaaaatgctcagagcatcaaaatcctcacctctatgtctctttaaaaggcgatatgcatgcttctgagcttcagtcaaatgattttcaagctcaaaaacatagtgtttaagcttctcatattcaggatttgattcttcaagaggtttttcctttccaagaacaacatcactcacctttgactgtacatcctgtttaatttctagacaaattaatgcaagatcaaataacataagaatttcaacaccataaacatgttaaattcaagcctgagaaatagtggcagaggcaagaattgtgcaataaaggttataccttaaagcagaaaaaatgggaaaccaaattattataaaagctagtggtaagttccctctgagtttcagataagaagcaacaagttatctagagagatttataagttgagttagagcctatgaggtcttctcg

SEQ ID NO: 1560 - DNA, 356 bp, Gossypium hirsutum
acgtgagcacattatttatttgggccgctcaaattttcacatttttttttgtctctccaatcatttggaaggacaaagcaacagacaaacttcccggctgttctacagaatcctgattgctatttcaacagagctaataaaacaacactaaacagagagaaaagggagaacagaaaggatggcttcagacgttccttgttgcggggttgaattctcgttgtacctgctcataattgcggggttggtgtgttttgctgggttgatggctgggctaacacttggacttatgtctctgggtctcgtggaccttgaagtcctcatcaagtctggccgtcctcaagatcgtacccatgcta

SEQ ID NO: 1561 - DNA, 611 bp, Gossypium hirsutum
aaccactttgaaaagattcttactaattggattaccctcatgcttttctgttctattattgttgttttataccttgtgacccttcatagatgttagaaaactcttccatatagcttttcccgtatccttccccttcaaattcctcttcttggaaagggaaaaagtgaaatggaggctcaagataaattcaaattaaacaccattaagtggtcctaccctgatatgaatctttggagaaccataacccaaaagctagcttttgaggttggagagcctaggtccatataaaccccactaggaaatcccatactttctatgtgaggtccacgtcccatacctaacaattgtgcacataatggtccaccacgctctgcagtcccaatgcccatgcgggctgggtttgtgttagcttaatctagccctgggcaaacactgcaatactgatatcaccacccatgttgcacgattgcaacagagagagatgatgactggctttgataccaactgatattgacttggagaaccacaccccaaaagccagctatagaggttggagagcctaagtccattaaactccactaggaatcccatacttccaagtcccatacctt

SEQ ID NO: 1562 - DNA, 628 bp, Gossypium hirsutum
tgaactgatgtctagacgaactgatttgacacccttcgtattaccataatttatttgcgagcacttaggtgaagcagagtcgtctaaggcaacagtatcagaatgagcatggtcaccatgttcagcagttctatctatttgctcgtctgtgggtgattgcacattagaggacgcagaagttattaggtcatcaggaacttctaccacaagcataataataggaatctgaatgccacaaagataacattgtgagaaaagagatggaaagaaaaagtaaatatataaacaaaaagaaaaataatccaacaaggcaaggcatattacagctgtattttccacggtcttcagagaatcattttttacccactcctgattggcaagatacctggcagcatgctggaaaataataactatgtcaatcttccaaaatgttacagcaatatatcggataaggacaacaattttcacagaagtattgcatagaaacaaagatacagatgcaagattcaaaacagtcatacagcagtacaccaacagctaaatataactaccacagggttattgtaagttatacagcatatagagaggaagaaggggaaatagaaatgatgccagtacattaatcggg

SEQ ID NO: 1563 - DNA, 630 bp, Gossypium hirsutum
  misc_feature (602)..(603): n is a, c, g, or t
  misc_feature (616)..(616): n is a, c, g, or t
catggatggccaatttccaacactcctccttggactccatgctgcaaatgtcattcattcatcaagtttttgaacttggcagtccttagatgctttctttcaagctgaccctgcacaagcacttcattttcaaccttggcaaatggagtcttctcctccttcacagccttggttgacaacacatcttgccttgttccctattacagtcctgcttcttcttgcataaacaacttgcaagtatagtttgcttgccttcaatctgccatttttggcttgcacccactcgggcttgcattttgctgctcgcaactatacacctttgacaggctcgcttttttgcttactgtcttcaacaggtgtcttcaactttgctgcttgcaaccatacacctttgacaggctcgcactttggcttactgtcttcagttggtgtcttcaataggctcgcaactatcacttcttgctaagcttgcacatttggaaagctcacacctttccttgaaacttattgaagcttgtttggaggtctcataagtttgagctgatgttgaacacgagaagcaaaatcaaaggccccttaaaagttacgttcagaataccatnngtgaaaccattgncagcaacaatcgaa

SEQ ID NO: 1564 - DNA, 644 bp, Gossypium hirsutum
agcatctgcagtcgccaatcccttgttgatggacccttcatcatcggttccgacaccgccaccgtcatcggcggcggcgtcaaatattaacccgacgcagacggcgactccgctaacagccccatctccgacaacgacaccaacaacaaatccctcaagtgatccctcactgcaaaatttgcagcagcagcagcaaatctcgcaaatttcgtctccgcctctttcaaatctcgcccaacaacaacaacagcagcaaatcttgcaacaacaaacgcaacaaggtgttgggggtttatcaaattttcaaatgcagcaaagccttcaaagatcaccgtctatttcacgcattaatcaactccaacaacaacaacaacaaagccagcagcaacaacagcaacagtctcaatatggcaacgttttaagacaacaagctgggttgtatgggcaaatgaattttggtgggtcagcttcaattcaagcaaaccaacaacaaaatcaacagatgggcaatcctaatttatcaaggtcagctttgattgggcaaagtggtcatttgcctatgctcggtggtgcagctgccgccgccgctgctcagtataattatcagtctcagcttttatcttctgcatggaactctatgcagc

SEQ ID NO: 1565 - DNA, 619 bp, Gossypium hirsutum
agaaaaaaatgatgcgcaaaaattaaggtgcatgtaggaaataccaatagaaaactgagaagattgaattttgaagactgatataacaattgctagcaccattcttaaaaaattaaagcaaaatgcattagagttcataaacagattatgaagacgctggtcctgcatccatgtaagatgtcacttcattgtcaatcacaaaatggatacaggtcgccatagaaacaagcaatacaggaaacagaaaggctgtatttgatagaataagaagaggtctaaagagttatgtaaaccatttatggaatcataaacagcctgaacatgaaataataataataataacaataacactaatatggggaaaataagggataactaattcgaaaaattggcaaataccaaatagcactatagcaggcaattcacatcaatgttcatacatccatttatggactaacggagcttagagggggttcttagagaaaagctgcatacccaatcacctacaacaaataggctcactagaactggattctgaagatctctctttctcctcaaagcataaacatcgagaatcctcaaaacataaacatccaaaatttctcctcaaagcataaac

SEQ ID NO: 1566 - DNA, 558 bp, Gossypium hirsutum
aaaactagccaaactctattactagctctcagcctcaccaaaaccaaatcccgattctggaaaacgaattaattgctcctgttggctttataaagcatattcttatttttaagtcactttaagaacatgtggatcatcaattaagcaagaataaagggcgaccgtccagcagcaagcaaggagcattactgaaactaaccatcaaggtaaaatagaagctaacaggcttgcttaatgattaaaaacagatgcagtaccagttaaaatattttcacgtgtgagtgtccaacatatttcaggggaacatgaccttaacatttccaattagttaaaaataaactcctaaaaattgctaggctgaataatctaaaaggacaatgcacaatgttgattcatccagtgcaacaaaagacagcatacaatttatcttttgtcggttcatagtaagcacaagattggattaactcttcacaaaacataaccaaattcaagtgtttcaatttttctttgtttttttcatgagaaacaatgacagtatataacccaaggatgctccaa

SEQ ID NO: 1567 - DNA, 625 bp, Gossypium hirsutum
tgctgtctgatctttggtatattgttataatgttatgtgtgaatgtgagattgtcgagtagccggatattctatcacgaaaaccggaacttttgatgggtttccgctactcaaaatgtaaaatacaataaaatatatatacatgagctgtaacactggtttatacatagtcttgccatgagttacagtttcatgtgttttggaatgctttcccttactataatatataccaatgttgtcattatttgttgctttatgttgtcattagttgtgtgtgtccaaatatatattgctatgaacccatttcacaaataagccatactatttagtagggaactgaaaataaaattgagattattgtaaaggagagaatatttagagatttatatggccaaaagcacccgtggtaaaagtcgaaaccccaatgtgagacgtggttgaaaactattctctgttcatgagggcaatggtggtgattggtgaaagactgctgctaggagcagttcgagaagatttagttgcaggtccataaaagggggatgaaggaccgctcggagctgattgtggggattttcttgatgagggtgaagattttgaagacggagaatcggatgatggagaaggtg

SEQ ID NO: 1568 - DNA, 609 bp, Gossypium hirsutum
aattaacagtggttcactacgtgataatttttatttggctcctgaagtaagctgtcaagtttctgtctagtcgtctataggaaacctcactgtttatttttattgattagcaacttctttaatatgatggaaatagcagatgttctgaaatttgctatagctacttaatgaaattgagttttcagaaagaaaaaaaaaattgaagtaccgaatacttgaaatttatactattttattagaaacaaggcaggaggccgggggaaacaagttaatatatgtcaccctttgggtttctatgttcaaaaacttgcagcctcacttaaccctgaccaatcccgtatgatgtcatctaaaaggattttcaacataaagcaaaccaaggctcattctactcatagcactggaagaaaatttatccctcgggaacatgaggacggcttcatgttacgggtggaactctaattaaaattaatgctaatccggttttctccccgctaatctatcccggggctaaacagccccactgtttctactcaatggaccctagtgacaggactatgttaggtgacaaaacattacaatctcatgggggggagaaaccacatatat

SEQ ID NO: 1569 - DNA, 631 bp, Gossypium hirsutum
ttcttaactctatttcatccttctcttttatgaatattgagaagcttatcataatttgatttttgtattttacaacaattaaaaaaattatcagatttaaaaatcagcagtgcagtaatttatatacaaagaatatgtaacaaaatagcgagtctgtagctcaaattcatgtatttattaataattagattagcttttcaattttcataaaacactatgattaaattgtaaaaatttaaaatcaaggaattaacttcttagtaggatgaagttcataattaaaccttactttattccctatatttatttcttctctttgctgctgaaatgatctttagcacttacaaattattattattatttatccttgttgaacttgaaggaagtagaactgatggaagaaaaccagcaattgaaagagaaagtaagtgtatattgtatcatctggaaaatttttcctatagtttcctggtttttcattttcatttgacagcaaagttgatttggtatagatggggaattcacctcatgtggtccaaccaactgtggctcagcaaggcctaggccagccatcagactgcaacggccatgcatggagaagctatagctctgacatttctcttagactggg

SEQ ID NO: 1570 - DNA, 658 bp, Gossypium hirsutum
aatttaggtaatactaaatgaatatctgaaaaagttccaaaggaaaattgttactttggcagaatcccatagttggacagtcttgtcaaaagacgatgttgcaaatatggttgaacttggcctaaaacgaacatcagtaatgagaagggaatggccctccgcagttctgacaaaatcgagagtttccatattccatatcaagacctgccagaagaaaactgtcatcagaactaagcttacataaataattatgcgaacaaaaagctgcattccagcttaagaccaccttcttttcatgcccagcactagctagtaacttcccatctgatgaaaaatggcagctcaagactttgcttttgcatgagtgaaggcaactaacctcttcaaatgtgaagcctacaccagtcatgacatatcattttattacagttgtttcagtaatatctctagcgttatactgccacaagtgcatctttgtgacagaatttcatattattaacttttacgaagaatcacaaaatacacacacacacacaatctacaccaagtttggtggcggacatcagagaaagctttcattttccaacctgattaaaggctacaaccaaatatagtcatcccatgctatttaacaatttttcagcaatatgtttaaagg

SEQ ID NO: 1571 - DNA, 586 bp, Gossypium hirsutum
gctgcggaatcaaggaaaaggccagaggagatgcggcataaagcaaggcaaaggtaatctctctctctctctctctctctctctctctctctctctctctctcaagtattcagttttttgttattttacttacatttgcttggagatttatatggcatgtaattctctagaggaccatcgggatacgggggacgatcatcttattatggtacgttattacggacattaaattctgttttcatagcatccttgttagatacatatccatatctgacactcacttccgggcccaagtgtggtgaaatgggtattttgcttcagatatatgcaaattatcattcgtttattttttccgctatgtgatagtaaactaattcgtagcggttccttacacgatgtgttagggcgttcccggtctcgttcagcatctccaacgcgctctcctcgccgtccttcaggttctagaggccgatatcgctcaaggtaagctgtcaaattgccatcagaaccttgggtgttagcaaatattcaatggttaaatattggtattgtcaggtcgtactcccctgctccaagacgaagagaa

SEQ ID NO: 1572 - DNA, 460 bp, Gossypium hirsutum
attttgtttaacttgtaattttctgatgtttggaagttaatcatgtccaaacccagaaattttggcattaaatggacaacatgtttacttttctttttagtttaaatacaggaaaaattcaattgtcactattattctgctgctgtaaatttttatgcttggtgactactgctacaactatttcttttatcatttatatgcttttgtgctttgcccgtagaaacaggtaatggtagctttggatgctttccttcagttacaaaaagtgtcgatgatgctggttttagaactctacaatcaaagaaagtagtccccacaagcaggtcgcctccatcggatgcttcaaccgagcccactgccgagaaagagacacacctgagcagtaattataggaattggaatatatcggatttcagtaagttggaccgcacaaaaccctctgattgtaagactgaaattg

SEQ ID NO: 1573 - DNA, 613 bp, Gossypium hirsutum
  misc_feature (323)..(323): n is a, c, g, or t
  misc_feature (326)..(326): n is a, c, g, or t
  misc_feature (334)..(334): n is a, c, g, or t
cacctaactacctcttagcattctcagccacttgactactcctgtttgctagataatggatcttatcccttaagaattctatgaggttcctaaaagattctcatatgtactcacagttttctagttaatgagccttgtccacttcgtttgtatttgttaacagcactgcttgtaagatatgagaagcaagtaaaggctgaagctgcttctattcatttgctttccctacatttctctttagatttggttttccctaatcccttaggcctgaatttctgcactttattcatttatacatcagctgtgactcctaagatcctaantantgaaaaantaaaagctttttggaaagaaaccacttaatttccatttaatgtctgcttgccatgcactggcgctgtggtgcacaagtatacttatagcatgtgtttcctggataatgagtgcattctttgtgaacctagagcgtacatgttttgaagttctaattgcaaccttacgatgagattcatgcatggcttaatatgaattgtctgaatcatttatattgctatgttatatgtaatttccttctatttctgcatgatcagtggtctcgacaatcaaggtctga

SEQ ID NO: 1574 - DNA, 585 bp, Gossypium hirsutum
  misc_feature (44)..(45): n is a, c, g, or t
accgcaacgtacatggagaaaatcatgcaaacaaccaccaactnntgagaaaataaaacaactccctcccttcaatataacaactcatttttcagctataccagaaacggaaatttcgaaactctattttttgatgattgaattagtaaatatgatttattaatatttatgagcctattatagatttatattgatttctggtccattttttattgatatgaatggagttatacatgttacaattgaagtgtgattgaattgatatatgttatttgattgactgttatgatctgtacggatatgttataatttcatgataagtaacgtactaatctctgaatatttgtgatgtacatataaatgttacatgatgcgctaaaggattttcatggttaatttcaatatgttttaattgcttagattatctgaatattaatgtaagttaagtaaattttgtatgagcttaccaagcatatgaaatgcttactctattcattttctatctctgtagtagtggccatttttatggaacatatcaaatagatcacctcagagctcacactatccaattctgactcggtagac

SEQ ID NO: 1575 - DNA, 653 bp, Gossypium hirsutum
gctggctttttatattaaagggtactggcgatttatgatatgtttgcataaatgcttatatgtgcaatgtagtgtaaggttctgagacatggctgtggttttggcagcttaggttttggcaattagcatgcaaactggggcaatgcattcaatgagatgagcatttttagttacatatttttgtagttaagattagttcttgtttgctgtaagactttaatcaaggctatttgcttactggttttgtatgttttaaataatttaacatctatcgtttgtctggaaaaccgtacatgcaatgcactttagtgtgattttctggaaaacgactaaagacggtaatttacttgctaaaatatacttagttgacttggtgtttctagaattatttttcatttagttgctctttattgtttggtctctcaactgtatagcatagcttcttcctatatttaatgcaattaaagcttcagtttactatcttctcaagagagctgtgatttattggaatttattgacactgtcaatgatatgatctgagtgcagatctaatggaagtaaaaaaaaagtctatatgttgtaatgaacttgaaactaacacattgttcacgggtttttcaattcttttcccacaaggaaagatattcactttg

SEQ ID NO: 1576 - DNA, 391 bp, Gossypium hirsutum
acttcttattggtaattgaaaaataatttgtcatggtgagcagatttttctcagttgtcaggaactgtttgactgagagttatctcatttgtatgttctttgcagttccgagtttgcgctccgatcatatttgtacattattttccatgagttagtgggccgacctgcttcctggctgtttgctgaagaaaaagtaagttttcaacctttggatgatgttaattatctgttgttgttttcttctttataaagaaaacataaaaaacatactttatagttgccttttttatcttacaggtgagagttttctatgcggtgagactctttcttggttttctatctcttatttcagatgctactctagtggtagcactttccagaaaatatggaa

SEQ ID NO: 1577 - DNA, 650 bp, Gossypium hirsutum
tatttttcttcattgccaaatcatatggaaagagactgaggcatctcattgttatgttgcaagttgtaaccatggttaaactttgcctaattaattagagtacaaattcctctaaaagtccttgctagctaatgttactagattttcattttataggcaaccaagcaaccacaaaaccaaacatgaaaagacaggtagtttaagttattttcagaccatttcactaaaaacaagataataaaagtaccaaaggatgcaacacatcaacaacataaatgagcatttgcatataacaaatttgtcctcaagtgtttgggaaccaacctcaggcagcatatctactttcctacgagctgctatttcaaacgcatatattttcatgagagctgtagttgcatatgccttcaaaaataaatgaaagatcatcagatttgcagatattgaaagaacaaaaaaatattctagaacaattacgaaagaaattttcagttaaccacgagattgtcaacataaaaggatctaggtttgcatcaagtggtaataagtaataactagtctaagaacaattaattcatattagctgataccttaacagtctcatcattagaataagcctctgccacatcacacagcttcccagtaatgtcaga

SEQ ID NO: 1578 - DNA, 653 bp, Gossypium hirsutum
tgacccgagagtctattagtagaaacggaaaaaaccaacatccattgctttgtgtccagaactcattcccctatgcattgggtgctacaggtagcttcaagtaaatttgggcataactatctgcttcttcgatattttatatttttaaatatttttatagatttaatcttttgaaattaaatatctttaaaattatttaattttttatttcgaaaattatcaaatatttaaaattataaattgaattggtataatgaattaattagatactaactacattactatttttaaacgtaacacgtattattataaaaatattttttatcatttaatatttttatataaaataatttaaaccacaacttgaaataaaattgcttctataaagagacaaccatttcttattaaactttaatttacacctagaaaaatctcatattggcaaagcatgggaaaaaccaaagttatatagaggggtagcaatacttaaatggtaagagactttttagaagtatatggacactctcataaataaagcgaacaatattttattagactgggcgttggttatgagatttataaaattaaattcattacttccttacaattcatttgaattttgagtggaagaaaattgcgcatagaagccaatc

SEQ ID NO: 1579 - DNA, 651 bp, Gossypium hirsutum
tgaagaaaggaccttgtttagtaattgaacatgaaaggtagaaacaacacatatcaaagcaagggataggggagaggaagtcaaagcaatgttcaactagacattccaagaaatatacattttctttcactaaaagaacaataaaaacatcattcctaagaattaccacatgtccaatgccaaaagttatgaaaccgaggtagacattctatcaaataaagcaactacagaatatggtgaagtttaacagataagacctacatataaacctaaatcaataaattatgtacaatttcaggtatgcaatacaggtgtggagaagacaatatacatacatcaaaagggagcccgccagaatctacagatatatcatcatcctcagcttcagatgattctctactgattgatactgttgaatttgagtggttattaaaggaagtcgcgatatgaactggagatgcattaccatcaactttccgtgaggcattagaaattttactttgtaaccgaaaatgatcttcaataagcattaaaattacaattgcgttctctaccaaaaacactgaaagctgagcagcattctgtgcttccaacttagcatcctttgcggacaaaccttctgctgcgaccccagcagaagcagcagcaata

SEQ ID NO: 1580 - DNA, 614 bp, Gossypium hirsutum
tctctttccccatccagtcagtgtcgaacaacaagaatgggaaccaagctatccaattgaggcaagtcactagcagcaggatccacattggtttcttcaagctcttgaaagctgccatcatttcacctatgaaaggagtcgattctttgctcccatcatcttggatttgcttggtgaagggatcttccttcacggttgtgaccgcggttactgttactaacaagaggatcatgatgtctatggtgaagcatgatttgagatttgcacagtaaatgtcgcaggctgtggttttggtgaaagggaagatcttgtaaaggtgggagtaagaaccggcggcgtaacccaacacgttgccgaccgccatgaaaaacgagaaccacccgtttgcggttctcatctttttgtggtcattagccgagaggtccgcgaggagagctcgacacggaccttgcaacatgttgttagccacgtcgaggatccaaaatccgacgacaaagatggctacagctctcggtttagtcgatctctccaaggaatctcccgcatggtggccaatgtctttggcgaaaccgatgaggaagacagctatagagacagagagagctccaatgaca

SEQ ID NO: 1581 - DNA, 620 bp, Gossypium hirsutum
aatgttgttttaatgtatgaaaccaagctcgagaggcctgttttaaaccatataatgccttgttcagtttacatacaagttgttctccatttgctccatgcatctcaaaacctggtaggttatccatataaatttccacagtcaatgtgccattaaggaaagaattattcacatcaacttgccttaacactgatccattaataacagtaattaccaaaatagtccgtattgttacagctcgaaccacagagttaaaggtattgtaaaaatttgaaccagcatgttgagagaatccttttgctactagtcttgctttatacctgtccaaatatccgtcaggcttcttcttcactctgaacaaccaattgatctcctagaatgtgggagaggacaaaggctccaagtatcattttttagaagagcttgtaacttattgttcttcgcttcttgccagtaaaatgagctcattgcttcctgaatatcaataggtatagtagcaaagaaactatcaataggcacaaattagatgaactagttaccctagtgacatatgcttttggtttaaaggttcctactttgctacgagtaatcataggatgagaattaggagcctgagatgg

SEQ ID NO: 1582 - DNA, 630 bp, Gossypium hirsutum
tacctgcattttctctgaaccaggtccggttctctgtggcctaagaattctgtcggttgcaccattttcatatttttgaataacgttagaagacctgctcaacagagaacacagaagataatatgtaattgctaagccatgcaggattacaagctctaatcagaaaaataagaaaagcccccataaggatgaaaaagccgtatactttttcatgacaatacaacgaccaaaaccacggtctagagaagacttgttcatgacaattgcatcctctatgtcataaccactataactgatgactgcaacagttgcattctgaccagctccaagcttatcatatccgacctgaaagccatgacagtcaatttacagtacaaaatggtgtgctcatacgctacaatatgcagactactgaccagttcaattgtccttgttgtcaataatggccgctgaggatacaccaatagataaagtaatgtgtccatccggcacaactacagcacaaaagagaccacctcagccaggaataaagaaaatttagctaaaagcatatggacagaagtctcaagctaaactcaaacataaaagatgaaatagaaaacttagaatatctatccttgggagaccgtg

SEQ ID NO: 1583 - DNA, 630 bp, Gossypium hirsutum
tctgtggtgttttacaaactaatgacatgaacttcaaacacccatgtatttctttctttctgtttcttttatttgtgatatttgtagttttaatttatgctgctcttgccataacttgtcttcttaatggtttacctatttaagaattgttacttgcgaaattaatgtaacagccaaagattgcgacccactgttcatgggattatcacatccaggattaaagcccattcagaattcataaattcttcagttgataaagctactcgaactggtgcgaccagtctccatcttatgaagggacagttagaaagctatcagttatccaaacaaaagcgtcagaatgggatatcattggctgggaatctgttagcagtgagccctgtctcacctgtgatggctcctacaggaaaagcacaggctgctgcaaaagagcttcttaattcaattctggactctgttgttcggatatttggtgagacgttgaattattattattgtagatactactatttgataagacactattataatcaatcattactttcttgtatcactacttaaatgaactatgatactaataaacaaaaaaaatctatagaatttctttatatacaataaatctatccatgg

SEQ ID NO: 1584 - DNA, 630 bp, Gossypium hirsutum
gtttgtgtttgatctgatctttctattgtctacctgtctctttttgccttgttttggagcgttcaatttctaaaatagtatctcttgaaataggcattggctggaagtagtgatgatgatgatgatgaagatggttggagtgattcttgaaaggacttacatggtgacagactcttagaggttacttggttaaaatgtttattcaaatagtaaattttccatcacagtgaataggaaatatgtttggtatggtgactggtgtattctttgcctcaaaattgtcattctgttggtgtataatattctgctcattcccgtgtatctcacttacacaatgaagacttttagtcactggcaccaggccctgctatatatataatgcttatacaaggaagagtttcaacatccatggctgagcctgtagaagtattggctgcgcctaatgaaattctgtttcttttcattattcttaccaatattttctgaataaatatgttgaagaaagatgtaaattatatttgagcaagagattgagatgtggttttggcgatttttgtgtttttggtaattattgcgatgcctgtcagatgtaaatggtggataaatgcaatgtgatgtggagtgtagtgt

SEQ ID NO: 1585 - DNA, 621 bp, Gossypium hirsutum
  misc_feature (613)..(616): n is a, c, g, or t
tgtataacatagagaagatgaaatatatattccaaaaaagataaatttagagggaccagagaacctaaacatacacatcagcatcttcaatttgaaaggataagtttccaacaaacagtgtcttcgatcctgtggattgggtttgaggagttacaggtgtttggggctgcagaaaaacgatgatcagattctgaccaacttgacaaaatgatcaataactcaacaggaaactagtacttacaactttctttgcagacttcaagtcctgcttagcaggtgttgtagcatcgaccatttccacatctgtgtcctgattccaatatagaagtacaataatgccttgaacaatcattacaacatacaaaaagtatcatatagaagataggttcctaaaaaattgtacttttttctttggagcttcttcttcgtcactttcttcgtcatcatctgattcctcagattcttcctcttcactactgcttgcttttttagcaactttagcctctttcttaggagtctacagtgtgaaataaacagattgccaaattagtacaagttaaatagaaagttaacagtaaccagatacacctcattcttcaaacgataaagcacnnnntcttc

SEQ ID NO: 1586 - DNA, 601 bp, Gossypium hirsutum
gaactccacagcagccatacttaatttcctaattcttttccttgaaaagaataagaaactttaagaagcacaacagaattaaacatacaaacatcatttaccttaacagtccagtttttatcaactaaaagattaggagacttcaaatcgcggtgaacaatggtaggtatgctggcgtgtaggcaattcatgcccctagcctgcaaaataaaaacagatttgaaattttatggggatgtgacatactaaataaaacaattgcagaagcaatcaatttcataccacatcaagagccatcttaattctttgcttctcatcaattcgagaatgaggacgatgaagaatcttatataagcttcctctggaaaaccaaatagcatttgaaaattttagatctcaaagtttatcgacatgtctgtcacataaatgcatatgtatactggtagttgtagactgccaaccttgtatgtactttgcatatgaaggcatagacttaccttggaagaaactcagtaatgatagacaggtttggagggcgagtaacagcacccataaaaagaacgacgtttggatggcgcagtctacgcattattcgcacctt

SEQ ID NO: 1587 - DNA, 657 bp, Gossypium hirsutum
attgtctaggtatgtttctgatacattgttttgcagtttcttggcattttgatcattacgtatcaatgagaaatcatatggattatgtggaggctgtttgcataagaatgaatgctgccgattgtttgttttacgctcttgcctatattaaaggaaaggcattgctggttatgcagaattatttgtggttctcaactggttaaggttgactgtgtggctgtatgcttgagaaaatatgccatcaatttgtaattaaattatgagatgatgatggagccgtaatactcattttcatcttctcatgaaatacttctggtttagaaaatgttatgttctcaccggtttcctcccaaagcagtgcaatccttttgattgaccttgttatttaacatgcttgcattctatcatctaccataatcttttcagcttgaatactacgtgattaacttgcaaccttaacattaattaacagttcacaattctgctcatagtttcccttctcttgtaaggttgcacccatgactagggtccttggaaacctaggaaaccatgcattcatgcactatgaaatcatccctagctgtcctacatgatttatgtatcacattttggtttgctttcatctgtttctttttgagccagggtactgctcttata

SEQ ID NO: 1588 - DNA, 469 bp, Gossypium hirsutum
ttttgttatattgtttttttttgttgctttatcaaaagttgttcttagggatgattactgtagaattgatttcatataatcataatttaaggattgattattttgagagaagtttttaaagtgtaatttattaaacaatcggttgaacactcaacaatgataaggtattgtctttgtggtcggggttttgtctccctcctccaccaaaagttgtgtacgatttatagagggaaagtgctttggttggtaaagatatgatctgcaaaactcactaaagaggtgttagtatagtgtgtgatataattatggaagtcacctgcacactgggggattcgaaccaacattgtaactcaagtggaaccatacttgcaaatatgtggcctatatgacttaggttgatggttctagtttctttgcatgcaagtgactttcatattaattattgttacatgctatgctgacatctctc

SEQ ID NO: 1589 - DNA, 477 bp, Gossypium hirsutum
  misc_feature (465)..(465): n is a, c, g, or t
  misc_feature (467)..(467): n is a, c, g, or t
gagcactctcacccttctcacagttcttaatctaaaacaccgattttaaagacaagacatattcgtttgttttttatgccctacgtgacactgaacaaatcctcattataactccagaaccatacatctggagataatcggataatgtacgagaaaaaatttttaacatgccatcccccatacagacaagacagctccgagttccagcatttatctttacggtccatcttcttgtgctgaatcaaatatggaaagagccgaatgagacatcagtttacaaggaggaaatgggagacattgatatgaagagagacttactgcttaaaatgaagccttgaagcaggctttgggctctctcagactgttccagagtacctgatatttgaatgatcttttgtgtctcgtttggtctgtcttcgaccagagtcacattggcacccgacaactataccgcaaagagatatnantgctggaact

SEQ ID NO: 1590 - DNA, 637 bp, Gossypium hirsutum
cttcggatgagggtggcaagaagccaattcagaaggacggtcaggaatgccgtcggaaggaagtctcgaaggaagagaactgcccttgcaaatgttagagtgagtggctctaggcgagaaactattttgccggtgagaaaaacttcctctaagaacatcgtaaaggaggtagttccggtgaagcaattgatgtcccataactcaaaccccggagggaattctgttagtttacaagcttctgtttccaaaggttccttgtcttcagcaaatctcagtgccgttgcttcgaaatgtctttcttacaaagaagtagctgtagcacctccaggtacagttctgaagccattacatgagggggaaaccgaacatcaggcgtgcaccatccgaactgagactacaaaatcggaggatggagaccatatgtctgttattgataacgttgtagataatgatgatgatgaaactgaaggaactcgtgatagcgaaaatcaatcagaagaatctgctcctgaacttgataacgtttcttccgagcctgcaaccaaggaggatggaaacaatatctctgttgctaataacattgcagatgacagtgaaaatcgatcagaagaagctgctcctgaactcgataaggttt

SEQ ID NO: 1591 - DNA, 662 bp, Gossypium hirsutum
cttatttaagatgcaggatacttgcaaagaaaagttgggaatacaatattaatacaaacaaacttaattaccctactaattttgctcaagtataaaagctcggataagaaagtgatacttgcttgtgattgaactaaaagacctgctatcatctacacataaagatgttcatagtgcggcggcatcagcagatgaatgtttcaaagtacactaacatagcggaaaagtagttgttaactatagagtaagtacctcttccgggaatatatcaggatacttggaaaatatcctaagtcttaaatcattgtatctacatgaaacatgagatcaaatgattagaagcaaattggaactctgtatactcgggatatgtcagcagaaatagaaaagcagagaccaataagagtaacagtaaggagacatacgttcctataacatcagtaactctttcgatagcccgctgccttatctgagatgcttcaagatacctgtctagctctgcacgtgtcctgaaacaatacagagaggctgtagagagaaaatctgagagtagacccttttactgtagcaagataaaaactctttttaagagctcttaccatgtgaaagaagaactgaattaaaataaactcaccagtataaaagtgaatagggttgccgag

SEQ ID NO: 1592 - DNA, 558 bp, Gossypium hirsutum
  misc_feature (548)..(548): n is a, c, g, or t
atggactctatctataaaccatctaatatgttgtttggcttcatttggtttggtttggttttgataatgatttgtttgttgagttgtgttcctaataaagagtgaagaatcaaaatgaaggcgtggtcttgggaagaccggagcaagtagcttagctcctccaccatttgtttttagtgtcgttattcagagcattatatatatacgtgtctatgactctttatatctctttggactttatagtagaggtgctcatgggccgggccgggctcagaaaaaattttggcccgcatcttaggcccgggcctggcctgacccgaaatatgggcttgagattttgtccaagcccgacctaggaaaaaattcctaaacccgagcccataaaacactaaaaatttattttaaaaataaaaaaaaattaaaaaagtattttaaaaaaattttaaaattaaaaatatatatattatattcaggccaggccggacccgggccataaaagcggtgcccgaggcccatcccattttctaaacgggcctcattttttgccncaaacccata

SEQ ID NO: 1593 - DNA, 497 bp, Gossypium hirsutum
gctcaaacaaaaacatttgacccatatcattaatttcaagactgagctacaataaaatgtttgaataaagatcagcaatctcagccgaaagatggtgattatttatataatcatcataacataaatcaggtttgattattcattttcatcatagattgcagcaactgacggaaaaacgaggcaagaaacaattaaatcaattaaaatttgacccccaattcccaaaaaagtaaagaaaatatgcaaaaagagatcagatggtagtgcatgtttgtattcatcattcaaatgcaaaaatgatggataagtttcatcacacctccttgcatatcttttgaaaaaatcaaatcttattaagcaataaaaaaactagagcttattgattttattttttattttttgcaaattaaagaataaaatatagtcaataaaagtgaatattttacagtttacacccctcattggagtaatggtaaatggatcatataatcgatcgc

SEQ ID NO: 1594 - DNA, 630 bp, Gossypium hirsutum
aagttattagacataaaccagaacgggaaagagtgtaggcctaaaaataggaaatacgacagcatccattacattgtatatgtatactaataatgccacagaaacagtctacaaataattaacatccttccaactgtgcacacataagatgcttccagtctatgggcatctatcctcatataagatcctccaatccaaaatagagagaaataaatcagacactaagggcgtattcaaccttaggtctatcactcaagcacactaaattttgtcacaaacaactataatctctcgccaaaatggcactatcatattgcaaagaaatctaggtattttctaagtatttcttaaaattagagccaatgactaccccaaatcaatgtggttcacaaatttcataatccaactgctcaagcatgtactgtacaaggtatgaacagggctctatgttaaacagaatctctattttccctgaagtacttgtgttcgatgcatatttgcagatggggtatggcatatggtggttcaaatacattgaaaaagaaaaaaattgagtataaacttgcagatatatactgatatacgacaatcgcctcaagtttaggtagcatctacaaggcctatacacac

SEQ ID NO: 1595 - DNA, 630 bp, Gossypium hirsutum
aaaattccatcaaatgcaagtatgagtagacatgtcaacagcatacttgttcagtttcttgcaaacgcgccctaaatcgattacgctggttgcagatcactttcagcattgaggtctggtctttatctgaggaaacttgcttctgatctatgttcttctccagaataggtaatggactaacaaatcagaacaaactcattctgaaaactgaactatttctcttgcaaaacatacttcaatttgatgtcaattttttcctgtctataaatattcattacggtccatgatatgaaggatttaaatgcaagtttaacattatcagtcagaaaaatatttcttgcaacaatataccgtacacatgtaccactgcacttcttaacaggttaaagcatgccaccctcaatgagtgcttagaacaatgatatagattctttcctaacctaacattatctgattaaaatcaggttggcaagtgttgctgatgctggttctttacatgtaactaattttttattaaggttggacaatttgacttctttaagaggccccttggtagaagacaaagaaataagaaacgaggaagcaaagttctccggagattatactccatactggttatggctagaaatg

SEQ ID NO: 1596 - DNA, 569 bp, Gossypium hirsutum
  misc_feature (521)..(522): n is a, c, g, or t
aattgagatcaatttccatgatcaaagtcaaattgaggaagttatgggaacttgttaaagttggcatgcatgcagcacatgaagcagccaagaagaagaacaagctgcaaagccatacttatgctggctaaagttcaagctgctgttcgttttgttacttcaagcactagtttagttttttagttcaaaatgaactgagttggtatagcttttaatgtaatttggagctgatagattgataaatcagcttatctatgtgcgcaagtaatgttttcataaattccaatgtaacttagtggtgttaggtggatgtttaggtgatgtagttgactatatatgtattgtttttcttattgaaaaattgagctaaatgagctgaagccatagctcccttgctgcacatttgtgagcaagtaaaaatactgccttgttctgtcttgtatttcttactctgcttcaaaaatccccaacaattggtatcatgaccttagtcttaagggccattgattttgcttccgctnncttgttaaaagaaagaagttgtcaaagcatgtcatcaaggactgctg

SEQ ID NO: 1597 - DNA, 624 bp, Gossypium hirsutum
  misc_feature (481)..(481): n is a, c, g, or t
tttttggttgattactcgtaattgattgacatttggatagattcatagggattcatttgaagatataataatttctagcattgtctcttgggcttggatcaggggtagagtggagtaggaattgggtagagatcctaaatttgaaccttggtactctacatataggaaaaaaaaaagttctcagctttttcttagttacttttgatgtggaatgaaatgccattattgtcaaactataagttttcagcatttgaaaaagtttttgatttgacattttctttttccaggattcagatgcttcaattcagaaaagggcacttgaacttgtatacttgctagtgaatgaaagcaatgtaaagcctttgacaaaagagctaattgaatatttggaagtaagcaatcaagaatttaagggagatattactgccaagatatgttcccttgttgaaaagtaagttgtgctattttctagttaaacaanaagtgctacttcagctttccttatgctgttatattctttgcagttgtcttgtatgctttgtcttcttggctcaatatttcatgtatgatgtttgtgctttggatgtatctagctgcatattctgggtatgatccttcctccaa

SEQ ID NO: 1598 - DNA, 650 bp, Gossypium hirsutum
gtatctatcgttgtgggaataatataccgcttacagttataagtcttcaatctgctccagggaagagaaatgtgcatcaactttgttgagagtttcttgatcaatttccatcgatgcgaacaatttcggcattggataatttgctacttttccaggagttgtgtcgttctttatgtcctgctcgttcaacgtgtcgggatctttaatttctgttggagtagacactgtgctttgatcgtaaagttgtgctttcatctctagacaagattttatatcctcttcatttcgagctttgttcaacttgtccatgatatcacttaacatcgaagatctctcgacccacaagggatttgccttcttcaacctattatcgagtttattttgatcatctggatcagtagctccattgttaggttcacttttctgaagcttttttattccctggtcaacaatttgcagtatcctctttctggtgttatcagatctcacaggattcgatcttagtgccaacttcagacctgaagtcattgccaaggtctcgtcttcctgtgaagtggagctaggcttagactcttcatcctcatcagacccgtcttgcataggttttgtagaaaagacttccttaagtaaactaacattctgcatgtacc

SEQ ID NO: 1599 - DNA, 586 bp, Gossypium hirsutum
cccgtatttgttggcaccggcacaaacaagtaatgcaacttctttaatgttttatccatattaaaagggttattactatgttgttgccaatggtattgcaatctcatttcgcaggaagttttggtggctgggattggaaaacacattctgagagttgataccatgaaagctgggaagaatgaagtcttctcaactgatgcacctacacctctccaatgtcctatagacaagttgattgatgggattcagttggttggtaaacatgatggagaagttactgatgtttcaatgtgtcagtggatgattacccgtttagtgtctgcttctacagatggcacggtttgtattttcatttgccattttgttatattgacttgcagatatctatgtaatctctctatgctccattgtggtatagtcatggaaccaagatcttggtttcttgttgtttagtgctggaatttcatgttgactgcatggatatatgcagttatgtcaagattgctgtgcttacaagtttatgttatgctacagataaagatatgggatgaccgcaagtcagtgccactaacagtgttgagaccac

SEQ ID NO: 1600 - DNA, 622 bp, Gossypium hirsutum
attcataacacagattttttaatccagttttcagaaattcagtataaaaagaggctcaaattctactatcaaatgaaaacaaatactcaatctaacaataacaagaaagcagcagtgtccttggttgtggaatgagatgagagacgacacagctaggaaggagaggaatgaagcgggggaggtgataatattgcgtgaatcaaatatacaagtgtgcagcatagcatatccagtagaaagacatgaatgaaaacatcagaggcccaacaagggttagaaatgccataatagatacagctgaaagttgaatcaactggctcaacaacctctttttatcttcacaagagagattctaagaaacaaaaactataatctgaaatggttcagaaaaacagaacatggtttaacatggaatcattggataatatccatgaaggttgattacctcagcagaatgctcctcatcccagttttcaactaaactctccaaaacataaggagcatcttgcatatcctgagaatattcccccaacatccatataagagctgccttggcttttggttcctgtacatttttgctgcttatgttcccaaccactgcaatgcaatcatggctccactg

SEQ ID NO: 1601 - DNA, 646 bp, Gossypium hirsutum
ctacggttagtctaaaaacaacggtgacggtgagattagatactgtagtgatactgtacgtgcacttaaccgtctattcaaactcaccctcaattggtatttgttgctattgcaacaataaagatgatgtgaactcgaggctaatgaagtagttttttttcttctaatttaagagtttgggatttataaataaaataagtattgcataaaaaaacataaatatctacaaaaatgtatttctcatcaagttataagttttgattaatggagagggacgagtaagcaatgatagatccataaataccgactatatattttttttcttgttcttctttggtgataatatcttcttctttctcttataatttgttaattgctttcttccgctactctttttttttcttttaatttgaaacttctaaaagacgttattttataaaagataaatatatatatttatataaaagtattaccttcctatttaagggttgagaggggttatggatagttttaggcattgtattaaaaagaacagatacgataagaatctataataagattaatgtttgaaaaaacttgacttcaatgaaatggtggttaaaattcttattaaacatccgtttgacatgagttcaaatcatcttta

SEQ ID NO: 1602 - DNA, 674 bp, Gossypium hirsutum
tgtgcttgtgtgtttcttagaagccatctttcctttatcttactgtaaagaaacatagtggtttgcctcacagtgttgttttttattaaaacagttcatagtttatccaacactttttattaggttaagttttgttcatcaactcataaaatttctcgttccattaatttacttttgatgtttctcttatttcaaaagcaaagacccctatctagtgctgatgtgaacttcacgtacgtgtcttgaatcagcaacaaggattaaaattggaccctgggattatccaataggttacaaagacacgaattatcaaacctgttgcatatgaagaagtgatgactaatattatcaattgaaacagaatattgacccgctaactttgtagaatcagggaccaatattatcaattgtatggaaattcacaagaaccactattggaattggcattcgatttcattcattgttgctaagtttcacggcaagtatacgaggttcacatcaaatgggcaaatagatttcctcctccatggcatgagcttcattccctttataacatcatattgggtgtttaacctatctaagttacatacaatacctaaaacaacttcatagtggatttttagctttttttcatcttgaagaattctaaaagacgagcttggtcaaatattgag

SEQ ID NO: 1603 - DNA, 618 bp, Gossypium hirsutum
  misc_feature (63)..(65): n is a, c, g, or t
atcattgaaggttctagaaccgctaagcccacgttacaagcaatagtaccgagaattactacnnngaaaaatatataaaagatcattgggccatgcgggttccccataataattatgacccatacctttagctaatttagctcttaatacaggatcgttcaagtcaggtttttttgttattaggataggtgaatttttctagatccatcccccaaaggaaccggacatgataatttttcatcatccggctcaagcaaaagtcaatcgaatcaaatggatacaaacggatacctataaaataaatctatattctatatgtttaaaataaatctatatgttatccccacatatatgaatggttccatatgtaagaaaaaagttacccgattccattttacggagttgcaattatacattccaaggaatttcatttttacaggtaaatgctcaatacccaagtaggcgtacaaaattgatcgtgatcaagtgctttatgggtcgtcttaggccttgcgattcacctttatcccaaaaatatatcgagattttttacatacaaaggatttacttgttactaatatagtctagcctttgctcttctttagatcccttgtttca

SEQ ID NO: 1604 - DNA, 673 bp, Gossypium hirsutum
  misc_feature (488)..(488): n is a, c, g, or t
  misc_feature (530)..(550): n is a, c, g, or t
  misc_feature (574)..(574): n is a, c, g, or t
  misc_feature (576)..(576): n is a, c, g, or t
  misc_feature (584)..(589): n is a, c, g, or t
  misc_feature (591)..(591): n is a, c, g, or t
  misc_feature (594)..(595): n is a, c, g, or t
  misc_feature (606)..(607): n is a, c, g, or t
  misc_feature (647)..(654): n is a, c, g, or t
  misc_feature (659)..(664): n is a, c, g, or t
cggaattgccttcagaagaatctcctgcagtcgataataatcagcttgtaacatcaaagcctcaatctggagaggatggcttgagcagtgagaaaaaagaacaacaagcatacccagaaccaaatacttcgattatccatcaaaatcctgcaagcaaaccgttgctattctcaaagaatgaaacagagtttgagaaaggggagtctacaaagatcaaccttgatttcaggaacaagagagatgatgaattcatatgtcaacatgaaaaggagttggatttcactgacaaagaacctgatgatagtcctgtgacatcggaaagcagaccagaaaagaagcatgcatcttccattgaatcaacccctgacagtattgctggaagactaaaacaggtgtggggaagtgaccggacccatgatgaaagctatgtcgtggcagatagtaatcctgatcctataaagaggcctgcgtctgatattggaaatagnctcaacagtaatgctgcaagactgattcaaaggcgtctactnnnnnnnnnnnnnnnnnnnnnaagcaaaggcgtcaactaggcaananttgtgatnnnnnntnctnntgaagcattgnnttctgggtatgcttgttgttcttttttctcactgcttcannnnnnnntgggnnnnnntttttcaaa

SEQ ID NO: 1605 - DNA, 614 bp, Gossypium hirsutum
  misc_feature (14)..(15): n is a, c, g, or t
tttcttgattatgnnaattaagctatatatatttttggtgcagggaatgaagtgttgaaggctgaacagtttctcgaaacagtgataaaaggttttcttatcttgtttagcatcatatatctgatgacattatattattcatatttataaatgaactcttgaactgttattcagctcctgagcaagaatggaacaagcttttgattgatggattagctgttggtaaaggagaaatttcagcagaagatttttatgctgtaatcaagaaacggattgagcggactttaatccgaactgtaagagacaccctttgccttgacttcctattggctgtagattcactctttttcacttttcactccactaatctctctctctctctctctctctctctcaggagggaggctcgtaccagcaacgtattctaactgaatatttaaagggaattgaatcgagagcagaggaggttgtccagtttcttcagggcaatatggcataggtattttcagcatgcaaaatatatgaaaattattctaccccttaaagaagaaatggcaatttgcagatctggaggcatgaaatgtacattttctgaacagttctatggcaacaag

SEQ ID NO: 1606 - DNA, 639 bp, Gossypium hirsutum
tatgaaagtatgttaaaaattgtatttagaccatcaatcatgtggtaaagagattctatagtatggtttttgtatatttggttcccaggtatcacaaatttatcaagttgctgaagatgctcatacgcagagccaggcgttgcaatcacttaaaattgttggagaagtattgtcccttaccatctttggatcaaaaggctggaaagtctagaacaatagttgaggttagtattgcctgtgaaattcatattaagtatttgaagttgcaagagcaatcatttgatttgtttaactgtatgttttgtctgatgctattttcaagccttgcttggtgctataatttatagatttgtgctattgcatgcatctgatgttgaaggttgtatgtaaatttcagtttgtcttttttattttgcgatttaaattagagagcttgcaacacaattaaaagttgactatgatttctattccagagaagcataatggacaaaagagggatcaagcgatccagtggtggtgttgccaaagaaaaccataatactccagaaacggataatgcagagctcgagtcaaccaggccttattgcttaaagagtcaggtacttgaatttttgtgggctgtttgtaaaagtttggttc

SEQ ID NO: 1607 - DNA, 587 bp, Gossypium hirsutum
tgatacaggcatggtcactcacccaacccgaatggacatgcaaaatagatgaaggtcctgctggtattgcttatgcaagatggagcccagatagccgtcacatactgaccacctcggagtttcagctgcgattaacagtttggtccttagtgaacacagcctgcgttcatgtacaatggccaaagcatggttccaaaggagtttcatttactaaagatggaaagtttgctgctatctgcacaaggcgtgattgtaaggactatataaatttgttgtcctgtcactcttgggagataatgggtgttttcgccgttgacacattggatatgactgatattcagtggtcaccggatgacagtgcaatagtgatctgggattcacctcttgaatacaaagtatgtgaactttgttttcctttcagtcgccaaattgcccctttctggttcctagatgatatatgatgtgtatattgggaagaaccatttcttctcttctttatttatttaaaaaaagaaaagaacaagaaatttgtggtgaaaatggtatcttatgtaagatctttccaaatgagaatttacatggccctg

SEQ ID NO: 1608 - DNA, 660 bp, Gossypium hirsutum
cgatgaaaagttattcgagtgcctttgtaaggaaaccaagccatttgattgaaatcaattctacttctgtttatagacttcctgataatgccgaaatcgatagatttttactccccgcattttttatatcaacacctttctcaacggatgcttcaagtaaagttgacatcacaggttctattccctttccattcttttctgtttaagtagtaaatttgcttaggaaatacacctgatgctaaattgttgttttattttattttttcattattattattatatgcagaggtgaacagaggaggcccccttgtggagtatgaacgaagaattgcagctggtgaactctttgacggtgatgcctgccaggtatgaatttctctttaggcttgcttttttttatttgttttgtttttgaggataaattgttaagtaaataaaattataagggtcttattcttgatattcgagttgttgtttgtttgaaccgaccgattatcaatcaaaagcaatgccctatttggatgtaactttgctcacctgctcaatacttaataggaatttcgtgtgacatggcttgtaacatatggagatcatgtgtttgtagttattaattggtttgtaatatatggaaatcatgtgttctgctggtattgtgctagg

SEQ ID NO: 1609 - DNA, 622 bp, Gossypium hirsutum
  misc_feature (28)..(30): n is a, c, g, or t
  misc_feature (606)..(606): n is a, c, g, or t
tgttcatcttatctacattgtcatgttnnngggtacttgtatatttgattaaattatcttgactttgtaggttctttacatagccttatttcttatctcgagtaaacatactgaaaatttgatggatgtaagtctggaatcttgtataatgttttctttcccatttgcattgcggattcctttgcaatttgatttctgattactttttattttatcatttcaggttgtagtgactaccctgaaacagggttcacctctttctcttcttgttgctataagcttattgggatgctcaatcaagcaggtcatcaatattatacaggtagccacatatgccttattacttgatccaaatttcctgaattttaattaaccccccctttcccggtaaatttaaggaatgggcatttggaaattttaaaggtgggaaccggttggttcctttgaagggccaacttggttgggataccgatggattaatacctaatatttaatgggacatggaaaaagaagcctggcttggattttgaaccggaccttaatttgaacctgggccgaacctcccaaaataactaataaaaaaacaccccatttggtttccaatantaacccctccgggtcc

SEQ ID NO: 1610 - DNA, 603 bp, Gossypium hirsutum
attaaaattgggattaagagaattaattttggaagcgttgaaaattatgtacggaattttaaaggtaattggtaatcgtgtttatatttataatataaatcaatgtaaaataagaaaaaaaaaattgaccttattagtatttggctagatgtataaagaagttagaatttacttttgcaaagattacgcttaaaaaatcgtcaaaaggaaaaaaaaaaatacacatgttacttataggttatcacaaatggcaaacaaagaactaagccaacaaagtaaacttttcttttttgttacaaaacttagaaatataaattttaacaaaaatacaccgaaggaactgtagtgagtttagaattttatttttggaattttatgtaaatatataatctagaatatttggtgtgacaaaatagaagcaattgctgtttgacaatagatactactctttttccttattacagcaactgaagacagtgaagggtttgatggtctggattctggtttctaacttttccacctgttttatacaatgttatactaacaactggatattctacttgtatattatattggaattaattgttataagccctgaatatg

SEQ ID NO: 1611 - DNA, 656 bp, Gossypium hirsutum
caatcccccagtccaggccgttccagttgcaaaataagaaaagcctaaacactattcatgtgtgaagaattagccataaacaaaaaaaattagggtgtacttagttaagcaaaaaagtgaaagaaagagagcaacttatgggccctgataacttttgctttccagttttaatacatcttaacattttctctgtctttggggtattgcagcaccacaaagatgcttaatttggcctaacatatataatatcaagcaaattctagcaacttaatttggcttacaatctaagacaaccctaaatgaaggcataaacaaaaatgattcatcatgttgtggttttgtaaggcaagcaatagcatagcaaaaaagttggatgtcataaacagaaagaacaaaatcgaatgaaacaaaagtaagcaaagacatggttggagagatataatacctgcagttatcatagcagcaaaaattgctgaaatcgtcgcaatagaaataacgaatgcagcaattgacatggccccaatataaatagctgttacacatgcaagggaaaagaacaagaagcctcccgcagctgccaaagagatgagaagagagacaataatggcattgacagtcgctaccagaaatataagcataaagataagcaaccctgt

SEQ ID NO: 1612 - DNA, 611 bp, Gossypium hirsutum
  misc_feature (589)..(589): n is a, c, g, or t
  misc_feature (592)..(592): n is a, c, g, or t
ttacatagcattgttagaatgaatcatagaattgagactggcaactgttgcctcatccaatagccttgccaaaacaacatcctgacagaagcaatcagaagcaagaattacaaaaccaaagacatgaagagtcataagccttaacatttaagatccttaccttcaaatagccaacacggtatgcctggtgtatttttgagatgaccatcggattttttattggaacggcctgtaaaagaataagaatgaacctttttttacagaactcctgattttctttcacctgatctaaactccctctataaaactccactataagcaacaagacctatgtaaaaataaattacctccttaaaaacaacatgttctttcagaaaattccgatagtgttgcacctgaggaacattcaaaaaggcaaaatatattaaaaggttattatcataaaaaataattgaacaaaatcttataactacaagcccgcatccaaacaatcaaatgaagttgcaaattgaacattcaattcaatccaccaacagtccctgataatatatctgtaaacaaatagtgatatacttacattcaagagaancantaatatccatgatcaattc

SEQ ID NO: 1613 - DNA, 603 bp, Gossypium hirsutum
  misc_feature (470)..(470): n is a, c, g, or t
tatctcattaaagatgacatctcaaatctcagaaaccataaaatcattactactgatattctgttctgaaagaaacggttcttcaaggttaaagcatccccaggcaagcaaatgactctttcccacttagaatggcatctattgctgcaaatagattatcaaaacaccatagaacacttgatagtgtttgtttataaaaccatgaatatgaataacatagtgacgccaaaaaccattacatacattagaaaagaataattacatcagaaaacaagaaaagaaatcaacatgtaccaatcttcttccttgttctgcttatctatctcatatgtaaggacttctgcatccattggtgaaagcaagtgcagtattagagcttcccaagttaggaggaagttgtgctggaaattgacagcgcgcgagtggattaccattccttaataaaaaagtaagaacaacaaaagaactanaaaggtagaaaaatgaatgcaaccaataggtaacctgtaatccattcatcatgctattgttttaagttccttcatgcagaactcaatcttctcatatttagtttttcagaagtgttaaaacaggacagaagct

SEQ ID NO: 1614 - DNA, 645 bp, Gossypium hirsutum
cttttcagcatcattttctatgtttccaatgaaaaatttagtattttattcatgcatactgttttattgtgcttcaggcaatgagtagagctcacagaattgggcaacaagaagttgtcaacatttacagatttgtgacaagcaaaagtgttgaggaagacatcctggagcgagctaagaagaagatggtcattttctttaacttgcatgaatgtgttcctatatattcttaaatgcatttattaatgtacattatgtgaaagggggcctaatttaactcttttattctccatttaaagagtaattttatgcgttttcttccgggtgctttctataggtgcttgaccatttggtgatccaaaagttaaatgcagagggtagactggaaagaaaggaaacaaagaaaggggcttattttgacaaggtaagaatatgtcttgaagcaattgctcaagtctgtagttgttaatatgttgtttgtttggcttttggttgttggaactgactacataattgaccacttctttcttggaaatatcttgtggttttgatgcgtataaatttttaacaatttctttgacataattctacatttcttttaccattccagaatgaattatcagcaattttgagatttggagctga

SEQ ID NO: 1615 - DNA, 481 bp, Gossypium hirsutum
tttctccgatgtgtttgttttgttggtagttgtgagttataataataatagtaataataataataataataataataataataataataatcttactcatttttcattgctgttaaaggtcatggaagcttttattattgttaacaatattgatttttagggctcatttggtgcctgttgatgtggtctggtgatggatatgtgtgtatatatttttaatgattatttttatggatcagaatcattatattatatatcaatcaaatatactttaattttggctgaagggtaaagaaaagccccccaaactttttcaaaaaatcaattaagctccctgaactttttcgttttcactcaattgagcccttgaacatctgaattacaatcaatcagtcaagccctttgaccgttaaagttaacggtcaatgttacaaagccaagggtgccagttttcttgaggctgtctatgtcatctgaccat

SEQ ID NO: 1616 - DNA, 624 bp, Gossypium hirsutum
tttattagtgatgttcatgacttgaactgtggttgatgtttagaactctaatattccctatgttgtaaaatattaatgctgttatttctaaacaccattctggccttgacagatgcaaatcggattgttgattcaagttatgacttctctgtggtggattccaactctttgctgtttctttttaaatatgcacctgtagtggcaaaggaattgaacattggtcctgagttttcttttgaaaccgctaaaatgtctaaccaacggacttttttggtatgtcatctgtagttctcgtgccaatatttctctaaacttctcattaccataatattttgtcagttaggaagagaagaaatagcatcccttttgatactttgatccatatgcatgcaatggttggttccttacgtgcatcttcattacataattgccttttgccgctagcttccagggctagtttggtgtcatataattttcttttaacttccagaagggaagttccctgtatatctgttaattttcgaccctaagccaaatgatttctacacaattctttaataatatatagaaaggctcttcagggcttccctgaaggtctgtccataataatgtttactttccttt

SEQ ID NO: 1617 - DNA, 624 bp, Gossypium hirsutum
  misc_feature (613)..(616): n is a, c, g, or t
gctttctcctttactttgatcttactgactgacttcaactcatctccccactgcttacaagcatttcctttcctgctacctgctgaatcagaaactttggacctttcctttctcactgcctgagattttgaacttttggaaagttgattcagtgtgtatttagaggaagacaaattcttaaatttctttgtttcaggaacatgatgactacaacatgctttagcatccatattaatatccattttcatggactcttcagaaactccgagcccatttcctctagaagaatttgcaccagcggaagaactaatagccttgttagagataaattcattatctcttgtttttgttctacctctgcaattattggatgacttagctttccttaagcagactgtacgaggagatctatgattatccttctttcccttcttgctaaccttactactcttaacacctccaggagaagcaagaaaaccagaattattcagaacagggtcatgcaactcttcttgatgtattaagccaacttgggcgtcaggaattgaattgattactacggaatctggtgaagttccagaacctgaatacttgttatctattgctcttccannnnattcagca

SEQ ID NO: 1618 - DNA, 535 bp, Gossypium hirsutum
gttgagttctggagatgtgctgtatgctgaactcgagaacctctttcgtagtttctgaaagaaaggcctgaacatcattaaccctcttttgctttctgccatgttcttgattgacaattatcgcagtgagtttatgagtttctttgaaaatctacatgccattctgccagacttggaggtatttatattggtttgtgaatcaaagtttgaaactattttcaagtaatgctgtggagccacacggtattctactgttcttaacacgaatattcatgttaatatctttttcttgatttcgtcttatcttaccacaggatattgcagtaaagtgggactaaattcagtgtttgtttatgataaaacccttcactattgaaaattgatgcttaacagaggggggaagttacataaattgattgatgtagaattaggccattagcagtacagtttgatagttttcttcaaacagtaggccctccagtacatctacaatgaatccgcagtcatgtagattttaagcactgctatgaatggg

SEQ ID NO: 1619 - DNA, 645 bp, Gossypium hirsutum
gatctgttgcggctagactaatttttatgattatgtggacagtgcggagactgaaggttccattgatgatagtgatgggaatacaactggggtgagatctcatttctatatggttaacctgtttccaactactttttcatttctgtacaagttactttatttgaacaatatattaaacaattattagggtccaaatactaaagcttgttttgtcattgcatgtcctctatcaggcagatcaaacaagacggaaaagagtcagggagggaaccccacccattggtaagatatactcccgcctctccatctcccctttccttttttctggtatgcatgttagcctttgtgattttcgtgattgatatcatggtgtggaactatacttggatgcatgatgtttcaaagacagattaattcactaagatttaagtctgcttttaaacttagagtttcttgtgtcttgtatgtcctggctttaaatgaaaattctacctatgagaactaataggaagtcccattagagatacgcggtcgcacttctgagaacttgtatgtgtggtacttgggttcttgagcttgatatgctagagtttttcgtgatgaaaagagtgagatttaaattattctagtcccactttcatttgt

SEQ ID NO: 1620 - DNA, 659 bp, Gossypium hirsutum
aggttcgatttggtttgcttgtgataaaaaatatatggtttgactctagtatgggttggtcagcctcaattgaatgtctagtctggttttgtgttgtgttgcagataaaggttgattgcattgagaacttgcccgcagtggaagtgaagctgggagaacatgtcttcttgacagtgggtgattactatttgacagaacggaagagccattgattatatgttttaataatctgtgcctccgactgagcacagaggataaaatccaatttacagaaaatcaaagagtcaagagctgggcagatatgatacttacagatgagatagttaagagaggaaaatgtttcatattttaaaaaaactagcaatctttttggcatctaactgttgtgaagaaatctagattcagtttctatttatagccatttgggagtatggttgctcaattctgtagaaaaattttgttacgattatcattatgtttacggtttgtttgtgcgacttctttctaattgcctttaattcaaccactagtttaataatattttaaaacaaaataacaaaagcacgcacccgtgttggtgaatttaataaatactattttcctttaaaaaatgaaaatatttttgataatcaaatacctcgtaatggctttgtgatgta

SEQ ID NO: 1621 - DNA, 626 bp, Gossypium hirsutum
tttcttaagcccatttgccctcattaaatccaccattaatattgaataaaacttatattaaacacaatgggggacaacataaattatctattgaccctattgataactatacacatacctactgattccctttggccaatcatcattaaatatacccatcatctaccaaaagggtaaaagcagccttcttggatcaagaaaactgtatagaatgttaacttagacattactgcattagcatcaattaatatagtcaaacttcatcattaattaataaattattaccattttcaggtgactggctgggatgcttccaacaaggtctgctctttagatatttttaacttataaacatgctataatactgcaatttttttatacaacatataatttgttgcttgttctccaaattacattctattcttgcataaagagacaatatttggacacttgagagataaattaataaatataataggaaacccatttaaggatgaaaagctaacccctaaaatgatcaaagcattaatcacactatacttcactaacctcaccatccttacatacacccacattcaccaccatggttcctggttcctttgattccattaccttgcaacagttcc

SEQ ID NO: 1622 - DNA, 516 bp, Gossypium hirsutum
ctcctttaattaagtgaagtatttatttaatataattacaacaaaaaaaacatcagtctagtcttgagataatctagcttaggtctcgagactaagtgtcttatgtctcgagacagccaaacatcgaacctaaattaagaaaacaggggaagttcgtctcgagactggtcttgagacatagaccccaatgtctcaaggcatgttcaattagaatcaaaataaaatccatcatgtctcaagacatgaaacctatgtctcgagacctcctgtagaatttggacacgagtttggattcaaatcctaaccacgtttgtaaccccgtacaatcctagaatgcatttaatgtgattaattggcaatcatttgaattatttaagagtgtgtgatgagaatgcatgggaatttaattgattgaatgccacattacttggtaaatgaggttgacttagtctgagttgctccggcaacataatgtgatgtcatgaattcggatccggcgactgggtcggggtgtgg

SEQ ID NO: 1623 - DNA, 616 bp, Gossypium hirsutum
aggggtgtaacggcatcgaaaccagtgaatagtatttcaaagcgtcctgcaataatatagaaattgcttacttcccttattgttgcaatttatgttgaacagatcactcaatgcttactatgagaggacggactcctgtttccctctcgcgggaactaaaaaacttgttgaaccaaacttcggaaattttcgaattagtatgtgctatcataaggggaaaaggaaaaagaaaaagcaaaccttgggcatcggtgtttgatcgatattaggttgcattccgatggatgttgtgttggcaagaatcatgccatcctccggatggaacctagccaaatcgtcaagagacaaagcatctcctccaattacatcggcaagctctcgagctcgttcttgaagttaaatcgataaaataaacaataatctcaaattatcaccaacgcagatccggaaaatgtataaaacaaaaaataactcttgttagaatgctacaacaagaaaaacaagtgcatcgtaccaaaggttcgattggcaattacaactctcgctcctttttgttttgcaccgtaagctaatgccttcccagcaccaccagcaccaataaccacgaacagcttac

SEQ ID NO: 1624 - DNA, 676 bp, Gossypium hirsutum
tttttctcgactctgttaatttttacaatttctatttcaatttacacaatctcaatttgtccatatttttaattctgttttttttatttctttcaggtatgcagtttttcttgggcatgactgtgcccgagaaatcgatgaataagaagttgtgcaaaaccagtctttaaggattttaccctacttcccttatactattattttcattattttatagggataggatacttttggtgctttcaatgacacatcagtcactggtttcttggaaatcaaaggaccaatctactgtatccaagtcttcaacagaagcagagtacaggagtatggcaatcacagcaacagaggtggtttggctagatggtttgctgactgagattggaatcaggagaaagtaatcagtcaagcttttttgtgataggctacttaaaagatttagaatggtcttataaagactgagcatatatctccacagagcagttggcaaacatccttacaaagattttgggggtatagcaacattagcatttagtatccaagttgggggttaaagatgtatttcaaccaccaacttgagggggagtgttgaaacaaatagttagtttgttaatttcaaattagttagagttagttagcataggacaattttttttcttggatgatggtttgacaactg

SEQ ID NO: 1625 - DNA, 351 bp, Gossypium hirsutum
tatactaccttccttagtgacatttaaaactccgaaatgatcgagaagaggagcctcgcggttggctatccaaacgacagtctcaggagaaactttgtaccatattcctaggtaacgtgttgttgaattaactgggctactgaagaatcccaattcaaaagtttcgtcacttgaaactagagcttccccatctctgatagatcggcctggagtaatattatctgttgcagcagaggctgccaagacaaatactagcatataagccaacaaaaaacaccttccaaaaccttcagttgattttctctccataattcaatatgaaactactgatatcttaaaaaaaaaaaaaaa

SEQ ID NO: 1626 - DNA, 406 bp, Gossypium hirsutum
ggatcagcatactttgttaacctataagtgcatgattgacaagcttgggtttcatggggaatttgaggctatggagaaggtactgctagagatgagactgaatgtcaacaacagtctgcttgaaggagtttatatcgggtgcatgagaaattatggacgcaaacagaaagttcaggaagctatcgatgtgtttgaaaggatggatttttataattgtgagccgacagttctatcatataatgcaatcatgaatattttggttgaatatggatattacaatcaagcgcacaaggtgtatatgagaatgagagataaagggatcatccccgacgtgtacacttttacgattaggataaagtcattttgtaggacaaagaggcctcatgctgctttgaggcttcttaga

SEQ ID NO: 1627 - DNA, 637 bp, Gossypium hirsutum
aactcagtatcaggaaaaggcaaaaaacgccttgtaggaaaagtaaatgggaatactatttgatgaaaaacaacatcacgattaacaaaaaaagttttggtttcaagattaaacaataagtatcccttttgtacaagtgaataacccataaacactgaaggaatagccttaggagaaaacttatcacgataattaggagtagtggcaaatgcaagacaaccaaaaacttttaagcgagaaagatcaggaggcttattatacaaaagttcatacggacatttccagttcaaaataggagtaggaagacggttaattaaaaaataagcagtcaaaacacattggccccaaaatttagtaggcacgtgagactgaaattttaacgacctagccacttcaagtaaatgcctatgtttgcgttcagcaactccgttttgctgaggagtgtgaacacatgaactttgatgaataactccagacatagtaaaaaaccccagcacactcatttttgaagaattcatacccattatcactacgaacaatttttataacagtggagaattgaatttttatcaaaacaaaaaattgtttgagatatagaagtgtatcactctttggccgtaacaaattaaacccaagt

SEQ ID NO: 1628 - DNA, 462 bp, Gossypium hirsutum
acccctcgctattataagcaacaataattgttgcaatttttaacattctaaaaccacctaatccttattttactacctcaaattcatatcattgcccggtcggtcagcacaaggatttctagtttaaatgtactcatttgggaaaaaaactagtttaaatgatatttctcaccatcacgatggaaaaaaatttatataatttaagtatgaatttatgggttaaacttttgtagtattaattcttatttcagaatatttatgtttagagcaactcttatttagaacaattgtattattgttctagaagagatattaagtaaaatgtgatgctagttgtttcacacttaatactataacttcctgacatataattatttatctcaaaaaagagataaaaatattaataactaaaaccgagtatctacggtgttaaagaagaaattaatcctatatcgccacctt

SEQ ID NO: 1629 - DNA, 652 bp, Gossypium hirsutum
cttacactgcatgtttgttacatttctttttccaaatcaccacgctttatgttatacacatacataaatcaattacagcatgggataaaaaatgagtaaaaagaaatgcctacgggaaaatatccatcaagcatttataaacctttttaaaccccatagtcgaaagctattaacctgcaaataaagtaacaaaaatttacatgaaatatgtaatcaaagtaaaatacgatgaaggaagtattcacgatgagaatcataattttaatcacgttaatcaaacgtaaaactataaaagcttaattttaacaacataattaaggaataaaatttttaaaaatattacatgcaaaatgactgatcaattcatagaattccttccaattaattatggagaaaaacaaaggagggagatatgattaatataaaatagtgtatcatagaatcagatgaatcgaaagtagaaaccctaacgccaagtttggatattaaaaagacaacaaaagctaattttgtattaaaaaaaagaaactttcttatttgattatttttcattaaaaaatagaataacaataatcagaaaggaagcctaacatgaaaaaaaggaaaaacgagttacaaaacaatactctgtttggctatgtgcatcaaatca

SEQ ID NO: 1630 - DNA, 617 bp, Gossypium hirsutum
ttaacaatgtgaaacgattcactattctcttatttggctagagctcatgtctaagttttacctttatttgtcacctgaaaacaatattaattgtcagttcatgtatggtttcttttcttttcaactcaacgtattgcaggttgcttttaatagggaaattcggactcctagtgtcacccttgaaggtgatatatttcaacctagtggtcttttgactggtggaagccgcaggtacatggttgtttattctcgtaaagtattttagtatttgtcctttcttccctctttttttcccctgaaacttgaggtttcattttgcttttggaaaggttggagtggatgtttaaattttttttagaaagtgactgtttttcttcttataacttgtcctaagtaattgtctccaagtaattagttgtgtaaattaagaggtttgaaaattgaggcttttttcacaggggtgggggtgatctgcttagacaacttcatgatttagcagagtgtgaatcaaaacttgcaggtcatcagaagaggttatctgaaattaaaatgaaggtaatctgcattgaatgaatatcttttcatatttagtacgttactgatgcatttgtgtcttg

SEQ ID NO: 1631 - DNA, 658 bp, Gossypium hirsutum
tctgcaagtcagaactcagaatgctgttctaaaaagcaatttacttgatttataatcttattaagcctctttgatctttctttttcctttgggtaaacttactatctatgctaacatggaaaatcaaagagggtgctctgcttggacagtagaaggatactctctaattaaattacatctcttaagtatgatgttacatgcatttgttcctttaacatattcacacatagtaaccttggataaacaaggcaggctcctgtatcactttatggctccctcaggctaggtaaaatccagaggagaagatctagtggtaaataattgctttcattctctttaagaagatggacatctacggatactatgttccatctttctgttaaactttgatctcctggaattcacattcataggtttctatctttctgaatttactgtctatggttttacaatattttctctcatatttataaaagtgccaataaggcataaattatatgaagaagttgatgaatgtaaggagaatctgtgacatttagatggaagaatttgttgatgctaggagaagcttaattgccttctttctcactagattgctggctattcttttacaggatttcctcagaaaacaagaaaggtccaaatgggactcacttta

SEQ ID NO: 1632 - DNA, 650 bp, Gossypium hirsutum
tatgcatgcattactcataagaatatcaaatgattactgctgattggaaagaagacttgatttaggtttactcttttttttaaaggcttcaatttaggtttccttgattgttgctttagctacatgcaatttgtttcatcaaagttgctaaggaaaccattattgcttaatataagaaaataatttaaatgaagtaatgaacatgcttttcaaatataattattttgtagaaaaaaaaccagccattcttttatttataaaccttcattttaatttataattatttaaagtatcatcggttatttttatataaacattcctttttccatttacttacagaaaccaaaagcaagtagcaaaggaaacaaccaaacagaggccttatgataatgttgaattggccctgttccctattgccaccattcccccttctggtttttgagcgcgtcatcaaaaatcaacatcaaggaaagtttacaaatggtattctagaatgtggaataacctatcaaaatgtcgttggtaacatggtattttctattttcaaaaagatctgcatatgcttcaaaggtccagaaattttctacccattcattatcaataaatttaaacttacaatcaataatcatcacgattgattaaaggcatcc

SEQ ID NO: 1633 - DNA, 409 bp, Gossypium hirsutum
ggttccttgatggacacatggcaatctttcaaaacgaggatccttagcaatcctgcaagagacagagagaacacttattagctaatgtaaggaaaaatatggccagtgaactgcaaagaggttgtcattgtcactatcgaaataaaattaaatatgaaataccagttcagaaataactgttgaaccaagtcgtattgcaacaaatgaatcaaggttccaaagatagattgaggcaaattaagaaacaaagactagcatttagaagcattgaaccaagtcgtattgcaacaaatgaatcaaggttccaaagatagattgagggcaaattaagaaacaaagactaacatttagatgcatttagccagataagacactgcaaagagatattgcatattacaggttaatggag

SEQ ID NO: 1634 - DNA, 636 bp, Gossypium hirsutum
atgttgcattaggaatttaccatatgtaatgaatatatgtatatatcgcatgtcagtaagaaaggtagtttcagtcttacaattcattgtgtatgctgaaaatgacattcctcgttgatttatgggatacaaatttcccataactcttcatactttgtatgaagctcacattggttcatgttacttccaggtaacactgcactcccaggtgaaggccacattgactgtcaatgatgcttggcttgatcttcaagacggatttgttcacgctggacaagatgatggaagaccagtttccggctttttccctctcgtcatatctccaacttcaagagcaggactcctattccgtgtatgtttggggaatggaacagctctaggtatggttttcatgtcttttaggatagtatgagggtataggactgtaagcttctgcttctgtgattctcgacctgtttatttactttaaaacgtctgactcactgaggctgtgcattatatttattgtcttagaattaacaagccctgtatgtgataacattgcggaaatgtaatacaccttcccatattgccctgtaacaagtaatcaacctcgtgcttttacagatgaaaataaggctcaaccagagagcatat

SEQ ID NO: 1635 - DNA, 625 bp, Gossypium hirsutum
accttttctcggacaaaaaacaaatctaattcaacgtgtttgaaccttgaataaatcaccggattcccagcaactgccacagcagccaagctatcacaccataccaacgctttgcctttaagtgtgactcctaactcagataaaagtgactgaatccaaatcatttcagtgatgacatgagcaagacttcgatattctgcctcggctatagagcgagagacaacctgctgctttttcgaaccccaggaaatcagatttcctccaagaaaaacacagtaaccagacgtggaacgtcggtcatcgctgtcatctccccggcttgcatcagagaacccttcgagaagaagtattggacacctaatcaacttgataccatggtccaaggtgcctttcaaataccgtaagatccgtttaacagctttaaaatgttgttatgttggtttatgcatgtattgacatactttattaaccgataatgctatgtccggccttgttatgacgacatattgcaatacgccaactaaacttctgtatagatgagtatcttcaatgggattacttccagtagctgtcaaacggcaagtcgttgtcataggcgtcggtgaaccatttgatctatccatgg

SEQ ID NO: 1636 - DNA, 614 bp, Gossypium hirsutum
cacatcagatactcccactaagaaagaacttggatcgctggaccctagaagtggaatgtactctgatcctctcacacgaacactaaagcatgctgcaagcaacaaagaacccatataagagatccagcaaaagaactttcgtgtgggtacaagttttgcgtgaattactgtcaagtctcttaaaactcttaggtattcatagcacatacaaaaacaagaaactcgtggaactcttggcatcgcatattcattagcttaatgaagaaatctttcataatatgctatgagaagattttgtatttaagggcaagaaaaccagcttcaatattaccattctctattttcacaacactttggagcattgtatccatctttgtcttcatgtcagaaccgtcatccataagtgggacaagaagagtcaattctctgtaaatatcacgtacaaactggcatattctctcagaatattctacttcaccatcagatattcgaccaattgctaaccgcatcagttctccagtcaaatctgctagctgtaaaagaagagtaaacattcttccatcacaatgcacattgtgtgagcgtatgtgttggttcagtgtgtcaaaaatctg

SEQ ID NO: 1637 - DNA, 605 bp, Gossypium hirsutum
ctacctctagctaggtaataaaaatagttttacaagtttggcagatatctactcatgatggtttaaataagggtcttatttcgttgttttctagagttaaaacatatagaaaagaacagtcatttctaattaggtagtttctttctatttttggaaaaaggggaaaaagttgctattacttgcaactatgggaatcttggtattctagattaactttgttctcctgaatacagccttggagaggaggctaactttttgtccgataacagtattctcattcatgaggctgcatggtttaaatgcatggagcttgtcagtcctggaaagttgtagcatgagtatcccatggttcatgtaattaaaaatgcctaggttttacatgttagaattgaaggttcttatgcatatctctcttaaatactcttgagccttgaccgtcagatcaaataagagttattttggttattgtgcagattcagtttatgatttaatactgtttcttgctaggtatctggcaaatcctggtttagttaatcaggttacttgtcatccctcaactgagccttgcatacccaatgcgggcaactttattgagagcacaatga

SEQ ID NO: 1638 - DNA, 619 bp, Gossypium hirsutum
ttttatccatgtgcaaaaggaagatattttagcttctctttttaacagtgagtttgttttacgatcctgttgtaactgatcatatatatatactcatacatatagcatgtgtatagtgtaaatgtatttcagaaagttgaggcaagttattactgtcatataaatatacagtaaagctagtcgtcttcaaaaagtactgcaatctttcaagtttgtgagctctggtgtctgaaagaaaaatttaacaattctcatacatttaatattcgcaacgcctccttgaagattgaagagcattaagccattaacccaacccatttctgaaagtccaaatccattatcagcctcatgtttctttatgtttttatctatcttgaatctaaatctaattctaacagtcccaagtcccaactcctttttattctaaatccactccggttcccacgacaggcttttattttttgcttctaaaatctccacatttgcaggagttatgaggccatatctgaaccatgccacaactagaccatcatcatcagcaactcctccatatttaccattttaccaccactctcgtttcctttctcccaatatctcttttattcctctctttcattca

SEQ ID NO: 1639 - DNA, 586 bp, Gossypium hirsutum
  misc_feature (543)..(544): n is a, c, g, or t
  misc_feature (566)..(566): n is a, c, g, or t
ctgattatgcctttaccaggatgcctagatactttcctttttaatttaaagttgttaaacaaaagtataaaggaaaatttcccccttcctaggagaagaatgtgcaatcatttctttaaggtttacttaagcagtacatcagtcatgtggggcctcattatgacattttggcaactcattaattaaggatcttaaactacttcaaaggctttagacaatccgcataaacttggtcaccaacaaaatctagagaatgccctaccgacagcagctaaatactaactaatatcaagctatagcctttgcccttagtaaagagaatcagattttgagtcatgctttaatcatcaacaatcaataaaaagtttgagaaaccataaataaaactccactctaccttcataacgaagcttcttctctttcctgccacaatacccttccctttggcatcatgatttggattaatgtagtcaagcaaatcagatacactgcaaaatagcagaaaaaatcaatacaagtaaaagaatgtctaaatttccccannatggtaaaaagagggtctaacnattctatcctgtagcagaca

SEQ ID NO: 1640 - DNA, 585 bp, Gossypium hirsutum
tatttcgattcaaaaaataaaaacaaattttgagttaattgaattgagttattcgattcgagtttcgagttcaaatcgagttaaatttcataatttgaatatttcgaataatttgaataacagattagtgtaaatacccctttggtccctgctaattttaaaaataagcaaattagtctctctcaacaaaaattataaaaaaaataatttttaaaattaaaaatatttataaaaaattcaaaatttatatttaaaaattataaaaattctaaaatatttataaaaaagttaaaattttaaattttttctaaaataataattttggggacctaattaatgattcaaatttatcatactcaatatcttatcttttaattatttttctttgaaatttttttaaatatatatggtttcaaattgttaggatcgtcccgaataagcaacgaacaagtaaaaatagtagaagaaattgagaagatgaacacacaaatttaacgtggaaaaacccctcaaaagaggataaaaaactacgggcaaagataattttactataatggcaaaagaatgaagagtacaaaagatgag

SEQ ID NO: 1641 - DNA, 606 bp, Gossypium hirsutum
atactacgatttccattggagattttgtgaaatgcttaccgtgttgtgtttttacttttctcggatattaatatgctagatcataccgatctgttggaagaattttcatttgattctagctgataaaatctcactttaatgaacaagtgaaattaagtttgccacttttgtttgtatgattggcttgtgatctgtattccaattaattctgcagatattactatgaacctgctgtatatgttcatagcttcttatttaattgttctcggataaaattaccaccttagaaatccaaccatataatcatcacaaaattttactgttcgtccttgcagtgaaacccagaaaaggtgatgcattactattcttcagtcttcatcttgatgcaacaactgattccgacagtttgcatggaagttgcccagtgataaagggtgagaaatggtctgcaacaaaatggatccatgtcaggtcgttcgatacggcaaagaggcagtctgtaaatagagattgtgttgatgagaacgagaattgtgctacctgggcttcagcgggtgagtgtgaaaagaaccctagttacatgattggttccgaagacaattacgg

SEQ ID NO: 1642 - DNA, 544 bp, Gossypium hirsutum
tgactgtgcagactgatgcttttttcaaaacaagtgttcccacagtatatgctgtgggtgatgtggccactttccctctgaagttatacaatgagttgagaagggttgaacatgttgaccatgcccggaaatctgccgaacaggctgtaaaggtgtgttacctgacttaggtatctttatacttggatgttgtctaaacgttacattccaatagacaaatataaactgttgaaccattcgtacaatttttgcaggccatcaaggggcttgagaaggggcaatcagtcgacgaatatgactacttaccgtacttctattcccgttcctttgacctagcatggcaattctatggcgacaatgttggggatactgtgctttttggagacaacaacccacaatcaccgaagccaaagttcggatcttattggatcaaagatggcaaggtggtaggggcattcctagaaggtggtagtgccgaagaaaaccaggcaattgctaaagttgctaagcttcagcctaaagctgagaatttggatgccctggc

SEQ ID NO: 1643 - DNA, 631 bp, Gossypium hirsutum
cgttgacggattttactgcctagctccatgttttcggctggacttcggatatcaatgatggtagaatttgcagggggtgggcttgacggtatactaagttcctcatttccatcatattgatgatgctgatcaatacctgaaaaaccaaaatatggtcatcataactctattccttttattggagttgtgtattggaattccatttgcataaaactttacattctgtatcatttaatttgttttgaaaagtagcatttgatgattataacttgagtgtttgacaactgatatcgatattataattatttaaatttgattaaaaatataaattttatctcaaatttatatatatttataaataattaacttaaatccattttcacaaacatatactatttagtattgaaaatttatcaaaaaatctgaagtaatacaccaggctgcaataggaagataccaggcgttattagctttaaaaaacaaatatttaataatcatatatatttattaaatttttaaacaagaaaaattaaacatattttttaatatttatttaatttttatggtataaattatgtaacatataattaaaaataaatacatttggtacattggataaatagcagtcggg

SEQ ID NO: 1644 - DNA, 1169 bp, Gossypium hirsutum
  misc_feature (513)..(513): n is a, c, g, or t
  misc_feature (519)..(519): n is a, c, g, or t
catcctccagggtaatgataccaagaacctcctcgtctaaacatgaaaatgattccaaatcttcattagagagggttgcttgttcccatttcttcattcgttgacggattttactgcctagctccatgttttcggctggacttcggatatcaatgatggtagaatttgcagggggtgggcttgacggtatactaagttcctcatttccatcatattgatgatgctgatcaatacctgaaaaaccaaaatatggtcatcataactctattccttttattggagttgtgtattggaattccatttgcataaaactttacattctgtatcatttaatttgttttgaaaagtagcatttgatgattataacttgagtgtttgacaactgatatcgatattataattatttaaatttgattaaaaatataaattttatctcaaatttatatatatttataaataattaacttaaatccattttcacaaacatatactatttagtattgaaaatttatnaaaaantctgaagtaatacaccaggctgcaataggaagataccaggcgttattagctttaaaaaacaaatatttaataatcatatatatttattaaatttttaaacaagaaaaattaaacatattttttaatatttatttaatttttatggtataaattatgtaacatataattaaaaataaatacatttggtacattggataaatagcagtcgggtaaaaaaatcatccttgtctttaattgatctttaagataaaaataattaaatacatggcaatttttaatttcgcagttcttcatgtatagagtaccaaaaagtaacatatatttagtatagaagttacagaaagtttttattctataaacaaaattaagattttattatatgatttattattttaaatataatttcggattgatggtaatagctcaacttttccctaagatgaatcttttttatcctacaatagccttaaaaagggtgttatatatatatttttaaaaattttattataccccatatgacatttggttttccctggaaatcctatttgtaggggtttaaaaaattgaaaaaaaaaggggatccaaaaatttttttaaataattaaaaaaaaccctttataaaaaataaaaaaaaaaaaaatttaaattta

SEQ ID NO: 1645 - DNA, 615 bp, Gossypium hirsutum
ctatcgtcaatctgtttccacttcactggttaacatacaactccctatatcgatcttgtggaggttataagtctttaaccaacgtatttgccattccgagtacaaatcattctgcacagaaatgcacaaaaactgtaatcgaactctgttaacttatttaaattcccttcttctttttcagtgtaatgtttgatttgctgcacttcttaaatattaagggtgtttcatatgatgctttgggactttgttgtcgaaaagtttggtttgctgagttatataaaactttgatatcacaattttcaaactaagcttcgaattgcctactggctttaggcatggtaacttggttttaacccggaattttggcctatatcctcaatttgatttgatcataaaaagttaaaaatattaatgcgtataacctgaaatagaatttatcaaaacctaacttgaatccgaaatgatcggagtttgaagtgaccagaatcgaaaataatttgaattgtgtaatagcaacttaaaaatatttgcttcaaactcgaatggtctaaactcaagataaatgatttgaaatctacttacctaaagtgaagaaacttatatttacagagaacc

SEQ ID NO: 1646 - DNA, 612 bp, Gossypium hirsutum
ctgtaagccattgcaggaaccatcctgtaataattttttaagggagagaaggaaaggaaaagaagcgtgaggcacatgaagcagttactgggaaaaaatgaaatgagaaactgctacaatcttaacatccacaacagaaacaagaaacaataaagctaattaaacaactaagagaagataattttaaaatgttcatgtaaggtattgaagaggaaaaagattcaaatgcatgtaaggggaactgataaacaataccctttaaccaggaagaatagaatcagaataatgcaggtaatttctaaccaatcatttatataagttacaatcctaagatgtggcagcagtaaaaggtcactacaagcaacgaacatatcatgtcattcacagaacacaaaactattgaaattggatgatcatggcaaaagagataagtaaattatttaaatcaattgcatttcgactttgaaatgttgattgtgcagaactgtaactcaacaagcaacctagagaaatttacttatcatatgtttcagcttatggaaattgtccttttctttgcttcaaggaccctaatgaaaatttacctgatgaattggcaggtaagagatcgta

SEQ ID NO: 1647 - DNA, 592 bp, Gossypium hirsutum
acttccgtgagcacctttattgtccttgctaaatatgatttgacaccttaattcttagttgttctctttcatgggactaatacagtctgattaaagtggaatgtaagtctatattttgagccctgttttttgtgcactttccagacatacactccagagagcccagctgatgctaccagaaatctctctcaacaaaatctcaatgcccttgtaaaagtactccctggccttcttggtggaagtgctgaccttgcttcttccaacatgaccttgctcaaaatgtatggtgatttccagaaggacacccctgaggagcgcaatgttaggtttggtgttagggaacatggaatgggatccatctgcaatggcattgcccttcacagcccaggcttcattccgtactgtgctacattctttgtcttcactgactacatgagagctgccattaggatttctgccttgtgtgaagcaggagttatctatgttatgacccatgattccattggtcttggggaagatggaccaacccaccagccaattgaacacttggcaagcttccgtgcaatgcctaatgttttgatgcttcgtccag

SEQ ID NO: 1648 - DNA, 545 bp, Gossypium hirsutum
atgtctatagcatttctgtgttgccggaggaaggaaacacgagtccaaaatgtacaccacagttaacttttttgagcctcttggaagttccttttccatctgaaaaccagatgtgtttggatgcgaaattgagttgccacaactgcatcaatttgaaagtggatagtgaagatgcttattcatcgtgcattctggatataaacattgagaaagagcttcctgacatacttacatccagtgatgagattgttggaaattctaaaactgaaggtgtactgacagtaagttcgatattcctatctttatagcgtgaatcttccagcaaatttctccttttaagatggcatattcagtaaaatgcagatcctacatatagtgtgggatatgcaaaatttaattacttagtcatcaaagcattgatggttttccttgagtcttggtacttcttttcttctttcaccttgatctagatctcaatgaattacagaatttgcagaaggttttgcagagacagtcaagcttatatgtaggtgagagttgactca

SEQ ID NO: 1649 - DNA, 616 bp, Gossypium hirsutum
  misc_feature (606)..(607): n is a, c, g, or t
caggtaaaatctgaagtttttccagctaaaagacctctgccatataccgaaatttatcctcaaacttcgttttctttgttttttttaggctagaagacttaggaaaactttaggtggtgggatgaggcagcttggtttcatttgtgctgctgcttttgttgctttaaaagaaaatgttgcaaagctcgagggtgatcacaagaaggctaaggtgttagcaggtaaattatggtttgaggtttcattgctttgactcttcattttttcgtgaaatactcgtatccaacacctatgtcgagcatcaaattaaattcttggattttatgctggttttgtattgtttcagaggggctaaatcaaattaaaggtctaagagtcaatgttgctgcagtggaaacaaatatcgtgagtatgcttgttattaactagcaataatcacaatcttttcattcactttgcattaaactagacacctatacttgcgaagtactcaggttcagtttggttgtagttgattcaagctcgatctatcaagcaagttcagcttcgagtcttgaatttcaagtagaatgcaagtttgagcttgacttcgctcaattatgtacnngtaagtgag

SEQ ID NO: 1650 - DNA, 548 bp, Gossypium hirsutum
  misc_feature (115)..(115): n is a, c, g, or t
  misc_feature (277)..(277): n is a, c, g, or t
  misc_feature (522)..(524): n is a, c, g, or t
  misc_feature (531)..(533): n is a, c, g, or t
gcacaatggccggtacttgctcatctcttttttaatattctttacgtctcatcctttttagtttattggtaaattttattttgggcgattttgtagaaatgtcgcaatgataaantcgagcaaggatacaaggtacgctattgactcagtggtaactcacgacggagtgaaattcccatgttgggcattgccggatctcacttcttttcgacacaatgtcggagaagatgcttatgaaaaggtaaatacccgcacttcaactttatcaacaaatgcncattttatttttttttcttttttgaaaatttatatatatatattttttggatgggcggggttgcggcagctggatgtgattggcatagacgaagcacaatttttcgaagatctgtacgatttctgctgcaatgctgccgacaatgatggcaaaacagtaattttatctggcttagacggggattatttgaggtgatgatcattcacaatatttctttggcaaattcattttatgtatataaaaannngttctannnttagaaatgatattc

SEQ ID NO: 1651 - DNA, 648 bp, Gossypium hirsutum
agagcataatttgagagttttctctttagacgagttgagggacgcaactaactgtttcaacaggaagtcaaagatcggagagggtggttttgggagtgtttataagggaacaattaagcctctcaatggtcgaggtgatcctattgttgttgctgttaagaagctcaacacccatggtttacaggtacttactctacacctatttcttcgtttataccctataagttgccttttacaatatgacctttctttcctgaatgtttgaagaattgacccctgctacaacatagaaagggattgtttaaggtagcgatatattgtgcactgtttaatattggctggttatactgaaatctttggaatttatttgtagaactagtttatgaatcttatgatattgtcatgaactttttagggtcacaaggaatggcttgcggagattcaatttcttggtgtggttagtcatccgaacctagtaaaacttatagggtattgttcggtagatggcgaacgagggatacagaggatgttggtgtacgaatacatgcctaatcggagtttggaagatcatctttttaatagtacatccacgttgccttggaaaatgagattagagattatgcttggtgtagctgaaggattggctta

SEQ ID NO: 1652 - DNA, 626 bp, Gossypium hirsutum
ctctaccacatcgaaacatatgatgtcaccacgatcagggcaagcactcctatgttcctgatgtcaagaaagatcaagtcactaggtgtgaagatggttatttctggtgaaggctccgatgagatatttggtggatacctgtacttccacaaggcaccaaataaggatgaattccaccgggagacatgccgcaaggtaatagatcatcttattcagcacttcacttatgagtaggggagttggaacataaggatattaacgaaaactggtctgttctgatacctttttatgcagatcaaggcccttcaccaatatgattgcctgagagctaacaaagcaacatccgcatggggattagaggcacgagtccccttcttagacaaagaatttatcaatgttgccatgtctatagaccctgaagcgaagatggtatgtaaacaagcatcttttttcttattgttcctggaattgcttggtttattcattcatggttgagatttacagacttatgacaaatagttctttgtttatgaatcagataaaaaatgatgaaggacgcatcgagaagtgggttctaagaagggcatttgatgacgaagaacatccctatctgccaaaggtcttct

SEQ ID NO: 1653 - DNA, 615 bp, Gossypium hirsutum
catattcgattccatcttttttctctgttttcttcccttcttacagtaggtgcagacaagtttatgctaaaggcaaaatatgaactaccgacatgtaagaaaaaatgaagagaaaatagcattaccggctattagtatttgtgacagtattggtggtagcattggttgctccactagctttcttctgcacgtcactttcaaccttcttcacctctgtctcctcgccttcccaaactacctcagtaactaatattaacatatatggaaaaaaatgatgtgagaagatattaatttggcaataacactgtttgttccaatttagtgcacttaagggggaaaaaagaggataaataattcgtatttctcatagaaagaaagatatacgtaagtaaaaatttccagtgattaaatttaagtttggcatagtcatgagaaaatttaattgcattagcaaagccattggcattgaaggaacttcaaaagagtataccttcaatgaggaaatgtagcacaatgatagctatgctaaaataaataaacaaaagtcaaagataaaccccttttttttcaatatttgaaaccctaattgacctaagaagaaggctaggcattgga

SEQ ID NO: 1654 - DNA, 632 bp, Gossypium hirsutum
gaatagcttcattgccagtatgcaactcaaaactgggtgtctccgctatagctgactggatcgaggcattaattgccattgctaattctaaatcctctgcatctgctggagcagttggaggctgagaaacatgcagaaatgcaggaccccttgcctgcatatttccgatgccataaaataaacatagacatttattattcaaaagcatcatgaacaaaatgttccatatttcaacaagtcttgagtggatgaacaaactaaactaccctgatgtttttacttagtactgtgcatgtactctgcaactcaacagccttccacccaaaaaccaaaactgtacctctcgtataaaagttagaatgtcatgtaatttcaatgaaaattttattcactcgtccaggtttgcttctgagaaatgtgaaactctctccagcaaacagaattaaacaaatgaacttatcatgtgtcaatcacatctttgttaagctatggtaacttctctgggaaccccaaaaatgtccattaggaaatttataggactattttaaacaaaataagaggaaatggcattgagatgataacagaattgttccttttgttaaagtgctataagttacgcaagggtctgcaag

SEQ ID NO: 1655 - DNA, 416 bp, Gossypium hirsutum
  misc_feature (375)..(376): n is a, c, g, or t
cgctgcttagctactatatgttccataaactatttatctatagatatataaaataagtgtctttaaatgaggttaagttcttgtgaacattcaagttacttttccttacatagcaggattttaaagggattcttttttttttctttttataataataatccgagccaacaaccaaggatgatcggtgtttgatctttttcagagaccaacatgtgtgtgtgtacacatccaatggacccaaagagatcatgagaataatagaaacaagtgcagtacaattcaggatgagaaattttgatcactggctaatcatctcgtgatattaagctcataacacattgacatttagattcctataactaaaatttttacacnnaaatattgaaaagagcacaagctatcatgtattgtatgta

SEQ ID NO: 1656 - DNA, 478 bp, Gossypium hirsutum
tatgcactagcatgtagtggcagctccctacaaccatatcaaaaagaaagccgatgtatatggacccaacatgagctgtatgagagtgatagtactaatttgaaacacagtttttatcataatgaaaatcttatctacctgtggaatatttttgaggaagtattttcctaacatttgaccaacggctgcgtcaaaccaatgtattggaagttaaaggaaaagttgatgtaacttgtttggaactttccaatataccaaaacaaaaactaaaatggtttgaaggattactattgattaaaccatggtggcgcataagattggtcgaaataattgctccaggatgaagtgaatttgcagtaatctccacctcttcttcctgattatgccaaagcaaaaaaagcactttaagcttagagatgctaaccttagctcacacatataaagaatcactcctcttgcaaaaaaaaaaaaaaaaaaa

SEQ ID NO: 1657 - DNA, 406 bp, Gossypium hirsutum
tataaagcttttaagccctcaagatactcttttgctgatattaagaggacaacaaatgaattcaaggacaaactcgggcagggtggttacggaaccgtgttcaaaggaaggctgtctaatgatgttttggtagctgttaagatcctcaatgactccaaaggcaatggggaagagttcatcaacgaagtgggctccatgagcagaatccaccatgtcaatgtgactcgcttagtcggattttgtgctgatggatacaaacgagcacttgtttatgaatacttaccgaatgagtcattagagaagttcatattttcagccaagggcgagaatcatgtccttggttggaataagcttcaagatattgccttaggtatagccaaagggattgaatacctacgtcacggtt

SEQ ID NO: 1658 - DNA, 561 bp, Gossypium hirsutum
cggttggccattaaaagatacaagtgatccatcgctaaagctataatcttgatttcttttgatgaaaagtgtagagaaagaacttcctcccacttcaaggtctctgcaagcagggttgttttgctggtctgcttcttgacccacttgtctgcaatcctcaacccatggatgctctgctaacagtgactttcatattagcatccatgcctgatccccattatcagatatctttcaagaatcctaaaaggaatggatatcaacttacctagaacctgtgcagaagtgagcctcttagaaggatcaacacaaagcataccagtgaccaaatccctggcagataaagagatgtgatcccagggatcaatggggaaccttagctcagccgccctaacagcatcaaatatctttgatttagtctttcccccaaaaggaggcattccacttaaaagaatatacaatataaccccagcactccacacatcagctgcttcatcatatccccctgttaaaacctctggtgctatataaaatgggctccctacagttccatgcaaattctcc

SEQ ID NO: 1659 - DNA, 643 bp, Gossypium hirsutum
gagggggaattactgggatgggggatcagggaccacctaatggtcttattcagggtggaaagatggggatgattggtttaggagggccagtcagtgttgcaactggatcacctgctaaccacttctcatcagatgggatagggaagagtagtgcagatacttcctctgtctcgccggttccttatgtgttcaatggaagttctaggggtaggaaatgcactgctgtggagaaggttgccgagaggcggcaaaggagaatgataaagaacagagattctgctgcaagatctcgagctcgaaagcaggtgactatatgtcttatttacttcattctagtgaaaagataggcgatttagaataagcattgttaatcatctttgaactcaataatatcggtctgcatatatgtctcaaaagattttgaactcttcttttaatacacttgaagcaacatgataaccaaatttcgtatcttattacggattaatgagtattacaaaccattgaccttgtgcttttatcatctatgacatgctgcatgcctgcatctcaaacttcatgaaagattgtgcggcagtatggtaatgtgatagcaatctgacatgagaagaaagattttgacaagtcaagggcatgagaagtt

SEQ ID NO: 1660 - DNA, 657 bp, Gossypium hirsutum
aaaagggcacacccagcatgcagaagtcacatggttttgcttcattatgtactgattggaacatacttccaccagtaaccaaaatagatttgcattctctaatttcccacaaagtcataaagccgtctttaaatattataagaattctgtatagaattgagccacacgtgagaaaacactgactgctaacataacacattaaagtttgaacaaaaggttaagaaatgaagtatagaaacacaaatgcgtttagaggcgggaaatcctcactataggagtcaacggtacttgaaaattggcatctcacaagaacttaagttataaacgaaaattaacagaatcagaaagtaaaagtaccttttgctttcagctgttggctgaggaagtatggagataacagccctatcagctaaaacttccgttggatttcctaaacaagatggttaatcaagttaaattaaaccactaatgtaagacacgataccacaaagtaaactttcagaatagctgcaaacaacgttcaatagcaacagaactaagacatcaaaaagtaagtcccgtagttagagagggtcgatattgatgatacagagctttcttttacaaataaatagttaacttcaaagtttggcttagtaggtagctaggaaaggaccc

SEQ ID NO: 1661 - DNA, 658 bp, Gossypium hirsutum
tataaattataagaaaatgacttgtatactcgcaaaactgttggccgaaagtttgaatgttataaaaccctatttccttcctttttaaactgtggagaagaggatgatgagaaaatggttttcattttcattttttttggtgaatggttttcattttcttttaatttttacttttgtacctaatttaaaattaataagccttaattaattaaactaaacctaaattaaattaataataagcttaattaacataaatttagtggaattatacatcatcctccaccaatcaacaatactaaatggtctaattaaaaatttgtagcagttaacttttaccattgttacaatttaatccttgtagcttaattacctatccaattgaaaaaaattaagggatcaatcgtgaattaaatattatcctaacctcgtaaatattaaataataatatttacggactcactcgtcaaaagtaagggctcgagacaaccattttcgatactaatgaaaaacatattgttatagttagaacatgaagaacatgtttaaggtataaaagtctattaccaatgacaataaattaaggaagatcctacatgtgagatagaaacaaaagtaccatttcccatcaaaagtttgcttgtacctgtgtactcagtag

SEQ ID NO: 1662 - DNA, 654 bp, Gossypium hirsutum
cccttttattgaaagttcaacctgtgttgacaaaggtaaaaatttataagatcaaaacaaatagaaatatgaattgacataaacgtgataatgtgaaccttacctgaccacctattgctcggaattcaaatagaggatactcttcagcaagaagcaccttaatgaaactccactcatgctagaaaagataggcaaataaatcaattcctaagcagttcgactttagttgaatttcatggcaatatagtccaggcttacctcatggttataactaaagctgatcttcaactcatcaagaactccagttataaaaacactttctatctttgctaaatcaactgtatcatgcttgtcattaggttctgtttccgagtctgatgaagtttcagatagactagtaataggcgcagaagcctgcagagagaatattatttagaattattcctttctttgcatcagaaatattatgtgaaccatgaaaaatgattccttcgtaacaagtataatatgctcttgcccttcttgatgatgccccttgattttatagagcattatcctccaagaatgtgatgcaagtgtgctagaagaaactttatcacttccaaatttctaatttccttactagcatttacgtcttcatcatataaggtccag

SEQ ID NO: 1663 - DNA, 652 bp, Gossypium hirsutum
tttcttttttttaaatttattaaaatataaaaaacataaatacctctaaaataaattttttaaaaagaatgagtttttggtaattaaaataatgggttaaatcactttttgatcttaaacttgacaattatttttacttggcagcctggaactttctttttattcaagttaattcctgaacttaaaaattattcttatattggaacctaattttttttgtctaaattaattctcaatatttctttaaaaactttaaagtccaagccgtcatgtgagaacaattgccaaattcatgaactaagttagataaaaaaaattcaggttccaactttggaacaaccacctagctcaagctctaatataagaacaattatcaagtttaaggattaacttagaaaaaaaattttacatctaaatataagagtaattgtgaaattgaaatccaatataatgatttaaccctaaaataatttgtgtctagtacaagtgtccactccattttccacttcatttaaaaaataataatatactttgtaccaaacatgtatcaacattcaacacatatgaatccaaaaacatagtctatatatatattgattgagatggattaatagaaagaaccttgatttttttgctgaagtcctctctttca

SEQ ID NO: 1664 - DNA, 631 bp, Gossypium hirsutum
ctatatatgaacttatgaaatgaaactaaatactattaagagttaaaaattaagaaaaagagagcaagggatacaccccctgatatatgacaagatataatgaaaaaaaattatatttggaacaatgcagcctccattaatgcattacaaagtataggaaaatgagagttctaaaagaaaacaactgagaaatgtccatgttcagtcatagtgcttaatagtgctaaaactgaaaccagttaggcagtgtaagacagtctattatgtattcatataatcgctaaacaaaagattaatttttgggtttccaacttcaatttgaaggacccagatgccactaacgtgtttttcatagggtaactgtgcacaagtatcaacagcaagaacttgaatctaacccagtgcaaaggtttgcagccattattaaggggaaaaatgataaaaggggaaaagacttaaatgcaagatgtagtttcacagttttcagtatgaaggaacaactaactagcatgcgcacaatattacccactatatcaacctaacaaaatggagcagccactatagtactttaacaattatagaacaccaaaatttcaagttcaaaaattaccttaacttccaaagcaaatga

SEQ ID NO: 1665 - DNA, 614 bp, Gossypium hirsutum
ctcataacgacgagagacagtatcggaggtctcgagccagtaaactggaacttggacttggggtgctttaacttcacccggttcctccttcgtttgcctcttcagcttatcctgttttattttgaattgcaaaataaaaataaataaatacaaaggaaaattcaaaccatgggaagtatgaaacgttaccagcaaattcatttggagccaaagggaagataaaatattgaaggcgcgagaatcgggggaagtccgagcggagcaatcgaaaagagggagctttccggttttcactttcgacgatggagttgccttttgttttttctttaatatgggatgtgacttactactattaaaaacccaaacccgaagatatgttattacccgacccgaatccattaacattaattagactcattaattaatcctcctgctaacaattaaattcgtaagtttgagagttaagtgagataacaaatgtttctcttatattaattaacgattcaatttttgtcttagatatagagcagttttaaaatttgtgaccagcatctactctttaatagttttattgaatgtgcataatcagttattgagctaacttcgacagaaaa

SEQ ID NO: 1666 - DNA, 639 bp, Gossypium hirsutum
gtagtggtcagatagaggatacatcaggtttgtgcatgtttttgtttgcaaagttttgctctgatatacttatgatgtgctggcaattattttataatctactttttgatactatcatgattggtgcaggacactttaacatttttgttggggatctcagtcctgaggttactgatgcaatgctgtttgcgtgcttttctgtctatcctagttgttcgtaagcatcttttactttggtattgatttttgtaaatgcataaactttcaggaaaacctatttgttaataaaccttgattactgtattcatgttgcttaaagtagtgatcaattggtgtctcagtgaataacaaagctgatacctttattgattgcagggatgcgagggtaatgtgggatcagaaaactgggcgttcaagaggatttgggtttgtatcatttcgaaaccagcaggtactgttgcttggttaagtttctggtggctttttgtgtttctcagtcttccttgataatgttcttttatctattgatatcaactttttttatctgtccaggatgcacaaagtgcaattaacgacttaagtggtacgattcatgttctttgctcaataaatgtacttctttatctctcattgagcaca

SEQ ID NO: 1667 - DNA, 449 bp, Gossypium hirsutum
ccctagggtttctgtttctaaagtattttgggccgtttgggccgttgtattttaggcctaggtttatttgggcttgtattgggtttgagctatggaccatttgtaatttaggttataattttgggccctggactggttaaaattggattgtttaaaagatttggactttgatgatagactattaatttggttttattctttggacttttggtttaataattggttttattttggttattgggccccgggcaaatcgggctttctacacatactttataggttctaaatagtatatggtatggtgacatgttttggaatggttattttggccatttttaagtacttggattatatggtgctttttggcatgtttgtgatgatatgtaaatggttatatgtgatgttatttggtagttaaataaattagatcttatgcttgaaaggtgggt

SEQ ID NO: 1668 - DNA, 658 bp, Gossypium hirsutum
cccacgttttttattagctgaaattaataaaaaaattaagcagatttctacccatcaagcttgaagcctaaaacaggtcatgtaggccctggtttagggatacttgatgcttgttatttctgcttttctattttttgcttttagtaaaagtacacgaaaaataaatttaatagatgtcaaaaggtaggaattcataagctaatagagacagattcgatgatactatgcaacaaggaaagttatatatttatatattcattaaaagttgtttttatatgatattcaatgtcgttccttgcattactgaaaacgacgtccaacttgtactctgggatggcgatttgtccatggattgccttggtggactgagatgagttaacccaacgccatctttgggtccccagttccttcttccatttcattttgcttttggatggatttttttgtttaattataccaatcatcctcgattgatttttactgtcttgatccaaataatttagtatcagacgataaaatcgattaatcaacttatattatattataaataactaaaaataatatatgtaagttagtcaatcggtttagttctgaattttaataactaaaccaatttaattacaaaacttacttattgtcatcacctatccttggattc

SEQ ID NO: 1669 - DNA, 338 bp, Gossypium hirsutum
aaattcccaaaagactcaagaaactagttgctacgtttcctcatcaagaggtatgtgattctttattaattatctattttttatttttaaccttaatccccttttatgcagcttgtcatcatctcatttcagtgtttaaatttcacagatgaacgaggaggaggcctccctccttgatgttttgtggttactgcttgcaagtgtaatttttgtgcctgtctttcagaaacttcctggaggtgactaaagtactgtattatttatttcaaatttgagcatgttgcatggaggtgacgttcttagaaaaacacatgagtattcttttcattcatgaattt

SEQ ID NO: 1670 - DNA, 657 bp, Gossypium hirsutum
tcgttgtgttcactggaatccacctttagggattggaaatattttgctgggagactaagtaggaattacttacgacaggttttgtgctttctaatgcttctactaattagggccttgcgatccctttcaagaaaaataatctgcaacattatttaacctcatatatttataaaaaacagaggattacaacttaaaattctgaatctttaaacataagcttttatatcacgagaacaattataattgaaatgggttaagttgaggcaacacttgcacgaccagtactaatttctatcaaattttagaagggatacaatcgggagaggagtactgctactcggtttctttagtcagagcacgaatcttgatgacgaagaacccaataccatggccggcaagtggtttatagaaataaaattttgtttgacacacgagtaaacgctgagaaagctataagatggttcattataccacaaatttagtatcgaggccatcgtcacgacattaggaagaaaaaaacaatttttcattgtttagtatttgtaaatcttctgatgtaattcatatgcttgtaacacatctagaaactgacttgcaataacatggatgctttggcacatagaaccgcatttcccgttgaaggagatccattactaa

SEQ ID NO: 1671 - DNA, 610 bp, Gossypium hirsutum
atgtcggggacattatctcatgataaaaaggttatagcatgcaaatgtttatgataataacagatttaccgaaatctggtttaggtcaaaaatcggttttatgctttgagcagcggcctcttttccaccataaagcctgtccctctggtttaagtcgagaaccgataaagaacttcgcaaagtaacttcctttccactggaaattttctgctgcttccggtttacgtccaacataagggcaggatgagtgaaacaggttccctttacactatttgtctttcccttttggttcagatgaaaagccatagctcggttcgacgatgtaccctttccagtggatttctttgctttcatatttgatttgcttctaatcacaatatcctgtggttgcaaaaaatgtcgttccgcttggggttttgaagattggtcttgcatcaggaacttgtgccttcttttcaaaaacctaacaacaaaagtgttgaatctttatcaataataatgatcctaaaattatgaaaatcctacaaatttatggaagaacatgatcatacttgacttctgccaacagggtcaatctttgttctttcatcatctgcaatttcttcctcat

SEQ ID NO: 1672 - DNA, 604 bp, Gossypium hirsutum
tcagcatgattaacaatgtacttgacagcatctggacctgaaaagagacaaattttctactcagcatcttaatattaggccaaatggacaaatattcaattaaaaaagagagcatttggccagtggcaaacctaaagtgtcatacaaaggaactgatacaagggaatatgcagagcaagcatgatcaacaatgagccactctggtctattgatgaaataaaagccaacacaagagccctggcatgataaaagcagtagaaccacatgctacatgaggaacaatctgtttactaaaatcaggtatcttacatgttgcacatatgttctgggggaaataaagttactgcagataaaaagttattgttgatatcctcaccttcgggattccatgaaatagtaggccagaaccaatggccgcccgggcagttcctgcttctccatatgtcatccacttgtaccttgatgaataaaaaaaaaaattcaaagttaacaaaggcctttggcaaccgtaactatgcctctcatctgacaatagaaaacttactccccaattgtaccattgactcaaattcttgtaccaaaatatttgaaatctcgaagggta

SEQ ID NO: 1673 - DNA, 579 bp, Gossypium hirsutum
  misc_feature (571)..(574): n is a, c, g, or t
ggcctccatccttttgttcctatcatcatctttcctctttgaaaactcccgtaacattctctcatggtacttggcaactcccctattgcgagcagttcgtgcatcacggatggcccagtgagcttccaggagcttcttgcgccactgaaaaatggatttcaattgcttctctctcagggccttctgagtggcttgtatttgtcttgccagctccatacgctgacgctcacacaggcggacaaattttctgtacggtctgtcaggcatagccattatctcttgttgctgctggtcaacttcatccctcaaacgtgcctgcacatctataagtcgaagctttttttcttcaatttgcaatcgcagaacaagatctggcctgatccttttcctctccaaatttactgctagtaaaccaccaatcttcctcaaattttctgatcgtttcttgctaaagacttccacaccttcctgaaagagaagctctttgacatcataagccagagttagattattattgatgttaggcatcactgaaccatacgagtcatgtttcctaggaagaaagaaaatnnnnaattt

SEQ ID NO: 1674 - DNA, 646 bp, Gossypium hirsutum
  misc_feature (572)..(574): n is a, c, g, or t
tttaatatagcttcttcattttattttagaggataaatctaaaatattaatttgtgtaaatttgaaatttaccctttggaatcatgaatctcttcggaaacaatatatatgtaattatgaatagttttatttgccttgttgataaaaggtatatacgcccatcgaaggaaaagaatcgaatttggtaaatactgcacaggctttgatgggtttaattattggcggccaggtatgctttacttgcaattaacaatgattttataattttaatgtacccaaattaacaaataaactatatatatattgtattctaaaatgattgctatacgttgatttcttaatccccacaataggctgagagggatcctacacctttgcatcgagctgcaaaattgttgataaattctcagttgccaaacggtgattttccccagcaggtaattcttttccatgtatatattataggtaaaagtattatataagaaggcctatgtattagaagtcagattaaaattttgtctcatttactcaaaaataggtaaattaatccatatatattagattaaagagtnnnttgatcctttttgttaaaaattttatccatttctagtgttaaaaattattgtagctgatagaataaccaggt

SEQ ID NO: 1675 - DNA, 610 bp, Gossypium hirsutum
  misc_feature (285)..(286): n is a, c, g, or t
  misc_feature (290)..(290): n is a, c, g, or t
  misc_feature (307)..(309): n is a, c, g, or t
  misc_feature (315)..(315): n is a, c, g, or t
  misc_feature (317)..(321): n is a, c, g, or t
  misc_feature (325)..(325): n is a, c, g, or t
  misc_feature (329)..(330): n is a, c, g, or t
  misc_feature (334)..(334): n is a, c, g, or t
  misc_feature (370)..(372): n is a, c, g, or t
  misc_feature (603)..(607): n is a, c, g, or t
atacttaaaacatgtcagcaagtaaaaaagaaaagacataaaacaccattagatataaatagaaacctttttacagatgtgacaagatcaccagatttgttgctctcaggatcaagggctccacttgcccaactgtgaaacatataaagaccaaataaatgagtgctaatataaaaattgagacgtaattcacattaaaagaaataaagaagtttcctccttaacaaataaaggaaaaagatacatactccgggtatttatagatttccaccctggatctagcanncagnacttaaacagcaacatnnnaaaatnannnnntggnggtnngagncacttagaaaaaaaaaaggaaaaaaaattatcattnnnctaaattgatgaatctgtataatgaccaacctgcactcaatagataatcccaattgtttcccttagattacaatgactttcacaaggtcaaaatggaaaaagaaaaacaaatatagctgaataacatcagttcagttatatagatgaataacatacaagtttccgtgagattttcttaaaacttttaaaaataatcaacaccgaaatgaagtcatgtaacaatagttcctnnnnnaat

SEQ ID NO: 1676 - DNA, 654 bp, Gossypium hirsutum
attatgactgatgatttggctagatgtccagtacaccaactgggccctttgcacctttcaggatgttgctttaaggtttttcagctgatttctttgcatttaatggtaattcttggctccacagatcaaatttccaatttatttggccttgggaagaatgggcttatgtcctagacctcccaaagtgggctccacagcgtgtatttgttcaagaggtcttggaaagagaagttcgtttgtcatattgggacaaaataaagcaggtatgaaaacatgctagagtgcttttctgttctggaagtactataaagatagaaaaaaaacccgtagattttggttggggcaattagtaatggttaaatatattcttaacctcccttagttgggaaggtgttatattaatttgtaccaaacatgatattatactaacctcggcatgttgctgtatctttgtaacatttctcgttttgtaacacttgttaatctcagagcattgagaatgcacctgctctagaagagttgttaccacccaagggtggtccaaatttcaagtatagtggagcggatgatcaagaaaagactgaacaagagcaggcactctctgcagagcttagcaacaaggtgaaaggaaagcagtcagcacgtgagataata

SEQ ID NO: 1677 - DNA, 630 bp, Gossypium hirsutum
tcttcattttatcgaataataatgataaagttttactaaggttgatgttgagaggaaatgcacatgttcctacactaataaaaagacaatataaaattttctttttctttaatgcggggccaagtttgttataaagaagacagaagaaaaagaaaactcacacttcaattataggttttaggaagggaagtgctttctcgatgctctctatgttagcaagggattgcacgattgcaataggaatcacaaaaaagaatgtaaggaagaaaaatgcaacagcaacaatgagcctccgaattgtgagaaaaacaaatggaattgataggttttcccagtacacgtctcgtggttccggagcccactcagtcaaccatatagttgggttcctacattgttgagtttgtgcacaaacagcagctccccatcgagttttgaaggaaacaaatgctgctgccataattgatttagggttgctggtaatcttctccctctccaaggatatctggcaatcattgaaggaacagatgattaagcacacatgtttccacattacatgatttaaatgtgcaaacaaattgctgatcagttcgaagattaagaaagcaaaaccccaattatcctaatgagatg

SEQ ID NO: 1678 - DNA, 640 bp, Gossypium hirsutum
cacatctcactagaacatgtgcagaaagacagggacaaacttgttcttgcaacagccttaactattggttttgctccagggagcttgacaaatgatactattccgtgccgacaaagaggacaggcaattgagccagttggacctttagctacatttgtcgtgtgatttgtagaacagaggtataaggcacagtgtgtgcagaactcatgatcacaacctgcaccatgggcaatatatctgtgaattctgattttcataacatctagtcacatatatcccatgatcatcaatgtcaaacatgaattcctacactttgtgatgaaaattcagggtgtggatataatgaagaaacggatttggagatatgcatatacgtatcataatgcccataagagaaaaggaattttattgtattattagcatttctaacctgatttagaacatctcaaaattggcacttatttcctctcaacctcaccactaaaaataatgaccgcacctaattctgtttgtgcatgaagaacaaagtttctatgaatgtgtctctgtgacaaaaaatgagttacgtgtgtgataatgtcattctaatattagaatcttaggtggaagatttcatttcctcatccctttcaatgaatat

SEQ ID NO: 1679 - DNA, 638 bp, Gossypium hirsutum
atatcagtattagaagcttaatgcatagttttctatacatcacttgaagagagagaaactttaaggtgggaattgttaaccatggaataaagaagacaatttaaagattcaaggccattttccttcccgtctttcatcttcttttcttcattgctttacttcaatccagtttctgtattattccattgttgctgttatggtatgctgtatcatccacattgggattgtctaaaaaaaatctatcatatctgccccccaagatgttactggacttctgttctctggaatttgacatatggttatgcatatagaatttacagtttttggtgcctgctttatctttatgttatatctttattttctaaatttgagatcctacatgttcaagtgtaatgaatgttgatcaaggttttcaaaaccagattggtggtcgaactggtcaggccaccggttcccaagccgacctgtttgtccagtttgatcaaaaaaattattaaaaaattcattaaataaaaaatagagaaaaccggttcaactgccggttcgcaggtcaaccagttcaatccctctctttggactggtacctcgacaggttcctggtccaactgccggttcggtccagtctaaagcagtgataa

SEQ ID NO: 1680 - DNA, 614 bp, Gossypium hirsutum
tggacgctgatctacctcataggtaaaggaagttgggtctttaatctccttggctatgtgctgtagtccatgtttcctccaggttttgcttttgatgattctgtcagtttctaatgttgtgctctcatgtgaattattcagtgcgtctgataaaattaaagcaatggaaaaagttctagccaaagcaagagagcaattatatgattgcaagttgatgcttggaaagctcagagcaatgcttcaggcatcggtagaacaagttatgagcttgaaaaaagatagcatgttcctgagtcagttagctgccaaaacagttcccaatgcaatccattgcttgtcgatgcgtttgaccatagaatattatctccttcccgcagagaagagaaagttccctagaagtgagaatttggaaaatccaaatctctaccattatgccctcttctctgataatgtcttggctgcatctgtcgttgtcaattcaactatcatgaatgccaaggtgataaaagctgccttgcatagctctctgagttgttctttactttttttgttttttcacttattgattaggaattgttatgtttataagaattgaagctcaaaatgcatcttcc

SEQ ID NO: 1681 - DNA, 636 bp, Gossypium hirsutum
tttgaatgaattcttagtttcaatgtccaaggatcaatccttgcaccctcaaatagaaaatagaagagttgaatagatcacattaaattatttcaaactttgtttcaaaaaggtaaatgactcaaccctacttagtagttgaatgaaaagatcagtctgatttaccctttgtttcaaagcgacttcaaaaagaaactcaccagcattaacagaagaagtttaataatgacagcaaaactgttatggtagtataaatatattaaacggttataatttttagagtgttaaatactgaaccacattatttcatccaatggaatcaaattcacagataaatgtaacaataaagcagcttccacgctttatgtagtctttaaatgataatatataccagacttaaaaagaattggttaaaatgaaaataaatcatcatatggggatacattcaataatatttcaagtgtgcacatcttacttgaattggtactttaaacatttgtctaggtataagctccttcagcttttgagtcaaagccctcccaacagaatatgcctacaaaatgttagctgatatttaattaaactgcttattcaacatacaaaatatgaaattcatagaaagttgccgaaattcag

SEQ ID NO: 1682 - DNA, 625 bp, Gossypium hirsutum
atgcctttattgcttagctaaatattgtgatgaccgcaaggtagggaatgattatgtttttacttcgacatgttgtgttatccatgaaatgtctgaatagttctttttttggaattgcagcgagaaatcattgaagcaggagctgttcgccgaattgtgaagcggatctataacggtgaaacggaactgaatgctatagccatcttgttggaactgtctaaaactgaagctcttgtagagaaaatagggaataccaaagattgtattcccctcctagtttatttggtcagttatcccaaccccgaaatcgccttgaaagctcaagacgtattgcagaatctttcatccaacacacactttgttgtgaagatggccgaatccggattctttcagtcgtttgttgctcgattcaaccatggtgaaaacaatgaatctaaggtagacaaaagttgggaaaaattcgatggaggccctattagtaggagttagattgtattttgcgctctctactaaaaaaaataggcaaagtagtccctttgcattagatgaatgagcaaattagtcttttcttttaaaaatttcattcatttgtactattaaaaactggtccctgtacattagcatg

SEQ ID NO: 1683 - DNA, 654 bp, Gossypium hirsutum
taagtatacacgtatcagctgcagtcaggttgatacccagacctcctgcccttgtgctgagaataaatatcctatagtcactgttcacatcattgaactcctggatctatttggaaaaagaaaaacaatacaaagtagccagttaataaatacaactaataagaaatccaaaactgcaacatgtcccatgaagcacatacaggcagagaacataattaaaaaagactaaaagactaacgggctccttcggggacacttgggaatattttgttcttatgaaaaccatactacacagatgaactaatttctgagcaaaacatgtatatttgctcgatgtagtttcaattttaagctgatttgaaagaactaaatcaaattacaatgtatatacagtactcatgacttcatacatacctgtcttctcctttcttctaatttcacactaccatcaatcctacaaacattaaatcccttttcactaaaatagtaatccattatatccagaaccttcgtccactggctaaagatgagaacctgttgatgaaaggcagggagaaggagtagacagcttttagcttaaataaatcaacgagaaaacatacaaactaagagagcttataacataacttgtgtttacgcctcaataaaccgagt

SEQ ID NO: 1684 - DNA, 638 bp, Gossypium hirsutum
ctaaaggaagaaccccattggtaagctttattttctgttgacctttcaagtcaatatgtttcaaagaatgttcatgcattaatgaaaatatcttgtgtgattcctcagcatatagcagcaacaaaagggcatgaagattgtgtgctggtactccttaagcatgcatgcaatgtacatttacaaggtaaaatatgatgttaacaccattgatccgagaatgaatcaagttcttacgttgtatcttgttattccatgtatgtggcagatatgaatggcaacacctcactatggaatgcgatatcctcaaagcaccattcgatatttagggtcctatataattgtgctgctgtttccaacccgttcactgccggtgatctcttatgccttgctgcacaaagaaatgatcagacagtgatgaaagaactactgaaacatggattgcccatagatgcaaagaatcgtcatggattaacagcgttgcagattgccatgaaagagaagcatgaaaacatggttaatctacttgtaatgaatggagcagatgtcatcaatacaaatacatatgaattttcttcagaagcgttaaatgaaatgcttgaaaagagagagatcggccaccgaaattatgtacctgataa

SEQ ID NO: 1685 - DNA, 638 bp, Gossypium hirsutum
acttttagaaatgaatgctcggctcttgaattcgtcaagaccaacaggcacagaatgggacagtctatcagactttggagagccgttttcagattttatatcaacaaccgagttatcagcatcaagttgctcatgagtagagacatcatttttgcaagcttcttcacttgcaggtgaatcaacatgaagagccgtgatctcagcaccatttgtacaaaaaccatcatgagaagaaaaagaaccagattcatccgccaaacattggccaggagaatcagaatgttcattgtctcccaccctagcttcatcccctgttgataagccaaatgctacagatccacctatataaaataacaggattactactagtaagaggacatgcaaatgctctccagcaattaaagattatcaaacagtacatagggaagaagacctaaatttttctaattggttaaaatatgctccaagtaaacacatgtactactaagaggaaaacaccagtaacaaatgcactccaggagacaaatactagaaatatgaaagatacctaaattctcagcactacaatcaaacaaaatgataggacatttaacgaatcagagtgctgaaaccttgaaaaattagcacagtttcaagac

SEQ ID NO: 1686 - DNA, 626 bp, Gossypium hirsutum
actgataatggaactgatctgactcagatgccaaaccgtgttgtccgctctctgtttaaggaagatgaagatagcacatcctcatccaagaattctgtttcttctgtgcctagcagcagccatttaaacactcagatagcatcttctattgaaaagcaaccagtctctgagaatgaattgattgttaatgaatttcttcatgaaaagcgtggttttgttgatagcatcagtggcatcgaggaagatcaaaatggcataaaggtttgtgcatttcttcttattattgttatttgtacttgaagcagacactcagaatcatcatcagagtttttgacacttttgcaagctttataactgttatggttggtttgatgggattttatgaaatattcaaataaaggaaattatcttagaattgatcattttcttgtctgccatgcttgatacttattatcataagttcttcatcttctgcaggcaaagataagagaaacaatggagaaggctttctgggacgggatcatggaatctatgagtcaggataagcccaattatgaccgagttattgagcttgtgaaggaagtcagggatgaaatttgtgaaatggctcctaagagttggagaga

SEQ ID NO: 1687 - DNA, 517 bp, Gossypium hirsutum
ctgctattagttcagagtttcatctgcaagtagtaaagaattaggacaagaaacaaaataaaccaaggacaaacttacctgatatggattttggagcttttattgctgaaaacaccttcaaatcaaaccaaaatagttgtactaaatcgaaaatattatcaaatattgagaatcaatacagaaagcaaagattattagtttaaaggaagtcttttcatccaacaagatgcaaacagcttagtccaacatggaaggatggcatataattgaaaaccatgttgtatttatgtacaatatgtgagcatcagctaaaaacagtaaaagtaccatagatgctcttgtattaagagttagattacatttcactcccttcactaaaaaaaatagacaaattaaccctcgtacgttaaattaaaaagtaaattgatgattctgttaaaaatttcattaatttctacagttaaaaactaatctctatatatcagcacatggcagccatgtgtagctgttgtgttat

SEQ ID NO: 1688 - DNA, 658 bp, Gossypium hirsutum
tgaagaatcaagttaaaaacttgacaggcttgtgaaaaaacacaacagaaagagataaatgaaaactagaagaaaaggagcatacggttaaacaaggatagaaataactgacagccaaggatcaaaagtactaacatgcttgaattcttctgataatttacattgttcgaatgaactgatagctctcctcacatatatatatatgcatgtgtgtgtatcagttcaaagttgcacaaaactcaaaaaaagaggctgcagaatacctggttccctagaagcatcaacttcctctgattgatcattcctaaaaatgccattttgtcccatcgcattagcagaacttggtgcttgagacaaagcattctcaagtgcagctttccactcaaacaaatcgtccaatgtttcagcctggaacatcaacaaaagcaatcatcatgtcatctaatttctatctattgaagtaaagagaggcttatgaaatagctccattgatttattgataaaggtaaagatagatagttacatagacattcaaactactaattcaaaaatataaaaaataataataattcaaaaataatttaaaattaagacaacagttttttttaatatttgaatgtttaaaatactaaaacaaagctatttatgcttcctgcaa

SEQ ID NO: 1689 - DNA, 630 bp, Gossypium hirsutum
cttatgggagtgtattgatagaagcatcgatacatgagtaaagtcgatttccccttcatctggattaaagaactgcccaactgccatggaagtggctggtggaggcctgcctgaaatagtctgagcaccacaaagtcactgcacacaattactcaaattattctgcactatacgttaaatgagagagcagcacagccatttagaagtccaggaacagaaaagaaaatatgaaaagcctaacattttggcatacaaaaaaatatgcatcattcacatgcatactaagatttggtcttctgaattggctcaagtttgataggctccaccataggttgaaaattggaaaagaaagaaaatagtaatgactaaaaggtgttgccacacatccatccttttagatttcacagtttagctttctattcctttactgtaagggaaaatgcttttcaaatatagatagctaagcacaaacctatcaaaagtatctgacggtttcatgatgtattctcatagaggtgaatccttaagatgaataagcataaagagacaaacaaatttccagaaacaaccctagtccatatatagttgatgttgtaaaaggaatgttaccggacgaagtgcaactgaaat

SEQ ID NO: 1690 - DNA, 610 bp, Gossypium hirsutum
agcaatggaatattgatagtttgtgccaatgatgtagcattttaatgttttgttcttttgatatagtttacacattgtaaaatcggaagttatgctatagaaatcaaaatcttcagcatcttccatttacaaattgtaactcatgatactgagtgaatgttacaaagaagaacatcaatccaagagattaggagtgaaatcaagacggcctatacaaacaccaatgcaacagtaagttttcgtttcctatcctcttctggaaagaacatgtatgtacaggaagaaatcaatcaccaattttcaccacgcccatcaaagccgcaattaataaatggcatgtcgagtaaacaactcattactgcaatgaatagtctgggttgaatgcaagtgcctcttcatataccaactccttcatctgcgccatggttaaagcatgctgctcaaagtcaaaggtaaaggggatcatgcaaacaggctcatcgcttatgtcatgcagtgtcgttagataggggtgagcaagggcctcctcaactgcaatatataggaattacaatcacatggctcccaacttccaactcagaatgaaacacattgcaacaaatcaactaac

SEQ ID NO: 1691 - DNA, 635 bp, Gossypium hirsutum
atatagaaaatatcgtcgctttccatatcataaacatctgttatggaagttgatgatgttggttcatctgtattaacaagtttagcctgcaatgactgcattgtattataatcccttccaaaaattaaagctgctaaacaataacactcccaacttgtatgatttgggcttctgcttttaaagactccactaaaagtgtatcaaatcatatactttataatatatttagaagtttgaatctcatttaaatgaaccaaccgattaaattaggaattgaaaattgactttcaaactagttttaaaccgtttgtgactactaattactaatataaaaaattccagaagcaggtgattaggtgataaaataggtttacttaccttagcttggcgatacttttcaagcatccggcgatattgttgacgtgcatctggagaatcaaccatagacaacacacgtgagactgcctcatcgattgctacatccactttctgtttgcggaacactttgagaatgtcctcttcttcatcatcaatgcaatccgactcactgcgaaaacctcgcaagcctacacctttacggcgccatcgaagtacaaccttgtctaatacggcgccatcgaagtacaaccttgtct

SEQ ID NO: 1692 - DNA, 611 bp, Gossypium hirsutum
aacgaattaccaggcaaggtaaaatcctatacatagctttactaaaggaagcaagacaagttccggttagatacttctttttgaaactggcatcttttttgggtttttttgactcggtggtgttgtagctttttgtattctggcatgctttccttagaagaaaacaaaatatagggtaaatggcttagtttaaaagtacatcgctgttaatctaaagacattacaccttgaactcttaatcttatgttaaagatactgtaggtcttgctttaaaatccaaggtgttgttagcttcttggttttcccttgcatcagttttgggtgttcattagattttaaaggacagtaatctgcctgataagtgtctcttgattgttgaatgatttgaaattgaaaataagattttaattgtcattgaagtttataaaattcagggtaaagtacatgaatagtcatccatatattcagttttttttattttaatcactcaactattactttttttttcattttagttactcaactattaaatattaatatataacttttcaaaaagttgagtgactaaaacaaaagatattaatagttgggttgagtgattaaataggacg

SEQ ID NO: 1693 - DNA, 550 bp, Gossypium hirsutum
gagagatatttaggactgcattaaccaaccacctcaagtttttcccttgtaatttgttctgatccttaagatcacttgcatatagttcttgacaggtaagagtttaatctaaccagaaaaagcacctacagaactttcttctacaatggaaattatgcacataatgatcttgaatctttgacggctttatccattattttcaaatagactaatcctcaccattcaaatgtataggacccatccatgaattgtggaaatcatacttgtgaatggtgattaaacttgtattggatagtaatggagacaaaaccagatatgtttggttcagtagttcaaaaaatgatatggttggccttcttgataagttggggttttcttgtcaaataaagcaaaatgtaagtcaaagatcaaggaatcaacatgtccctccatctgaatttatgaagccttcctagctttcattattattgaataaattattttcattccaagaaaaaataaatgttactgcaatgcaagaaaaaacaagattagatatgaggaaaatacc

SEQ ID NO: 1694 - DNA, 598 bp, Gossypium hirsutum
gggatgaatcactggcctgggagggctaactcagataaggattattattttgaatcttcttctaggagaagaaagtcttgatatgtccagttctattagtaagactgttgcagctgtagtggttgagatggatgaaatgaaattggttaaagttgattacgttcatggaccttggtgtgccggatagggattctaactccaattcttcgaaggatgaatcacttcctgaagggtctgatcagacgagattattattctaattcttcttctaggagaagaaagagtctctataggtccggttctattaggaagactgcggcatctatagtggttgagaccgatgaaatgaaattggtttctagtgtttaagtctctcctgcaactgttgattttaagctcggtgttctagatggtgattctaactccaattctttgagggatgaatcactgcctggagggctaactcagataaggattattattttgaatcttcttctaggagaagaaagtcttgatatgtccagttctattagtaagactgttgcagctgtagtggttgagatggatgaaatgaaattggttaaagttgattacgttc

SEQ ID NO: 1695 - DNA, 636 bp, Gossypium hirsutum
gtttaagatcgctacacaaacctgtgataaagcatctgcaattggcgccacctctgctgaaatgtgcttggatcccggaacagcttttgtattaagcttcaattgaggagatggagtagcaggtgcagctcctggtagaccaagaccaagcagatcatcaattgccgagcttgctgcttgtgaagaatggtcagctgcgatgggatttgatattgccaattctgtctttgtagacgaactatcataaggagctgtatatgcagaaccattattagttgaacctctagtttcctctttctcagaagtagttaaaagcagatccttatcattttcctcaactctcagagcagaaacaacattatctgctgcttcttcaccgatagatttcggagttcatctgaaaactcaaatggacccgtgttccttatctgtaaacatgtaagatggctgcatatatttacaaatatcagttgacactcattactattatttgagtaacacaatctaattacgttcctaaaaggagatgcagagtggatatggtacactaaattgtttaatagcaggaagtaaacccttgagtaaaattaagaaaatgcttggagaagcagaatactgttataacagcagagaaag

SEQ ID NO: 1696 - DNA, 623 bp, Gossypium hirsutum
ggcgctcactgaaaccctggataatgaataaagttatgaggataagatctatgcatggtcaaggctcaaattaacaattaaagatgcttaaattttttacatcatgtgagactgattctatgtagccaagcacaaaaattacaacatggcgagctatatgctatggtaaatggtgataccataattgattggtataaaatgaaaatcaacaattttaaggggcaaaacttctatgccagtagcatattcaaagatctcaggatggtagtaaccaatgggcaagtgaaaaattctatggaaggcaaccgtatttaaggaaaaacgcttcatcaaggagaatattagatggtctaaagatagaatataaccttgcttagagcattaattgccacgattatttgctggatattagcaatttgtagagaagattcatctggattcaatgcttttgcattcatcaatgttacttcgacctgtgacattaatcatatgagtaaaatgctgctggaaaaatgtaaaataaatcaatttgctcacatgcggaccacatgagaacactatgcaaaaacatttaaagatttcatggtacagatgaaaacctgttgacagagaggagtgagcaa

SEQ ID NO: 1697 - DNA, 616 bp, Gossypium hirsutum
attgagtttctccaccgaatgacgctgggtggtggtagatggcgttccaggttcgaccatcagtttaccacattaattgattcaatacacttactcttgggtaataacgtaagtgtcttttgcatataaaggtttgttaaatacttgctcataatgactttgccagattagagatttctggaaagtaaattaaaagttaaccggtgaaatgtgctgttgatgggggcctgcctgtttgtcataaaagtattaaattatgattcaccattttctttttctcttttgtatagttgaaaaagtttagtaagtaaagatcatcttttacatacccgacactggcatcggttgctgctgcctagatttgccactggatctgtggccatcagtttctttaccatcatattattatgtgggactggctgaaggtgtggactcaaaccttgtaagttgctggacagctaaaacttacagttgacaaaagtcggtttgctttaaatgggccgggtaaaacatttttgtgtcttgaaggagtcccatctttactacgcatgcttgtttgttgtgttggacccaatattacaaatgctgtagggtacctctgtttcctttgcttctt

SEQ ID NO: 1698 - DNA, 610 bp, Gossypium hirsutum
ttatttatgctgctgttgcatattgttatctctagatgttgtgatggctttctattttatgattggctgcttgtgattttccttttgcaccatgcctgtaatcttgaaatatcatttgaatgttgatgctggattttcatcatagtttttttctccttattttccctaaaattatgagtagatttttttctcattctcttactggttgttattatacattcttttgattgttaaagagtatggttgctacttgtactagttgtatttaatgatggtagtttgccttgtacaggttagtcagcttagggctgctgctcagaagtatcaagcagcaactcaaaatgcatcaacaaatttatctgctccagatttgcagaataactgtaacttgtacgtcctttattattgtgctctttgtttttttgatagaattgagtaatcgttcctttttatatggtagctggactggtagctttttccctttcattttttcttttctagagtgtgatgcattatgctttcctcttgctcatacctagctgtagtcacttacactcggtgtattgatgttgccagttatgtttgtttggggactctttctttgggtaaa

SEQ ID NO: 1699 - DNA, 658 bp, Gossypium hirsutum
atccctctcgcagccatatcctctaacaatcttgaagatttcagagctgaaaaagaaatttggaatccaattaaatattcatacaatggaagaaatcaggtaacttcacgggttagttgaacagcaaacacaacgtatttccgctctagttctaaaatacctgtatatactcctccattcccatctggagactttgctacctggcttaaaaaaagtaactcatataaccaccaaagttgaaaaagttttctacttggagcaagaagcaaattgtgaaataaaataatatcaaatcagccaaaagaaaaaccattaagtattaatactaaagggatacttctaggagaatagtgtagccggaatactgctgttaaatcacacatgacacaacagaatagacgtaactcttttcctcctaaaacttacagacaggtaattttacttggcctttcaacaatcagcattcatttgcaagattctcaacccaaaattgaagttgtgatgttatgatagtagtcattaacatctgatgcaaatcaccatatagcaagtagaactgtttaagaactgtttaaggacaaatataactatatgtacagaggagcttgttaattacaacttgaacattattttattcaaccgaaggaaatgtcactct

SEQ ID NO: 1700 - DNA, 513 bp, Gossypium hirsutum
  misc_feature (506)..(509): n is a, c, g, or t
agcttcttaaggagttgctgatagtgaggtttgtctgatatgctgttaatgttctctaaggctctctatctttgactgacacacacatgcacttgcttttgatgacttaccgtggttttgggtatcaattagaagctcattttatttgattggttgacacaaatgcaattgcttttggtggctttcaggcatcaattagaagaagttcattgtatttgataggatacttcttcaaaaacagcaaactttatctagttgatgaagctccaaacatgatatctaccttaattattttgcttagtgatacagattctgccactgttgcggtatgttacgagctattccttctcttttgttgttcatttacagtttgtatcttgcatcttatgtttggtttgataggttgcttgggaagctttatcaatggttgtcgactcagttccaaaagaagtgcttccttcatatataaagttagtacgcgatgctgtatccagagcaagatatannnnagcg

SEQ ID NO: 1701 - DNA, 662 bp, Gossypium hirsutum
cttgccttcctcaaattctggggtgcaacttccatgaacaactcgatgtcctcctgaggcttccccacgaaaacatagcctccgggtactccatcgtctacgttataagctttaacgttcggtggagttggttgggatgtggagaagaagatagagttgttggattgtgcagtgccgaagaaggaaaacaaggtctttggggacgccgaggctagccggtcgatgatggcgaggagtggagcagcgtgggtgccgtgagggaatgcgagaacagcaacatggggatcaacaagctgtgacatcactgctgcgcgggaaaggttgagcttggatgggtaagggcaggaaaatggattattaaatagccataggcccgtccaggttggtaagtatggtgccgtacactgataattttgatatacaagattgggggttagcatacggcagtgtattcgtccacgcctcttcaatcaatgattagttgactaagaaagtggagttgggatttgatatagtttgctcaccattgaattagtgtcatcgaacgattcacatgctaacccccgttatcttttgttgttggatagtgcgtctgctttccgccataattaggttcgttttttaaataaaccaacccccacgaacaccagacttcagataaa

SEQ ID NO: 1702 - DNA, 553 bp, Gossypium hirsutum
  misc_feature (416)..(417): n is a, c, g, or t
  misc_feature (445)..(448): n is a, c, g, or t
  misc_feature (450)..(452): n is a, c, g, or t
  misc_feature (467)..(469): n is a, c, g, or t
  misc_feature (500)..(507): n is a, c, g, or t
  misc_feature (526)..(528): n is a, c, g, or t
  misc_feature (530)..(532): n is a, c, g, or t
agagaattgatcccactttgggagctcccaatgaatttctggaatcaaatgaagaatcgttataaacatgtcaatacttacaattaaaattaaaacagcttacatcaccgaagtatggaacaaagtggatttatcccccccttaaataaactccaaatggtactctaaaagggtaaaagaaaagatgaagaggattctgagaaagatgagtgtattgcatagacaatgtatatactaagtccaacttccttggtcgtaagaacatactaatcattcattattcttcttaaaacaaaggaaaacattaataattaattcttgggatatactctagaatgaataccccaaattatcctccaaagaatggctaaataatagaagcaagcactagtaggcttttaaagaatcacataatnnactaaggaatatcacaaagacaagcagnnnngnnnttcactgaaaaaacnnnaataaaaacagaatccaaaatagtaacttcnnnnnnnnaaatcactaaaagcattcnnngnnnagtggaaaactggaaaaaaaa

SEQ ID NO: 1703 - DNA, 600 bp, Gossypium hirsutum
aatagatgccctatatataataagcaatttctgccaaaggaattcattcacttgctagagatatagtgctaggagagttaacgctctcttcgacaaagaactgttcaagaactgatacaggacttggcagtctgtcttcgactgtatgatcgtcggctcgataacagtgctgttaaattggtggatgaaaagagtaagatttggggtaagtcacagtttatgaaaggggaaattgaaattgatttccaccatgaaaacccaaagatttatgaaaagggaaattgaagtctaataggatttaaagaggagggagcatgtttttcatctgttttatctccaagcatctctattttttctcttcttcttcttcttcttctttttctcttattattttactatataaaccctaaattgttgctgatatggctgtttaaattgatgctaaccggttagctggacgccgttatctgccacgtcattttaccgttatgtctgtaacggaaaacggcaaaaatgattgttttgtcactttttaaaagttgagtgattgaaataaaacttaggtgactgttttgtcaactactccaaagttgagtgact

SEQ ID NO: 1704 - DNA, 589 bp, Gossypium hirsutum
  misc_feature (578)..(579): n is a, c, g, or t
tctatatccttgcttctgaaagttgttcttctacatagccctcaaaatacttgatttggtcatctaaagtagaaataagcttttaaaatctatcatatccaccatagttactgtttaaacaataagaaactaggaaagatctcagatattgcaaactccacaatgttccccaattcatttctaaaattatttagaatacatggccatcgtcaaggttgaggtaataacaatttaagccctgtctacttatcaacaaagtacatgattatacataaagatatgcctgtacatttactaaaatacagattaaaatgaaggagaatcatgataaattgaattatatatatgagtgagagacatatgcaacaaaataggatgaacaaccaattatgttaaataaaaaaatttctaagaaaaaaatagctctgcataacaaggcaattgtaaacataccttttaaaagtacaaataacagaggttgtggttgagaggtttagctggagcatcccttcccagacacgttcacccttcgaagtggttgtagaaactatagtttctgtttttgcaggaatgtcatnncagcttaaca

SEQ ID NO: 1705 - DNA, 621 bp, Gossypium hirsutum
gagagtgagaaacctgaagtccgagatgctgcgcgggaagctgctctgcggtacgtttaaagtattgttgaaattacattgtgatggaaattgattagccaaagtttgtttgttgaatcacatgatatgctgtgcagtgaaattaaagagaggattaagaaaactaaggatgaaaagaaggctaaaaaggctgagataatatccaagcaacaaaagactcaaagtaagggtaatgtgcccaagaccgctgcaacaaaagcccccaggcttggcggtggcggtgggaagcgctgattgtttggtactataagaagttttgagcaattttgtattgtttgaaatgaaaatggttgccctgtattatttattttttgagtcttgttacaccatggtcaatgattttggtttgaaatggagaaatgaaaaggattgtggatcttcttgagcttaaattcattttgtgtgtgtgttgaaatatttgtttacttggcatggacgttagatctttatgaatctttcttattgacaggttaaaccatactgtggtcatgattcttgtaagttgtacaactttttaagtgtagctgttgattgccactgattctggcaaggtgggagtca

SEQ ID NO: 1706 - DNA, 618 bp, Gossypium hirsutum
ctcattagaaaacggagtttttaacttaacactttaatatatatgtatagggattgaagtgatataaaacatttctttttttattttggcttgcatttcagaactttaaagtttctatctttgttgggtcattgtaaacaacaaccctaggaataaactttatcgatgttggttagaaaaatcaagacattttctagttttggttttattacaattattaatttctttatatcccagtatcttttaatcattagccatttgaaattattgattttttttccgattaagtctaaactcaattgcatcaatattgttttcagagtaagagggtgtgggttcaaatgcgctgaaatgctttatcctcttatttaaaagttgaggtgaaactataggtagttttaggcagaatactaaagagcttcgggatttatcccttccaaaatttttaaaaaatctcagaactcatttttttttattctaaataaaagtaaactagcttcccaaaataattttatctttactttgtttatgattcaattttatgtattatacattaaaagtagctacaagaccactatgaagaagatggtcttatcgtttccaaatggcatagattgg

SEQ ID NO: 1707 - DNA, 663 bp, Gossypium hirsutum
  misc_feature (520)..(520): n is a, c, g, or t
  misc_feature (528)..(529): n is a, c, g, or t
  misc_feature (531)..(532): n is a, c, g, or t
  misc_feature (536)..(541): n is a, c, g, or t
  misc_feature (549)..(551): n is a, c, g, or t
  misc_feature (554)..(554): n is a, c, g, or t
  misc_feature (581)..(596): n is a, c, g, or t
  misc_feature (598)..(599): n is a, c, g, or t
  misc_feature (606)..(609): n is a, c, g, or t
  misc_feature (615)..(623): n is a, c, g, or t
  misc_feature (625)..(629): n is a, c, g, or t
  misc_feature (633)..(634): n is a, c, g, or t
  misc_feature (640)..(646): n is a, c, g, or t
  misc_feature (652)..(656): n is a, c, g, or t
  misc_feature (659)..(659): n is a, c, g, or t
agcagtttttactcttcttgataatcttggtcagtgggtggatgatgttaaacaagagcttgctctctctcagtctttatcatcagcttcaaggcatcaggcatccaagtcaaaggatcaaagtttggctttatctgcaagtcaagatcaacttcttgtacagtgtaaatatgtttctgagcttttaagtgcaattccaaaggttacccttgctagggcttccttcaggtgtcaggcttatgcaaggtctttaatgtattttgaatcttttgtgagaggaagatcaggttcctttaatcctgcttccgagagaagtggcatttttgaggatgaagatatttcatatctaatggaaatatacagttgtctggatgagcctgatggattgtcaggactagcatgcttacgtaagtcgcacagtttacaagatcaactcttaataaacaaaaaggctggaaactgggcagaagttttgacggtttgtgagcaggccttgccgatggaaccgacaaaaaaaacntctgcccnntnnccgnnnnnntgtttatnnngancttgatcttgaaaactgtgcaacttannnnnnnnnnnnnnnncnnacatccnnnngctcannnnnnnnnannnnntttnnattacnnnnnnnatatcnnnnnccncaaa

SEQ ID NO: 1708 - DNA, 657 bp, Gossypium hirsutum
cgatgaagctgctcaacctgctcagaagtttaacttgtcagcaacacggtagctcaaaaaataaatattcaaagcatcgtctgcgaggctaaatagaaatgatgtgaatgataagttttttacctcagtcctccccggcataattggtcttccagcaaacatctcagctaacaggcaacctgcactccagagatcaaccccaacaccataatctgttgatcctaacagcagctctggagctctgtaccatagtgttacaacccggctggtgaggggtcgttttggtttagggttgaaaatattggcaagcccaaaatctgctattttcagccccccattgctatctatcaacaagtttgaacctttaatgtctcggtgcaatattcctctttcatgacagtgctccagtcccgatagcagctgttgcatataacacttgatctgcatcataaacacaaatatgtagaccttgtaatttcctaaaaacatttgatgatatcatacattacctatgcttgtacatcagttttcacatatattactccagtcccatttcttctttgatcataaacacaaaaggttgaaattacctggggttcagtgagccggtcgcctgggcgggagataattttgctccaagtcaaactgcatgaaatc

SEQ ID NO: 1709 - DNA, 631 bp, Gossypium hirsutum
ttgttgcccactccgcacaacctaatggtgcggtggcacagatgagccaggtgcaagttgtccagggtgcaaaacagctggggcagcaaatgagccaattagctcaacagcaaggacaaatagttgggcagcaacagggttcaatggtagcgcaggttacggatcagcagggtgcacaacaaccaggtccacaaatgggacagcaggggcagtttatcccgcagcaacataggccacaggcaatgcagcacccaaatcagcaaatgatgtctcaaattgggcagcagacaatgcagcatcaaaactcacaaatggcacaaccacaaggacaacaatatgcacatcagcatttgcagtatatggcatatcaacaaagtgtgcttccacagggccaacaaagttctcagcagctcgctcctcatggtgcacaacaccagggtcagcagtatccaaatcgagaagattataaagcagcagttccgaaaaaggaggatgttgattttcagctagggaaccaaactgggttttctcctgctcaatttcaacagatgggcacatcttctcagaaccactctgctggaactaattcagttcagactccaccggcaggtttatattcaggtcaacaaca

SEQ ID NO: 1710 - DNA, 631 bp, Gossypium hirsutum
gagaatcttcagaagtttattcaattcattgtggaaatttttaagaggtattctgttactttgaagcctaacgcagacaggcaatattgggattatttaattttggtttgcatttattgtgttgtattcatggtacaattctttattgttccaggtatgatgaagcaccggtagaatataagccttaccgacagaaggacggtgctctccttgctgttggagcactttgtgataagctgaaacaaactgagccctataaatctgagttggaacatatgttaatgcaacatgttttcccagagttccgcagtcctgttggtcatcttagagccaaggttttatttttcttttcattctttttttctggagacatcttaatgctcctacttcattgctctttttctaggtatctagcatacgtagtcatttcgatgtgagaaatttctcatttttatgcttttgtgattgtggtattaggctgcttgggtagcagggcagtatgcccgtataaacttctccgaccagaataatttccgcctagcattgcatagcgttgtttctggattgtgtgatccagaacttcctgttcgcgttgattcagtttttgcattgaggtcgtttgttgaagctt

SEQ ID NO: 1711 - DNA, 642 bp, Gossypium hirsutum
aatatgctttggttgattgttggggttataatatgaccaagaactatatgtttgatgggcagatcgaatcactctcagcaggctcggagtttaactgcggattgttttctcagaacatgactgttttgtgttggggcgatgagactagtagccgtgtcattagcttaattcctagagaaatgaggtttcaaaaggttgcagctggtggttatcatgtttgtgggatttcggaagggctgaattctagagtcttttgctggggaaggagcttgaacctcgaagaagaactatccgtgccggttgcatattctcgtcaaggaaatgttgatttgccaccaaaatatccgatgcttacagttgttggaggaaagttccatgcttgtggaatcaagagctatgaccaccaagtggtttgctggggtttcattctcaagccaagtaccccagctcccaaaggtgttaaagtctatgcgattgcagctggaaattacttcacttgtggtgttatagccgaaaaatcctttctcccagtttgttggggcgttgggttcccgacctcactccctaccgctgtctcacccggactttgcaaagacactccttgtgcaccgggttcctatgaagttagtccagaagatgcac

SEQ ID NO: 1712 - DNA, 649 bp, Gossypium hirsutum
tttttatgagatctcaaaaagtgaataccgtataacatttcaagctccccaccattctttgatgtaaaatcaaaccatcaatatattaactactcgacgattaatgacttagtagaatcccaaacctacagtcttttaccagacacttgaaataatgttagaatacagcacggaaaccctatcattttcgacttaaaaaggctacaaaagcatagaacagcagtcccgtaaggacctacgggttgctatctcgaactaacatccaatcacttgaatcaactactctaaaagttatctaaaacattatagaaatttgctgcataacagatccatccttacaacgataaatatcatttacatatgttaacaacgaataatatcaattatttgcatcaaccacataaagattgaactgaaaatggctaaagaacctgaaaaagaatgtcgataacacgtttcatctgagctccaacaggagatttcctgatgctattaatatgttgaagcctctcagtatcatttgagaatttgacaggagcagaaggccttgcaccagaaaaaggcggtgcaggtgctggttttggagccacggctgccctagatgatgatgatttcgcggcgatgttggagagcatcgactgacacttct

SEQ ID NO: 1713 - DNA, 632 bp, Gossypium hirsutum
caaactttcatcaattttacaggcagcgaaaggatgcttagccaaacgggttacccccaacagaagagaatggctgtggggcagctggtgctgccaatctaccagccacctgttgatcggtattcacaaaaccaaaacagacttcactgccgataccgccaacttgatggctgcaaagcatagaatatttcatagattaggaacataaacctataattaacttttaacaggtggtgctcggcaacttgaggcacagccagtaacccagattgaagccacaacataaaacagaacaatagtttaaacataaaatggacattgcgtgggctagcacagtaatgtcaggaaacattgggcagcgtacatgcagaaacaccgaacacgtgcaatgaagagataaggaatgaattacctggaaggtggcaagctattaggtaactgtgcccctgggtaaggccctataagtttttgaaaaattcagcttgtcaaaaagatcaaaataaaaataagtaaaaagaagaaaggggggcaggggtaaaaagctgtacgttgtgccactgatgatgcataaggtaaagactgaggtgacatccatgctgatgatggagtaccaaggctagaagtacgcactg

SEQ ID NO: 1714 - DNA, 600 bp, Gossypium hirsutum
aatacttcatgagcacagcatttatcaaatttgatattaagattgttgttacacattaagttttcatctctaaatgaaagctgatagttaaagtgtctgtccagtctggtacctaagtaggaaacattcagtcaattattgatatcacaaaagttacaagatgagtggatggacactataccccccctcccccaccaaattaatgtgatttcagttaacttcttgctacaactattgaatcagatctttttacctcaagtttagaacatgtctcttcctgagtcataaaattctatttctttctttttgctgaagggctgggatttaagactttagatggccaaaagtctagaacgtagttctgctgtctttttgcagtaaaaaaaatctgtgcttgatattgtttgcttcaaattgtaaggctgttggatgaacatattacttcatttgggattttgattaaattgttcccttggtttcatgagcttcagacttgttgaaaattttagcattgttctcatatccttctgttataaaataattgcagaagcgggcaatggaatcagaacaagaaactgaaaaggctcacagacagataaa

SEQ ID NO: 1715 - DNA, 664 bp, Gossypium hirsutum
  misc_feature (650)..(652): n is a, c, g, or t
ttgcactttttactagatatttagatatagtccaagcatgtctgcaaggagacaagggtctgtatcggaatactcatactgctggaaatggagaaagccttgtgactgggtgacaaaccaatggatgagctctaagaagagtcattccagctttttcctccatattaacagtgccatttgctccatctctaaccttccaatcaaagcattgtatcattatgccaaggactgttgggacaacctgtagtgccagcgaagctccagggcagcttcttcttccactcccaaatggcaacaggctgaagtgttgtcccctcacatccaaaaactggttcttgccttgcctccactcttcactaagaaatcgctctggtatgaactcaagggggttctcccattgattggggtccctaccaagagcccacacattgacaaagagcctggtaccttctggaatctcataaccactaatgacacaatcttctgttgactctctcacaactaatggtccaccaggatgaagcctcaatgtttcttttactatagcttgcagatatgggaggtttgatatgtcagattcttccagtattctgttccttccaaccacggaatcaatctccttttgtactttctccatcacatttgggagnnnagtggaagaaga

SEQ ID NO: 1716 - DNA, 492 bp, Gossypium hirsutum
  misc_feature (432)..(434): n is a, c, g, or t
  misc_feature (458)..(461): n is a, c, g, or t
  misc_feature (470)..(473): n is a, c, g, or t
  misc_feature (475)..(477): n is a, c, g, or t
ttgtggttccctccaatttccaggcaaacaatcatggatcattgcagatactatgtgaatactatcggttaccttgtccagaaaggggttcaaaacttaggtttcatcctttggagcaccttcatccactggaatatcagaggcctgatgaaaaagttttgcatattgctggctcaaccatcgagttgatatcttgcatcctcatatttgactctgatgtcatgtaaatgatgtgtattttcgttgtcaaaatgtaactaaatgtcataattttctattacactttctcaattgtctctatctctatcggcgaagtggcggcacacagtggttaaatggtggaaaagtattgttagctctatcaacgtgggctgttgcatgcatgtgtggatctctgcggcttgaacatgtaaatatatgtccttgtttatnnngagaagcataacatgcagttttannnnttcctcctnnnngnnnttgatgtcatgtaaa

SEQ ID NO: 1717 - DNA, 612 bp, Gossypium hirsutum
acccggatagagtaacggtccactataagagtggttccagctttcattttggtttccatcattgatctgcaaacaaatagttgatcttacaactttgtgttaggttctgatactactatcggaaccacgtgtttgcggatattttggtctagttttcaatgtagtttccaaccagacaagattattataggacaacgtatgtaataagtttcgacacttacctcttctcccaccgatttgcgctgaaaaggagatgaatcgtgtggtcatccaactgcgatttatttgtaagatatgcagatatcatctgtccgacactagtagttctgtctggaaatcgccatatttcaactgaatgacccaatccctccaaatacgaaaccaacctcccacattgtgaagttttcccactacgatccaacccttcgaaaacaaccaacgtgcctctagattcattgtttgcactcaaaggggtacaattatcactgatttccattctaatggatctaagtggaaacttgcaggaaagattcaatctcaaattcaatgatctcctcctcactaaaaaatcgtcgaaatttctgaaatccaacgatttcgaagttacaagtt

SEQ ID NO: 1718 - DNA, 611 bp, Gossypium hirsutum
tgaacatctgcaaagacaaaaaacaaaaaaataaaacaaaacaagaactgctgtgagcaactatttcctggaacatgctataattggaatcgcattcatagcaccttgcggaaagtaacaagagcaggctgctgcaaatgaagcagcagaaccaaattggaatgagcaaaactgcacctataactcgaatattatatcgatctgggtcaattttacagagcagctaaatagagaaaggagagtatatctcttgatatacgctacatgttattaaatcatatcaaatattaaatgatttcctcaataggaatgaactcaacaaaaatatttccactacgaatgcgtaaattcatgtagagaatagatgttttagaaggtgtaagacaccatatgaaatctaagtcgtattaggagatgcatgcagataagcaagcaatgacagaacgatatgcactgcaaattaaatattactctaggtcactgcatgaattccattatacacatgaacacatccatgaccacaatcaactttgttcataaacaagattctgataggaactctgaaacaagtaaatattgttctataatgataggaagaacaccatcatgca

SEQ ID NO: 1719 - DNA, 805 bp, Gossypium hirsutum
  misc_feature (265)..(268): n is a, c, g, or t
ccttcagcttagaattaaatatccgctcttattttcagggaggtctatgtttcatatggagggcttctaatgctgctcaggggagaagcttctcatgtctcccactttgaactcgaccagagaatatttcttctcatgaggaagctctgaaactttaattgcatctaatatgcgagcttctagattgttctatggtagtataaagcgcaacttttgtcagccgagactggtttaatctggaattttatgcaaacaaatgctcgannnnaactcttttgtgcttctatagtctccttacttgagcttagaattaaatatccgctcttattttcagggagctctatgtttcatatggagggcttctaatgctactcaggggagaagcttctcatgtctcccattttgaactcgaccagagaatatttcttctcatgaggaagctctgaaactttaactgcatctaatacgcattatccattgaattaattcagtgcataaaaaaataactagataagttttcaagtggtcagaaatgagctcaacggctaaaaaattggttttcaaattctttttcatagttttatttgtaattacttaggttaccctattatttcaaaaaagaatattacaccattaatcttttagcatattaaaaatatttaaattaagctaaatgcattttagatggtaatttgccttttggccagaaagaaaaggatagtacgttgccatattagtctcagaagctctcaagttcaattttctgatgagatattatattcaacattttcaaggtcgtattgca

SEQ ID NO: 1720 - DNA, 636 bp, Gossypium hirsutum
ctgggaattcaacaccgaattacatgtccctacacttcagagcagaacggggttgttgaacggagacattgtcatgtcgttgagatggggctcacattactggctcgagcgtccatgcctttagaacattgatcgtctgctttttctcatgccgttcaccttatcaacaggttaccaacacccgtgttgcaatgtcaaacaccgtatgagagattatgtcattgattaaacctgattattctcagttcaaggtatttgggagtgcctgctatccgtacctgagaccttttcaacagcataaagttcagtttaggtctaaaaaatatgttttccttggggctttctctaatcggaagggctacaaatgtctggctgttgatggtaagatttttgtgttaagacatgtcgtgtttgatgagacacagtttccctttcaagctgggttttctcagtcaacagtggtgtcccagggccgattttgtcatcaacaggcatctgtgcctataattggtttccttacttattttgcccctaatttttctttctcacctggagttcctcctgtttcaccttctcaatttgctcctgacttgtcttgctcacctggagttcatcctgtctctgcttctacacgat

SEQ ID NO: 1721 - DNA, 647 bp, Gossypium hirsutum
cgtgactattccgagacccacggtggggccgaggccaagaaactcccggcgaagaccctgttctcgccggaaaatatgcggccagctacgtcaggggcctccaaagtgccaccggaaaccgccttaaagttgccgcctgctgtaaacattacactgcttatgatcttgataattggaagggtgtggatcgattccatttcaatgctagggtaagaaacttagagcccaactatttttttactagcttttgtagatcaaataaattaggttaagataagcttcaaatcctttacttctttttactttatacattttaaagttaagatctaatctataacatttacattttttctgttaaatttatcggtatgatattttgaaataaagaaaaatggtcacttaataactgtgtaacaaagaatgatatggacttgaatttaacacaagaattttataagtgctaacaattagacttatattttttattttgaaaaataggggttaaatttttaaaaataaatagtagatgactaaattccaaatatacaaagtctataaggacttctaccatattttaaccaataatctaattaaataatttgtctaacctctaaaccatacaagggcgtctctcggctaagtcccta

SEQ ID NO: 1722 - DNA, 620 bp, Gossypium hirsutum
agaggaaggtgaagaagcctcgataacgacatccccggtggaacaaagaatcaataagccaattcgggatagtatgggacggttcaagcataaaagaaagcgaatgaggatgttgaatggaaatagctttgaagaaagcccgtccaaaaacgttaagaggagattaatggaaagtgtttcacctgttcaggcggtggctggtgaccagcctcgccctgcacaatgaagatcatttgttggaactgtcgtggggttgggaaccctgcgacagttcgtgatttgaagcaactccttgttgctattgatccggatataattttcctttgtgagactaaggttagtgctaatagatttgattttgttcgcaggagatgtagaatggaaggttgtttagctgtgaatgcggaaggcaagggtggggggctggttatgatgtggaaagaaagtaagaaggttgagattcaaacctattccggcaaccatattgatgctttggtacatatgaagaatgagagccctattcgtttcactggcttttatggaaatgctgatccgaatagaagacagaattcctggaatatgcttaaaagggttggtcaaactgttactggggaagtgga

SEQ ID NO: 1723 - DNA, 625 bp, Gossypium hirsutum
  misc_feature (47)..(49): n is a, c, g, or t
  misc_feature (543)..(543): n is a, c, g, or t
gaccttgcttggataactggagttgttcttctcattgcaactctctnnnggggtaagatccattttatatattaattaaattggatgccaagcactacgtggtacaacctctagcgtgcttttttagcgttaactgtaatattgaagttcggtgaaatttttagaatcccatggcataagactaaacagcccttaaccttttgaggaacattgaaatttcctctatcccagtttttcctgcaatagaaaatgttagacaaagttttgtctggatttacacatttactttttatgttttcccctcggagttgtctctatcaaatatccttttcatccttccaatatccggaaagcattgcatgtattactgaactttgtattctttagtctgatgcaccaaccgaagagtaggattttccttttcccttaagatatgtatagatttgatggatctgggtttcattggttccttggaatccggatttaaaaaagaacttaagacttggtgggttggaaaaatgaatggccaccagatgggaagantccaagaaaaagcaacaaaaccctttgggagaagaatcaaaaaaaaaaaaaattttttaaacccccgggggggggggttggg

SEQ ID NO: 1724 - DNA, 508 bp, Gossypium hirsutum
tgtaactcacaagatgtagaaaatacttcaaacaacaatactcgaataaagaagactataatttgaaacaagatgaagggcatcataactgaaacaagcacatgattaacttcatccacaaaaatatccagtaattaagtgtcaagcaacaatagcctaagcagctacatgaaaatagaaaccacaaatatttaaaagcatccaatgtaataattgacatttctcatgtaatgttcccataaaacttttactaaaatagatggattcatcaaaacaacctcatagccaacttaagccgaagctgctgcaaccttcttcctcggtgctgcttcactacctagtatcatgatccaacagaaatatttaacaaaatgaaggggggaaagcccttaaactagaacagaatatgtttatataatgaaattagcaatttcataccttctctgaaaccagtcttgaacctacgaggaacatggcgaagatacctcatcctaccagtcccatgtgg

SEQ ID NO: 1725 - DNA, 621 bp, Gossypium hirsutum
aattctatccattttagttgttaaaaattggtccctgtacgtcagtataaagtacacatgatataccatgttttaatgtctgattttccatcagccacactgatttttaatagtctaatggataaaatttttaacagaaatgaccaatttgttctttaatctaatgtataagggctaatttgcctattttttagtagagggggcaaatccaatccgattcttagtacaggagcctctatgctacttttaccaacaacaccatcaaaacttcgtctgatatgcctttggtctgaaaatataaggactaaaatgtaaatttgcatacagtaaaaggaccaaaatcaaataataccaagattcttatataggtgcaagtctaatctagcaaacatgctagtgcggtgggatttcagcctagggttggcaatggcaacatcagtaagtgtctcattaactgcaagagataacataaaatttcgatcacatcggttcagaaaaacaaaaagtttctacaacaacatacttgcctggaaatatgtagtgcttatggtgcttgggtgcttctaacaccaatgactgctgtgaaagaccccctaaattaacgtagtcttggcatgttcg

SEQ ID NO: 1726 - DNA, 1220 bp, Gossypium hirsutum
  misc_feature (662)..(671): n is a, c, g, or t
  misc_feature (673)..(677): n is a, c, g, or t
  misc_feature (679)..(683): n is a, c, g, or t
  misc_feature (687)..(697): n is a, c, g, or t
  misc_feature (700)..(704): n is a, c, g, or t
  misc_feature (709)..(711): n is a, c, g, or t
  misc_feature (713)..(715): n is a, c, g, or t
  misc_feature (721)..(722): n is a, c, g, or t
  misc_feature (724)..(724): n is a, c, g, or t
  misc_feature (727)..(751): n is a, c, g, or t
  misc_feature (753)..(763): n is a, c, g, or t
  misc_feature (766)..(780): n is a, c, g, or t
  misc_feature (782)..(792): n is a, c, g, or t
  misc_feature (794)..(798): n is a, c, g, or t
  misc_feature (803)..(816): n is a, c, g, or t
  misc_feature (821)..(823): n is a, c, g, or t
  misc_feature (828)..(840): n is a, c, g, or t
  misc_feature (844)..(847): n is a, c, g, or t
  misc_feature (850)..(853): n is a, c, g, or t
  misc_feature (856)..(867): n is a, c, g, or t
  misc_feature (869)..(883): n is a, c, g, or t
  misc_feature (885)..(888): n is a, c, g, or t
  misc_feature (892)..(900): n is a, c, g, or t
  misc_feature (902)..(916): n is a, c, g, or t
  misc_feature (920)..(923): n is a, c, g, or t
  misc_feature (925)..(925): n is a, c, g, or t
  misc_feature (927)..(936): n is a, c, g, or t
  misc_feature (949)..(976): n is a, c, g, or t
  misc_feature (978)..(981): n is a, c, g, or t
  misc_feature (983)..(996): n is a, c, g, or t
  misc_feature (1000)..(1002): n is a, c, g, or t
  misc_feature (1004)..(1006): n is a, c, g, or t
  misc_feature (1008)..(1010): n is a, c, g, or t
  misc_feature (1016)..(1038): n is a, c, g, or t
  misc_feature (1045)..(1047): n is a, c, g, or t
  misc_feature (1049)..(1052): n is a, c, g, or t
  misc_feature (1054)..(1054): n is a, c, g, or t
  misc_feature (1056)..(1064): n is a, c, g, or t
  misc_feature (1066)..(1066): n is a, c, g, or t
  misc_feature (1074)..(1074): n is a, c, g, or t
  misc_feature (1077)..(1086): n is a, c, g, or t
  misc_feature (1088)..(1095): n is a, c, g, or t
  misc_feature (1099)..(1100): n is a, c, g, or t
  misc_feature (1102)..(1104): n is a, c, g, or t
  misc_feature (1106)..(1125): n is a, c, g, or t
  misc_feature (1132)..(1135): n is a, c, g, or t
  misc_feature (1138)..(1145): n is a, c, g, or t
  misc_feature (1149)..(1169): n is a, c, g, or t
  misc_feature (1171)..(1172): n is a, c, g, or t
  misc_feature (1175)..(1177): n is a, c, g, or t
  misc_feature (1179)..(1202): n is a, c, g, or t
  misc_feature (1207)..(1217): n is a, c, g, or t
aaatgacaccattatattttaaattaatattaatttatgtaaaaatgtcaaatgaattaatgtgctaaaggttaaattatttaaagagttttacgtttcataatttacctttcttaagattaaaaaataaataaatattaactagattttacttttaataatgaaataaatatcataatatatatttatgattatatttattttgatattatgagtatgaatatttcactataatattttataattaatataaacaattttaattttccttatgaataaaaaattatagaatgcaataaattgttttaaaaatgatctaaaataagattatatgattatagttataattattttgttatacaaataaattgtgcaaaattaaaagtttactaccacaatagcacccgttacattttcaagcacgataagtgtaactcgaccaaaaatgcacgtgactgcattttaaattcctgccccttgttagtattgtaaattagttttgccagaaatgttgacatattgctacattcattcgatttgattaagtgttttccaatgtcttctaaaattttctacctactattagagcaacatctgggaggttatatcgattagcattactattgttaatgagctctttgtttatctgcactatccaggcnnnnnnnnnntnnnnntnnnnntctnnnnnnnnnnnttnnnnntaacnnnannnaaaatnntngtnnnnnnnnnnnnnnnnnnnnnnnnntnnnnnnnnnnnaannnnnnnnnnnnnnnannnnnnnnnnnannnnnctatnnnnnnnnnnnnnncatannnaaacnnnnnnnnnnnnnctannnntannnncannnnnnnnnnnngnnnnnnnnnnnnnnntnnnntgcnnnnnnnnnannnnnnnnnnnnnnnttannnntntnnnnnnnnnntattcatttttannnnnnnnnnnnnnnnnnnnnnnnnnnntnnnnannnnnnnnnnnnnnaatnnnannnannnaccaannnnnnnnnnnnnnnnnnnnnnncacattnnnannnnantnnnnnnnnntnaaaatcanacnnnnnnnnnnannnnnnnncttnncnnntnnnnnnnnnnnnnnnnnnnnaattttnnnntannnnnnnntctnnnnnnnnnnnnnnnnnnnnntnnatnnnannnnnnnnnnnnnnnnnnnnnnnnctaannnnnnnnnnnacg

SEQ ID NO: 1727 - DNA, 624 bp, Gossypium hirsutum
atttttatattttcagaaagttaccctttttttattttgttaccaatataactccattttcgctcacaaacaggagttgagcacttgctaagggatgtaaaagatacaaccattagtacactcgcaactgaggtctttttatctttctttatttattttttcaattccagttagtaatagagcttttacttttatggaaaatttttacaataggagtatatataccttggttttaataacaggtaactggaaaactcacagctttgaagggtttagatgcaaggttaaaagagatacgttcttaccttgaccttgttatcgatgagaagcttccactgaatcatgaaatactgtaccatttacaggtaaactaatttcagtggaagttgaaagtgaaaaagcatttgaagttattaactttaagtctttaatacttgattgcataaatttcccttgaatggtaagagtaccatggaggcctctgtattagaagtcagattgcattttggctcctttacttaaaaaataggaaaattagttctttctattaaaaatttcattcacttctaccattaaaaattggtttatgtacctcaaaatgaggtactatgtgtaactatgtgg

SEQ ID NO: 1728 - DNA, 498 bp, Gossypium hirsutum
  misc_feature (482)..(487): n is a, c, g, or t
ccctccacctattcctattgctatttttcatattgaggttgactgcttattttccaaactcaaatcaaactaataataaccataccattttattgttaatttaactaaaaagaaacttgttgataaaactaaaattggtatttttcaacctttttttttgaaaaaataaaaataaagatgatctcgagcttaacaattggcttatccaatatagagaacaagttgttgatgaaggaagaaattcattattgacggctattaatttgatgctgatacgttatcttggcgttgttacagcagctcccaaaagtcgcgcctctcatgaaaatcaaaattgaatgttcttcaactctatccatacgtgtgtgtgaatagggtccagcaagttgataatgtagcgaaaatctatagccaaaatcttttacgactgatacattgcacatctttaataattccgtacatgaacttaatccaaatatgcnnnnnnagcttaatcca

SEQ ID NO: 1729 - DNA, 350 bp, Gossypium hirsutum
tctgacttgatttacttcccactgattcatctaaactatcatcacgtggaaggagttttatcctgtcagcatgctcaatcatccaatctatgaattccggagaagctgccagttccaccatggctttccgggtagatttctgactgaaatctttccattcttgctccatgaatttcttctggaggtttgtcttgtgaaaggttgaatagtaatcttgatgatctatagcaccttcaccaagcttagcataataacctttcacaagagagttagtccatgctggggcagtcatcggactattccacatcttctgtttagaatccactcttggtgaccgacttacaaattca

SEQ ID NO: 1730 - DNA, 573 bp, Gossypium hirsutum
atctgcccaaaatgattgtagggacatcagtcacaagcggaattctccttaaaatagcatcattcagcacagtatttcgccccccaacctacagaatttacaattctcaaatgatttaaaaataacaagacagaaaaacactatatcaaatcaccaccagtgaggcaaaacatataccttagcattgatcttgagagcaacattttcaaaatattggttgctaaactttgaagcttgcacaggcttacaacattgtgaaacaatacctagctccgtctcacaaattcgctttatttttcctgcaagcaaaaagatttgagtcgcgcaaagaaaccccaggcattacccatttacaaaacatcagaatttcttaccgtaagagccagtctgatcaggtaagataattatcaacaactgaagtggcttattcaagccagcagactctttgtatacatccatgagagtctgatcaattcgatcagaacgagctgatcgcattgcaattgaaggagtttggcgaaacacctagagtaacaaaatgggaaatcaagctagtgataaataaataacaga

SEQ ID NO: 1731 - DNA, 605 bp, Gossypium hirsutum
  misc_feature (264)..(265): n is a, c, g, or t
  misc_feature (268)..(268): n is a, c, g, or t
  misc_feature (270)..(271): n is a, c, g, or t
  misc_feature (274)..(274): n is a, c, g, or t
  misc_feature (279)..(279): n is a, c, g, or t
  misc_feature (282)..(282): n is a, c, g, or t
  misc_feature (284)..(284): n is a, c, g, or t
  misc_feature (287)..(287): n is a, c, g, or t
  misc_feature (305)..(305): n is a, c, g, or t
  misc_feature (308)..(308): n is a, c, g, or t
  misc_feature (311)..(311): n is a, c, g, or t
  misc_feature (314)..(314): n is a, c, g, or t
  misc_feature (319)..(320): n is a, c, g, or t
  misc_feature (323)..(323): n is a, c, g, or t
  misc_feature (326)..(326): n is a, c, g, or t
  misc_feature (329)..(329): n is a, c, g, or t
  misc_feature (357)..(358): n is a, c, g, or t
  misc_feature (360)..(360): n is a, c, g, or t
  misc_feature (363)..(363): n is a, c, g, or t
  misc_feature (365)..(365): n is a, c, g, or t
  misc_feature (367)..(367): n is a, c, g, or t
  misc_feature (370)..(371): n is a, c, g, or t
  misc_feature (384)..(384): n is a, c, g, or t
  misc_feature (386)..(386): n is a, c, g, or t
  misc_feature (388)..(389): n is a, c, g, or t
ctttaccaactggggtattttgagaatatatcatcttgatggtagagaaactaggaaaatctctcaaaaatggtgattggccaaatacttgctgaatactttattatcattgcacagacatttacactgactttctgtcttaatgttctacatggtgccttttttcttcatattcttgcaggtagatttaaaaatctgcaacctcttaggaacaatatggaataggggaagtttgatggtggatctaataggccttaagagaannaancnngcntgttnttntnttnccagatattggaagcccnganggnccnttaannganggnttntcaagcagccttaactttttgtttgcgnntnccntntngcnnataattttctttntntnntgcccttcaaggggccaggttccatcttgtgtttgagtagtagtctgtatgtaatgcacatatgaataaacgatgctaacattttttctgttaataaactgctataaatcaaaattgaataggaaaagatttaatcagacgttaattttggctctatacatctctccaacgaccttcatcggctgtggattatctggtcctctatctcgtgccctg

SEQ ID NO: 1732 - DNA, 609 bp, Gossypium hirsutum
aatcaaagctaatccacacatatgttaaagaaaagcatcagggtgagattacctttggagacaagtcaagggtaggtagagggggtatgactgcaaaagtaaaagctgctgtcaatgcagcttatgctggcattcctgttgttatcaccaggtatggttcatgctttattccaggtttggttctgtgcaatgttttattgtgttctgacacatgttatatataataaataggattaatgagatgattgaatgctgtttttgttaggattataatcatttaaaatgaaattaacatactggctactatcctgccagtaattacatagagagttaggaaaattgcagctatttaaccctcttgcctcatcccatctaaaaatcttcatgcattgttatctgtattcttactcaaggaaaaagactgaaaacttattttgtttggaacttgtagcttttcccatataggattattcttcctgcatttatatgctatgttgccattctattgtcagtcacttgccttctgcctaaccgtgagtattttttcttttgtttcttatgaagtggaagtgctcctgagaacataataagagtcccttcaggtcaacg

SEQ ID NO: 1733 - DNA, 664 bp, Gossypium hirsutum
aaaatgtaagtttttttcaaaaatattttttaaatattcaaataaataaagataatgaatacatatagtatttttcaaaaaatagcttttttatatatagtattttaagttatttttattccattataaaaatagaatttaattataaattaaataaaatataaaatataaaattttaattttaattcatagataaataaataaataaatctatacatcatcgattcgtatggatttttagtttctcaatattttgcttgctcagcccgaattgaatcaactacagtaaattaaatgggtgaaatcgtaaattaagttgatttaaataatttttctctgatatatatatatatatagttgagaaaatacgagctcaataaaattgaagtccgagaaaccgatctaacccaagtcggatataaatctcatcaatcataatagtccttaataattagtatagttatatgatattatttaaaatataaataaatggtaaagatttattttataaatatgtatttgtaagtactttaattattttatttaaaaaaattctattaaatatgtataacttatgcttttataaggcaaattaaaattgaatatttataacataaaaaattcaaaatcatttgaatttgttaaagatcgtcctggttcgatc

SEQ ID NO: 1734 - DNA, 587 bp, Gossypium hirsutum
gtgtcgtgattaaataaaaagtaaataatgatttcatatataagctataactattgcatatggagggcttatatttgcaactattgtgactatgagtctatttttctagttaatgtttttttttccctaaaaaatagaatgtttttattaattattatgaaaaaaattaaaatatattttcaataatataaaaaatcaaatatgtcaaatgttttcttaagtacaaaactattttatcaactaaatcatatatatatgtatgtatcattttcttttgtaacaagtgaataacttcattgcttgacacatcatcatcttttatattaaactaatgtggaacccattgttgataaaaaaataaaatatttgaatcataaaaaatattttatctatgatgtattatgttaccatattttataataaaaaataaaatacataaaaaaaaagaaaattagtaaatatatatattaggcaaacttgatgtttctccttttcgttgactttagccactgtgaaaatgacaaaggtttcaatatgtacactttataatggacggcatgtgattatggaaataagtcgcctcgctc

SEQ ID NO: 1735 - DNA, 500 bp, Gossypium hirsutum
tcttggactcaactatttgcaggacagcaaaaatggttgcccaatcatgtcggcaacagccttattacagaaagcagcccaaatgggtgcaactgcaagtaatagtataaactcacccatgatgcaaaaaagctttgctagtagcatggcaggtcctgagcagaccattagaccaccatcattcggtggaattcagcagcagaacacatcttacgatcacttcccgtcccaaaccgatcagacaagcatgatcagcgaggccggaggattctccaacccgttcatgcagaaaagccccagtgaaatggcccaacttttcacagctgccaccggaagctcagcaatgaatgaaatgggaatgttcactaacatattcattaacggagatgaccgaaaccaagtaggcttgatgcagagcatagaacaggaagatagtggtagctctagcttgttacaaggaagaactcagttaccagcagcaatgtttggaacaagcaatg

SEQ ID NO: 1736 - DNA, 415 bp, Gossypium hirsutum
  misc_feature (223)..(223): n is a, c, g, or t
cttttttctgctgcgaagaagcgatcaccatgtattatatttattgacgagatagatgccataggtggaagacgtaatccaaaggaccaacaatatatgaggatgacattgaatcaattgcttgttgaattggatgggtttaaacagaatgaaggagttattgtgatagcagcaactaattttccagaatcattggataaggcattggtaagacccggacganttgaccgtcacattattgttccttatccagatgttgaagggcgaaggcagattatggaatcccacatgtcaaaggtattatgttgactgtagaagttaatttcttctaggagttttgagtttaagttgacagctattactggcagattcatcatatttgtgacagtacatcaagtggactgtgattggcagg

SEQ ID NO: 1737 - DNA, 610 bp, Gossypium hirsutum
ttagtcccagaaactccatcttgccaagagtttttcctatgttgtataccattcctacattacaataaacaaattacaaatattcagactgatattacccttttcgatattgatctcttttattcaatccttcataccatgtaaacagaagtgcctcgtcaagatcgttcttcacattgacaactacgttccagtttgtagtgacgttgaggatcggtccaggaaactgtccattgatcccaatcacctggaataatggcattatatatataggtcataactcatgacatgattcaaggtcctgaataggcaagactagaagactaacatgccggttctgacaataactatcgagaactgagatttctttcaccgtatagagccggttatatcaaagattagaagcagaaaagtgttgacaagttcaaatgtatgattatggcaaaatgccatgcaattgaaaaccaaagtattagaaacaaaaaggtgaaatacacaatatcaacctccatatttacttggtcaagtatcatagaggcccttgtattaagagttggattgcattttgccccctcaactagaaaaatgggcaattcaatccatgtacatt

SEQ ID NO: 1738 - DNA, 658 bp, Gossypium hirsutum
cattattagttacctgttttcctttttttcttctgagccattttttttgtattttaaaatatttttagctcgaactcctcgaattgatggaaaggaattctttcgtcaagccaggtaaattttattcttttctcaagcaagagtgtgtagatacattttatgatcccttgagagtttctggatcttctcaagctgatttgaagtatttgtagtgtaggagtcaactttcctacgaacagttcagtgcacttttggctaacatcaaggaactgaatgctcagaagcaaactcgagaggtaatgagttgttgagttatcagagactttatgccagttcagtgtcaaacgttttgtgcttagtaacactggttcttttactccaggaaactttgaggaaggctggagagatatttgggacagataaaaaagatctgtttctatcatttcaaggactggtaaatcgcagcattgctagatcttaattatctcctggtgagatactttaccattaccagtacgtctacttctagacaccatctgcgtggtttgtgaattgctatattattcatagcattggccagatgctatctgcctgtccattataaggttcatgtaatcctttttttgagctgctcccttgtagtctggccatagactcg

SEQ ID NO: 1739 - DNA, 661 bp, Gossypium hirsutum
ggggggatggggcgtttgaattttaagcccctgagactatccctactactaacaacgcccactttattagatctgatcatgggttggattacttgtccaaacctgaaaattcaattaaaaagtgagggtttagacaaaaatataggtttaaaaaatagatttggataaaaaataagacttattttctaaatgggttggacctcatgtaactatttttttgccccggctcaaatctgtctagaaaatttttttgctactattttgctactgttttgttgtcatcttactattatgttactattatttttaatgttattgtgttgacacatttgacattacacatatgattatatgttttgacacatcagattttgaaaatagtaaaatttgatttaatggagttaactatcaccatttggtgagaattaaaattttaaattttgaaaaataaaaagactaaaaataccaaattaaagtattgagactaaatctacaacttcataaaatgcaaagactaataacaaaatttaaccaaacaaaaatcacgcatcaattattaatataaaaaacaagaagatttctcaacgttttcatataaaccaggcgattacatgaataaataagacagtacatggcatggtatggccatgggaactctatt

SEQ ID NO: 1740 - DNA, 582 bp, Gossypium hirsutum
tcatcgaagagttggaagatactgaattctgtcctgaaaaaatagaagagggactattagaaaccatatgcacaggtgagcaacttacttgtggacacacgtgtgaagtattagatcgtggcataagaggttcttgaatagttgaatctgaagagctgtctaacccagagcgaggtaccataataggaacagcagactgctgatgttgaaatttagtaaggtcacgagcaaactgggaagcacttgcgaacgtataactaaccttaaaaggaaagcaacctcatcgaatatgacatgtctggacacaaaactttattattctcaggaagacacttgtaccctttgtgagccatactgtagccaagaaaaacacaaggctgagatcggaactgtaacttgtgagcctgaaatggtttaagatacggatagcatcgacaaccaaaaatttttagatgctggtaattaggaacagtcttatggagaacctcatggggcgatttaccattgaacactagtgttaaaagtttattaatgagatacactgcactagtaaaagcatgagtctagaagccatataggcat

SEQ ID NO: 1741 - DNA, 574 bp, Gossypium hirsutum
aatcgaaaagagaacaataatgatgcatatgcagatcaattcactgtttggattaactggttttaactaagcttaccagaagcttctgtgctttgcagatgttttttaagctcttcgattgtctcattaactgacttatctgcactgaagcatgaacttatctgaggcaaaagcaacttcaagtgagcttcagactcggggttactgctgtactttgccaacaatgttgtaagatccttgtctggatcctcagaactgcataagcatatcgtttgtcataagatcctaaaagaatttcactaccatttgaaaagaaaactattaaactagaaagaagatcagagatatacaaggtactcgacagaagggcttccttcagtgaacctagattcccagatggcacatagtgtgttccaagccctgcatatagtgcatctgaaggtgttgatatccttttcccggtcattccaagataagcacctgcagaactccaaaattgtaaatggcaacgatagaggggtacaatatagtgagctggaaagagggtaaaagtatcatggaggctcttgtacta

SEQ ID NO: 1742 - DNA, 641 bp, Gossypium hirsutum
taagatttcaatgcagtgttatattttacgaaagaaaaaaaaattgagtccttattgatgtttcttttgaatcttgtgaatctaggtcatggatatgctaggtccgagtttatgggatgtttggaactcaaacaaccagatgtaagaaactatatattcttcttttaacattattctcatgtgctttgaagtttcgtatatgatcttctattttatcgtgttgtgtttgctcttggtataggctgacagaagagatggttgcttgtatagccgtggaggcaatatcgattctcgagcagcttcatttgaaagggtactttcaaaattgttgcattccattcttttttacctcacttcttttactgcttgtggatattggtccgatttccaatccccacttccgttttggacctggaaaaggtaagccccaaaaatttttggttggcccacccgggacctccaaagaaaaaaacctggatctgggtgaacttgggccggggatgggtggtttcctatccttatatctaaaggtgcattagcattttaattttttatttttgaagaacctaataattcttgaactttttctttttcaacatggaaagaggaagattctgctcctcctgttgattatgacaatg

SEQ ID NO: 1743 - DNA, 642 bp, Gossypium hirsutum
gttgatcttaagccgaagatatggttgcctgttcgcctcgttgagaacaggctttctatcgagataaaggcaaaccttttgtctattcgcgaagaagcggagacagtgataagtgctatgaactctgcataaaactatgtacttggacatataataaactcaaaaagtatataatctactgaagatcaagtttttctattttggataattttattgaagatttaagtctcacattgcaataatgatacacctcaaaattctagctcaagcttgaagtttatgcatttaaatatgttttattttttgggaactggataaatgtaatttaaggactaaagattctaaatttcaatgttcctacaaagtgaatacagttgccaatgttgggcttaaatactcaacaaacttggttgctgggcttcattgcaaaccgcaaacctaagtgcttaatactttctatattacatcttgggagaaaactgtatggcaaaaatgaaatgcaaaacaaatgcatgaaaggtgtaaataaaacaaagatctaaaactgcacgttgcttttgaaggactgaccaaattgccaaccggaaggtaccacattaaaagcgactttaagcagggggtcgtctgaaattcttcacccag

SEQ ID NO: 1744 - DNA, 620 bp, Gossypium hirsutum
tgaatatagagaaaatcacaacacttgccatccaagtctggatatgcattggacatcaatgttggacatgggtactttaagaaaaatgaacaagagcaatataggttctaagtttttatggcaacagatctttaagttacaggacaataatccaactacgtatctgacaattagagtgaagaacaacatgaagtaaaaaatgaagtgatggtgaacacgagaaacagaaaattagtaaaggtcccttacctgaaactgagccctcaacagggcaagaatgggcattcttaggtaccaagactgttgaaccttgactagaaagatgatccacaggtagaaattccactgctgctccctcggatggttgtaccacagacataaatggataacccagaattccacaagcaacacaaaccaatgtccccgaatcaacttgaaaatcgcaagtcaaatcatcatcattcgaatataaatagttcagattttccatgtagaagcacatctcatctaaaagattcttttgatcagatttatcttcaccattaatatcagaaacattttcttgcattattgtagaatctgtagcagttctgctgggcaattcagaatctctgcttgta

SEQ ID NO: 1745 - DNA, 611 bp, Gossypium hirsutum
  misc_feature (23)..(24): n is a, c, g, or t
  misc_feature (448)..(448): n is a, c, g, or t
acttcttgtacttagccaggaannaatttatagccaaaaagcaaggcacaagagggataaagctggagatagtttgacaagaaattaatatctaaacattctttaagaacgtggtggtaaaaattattcatgtagctaagcaaaatcattataattacagcttaattgaacaaagttgctaatgaacaatatgatataaacattaatgcaatcatgcatgtttcgcaaatctgaccaagcagctcctgaatatttcaaccaaaagaaagcagaaagaaatcagcggaacataactagatggcaagtactcaaattgttaattaggcaagctatcttgagacaaatagcataacttatagcatgagaatattaaaataaagaggaaaagcatctccatgcatgcatgttagcaaatattttgcaagctttaataggcaactaatgatanatacatatataaaaaaaaaaggagatcgttaacttcttactctttttcagaattcatacgcataggttgaaaattgctgggtgcagggactccattgaccacatgacagcttgatatgcccatagagtcaagatgaggttgccctgcagccggaatggaggtg

SEQ ID NO: 1746 - DNA, 642 bp, Gossypium hirsutum
gattgttatctatacgtgttccttcacctgaagtaaaattgaagattctgaaagaaattgctgaagagcatgagttggaatgggatccagctgctactgagtctgagtttttcaaaccacatgaagatttattggtaagtaaatttagacttcgtttctctgttcctgtatctttaagacacctttttttgttctcagaatggcccaacaaatcttgagactgggtctaagttaccccctcctgtggagaaacatgatgaagcattcacttctgccgctaatcgtgcccaaaccgagcagcctgattctgattcggactttgacccattagattttcctcaagttcctaatgtgtcattgaagccaagcactaatgctgcatcagcaccggtaactaacccactgtcatcagctgctccagaacctgaaattgatcattcatctagacattctggagcttcaagacatgtgttacaaatgtcccctttggagcctgatatgacgcaagaacattcattaaccaaagaaagtacaatgcccaacgatccagctggagccaaagaaaataaacaatttctgccattcatttcttctccacccgtatctgcttcaccaatttctgaaagaccaagtgatccaaca

SEQ ID NO: 1747 - DNA, 621 bp, Gossypium hirsutum
atatcgcaactgtttgaatcataggaacaaccctatttgcagtcatagtctggtaagctcgctcttgttaagggtgtgcgagttaattgtaaatgtaaaattaaaaaaaaatgaaattctagtataacctcatgtctggttggttgtaatagtcatttcattactgatcaattcggtgataataagtgatccctttgtttggttcaccaaatcattcattccatggaatcgtcattcatctcttattacagtttctccctaattagcattcctcaccatacccaaaaaacagctgagaaataaagagaaaaaccttaacctgtcattattgtcctttatcactctcagcctcactaatacctcaagtcaccacacccccaaagtaatcgacagagttgatcccggtaaagttattattccccttaatctcacttcggttgttaaaatttcatctctttgcttatttggttagaaatctaagcttgtttatatattaggtccatcccactaactctaaaaggagttctgtatgaaaggagaaaattttttgtttggcaggtgattgatcagagagagcgagtgaattggcgataatggcagaagtgaagaaatctgtggaaa

SEQ ID NO: 1748 - DNA, 540 bp, Gossypium hirsutum
ctctatgtatatagctcgttggatacctcgatacgagagatgtacttgcaatgaatgtgaagtcttttctggcatatttggcaatacattctggcatcaaaacttgaccccaacaatgcaccattggttaaacaagcgaagtacaacaaagcttccaatggcagcctttcctcacttaaggaaaatctgcaaatccggattcattgtcgatagcaaaggaaacaactcatatttgattcatccagagagaatggccgtgtcgacattatacatctccgggggacgaagtcttttggtgactccagagactacctttttagctaataagtatgtgaagttgcactaaccgggttttagacatgaaaggattgttgtggatggttttggacattcagatttattgattggtgaagagtcttgtaaagaagttttcccatacatcgtatctcacataaggttatgtgaagaagggaaagatatagtaatgattaacaaggaaaagaaagaccgtaaagaagccttggattgggctgctgatcc

SEQ ID NO: 1749 - DNA, 538 bp, Gossypium hirsutum
ggcagttcttatttactaaaagaggcaacagcttctcagtatttggacctgttcttttggagcagatacacttactagtgttgtcctttattgttgagctgattttcagtacaattgttttcttgtttttgtaggtacaattgagaggcatgattatgaagggcctatgttcgacatgaggatacatctgaggttttgtgcttgtcaatgtaagcccttgaactttgaagcaagggaggatgaatgtaattatataagtactgtttatatatagtaaaccttaggcaattgtagcaattaagagagaaaacactgatcaattcaaacagcggcaccagcagtaagcgtactttgattcacatttgtttttattaccagtgaattgagtgttccttccagtgcagagtcagtccaagcgcatctgctttatttgtttggatttgatatttacatgtgatccataaaattaaaatttaaaaatgctgaagagaaaagccatcaattttgtacaaaatgaaactcagtctgttgctttctt

SEQ ID NO: 1750 - DNA, 660 bp, Gossypium hirsutum
aaaaataccctataggttttcatgaacaggttttcatgcattgctagctgcacaacaaaattttccagtatcctaggtatagatccttttcatgaatttgttctccaaagatcctctgggaccagtcgccgtaaatgaataaatataattattgtcaatttgacttctagataccatcaaaaagcaaagctaaaaagctaaataagaaaatacagatctggataggtaaagtgagaaggaaaagacttaccatacattccatttctccaactgagaacaaaccatcgcttgttacctctaaaccacagaaacaatagatacttaatcatcaatgctatctaaaagttcaaactctgacatgagttttgcaagatgtcaaactaaaggtaaaaataattacagcacttaccattccgcttaacccccaagtggttcaatagggcttcttcaatttctcgtgaaccacgtatcatacaaggtgttgtgccacaaactaacagatgatatttcccaacctgagaacaattgaataaactctactataactttgttcattggcagtaccataaaaaagactttgaggtgcaaaacaaatataaattctgacctttgaccggttgaacattgaataaaatgtcgcaacctcatatacacgaatag

SEQ ID NO: 1751 - DNA, 639 bp, Gossypium hirsutum
agcaaagggtaacttaaaactccaacttgctgctaacaaggacaagggttttgaagacaaagttaagagcctgacaacaagggcaacctctatctcgtcaaatcccccttctcatatgcacacctagggagattcattattctctaattgtagatgtgtagtagattataacttacacgtcaccagagtcacaatttgaaatttgcaaaaattgtacaaacctgcaaaggaataatattaaccacaggttgaagacaatcttcaacctgaggaacttcaatcactcgacaagatgaagatccaccaggacatacagcagctacatctccttttgaacacaccactattaggcgacctttacgggcatgaagttgctgaataactgactgctgcttactgtaaaaagtttagtaatgctaatcatcaattaaaactgaaacaccaccatatcacttcttgaaagcattatataactgacctgaagcatgcatcacgggtagcaataacaataatggggagattctcatcaactagtgccaaagggccatgtttcatttcacctgcaagcattccctcactgtgcataagagaaacctcttttacttttaaggcgccctctaaagctgttgcaaagttaaa

SEQ ID NO: 1752 - DNA, 582 bp, Gossypium hirsutum
tgctgtctgctttttagcccatgatttaccagcaacaacactctgcttcagatgctcatcatatacacattcaacagagaagtttcgatcttgaacaacctcatacacaacagaaggtttttgtgttgtatcattgcccatggaagagtcctcaacaacaggggcatttctttgtggagaatcaattgtggaaaccacatccgacttaggaatctctccagcagccacacaagcaagcaaattcattccagcatcatccgcaactggcatgcatgcatttgctttagtgtacttaacaaaactatcaattagagtatttatggagttcaaagaagccctctgcatcttccttgatttaatttcatttccagaagatgaggaagcaacttttgtgacttcggttattttcctaagatcttctccggttctacggtattcttcatcaggaacagctgcgggtgaactctctccctcatcagacccagtcagcagatcttttacatcattgctctgccaggattcataatgtacatcagttataacattttcctggtaagtaccactcttctccttcatgttatg

SEQ ID NO: 1753 - DNA, 653 bp, Gossypium hirsutum
cctgggagggatggggtatttaatctggttagctacattcagttcttagtgctggaacttttcatgtactctaatggtggcaaatcatgttgcaggagtggcagtatatccaggggtttcagaggtgagttcaggcaatggcaaattatccctggaacttgcaacatttcacctgttatggctaatcaattttctgtaaagctctgcccttctacttatttacttgttcgtgttatatttttttatgagtttttaactgatttatttcaagagaatgatccaaaaccaaaaatatgtatataatataagatcggtcaacatatggttttaggactatcagctgaactcatgtatatgcgttgaacttgaatttttcttctgatgagacaaattgacattttcgttaaaaggttttgagaggcaatatttgaattttataagatgacattctttttcattttaaatctagcaccaatcatgtagttgctgtgcaccatcaattattcaatattattttattagtagattatggttgcagtttttccaacttaaatttatgaaacagatatggccagtcccccccagataagggattacaaaaaataaaaaatagctcaagaaatgttaaaccagaatttcttcttcttgctggt

SEQ ID NO: 1754 - DNA, 573 bp, Gossypium hirsutum
cactctgtgtctctttacagacgataagcatgcttctgagcttcagccaaatgattttcaagctcaaaaacatagtgtttaagtttctcatattcaggatttgactcttcaacaggtttttcctttccaagaacaacatcactcaccttagactgtacatcctgttaaatttctagagaagttaatgcaagggtaggaatttcaatactataaacatgtcaaattcaagccagagaaaccaacttcaatagaataaaaaaataatatcagcaaaatggtacacattaaagcaaagggaaaccgacatgcactatagaaagcaagtagcgagtttcctgtattcttcagtttcagataaaaagcaacaagttatttatgtaaggtttataaatcctactaaatgccttctcacctaaaactgtggtcagagtaccaaattgaattcatagaagttttgttgcagcaagaatttttgtttatacagttttacaagccaaattatctactacagaaaaaaatgttcaaattaaagtttcttgacattgaactaatcagtatgcatttgattgcatc

SEQ ID NO: 1755 - DNA, 590 bp, Gossypium hirsutum
ggtggtcttgatgacctacgacaagttgaagcaaaatatccagctttgcttttcaaacagcaactgacagccttccttgagaagatatatggaatgataagggacaatttgaaaaaggagatatctccagtgcttgcatcatgtattcaggtatatagagcaattctgcccaacatttttagcagttacaataataggagaaaatacttgaatttgcttcatttttcaagtttcaaaattgagacttgaggtcttttatatgcaatcaaacctgagctacttttttttttccatcgatttctgctttttctattctgtaaccagctcttttgtggattcttgtaaactaaactacttcacttttgctcaccgttatgatttatttgtcactgcacattctatatttcttctaattagcatatttattaagaactaggatagattttagatatgtttgaattttgtggtttaaggtaaaactgacagccaacagttcaaataaatggtttttgacccaacactgttgctttgtttgcagccatgttaacggtttgtgttgttaagtactcttattttttgcaataacaaaa

SEQ ID NO: 1756 - DNA, 661 bp, Gossypium hirsutum
ttaggacgatgaccaggaacaaaagaaggtttcttaacaaatctttggtttccatcaacatcaactggtgcccctgactgtaaccctgcatccataaggctgagtaaatgcatggctggtatcgtttcgtttgaatacaaatccactgaccccgccgcattatgtttgcaagaaaatgagtaatctgcatgtgtccttctaagggcatcagaatcaaacttcctacaatgcttctcataatttgaagccacattcaagaagttccgatcatcatttcggctcatatttcccttaggtagactgctggggcaatgtgaaagcacatctaaccttgcaatctgatctgcacacttttgagggatgctgtgcacataggacatgctattcgatatcatggatgaccataggtgagctacttctttattctgctgcggagcactctggcatgtgttacaaactcccagtgcctgcacagtagcatgagaggaactttgcccgatcatgttcccgagccgctggcaattttgagcactgttttgcctgatggaattggtggcagaaaattggactccattcaatggcttctctccacatagaggaaaaggcctaaagcctgcaggggggtaacttcgttccaatttgcttatcttgtactggtttc

SEQ ID NO: 1757 - DNA, 610 bp, Gossypium hirsutum
cctccggttcagcatattgggatcaacaccaattcaattgcttcagctaagtacactccttggaatttcagcttgtacgatggaaaaactgccgatgcatggatttcttacaatgccactgctcagattttgagcgtgacattgaactacaagaacacaagtatttctaaaagggatttcactctttcccatcatgttgatctcaaggaaatcttaccagagagggtcaaggttggaatttcagctgctacgagtcataagtcagagcggcatcgacttctatcatgggaattcagctcaagtttagaaataaagacaactgatgagggaaagaagagaaagaggaacaaaatgatagtagtacttgtagttctgctgagcattttaatgattgttgtcaccatatcattcgtgttttttcggagatggaagaagatgaaagaagaaagagaagagagagtaaacttaacttccatcaatgacgacctagaaagaggagcagggccaagaaggttttcttacaacgatcttgttgtagctaccaacaacttctcaaaccagagaaagttgggtgaaggaggatttggagctgtcttcaaagggtatttca

SEQ ID NO: 1758 - DNA, 646 bp, Gossypium hirsutum
  misc_feature (635)..(636): n is a, c, g, or t
tcttctgagtgctagcaaactgtacacaaatatacggttagaaatgtaacactagattttcatcttatcttattttactattacatttgaaaacttttttaatgaaattcttgctttctttgttatagttttgatgagttgggtactttgctgggcattcctcctcataaggtgcgatttactcgtggcatcctttttctacattcaagcaacaataacatactatagaaaaaaaaaaaaccctcctttaaactttttttttttttttttttttttttttccggtttttttctcccccacgaacaaaaaaagggggagaaaaaaaaaaaaaatattttttttttttttttttgggggggaaaaaaaacccccaaaaaattttttggaaaaaaaaaaggggggaaaccaccccccgtttttttttttccccccggaatttttttttttcctccttttttggggggtttccgggggttttaaaaaaaaaaaaattttttttttccgggggggggagtttttttttttttaaaaaaaaaccaaaaaaaccccccagggggggacccgggggttttttttttttaaaacctttttttttgggggccaacccccccccccttttttgggggggggtttannaaaaaaaaaa

SEQ ID NO: 1759 - DNA, 655 bp, Gossypium hirsutum
agacttctcgaattttttcttttgaatcattctccacctgcaaagcttgttctttcaaccaaagttgacaccttgatgattcctcgagcatttctttacatctattgagctctttttccattagctgatgcttatcctcaagttgatctaaagtatcaaccctcctggataaaatcgctgtcctctcacgttcatccgcaatgtctttctgagcatcggccaaagccgtatctttcatatccagctgctgtttcagaatagaaagctcctctaccctctctttctcatggaggcccaactcagcctcaacatttccaagtttcagtcgagcctctgacattcccgacttcaatactagcaacatcacggaaatctcctcattctgcaatttcaactgtacagctgaagataggcaaccttcaagttccatctcgagaactttaagagtggcatctttactctgtaaccgagagctgtaatcgtttaatttcctagtcatttcctcccgctgagagttccattcggcttctttagctctaagatttgttgaacagtccttgtgcatctgctccacacttctgagcttgtttttcagttttgaaagagacgaggaacttccagcttcctgaattctagtttcccggagttctttgag

SEQ ID NO: 1760 - DNA, 661 bp, Gossypium hirsutum
tgaagagtattcaatcaaaccactaccagaatttacatcagcaaccactgaaacagatttctcttccatatttggcatccctgaggaaccatagtagttaacatcctgaaaccttggttcacttggtggttttccaccagaaccactgctagaactactagagttaaatattcttgctcgagctcggttatactcctcttttctctcttccacacttttggagctgtttgacttcatagaatttgaatttgaattgcttacaagctgagaccttttctgtggcctctgtttaattgccaccttaacaacaccagggtcttctgatggtaaatttacagggatgtcagccagtcgtatacgaggaagcctacattcagaagtcttgcagacaatgattctagaaccagaaccatcgggtaaattattgtctaataaaaccatcgactgcaatgaataatgctgtgcgatacgatgcgcagccaaccttaaatatgatgtaggcagctgctggaactcaaattgctgctgattaggatcacggataaatttttcaacatcttgttccatcctcaggactgaacaaaagaaattaagaattctcagttcacaagtagagaaaagcactcttgctcaaatattgaaacagacagcacactcattc

SEQ ID NO: 1761 - DNA, 552 bp, Gossypium hirsutum
aagtggaaggatgggagaagggagtggaaaaatggaaggaaaatatttgagtttgcttggttgggaagaaaagtgagaggaaagaaaataagagggatgaacatttttcattctaatgcataaaacccaatcctaccaaattggaaatatgagatgagagaaaatgagaaagctatgtacgttagttcaaaattatgcatttttcaaatgtattattttttctttccatttttcaactttaccaagttatggatggaaagaaaattaccatttttccatctctcctaccaaacacacttatggaaagaaaaattaagttttccatctctctagttttctaccccttcaatttttcatctatcaattttctttccactctaccaagcaaagtctgtatgtcttttaaatcaatgaaaagattttgttacaacctatgttgcactgacttttcaattttgcttgaaacacctgtgtctaccatatattcagacatgggtatataggaatatgacccttttaggaccctacaagtacataaaaaaaaatttggac

SEQ ID NO: 1762 - DNA, 613 bp, Gossypium hirsutum
tgccagaagcagctcctgacggagcagttgtgctgggaaatccagttgctccccctgtaaacggggatatgcatactgacataagcactgagaatgccatggttcaaggatcccggtaaactaccacttatgtttgttgtgttatatggttattgaatggttaagcttcatcaatcaatcctagtagctgctacaatgtggtttacgatgcaggagaatgagcaaaggtgttgaatatttggtcgaagcatcagctgctgaagctgaggctattagtgccacactggctgctgccaaggctcggcaagttaatggagaagttgaacttcctgatagggatcgaggggcagaggctacacctagtggaaaaccgacatctaccttgattaagatgcctgattcttctggatcaaatgatgttgctccacctggagttcggcttcaccatagagctgttagtatcagaaatttttatctacacaacactgttctcaagtcaaaattggcatttctgttacctataactgtgtgtcaaatgtttcattatgtcaacaggttgttgtagctgctgagactggtggagctttaggtggaatggtcagacagctttcta

SEQ ID NO: 1763 - DNA, 617 bp, Gossypium hirsutum
aaaggtcgaagagtaagcgtatagttaaaactcaactcataccagttggttgtttccttttcgacccttacctctacaaatagactggatatcgacagaggcctttcgcactgcaaggaatcttctacgagatatatgagtacgaatacggcgttgtatggtttttgcagcagtactgagtacttctgccctccgtgcatctagttccgccatctgaccagctctgagaaagatctttgttagacctacctgcaaaaggaaaaaaaaaacattttgagctcaattgttgatgcttcaacactgccatatcacaacatgaagggcataatcgttgaataattccaactgtcataagaaaaatcgttgcattacctgaaatccttcaagtccagccttttccaaaatcttctggcatgcagccttttcgtcatagctgcttataatcgatgaaatcaatgtgaagagtgtccacattagttcaattgtaacgagtaagattgcaactacaaatttcataacttcaatctctatagctaaacagaattacagcagtttcatcacagttaactgtgattttaaactaaaaaagctcacttactttccttccaaagcctcag

SEQ ID NO: 1764 - DNA, 643 bp, Gossypium hirsutum
ccggttatcaataaccgtccatgtatagagtgtgcagccatgcatgatgcttctgttcttctatactgaacaaaaacacagccgggctcaaaaatctttttcaaatcgttctgctccctattttcatccttctcaatagcatcaaattccattctcgtgctaccagcggaaccatctacagcttttggtaactttccagtgcctacttcctgttgcagatcttctttgggcaccaatatcttgtctacatttatgattttgcttttaatattatcagcaaccttgtcattttgagagtctggttcctcttttggggtattcagcagggcagggatctcttgaaaacttattattgactcactcttaaagggaggatcttcgatctttgtatgaccttcaggtaactttctattgactttctccagatttgcattctcttcaactactgatatcttctcaacattcatggcttcacttttaattttatcagcattcctgtcaaaatgataatttgattcctcttttgaggtatgaattggattaagggcctctcgagaaattgtcttgtctacaatctccaaagtcagatcttcaacagccatttcagtatcaagctgagctcctccaaactgttgctatcaaa

SEQ ID NO: 1765 - DNA, 613 bp, Gossypium hirsutum
tacatttcttcttagtcatcagctcacaaacagagaaacttcactgagctttgggtaaatggtgttttggagaactaattcatgaacttcttttgtatgatcagctcatcttcatctcttccaaaaaccaagaatatatgtatgaccaggatccttgaatgatatttctgttgctttttggcacatcagtaaggagactaccccccagtacctggcttctgcctagcacaacattgacagttacaaggtctgtcccaaaattctttctgttctgaattgtctaaacatcatgaactaatcgaccattcggcactgattgcagatgactaaataagcatacagcagcaaaggaaaaatttacgatcaacaagcagtgaaccagaggattgctccaaaatccactcagatgcaaccaaaagattcagtggtagcagtaagtttgttaaaaactaagcttgagagttgggatctgctgtaactttgggtatgaagttgatcctttctactggttcacaccacttgaaatgtatccattaacatatttgacctgacaatatctaacaacattcacagtgaaatttaacagagatttctttggatacaagcagctgag

SEQ ID NO: 1766 - DNA, 625 bp, Gossypium hirsutum
acgctgatcattgctctccagtgctagttaaatttcctcatgagcaggcactttcttattactgtagcttcgaatattaagataggcaatgagattggtttcagttctttcagaattttcttcttttgatttctcatcgagaggtatttcctctttctacgatagtggttaagcagtctcttctcatatgtatgtctctttcttggcagaaagtagttcaggtttcatgcggctggaggcacacacttgcaattactgaagagaaaaatgtcttctcttggggaaggggtacaaatggacagctcgggcatggagaatccacggaccggtaatcacatttccatatagactagtgatgaccaggggacaggaatgttccaaagattatagaacaatgtgcctatcatacacactttcaatttgtttcacgaaattaagaaaaatgtgctgtttagtttggtggttgaccaagtagtcacaatctctgttcttgttatcaggaatgttccgaagattatagaggctttgagtgttgatggttcaagtgggcaacagatagaatcttcaaagctggatccattgtcaggtgctgtataattaattacattggacatccttcctgcta

SEQ ID NO: 1767 - DNA, 631 bp, Gossypium hirsutum
atgctctcctgacatgcagcaaagatacccctgcagacatctgtttaattcctctgtctgcctatccgactcagggtgataggctattgacaagtgcactttagtccccaccctcttgaataagtcctaaaaaaaattgctaacaaaaattttgtccctatctgaaatgattgagtcaggcaacccatgcaagtttgagccactgttaccactatgtaagggtgagctagagccagaaaatgcccaaattttgtgagcctatcgactactaccagtattacaattttgcctttggatttagggagcccctttatgaagtccatgctaattgaagaccatgccctgtctagaattggcaatggttgtagtaaacctagtttggccacagtctcagacttgcatttctgacatgtagaacattccctggtccaaagcttcacatctttagtcatgcctttctagtagatgattgaagccatgcgatttctggtggcatgtacacccgagtgtcccccgattgcactcgcatgaaaatgttaaaatagggccctcctaagatccccatcactgcctacaaaaatctttccctttctcctaccaaatcttccatccacctaccaaatcttccatc

SEQ ID NO: 1768 - DNA, 1636 bp, Gossypium hirsutum
  misc_feature (661)..(663): n is a, c, g, or t
  misc_feature (666)..(668): n is a, c, g, or t
  misc_feature (670)..(670): n is a, c, g, or t
  misc_feature (673)..(673): n is a, c, g, or t
  misc_feature (675)..(676): n is a, c, g, or t
  misc_feature (679)..(679): n is a, c, g, or t
  misc_feature (681)..(683): n is a, c, g, or t
  misc_feature (688)..(688): n is a, c, g, or t
  misc_feature (690)..(690): n is a, c, g, or t
  misc_feature (855)..(855): n is a, c, g, or t
  misc_feature (951)..(951): n is a, c, g, or t
  misc_feature (1010)..(1010): n is a, c, g, or t
  misc_feature (1109)..(1109): n is a, c, g, or t
  misc_feature (1146)..(1146): n is a, c, g, or t
  misc_feature (1178)..(1178): n is a, c, g, or t
  misc_feature (1191)..(1191): n is a, c, g, or t
  misc_feature (1234)..(1234): n is a, c, g, or t
  misc_feature (1253)..(1253): n is a, c, g, or t
  misc_feature (1276)..(1276): n is a, c, g, or t
  misc_feature (1319)..(1319): n is a, c, g, or t
  misc_feature (1334)..(1334): n is a, c, g, or t
  misc_feature (1347)..(1347): n is a, c, g, or t
  misc_feature (1431)..(1431): n is a, c, g, or t
  misc_feature (1467)..(1467): n is a, c, g, or t
  misc_feature (1528)..(1529): n is a, c, g, or t
  misc_feature (1566)..(1566): n is a, c, g, or t
  misc_feature (1611)..(1611): n is a, c, g, or t
  misc_feature (1613)..(1613): n is a, c, g, or t
cccaggtgcatagctttttgcaaacacttttctagaaacttacctagacaaaaaaattgattgggcaaaaaaagtacgtttggaataagagaaaattggcagttgtgaggaaaaaaaaaagaagcattaagaattggacaattctatattatcacttggaaaaccaagaaggaacagtcactggatttgtggaagctcacaatttaaatactacattttgagtcaaaaaagctagctgctgcttcattcgatcacaatttactctgctcatcaacttcctttcatctcttacttgtcctccaccagttatatttcatcaatggctcgttgctaaagcagtcaccagtaaaccaagaaccagaaatggttgtgcacttgcctgaaacacaacaacaaacttagatgataaatatgaaacaagagatgagataattaaattgcaactcctttatcatgttaactcatttaaggtaacgtattcttgatactgacactataagatggtagaattattgagacataaagattagtgtgtgtgagagacggtaagaatgacaaatactgatgagaggaagttggtttgtgtttctccttacctacagtcgtaactatgggaaaaatccttaatccttaatccgttctaatccaggaaccacgtaannnccnnntnttncnntcncnnnctttncncccctctcctcctctctttctctcctctttctttttttttctcctctcttcttttcccctcttttcctcctcttccctctcctcctcctcccccttttcctctctttctttctccttccttcccctcttccttcctctttctcgcccctcctcctcgctcccgtnttcttcttgttctctcgcgccggccgccggcccctcgctttggtcctccgtgcgtgttctctttccttctttccccccttccgtttcctctgcgtntttctccccgttcccccgctcgccctttttccttttcttctcttcttctctccttgtcnttcttctttttttccttccctttcctcttcttgtttccctccctcctctccgttttgctttctccccttcttccgtgctctgttctcctgcggtctcgnctgtgtcgtcccttgtcgctgttgtgcgtcggcgtgnccctgggtggtccctgctgcttctctttctcncgcgcgctctgcnctttctcccctctgtccccttcctcgcccgttcgtgttcgccnccttcgctccgcgctcccntgctttctcccttcttggctgcntgctctgctcttcgctctccgtcctctcttcttctttcttttntcctctcctctcttntttctctcgtccngcgctgtttgtttctcgcctcgcctgcttctgctcctctccggccgctggccccccgccctgccgcttgctcgcgccgttcttngctccttctctcttgttgttgtcgcgtcttttttcnctgcttcctctgtcttcttctgtccctttgcgctccttgccgctttccttgcctctttcgnncgctgcgctcatctctccgtgtctctttgccgcgtcnctctcctgtctctcgctctctccctcttccgcacttctgcttctncncttcctgctgccgctgtctctcc

SEQ ID NO: 1769 - DNA, 653 bp, Gossypium hirsutum
attttgtctcactgtttaataaccctagttaaatcaaatcaaaggtttagatcttagatataagtatacatatcaatctatatgttttatgtatctacatatgaccttcaacaatataattcattgtattgacaatatttttctttgttattgtactaatatagaacgaccgtaaagaagaagaaaaataagagcatacatcaaaactcactaatgtcgaattcaaatgatgcaagaggagtttagattacatctatttataggttgaaaacccatattttaatcaatgtcaaatagaagcagcgtagtaaggataaaacaatatcaactagaagaaatgtacttctatatggattccacttgtacagcctataccgtacgccttattcggtccttggccttcgcccccacagattctcctattttgccacttcttttttttaataaaaatttgggtcacacaactctaacagttataaattatagattgtggcatggtgatttactcataaaaataaagcacattttgtagtgaatcatttatctctttgaaaagtaatgattgtaaaaattaaaaaagacaatcttaatttatagataaatttagaaaatgtgttttaacaaaatgaggtgggaaacaaatacatggatag

SEQ ID NO: 1770 - DNA, 563 bp, Gossypium hirsutum
gggtggcttattcttctctctaggtgtaacttgggttttggtagatgtattcaagccaagagggacacttgacttcgatttgttgaccaaataatggagccacaatagttgctcaagaatataggtttcagttttctctttatcggcatggtgaagtgtctcaatccgaattacatctgctggtccagttgaaggcttcttgttgagctcaggactatgtaacaaaaaaaggtgaaaaaacaaatgtcaaaatcttctttcacttggcatatttgcagatttctagcacccaaaaaataaaaccatgagaacaaggggaaaactatagttactcaccctgtatttgcccattccccaacccaaccaaaaccatgatgggctctgtgtaagtgcaatgaaagcaacaaagaatgttagaaggcttaagaaataaaaatggaaaaaaatataataaaaaaaaaacagaagcagaagataaacaagccagaagcttcttatttgtgaaatagccgatcatcattcttggtacagaaagaagaaaataggttggccatcttacttgg

SEQ ID NO: 1771 - DNA, 568 bp, Gossypium hirsutum
aggttgagaagagtttcgagtgggagcccacatgatctttgagaaaatagattgaattgggcgtaaactggttgtatgtgggaaatggaacagccaggaatactgggtgaaagaagacgctagttgtagaagaagggctagagataaaatgatttgtcgtcgtgttggaattcgctgaatgaatacagggttactgtaaaacgtagtcgttcaggataatatactttgaaatataattatcctgtttttgtatgatatgggtttttttatatatttttttgatgtctgatttagtatttatatttcgggtttctaattttcactcctaaaaagtcaattccaaaattttttattttaatgtaaaacaaagtttttctatatttttgtttgatatattactgtaaagcctcaataaaaaataaattgagctcttatgaaaaaaatacactcaattaaacccttagcttttgttaataaaaattgttagttaattaatttgactattaacctcactaatatgattgatggaaaccatcaaaaattactatgtggcagtatgttgcatgtt

SEQ ID NO: 1772 - DNA, 583 bp, Gossypium hirsutum
  misc_feature (203)..(203): n is a, c, g, or t
  misc_feature (221)..(221): n is a, c, g, or t
agcagttgttggacggatgtcatttcttagtttcaatccttctattgatgtgagtataaactataaaggtcaagcgactttcgaattttttccagtgattcttctctttttgtgatcttgagttgcttctgctctcataagaaagccttgttttcatagaaactaaatgaagaagcatcaaatgcatgtcggccaaatgcctntggtggaagaactttatntaggtgggtttttttttagttgagcagatcttatgttattgttctggttttgtcctaaaagcttttgaaaattattatgtaatttgtgttggaactacaaaatggtattaagaaatgaaagattttaatcgaagagataaattttgaaaggaaaatccgatgtttcgtaataccaagggacattgaatgtaagaaatatggggatgttgagatgggaatgctataagagttgcgtgcaactttggttcagattgtagggtaagttgaattgaacacatgtttgcacaagatgcatgttttttatctgaccttttgtccttgaattgggggacagtgaaaatggatctgcatccgaagcggct

SEQ ID NO: 1773 - DNA, 662 bp, Gossypium hirsutum
tcatccctaagaatctgtctttattatctccattcccacatgttaggggcgtactcctgatacatccaccattgtggccttgtcggttctccgatggataaaaacctcgcaagcacttgcaactctgagtatcctcaaagcatctactgaatgagccacaagagtttaaaatgctacaaaactgtcttggttgagaccagaacaaattccattgttgataattttcaagccatgcaaattctctcatacgtccgtcaacatcgaggctgaatctagttatagtttcaggattatacaatgaatacgaaaaatatgtttcgttttcatccctatacaagctgtagttgaagatgtagttcaatctcatttcaggcatcaagtcaaaaccatggccattccaaggtccactactccataatatttcggtacccctcatgaggaacacttcatttgataccattctcacctcgaaatccccattatttgggtcttcttcatccaaccaagatgttagagaccaaactttccctgttttattattgtaaccaagcttcatcccaggcaaaaaagtgtttgaagggtaatcaaagctctgccatagtatatccatattcctatctcttagaaccaaattcccagaatccaacagcgttacactcaca

SEQ ID NO: 1774 - DNA, 641 bp, Gossypium hirsutum
  misc_feature (617)..(635): n is a, c, g, or t
atcatccaacatgcatcaaaaacccaaaaataaagttaagggatataagtcaagagatataagctaaattcacatttgttcataaaaattaaaagtagcaacatcatcaaagcaacaaagtctttaaaaaattagcatcatctctctctttgacaaagcaaaatacaaaaaactttattttctgatcatcgatactaaccggcaaatcgatttggatctaaagtatatttttttatttatcgatgagtatttatccaccctggttgttgaatcgcaacttaaaacttgctagttgaactttaaaaagaaaaaaaaattaacaactcatcaatgacttaaataaaaactatggaacaattcaatgacttaaatgaaaactttcgaatagttcaataatcattttgtaactttttatagttaaatgatcaaaatgtaaacttaataacagtttagtggcttcaagtgtagtttacccaagaaaaaagttagttaaacaataaaaagttgaaaatcaataaataaaagaaaaaagaaaacaaagagaatctgtagtcttagcagtttttttttttttttaaaaaaaaaagggccaaggaaggaaaaaaagggttaataannnnnnnnnnnnnnnnnnnaaaaaa

SEQ ID NO: 1775 - DNA, 606 bp, Gossypium hirsutum
  misc_feature (544)..(545): n is a, c, g, or t
  misc_feature (547)..(547): n is a, c, g, or t
  misc_feature (582)..(582): n is a, c, g, or t
  misc_feature (585)..(586): n is a, c, g, or t
gcgctttaatcaacattaagaggcggtatttctacaataaacaaatgagcatcgagtcaaagtcgaactgccatatgaaaataataatgtgtaatttcaaaataataataagtgattctgcttttgttgcttaggtccataagttgattcattgatcaagacaaaatatgatgcagcaactacctaagatgggcagaactaacctttgcctcattggagacagagggtcttgaagggaattcaaccttgagtgctttgataattgtgtcctcacgcaatattcgttcttgagtttggtcatgcccaaagggtcgcctaccaaaaagcatttggtaaaatagtacaccagcagaccaaacatccacctgtccgaaaaggaatataacataaaagaagctgaagactcgtacaaaatcatatgcaatcatggtgcacagggtcacgtacttggaaactagaataaagatttgtaagggcacaaaaaattaaagtccatatggtaatgaaaccattgacttattaattatccaaaaaagaaaccgcnnanttatcatgttcagtatgcatgccctcaccctcacntgnnacaaaaacagagagaagaaa

SEQ ID NO: 1776 - DNA, 652 bp, Gossypium hirsutum
gatgaatatcattatgagatctccaaaaaagaggatgacatgctgtatgacgaatttgttcagaggtttaactttaataaaatgaaggtatgctgctgctttactccatgccttcaaagaaagaaacatattagaattgcgatataaattttcacttttcattttgcatgttggaactttttattttgcggctttggtcacattcacattcttgtttctcgctcatacacacatcctggtgtttgtgcatggactgctttggtttggctagatttacctttatataggctaagtgatgcatttatctgggaaatgtccgtattgagaaatatatagaaagaaaagaggtaagagtgattagatattgacaaactaatagaatagtggttagctatgttacccagacgcatgcatgagcgtcgggtatgagtatgttcaaccttttcaagttttccaaatctcttaacaaaactaatcaatggaattttcactagggattctcttctgtccacgaagttatctcgactaccaatgaaatgaatctttaccaccctctctactttcattctatgccatcttgtttcaactgtttcggctttcagattaagccccttgatcttcgttgagtggttgccttccttcctaggatatt

SEQ ID NO: 1777 - DNA, 639 bp, Gossypium hirsutum
tgctgggactgcctttcttgaacatgtattgtgatgtggacctcgaatcttacttcaagagtgcaggatcaccacttgcaacgctagaacttgtgtggtatgtatatgttatgcttgagtttggttacatgtttttgtcatatatctgtccaaaagcttgttttcactatgatgagataaaatttatctggtctttacttcatatctgaaacataacaataaagctaaacaaaagtgtcacattttttggcagaattcagacgaaacaagtttcaatcagactctgatgtcagcagaaaccgaagttctaagagcatggaagatttgtagtttttgttgtaagtaatgtgcaggacttatttgagcggctgtagtgatgacaaggccaaagttaacccttaatgattatcaaaaaaattttcttgccagaggctcggagtgtgaggtacacctttattgccgtgttgttaatgtttttcataatttgaaaggtaatgatgtcttatatcaagaacaaaatttataaacttcctgaattagaatctttacctgtcttttcatgttctgggtgcattaattctgatcggatcattgcatcacgtgttacaggactttagtctagtgaactgcatgatcctc

SEQ ID NO: 1778 - DNA, 621 bp, Gossypium hirsutum
gcagactatagaaactaaacaatgtcaatttctcacattaatttgatgactgattgattcctgattgcagaacttgatctcccatgctgatgggcatgatcaggtaagatattactttaacatctgtaatctatagtattttctttatggtaaatcagaaacactacgaaaaatttaacatgtcgaaatgtgatttacaggttatgggaaaggtagcagctggggatatgtttggagaggttggagttctatgttataggccacagccatacacagttaggaccaaagagctttgtcaaatactacgactgagtggaacttcactgatgaacagcatacaagtaaatatggaagatggacgtgttattatgcataatctttacatggtaaatattgcttatgtaacttctagagtaatgaaacattattattgttataaacagtatgaagtgatggtttgttctcgcagaaattgaatgggctagagagcagcagctttgaccagcccgaggaaggaacaatgagaggaagttgttcagaaactggatttgaagatcaaccacagagatatgcatcaaagaaagaagcaacagacataggtttcttgggatcagaagctat

SEQ ID NO: 1779 - DNA, 618 bp, Gossypium hirsutum
aaagcagattccacattcacattgtcctgaaacatagagggcaagctatccaggaacgtttcaaccacatttctagattcagaaaagttgacaaggagatcatctggcaatggaacaaatatatcatccagatctgaaacaaccatcatttgaggctgcgtaagagatgactgcaaagacagaagccaaaaaattatttcatatgtactttagaggaatggagaaaatttgaggcatcccaaaaagacttttccactgatctcatatgtcacttgccttcatattgtaaaaatgaattgtgctatcaaaagtaatgaaaccaatctgagttctggggaagccaggcagctcatccaaacatgaacgtatagtttgagcaacaacctaacaaatatgttgcaagtcagcggaaaccatcacgtgcttatacaatatggagaaataaaggaaagagaaacaagcagcatggcctccagaggtaattcttagtgttatgaccaaaaggccagagcaaaagcatgcagacctaacacttaagtattcaaattatgatcaaacaatgcatacaacaacctggataaacaatcagctaaacaagttttccagcatcctacaagc

SEQ ID NO: 1780 - DNA, 591 bp, Gossypium hirsutum
ctttgataggtcatctgaggatgtgtactctgatcctggttctccagtgctgaggagaacctctactgggagttatgtgatagctaaactgaggaaagaaaatgacaacgcaacttatcttttgctgaatggaaatggtgctacaccagagggggacatccccttccttgatttgcttgatatgtaagtgtttaagaattaacctttttcttttgtgtgtgtgtgttcttgttgtggggtctattggtgcctttgtaatctaaaagcaaaaattttccagaaatactagcagcaaagaacgaatatgggagagtgacaaagaaaagtattatgagagtgttgttgctttgctgtcagatcaaaaagaaggggatatacacatcaatgacctgaagattcttacttctaaagaatcgaaaactgagaatacccaatattacatccaaagttggccagataagaaattatgtcagatcacaaacttccgtcatccatatccacagttggcatcattgcagaaagagatgattagatatgagaggaaggatggggttcgacttactgcaacattgtacttgccgccaggctatg

SEQ ID NO: 1781 - DNA, 593 bp, Gossypium hirsutum
tgcttgctgggtatttcatgcaggtagctcatctggagcgcacggggcactacttgacagttaaagacaaccaggtccatataaatagttttctctgtttctggatcaggctttctttcttggtttcttggtgaagttttttctcattttggaggtgcatgcgtggaatgtaactgtgtattgtgttatttattttacaggtggtgcacttgcatccatcaaattgcctggatcacaagccagagtgggtcatctacaacgagtatgtcctgacaagccggaattttattcgtactgtgacagatattcgtggtgaatggttagtctctccctcatttcttatggttgacattcttgtgtgggttcatgatacatgaattgagaaaccccaagattagttttgtccaatagctcgttaatttacatatgcactcttttgatggatacaggttagtcgatatagcaccacattattatgatctcgaaaacttcccacagtgtgaggctaagcgagtcctcgaaaagctttacagaaaaaaggagaaggatcgggaggagagtcgaaacaggagatgaagtgctacgaccataca

SEQ ID NO: 1782 - DNA, 644 bp, Gossypium hirsutum
tctgctgggatggaacttgtgatgctggtggtataagaggctgctgtttctgctcagaatcagctgggtgagatgattgagaacttccctgtagagtttgtgtttgctgcgatggcagtgaagttggttgtgagtgtgcttgctgaactggaggatatgattgataagtaacatgacatgctgcaacttgagggtttgcccaatgagaaacaccctgtggttgtggatttgtagaaatgtgctgcccgggatatgatgcattgggcggtatatgtcctgccatagaatcaccaagatttggcatagatctggaacaagcaaacaacaaatagaaggtccatcaaatttattgaacatgaataaaatgctaaaaagcaaaaaaagaaaaattaaggggaaagaacttacctcatagccaattcttgaggatgtgggccagaaggcatgctattaaaagcataattgcctctggaaacagagcaagttggagcaatatgtcaacatagtttaaccatgaaagagtaagttgtaataaagcatacagttgcaagccgaatgagacaataaatcatgtttctataattccaccaacaactcaacatctatttttggacatctcaatggtttcaagtacaccaacccta

SEQ ID NO: 1783 - DNA, 1204 bp, Gossypium hirsutum
  misc_feature (631)..(664): n is a, c, g, or t
  misc_feature (667)..(697): n is a, c, g, or t
  misc_feature (700)..(716): n is a, c, g, or t
  misc_feature (718)..(718): n is a, c, g, or t
  misc_feature (720)..(722): n is a, c, g, or t
  misc_feature (724)..(730): n is a, c, g, or t
  misc_feature (733)..(776): n is a, c, g, or t
  misc_feature (780)..(786): n is a, c, g, or t
  misc_feature (788)..(813): n is a, c, g, or t
  misc_feature (816)..(873): n is a, c, g, or t
  misc_feature (875)..(880): n is a, c, g, or t
  misc_feature (882)..(912): n is a, c, g, or t
  misc_feature (914)..(923): n is a, c, g, or t
  misc_feature (926)..(930): n is a, c, g, or t
  misc_feature (933)..(953): n is a, c, g, or t
  misc_feature (955)..(982): n is a, c, g, or t
  misc_feature (987)..(991): n is a, c, g, or t
  misc_feature (997)..(1002): n is a, c, g, or t
  misc_feature (1009)..(1014): n is a, c, g, or t
  misc_feature (1016)..(1018): n is a, c, g, or t
  misc_feature (1020)..(1026): n is a, c, g, or t
  misc_feature (1028)..(1035): n is a, c, g, or t
  misc_feature (1040)..(1041): n is a, c, g, or t
  misc_feature (1043)..(1050): n is a, c, g, or t
  misc_feature (1053)..(1054): n is a, c, g, or t
  misc_feature (1059)..(1062): n is a, c, g, or t
  misc_feature (1066)..(1073): n is a, c, g, or t
  misc_feature (1075)..(1075): n is a, c, g, or t
  misc_feature (1077)..(1080): n is a, c, g, or t
  misc_feature (1088)..(1093): n is a, c, g, or t
  misc_feature (1095)..(1103): n is a, c, g, or t
  misc_feature (1107)..(1113): n is a, c, g, or t
  misc_feature (1115)..(1117): n is a, c, g, or t
  misc_feature (1120)..(1128): n is a, c, g, or t
  misc_feature (1130)..(1134): n is a, c, g, or t
  misc_feature (1137)..(1138): n is a, c, g, or t
  misc_feature (1140)..(1151): n is a, c, g, or t
  misc_feature (1154)..(1158): n is a, c, g, or t
  misc_feature (1162)..(1171): n is a, c, g, or t
  misc_feature (1183)..(1188): n is a, c, g, or t
  misc_feature (1190)..(1192): n is a, c, g, or t
  misc_feature (1194)..(1194): n is a, c, g, or t
  misc_feature (1196)..(1196): n is a, c, g, or t
ctttttttttttccctattctatatcactctctttcctaaggatgctatgctatctgccaaaattttatatataaaagaaggaacctgcctgcaaaagcttaacccaaactttctcttcacagataccccaacaccagataaacaaagttgtctattaagaaccctaaacccaaacccaaaccaaaaaagcaactaaactacaactcttttatctttatctctcactcactctctctccatggacttgcatctgaagcaatggagaaaccagcatgagtcagagcaacaaccttctgcaaagataccaaaacttctacttgaccttgatgcccctcaccaccaccaccaccactcacaacagcaacagcaacagcaacagcaacacgcatcctctgaaccatctgctctccccttgtttgtatctgaatccaacagcaaaatcagcggcagcctgtcagcaccacttcctgattccaacagcagtaagatttttattccttggcacccttttgttagcagaaaatttccacctccccggtttggaaagtttataacttagtggcttggtttcatccagctccttgatgttgtgagtttcctttttagtaggaatgggaagctatttcagcnnnnnnnnnnnnnnnnnnnnnnnnnnnnnnnnnnccnnnnnnnnnnnnnnnnnnnnnnnnnnnnnnnccnnnnnnnnnnnnnnnnncncnnncnnnnnnnccnnnnnnnnnnnnnnnnnnnnnnnnnnnnnnnnnnnnnnnnnnnncccnnnnnnncnnnnnnnnnnnnnnnnnnnnnnnnnnccnnnnnnnnnnnnnnnnnnnnnnnnnnnnnnnnnnnnnnnnnnnnnnnnnnnnnnnnnncnnnnnncnnnnnnnnnnnnnnnnnnnnnnnnnnnnnnncnnnnnnnnnnccnnnnnccnnnnnnnnnnnnnnnnnnnnncnnnnnnnnnnnnnnnnnnnnnnnnnnnnttttnnnnntccctnnnnnntcttccnnnnnntnnncnnnnnnncnnnnnnnntctcnntnnnnnnnnccnncttcnnnncttnnnnnnnntntnnnntctccttnnnnnntnnnnnnnnnttcnnnnnnntnnnccnnnnnnnnntnnnnntcnncnnnnnnnnnnnnttnnnnntctnnnnnnnnnntttctcctcctnnnnnntnnntntntctttttt

SEQ ID NO: 1784 - DNA, 746 bp, Gossypium hirsutum
  misc_feature (734)..(737): n is a, c, g, or t
cactagtagcagtaaatcatatatcatagatgaaagtttacttgttactctgttttaatacattcttctattttatcggcagagcaaagccgcagagatgatttggaatcccttggttatgtgcttatgtatttcctgagaggaaggttgtgtatatgatcaccccatctcatttcattcatggttttatattgtttcttgttgctgaatctttgttcttagttttcctttgcaatgattttgaatttgattcagtttgcaccatttctttgcttcagccttccctggcaggggctaaaagctggcacgaaaaagcaaaaatatgataagattagcgaaaagaaagtgtcgacttctatagaggtatgtttacttgccccatccttcgacagattggttccctttgagaaatttaatttttatgatatcactcttgcttcgttgttcattagtactggtttatgcgtgtttaataggtgctctgtaagtcatatccatctgagtttgtctcatattttcactactgtcgttctttgcggtttgaagataaacccgattattcctatctgaagaggcttttccgagacttgtttataagagaaggttagttatcatcattgtggttatgcattctgtcactctttcgcacacataaaaaaaaaaccagtactaatgaacaacgaagcaagagtgatatcataaaaattaaatttctcaaagggaaccaaatctgnnnnaaggggggg

SEQ ID NO: 1785 - DNA, 462 bp, Gossypium hirsutum
  misc_feature (455)..(455): n is a, c, g, or t
ctgtgcctctacatatacataattcatgccaactgatctgccggtccttcctcgaatcttgaattgcataaatcaaccgagttaaatccggtgtgtcctcgtcctataaactttcgtttagagttttcctatggagcctgcgaatcagcatccggaaccaagagatgagatcgaagagggtgaaatcggtgtcttcggtgccgaaaaatacttcaacatggagctcgatgatggtgagtgtcccaagctttatgacaagtattcgaaccaaatcgatcttcatcatatgactcttagtgcaagttcagaaaccagttggaacatccaatctgtttcgttaccgaattttacaaggagtcgatccgaaaacaggcgaaccaaggtcgatggaaggagctttttctccagtcttggtagcagcgggtcctcttcagatgggaaatctgtttaaaaanctgttta

SEQ ID NO: 1786 - DNA, 550 bp, Gossypium hirsutum
actgcatgagtgtccacttgctgaagtttcaaacaaaagctgaataagaaaacatttgtaatgaaagacaacttcttagtcaagcaaactctaaaaagtttcttcacttattaacccttatttattagttaagctctcctattagaaaggcattaaactctgcatattagaagtgcaaaagttcagtttaaaatcttccaatcaatttcatacacatgtacccattataattgtataataataatattcatctaaacatgattagattcaataagagataaaacataccccgtaacagaattgcacagacaaaacaggaatacatcacggaataactttgaccaccaagataagtctagaaaatatataaaacatatatttttccacatgaacaccatatctaatacaaaatatgttatgtcctatacataatgatttgtcatatatctacttatgcaggtcacttgatttttcatgtttataagagttacttagcctttcaaaaatttaggcctgtctgcatttagaaactatttccatttgtcatctc

SEQ ID NO: 1787 - DNA, 557 bp, Gossypium hirsutum
  misc_feature (25)..(27): n is a, c, g, or t
  misc_feature (535)..(538): n is a, c, g, or t
  misc_feature (545)..(550): n is a, c, g, or t
gaacaatacgaacatccagatcacnnntgaactaatagtgacatgtaaagaacatgctaaaatcaaacaactggttatgtttgtctaagccacaggtatgcagcaaaacagattaaatagtcttttatttacaaaacgaaattgattacctatctatctatgaagacaaccgacatttttgcaaacatgaacttatagatgccttaacatataacatctactttgataaaccaagttcaaaaaaatgattagatactcaacttctttccaggactctaaatccatgcatttttcctaagattcttataattgtttctattgatgaagtttcacatttgagtaaagagacaaattaaacagaactctaaattcaattctcatctaaaaagaaaggatagcaatttattggttcaaacatgaactaaactgaaattaaacagcaactggcaatggaaatctctttttttttctttttactttataatcaaacagtaaattaacgcaaactcaaatcccaatctcctgtaaatcctannnntcatcgnnnnnnaaaaaaa

SEQ ID NO: 1788 - DNA, 579 bp, Gossypium hirsutum
aaattcagaaaaaaaaaataagacttcgagaattcaaaagcattttctctgaatgatgaaatcacaaaaaagcaacaagaaagcagaagttttacgtttttgaactgagcagaggttaagaaatttaaaatattctctttggtcctttcttgttaaaactagtaaaataggttgaaaatagggtagcagggggtgatgtatgcaagaaagactaccaactaaattagatggcaactttggtctcgataactgcttatgtccatcaataggttttccctaaaagctcattagtaaggggatttactggagctgaaaatgtccttttatcattcaggatgaaggagccagaagaatgaaaacaggtatgtgtgcacaaaggggcatttgcaaagtgaaatccagataaatgtacttacatgccattcttgggcttaaggcatacatgaagactgtcatgaaataataaaaaattgctatatgttgagcaagaaaccggtcaaaccaccaagaattcccacccaattcctgaaaccaaatatgataagaaaagtcatcgattgaggcacaatatacaagaac

SEQ ID NO: 1789 - DNA, 611 bp, Gossypium hirsutum
atactcaaaaaatgggtaaattagtccctatacattaaatcagtggacaaactgatcatttatgttaaaatttcattcatttctacaattaaaaattatcacacctgaagaaataatcagacagttacacatggcgtggacatgtaccttatgctgatatacagagatcagtttttaaccgtaaaaatagatggaattgttaaaagaaggatcaacttgctctttgatttatcgtactaagaactaatttgcccgatatttagtaaagggggcaaagtgcaatataagggcctcctggtacttttaccatgtatgtattgtatgcatgcatgcatacatgatgcatgtacatatgtatggaagctctaaatgctaatgctattaggaggctgtcctaaaaaaggtcatgactatgacattggtaatctcatgccatgcagcagatcccacaattttatgtatgtgtgtggtggggaagggagggctatataccagttgtcgttgtcttgagcaagaaaaagtacgtatatcccacagtaggggacaagatatagaagacggttgttctttttaaaaagaaaaaatttgaaacgcataattagatggagaag

SEQ ID NO: 1790 - DNA, 663 bp, Gossypium hirsutum
gatgaagttagttgagtgcaagctactcaaaccaccaacttgaggcttataagccttaggttggtagttcaagcccccctcacgcattatttacataatcacgctcacaccctatactaatacttctcctgagttttataggtctgtgaactggacacagttctttgtggagactggggacaaaaccccaacacggggacaataccttcagttgttgggggtccggttgactgcccgacagacgacacttcgaagacttctcctgaaagagttgacccacccttattctataacaaggctcaacaaactgtaatgtgtaaacagaaaggaaagagaattattgaaaggttaaacaattaaaatttacttgaatggaaagtgaatgctttgtagctgaaagctctggcttttcttttattgcttcatcttcaatatcatcctccaaggctttagaattgacaatggcatttttaacttcaattaccttgtcatttgatttttgcatttgacaatcactttctaacccgacagtcacatcctttatcacaggctctgtaaaattatcataaaagactttacaggcaacataaaatatgactcgcaccaacaaagacccgactgtcaaaaccaatctgcagcagggtatatagtgctcccaaattg

SEQ ID NO: 1791 - DNA, 508 bp, Gossypium hirsutum
ctttggtacaaataaatttatcagtaaatgcatgacaaatattttaatagaaagaaaggggatgcacgtagtcactacgtacgagttctttttcaatgcattgaaactaattgtacgcagttaaatctctacgtatgagttcactaaaagggtacttaaaacttatgcatttgactatatccttatagcattggcttcttaactgacttaggaaattatttcttatgagctaggaatatagaaacataccaccaacagtatcagggtgaagctagaaaatttattgaggggacaaaactaaattgtaacttttatgataataaaaatataattttatcattttaataatttatatatttataattttttaaaaatgaaatacaaatatttgataattaaatttatcattatgtcaaaataaattgttgaataactaattgagcccggctgtgatggggactaggataccagttccttgtgtttttgccgtctaacaatctttaagaca

SEQ ID NO: 1792 - DNA, 653 bp, Gossypium hirsutum
tgcactctatcctgaaggccggcaacaattccgagctccttctctgcgctgaggatgaggttgggtctgacttttactttaatcaaatgtcggaccttgtaaaaatcaagcaggcagctaagggcagcgcatacaatagcactggaccctgaaagtccggcctgaaaaatcataaagcattagccatacatcgctgaagaattaaataagaacattacacaaacagagagaaatcaaaaaggaattgaacaatccaaactgcatacatatttgtgttagaataactacaataaaccgtgtatttcaatgcgtgagaaaaatgagtgacaaaccgatgacaacaacaatgacatatattaagtaactaaaagaacattatgagttcgattcttgtattttctgttcagagcaatacctggcgagggatattagtatcatacgagagggtgaagttccctggtgagagatttatgttattatccttgcaatgcttatgaaagagtttacaaattgacataagcagtcgcacacctccataataaccttcactttgcaaccgattaaccttccaagtaaaaaaatccgtgtttcagcccatttatgtcgaacatgcaatgtagatatctatacctatgaatgcaagtagaaccaga

SEQ ID NO: 1793 - DNA, 648 bp, Gossypium hirsutum
  misc_feature (564)..(564): n is a, c, g, or t
  misc_feature (628)..(632): n is a, c, g, or t
  misc_feature (634)..(638): n is a, c, g, or t
gggggctgggttggcaatgtcacctggagatattgcattcaaggtgtgtaacctgctctagctctggtttcgttctttttcctttgtttattgtctgcactagttcttacactgtttgctgatactatttctgtagtggaccgtctattgagcatggcttatgttgatatcttgataatatccaaacagatttatgattctcaaatataacatattagctgtgagtttaatgtagatattagcttgatatgaatgaggaaaattttggtcattagctgttttttcattttaatttaatgttaaacttaggttaacaatcgtgcctgagattgtaaactttaatattcttttatctttctgaaaaatgattaaacttagtgcctttctccttaccagatatgatctatcttctcacttgatcacttactttaggggaacgattttcttaaagatcttcctgctgtttttcgcaacaagttaacattttatagttccataattttcttcataacttgatattttattgtaaatggttacctaatccaatatttcaattgtctccanccaaattttgcgaccttggatgacaaaactggcatacttacaagtaagagagctgacaggcatnnnnnannnnnagagctgaca

SEQ ID NO: 1794 - DNA, 651 bp, Gossypium hirsutum
ttttcgtcgagctgttgctcagaatctgaaatatactccaacataaccgaacgaccattaataaaaagtttgggaactcaaaagtgccattaataaaattgatataataggtagtttgggcaatttttattgttgttaaaagggatgaaaacttggctttcaagaaagcttaaaacacttacatgaagaaaaacactaataggatgacgtccgcagatcgtgttgtcgtactcagataaatattgtttgaatgcatctgcatctccagtttctattatatccatacccatcttgtctagcgcctcaattgatttgtgtatggccccgtacttcttgtcatagtacatataattgaacctggcacaaaaagcaaatattacttggactggggtgcaagtgtcggatgcatgtgggtatggttagatttttctaggttttttcatgtatttggaggatccttggaggtaatatccccatatctatgtgtaaggcatgagtgtccgatacaggtacttcaggaaaaaagaagggccagaacaacctaggtttgcaacacaatgtagaaaaccataaccgatattggtctatactccatatccatccaaacattgattaacttcggctagggcgaatcatagaatagaaactgga

SEQ ID NO: 1795 - DNA, 337 bp, Gossypium hirsutum
agcatataacagttaattttttaaatttttaatgaaatagaatcacgttattttttaattttttagttctttttaaaatttcactgggaattcttgaattcatttccaatccaagtttcgatcaacaggtatcctcttcattttttttcctcatgggaatatggcttccctatcttcttgattgaataatggttttctctagggtttttttagtaagcataagttgattaatttttccctcttgttagctcttggattgttgagttattgataaattctactgggttttttctcaatcttgtgaaatctagttgtttggctttagctattgattttc

SEQ ID NO: 1796 - DNA, 641 bp, Gossypium hirsutum
ttggtcattacaaggatatagaagaacttaccatggggaagccaagatgataaagtccaagcccagtaaaagtcacgtatggaacaacagacagagggctaagaaatctgtagaagagataaagtagtgaggatgatatatgccaaacaatacaagaattaacctaaatactttgaagagctaacctcacagcatttctccataatcccaaaaatcctatcgtacactggaaaaatgcagcacctatgagtgcaccctgaatccctctcattgttcgaacgaacctctgtaaaatgatccaatttatatgaaattgaatttcaaggctcctaaagtaagaaggtaaaaagctagctgcacttttaagtaaggttactcgaactcgctgtatgtgttcaatacgggaacatatctacttgaagaagaaaattaagaggtggttaaaatgatgcagttgaaaagaacctcataaggatctgaataagaagtgtatctgcttgcttggataatggaagttacaggaatcaaataagcatatgaacccactactactatggggagtcgggttccgaaaaatgactggaaaagtgtgcttagccctgaaacaaagagtaagttctggatcactgctgccttctcat

SEQ ID NO: 1797 - DNA, 610 bp, Gossypium hirsutum
ccccttccagctggcctatgatgcttccaagttcagaatctgaaactggttggttatttttatcgcaatctcccacaagatcttttgccagattgacattctgggaaatagtttctaaaatctgttttgcatttttcggggttttctcagtatacttcaactccattatcactggaaaaactcgataaaggtagcatccagcttcaaagaaactctcctgctctacttctatgcactctactgattctgtgactactgtaatatcagccaacaaggattcaaaaagaccagcaaaggcagtgttgactatctgaaaaaggaaaaaaagatcaaaagaattgagatgttggatcagtaatgatttcttcaagctataagccaagatataagtattttctttttcttgtaattcagaaaataaggccaatatgcatagtccaggatacaatcaaagcattgctcatgacttgaagatgaatttgcttgtttgacaaaaatagaaacagatggtgatcactttggtgatttcatttgtctcatatgaacaaatctcagctatataatcatatctatttatctaaaagcatgggatgcttgaaggttcaccagg

SEQ ID NO: 1798 - DNA, 649 bp, Gossypium hirsutum
gaactatagcttttgcattgcattgccaaaatgtgccagagggatcggtatagtatctgcaaaacccaagttttaaacaagtaaacagaacagcatatatgcatgcctatcagaaactggcagcccaaattttgatttgcagttgctcagagccatattttaacctatattacttggacttggtaacgatttggacgtgttggatatgcagggtcggataccattcttcagataatggcagttcaataactatgcttcaaccaattacagttgtgataatctacgtttatccgacttgtaatttttccgataccatgggattatgattcactaaaaatattgagcatacccgttcagcacatcatctctaagtccgagtaacataggagataacattagatttagtgacatgacagaagagattttctcctacagaaggcaaggcaaagtaaaatcatcgcatacttacaagctaggcccattctcatcatgaccagcaatgagaagagataccccaaatggccgggactgtgaaggaaaacgttatacatgtgaatacgcaattcaaaagagatacagaatcctacattagatggcaaaagaaatataatacacaatgtatatgaatcatattgcgtatggccctctt

SEQ ID NO: 1799 - DNA, 660 bp, Gossypium hirsutum
gaatccagtcagccctgtgaaggatcctcaaaattcatatttgactaaaaactttcttgaatgtagccagctacaagagatatcaatagcacatcatggatcaagtgggaaattggataatatcaaatcaaatgaatatatagacataaaaattccccccgatatctattctaaaggcaagtttaagttctatcatgtgaaattgctatattagttgcttttggcttttcctaagttatcattaaattgcccctagagagacatagtcctaagcagagtgaaaagggttttctatcagataggaaatgagaagtactgttagcccctttaatgaaattcatcaataattgtttggtaatattctgaccagggctggattcagtagcaaaatccagttgtaatggcaataaatcctccaagaacactgaagtcggaaacttgcatcaggtttggctgttttccttctgcatccacaaatttctttttttgttgcatgtgctatttaacaacagctaattattcttgtataaagagtatgaacttgatggaggttttgtttgcttccattccagttgtaagccttaagaaagttgaaaagataggtaaaatatcagaaaagtatgtcgttatatgcagccatcaagtggcttaaactctttg

SEQ ID NO: 1800 - DNA, 644 bp, Gossypium hirsutum
ttcttttccttgacttcttaagtaaaatgccaagaatctattatgttaccatttggaaagtcttttatactagcatggagaaggtgaaagtttcttatgctaattttctttactgaacttgaattttgcatgaagtttacgtaattggttgttttattcaaattacctgaaggttgacctggttagaagaagtattcaaattagttttgaaaccattggcttttgaatatcataattaaaaaaaatagatgctgctctattttccctctgcacagctttctgttctcttgttggtaagtcgtattagtttgaagtttccaatgaaattgattctaaacgagctctgtaccaatgagcactgcttgagccatggctataattttttcctgacatttacaaactatattaagatacagcataatcgacttagaacaagtactttcaaataataacactcaagtttatatatcaaatctcagaaatctcagtcttataaacaaaaaccgaccagacattgaaataacataagttttattaagtcccaaaccctattaaagtgaaaaatagcacatataaccctaaaaccacaagtacttgagaaatggctcttcatctatgagaattgttgatctgttgcccttaaa

SEQ ID NO: 1801 - DNA, 654 bp, Gossypium hirsutum
gaaacctgttaatctgtagctattcaatccgatttgtgcttggactttctacaatcaggcaggccttagaaactgcgaaaaacctcagtgcagctggagttgtgttctacatggatccttacgtaattggttttcagcttaatcccacaccattggaaatacctggcatcataattccatccccagatgattcaaaggtgcatgttctacatatgtttcaatgtcttgattctttgtttttaattgaatattgggggggggggagatatttgaaattctttctaaaatatctgataaattgttaccagtgttagaatttggtctactctctcttcctctctcaaatgcaaccagagaatttactaatatattatgatcgtggtgaccagattttactccaatattacaattcatctttggaaagagatgggctttcaaggaaaattgttagatttggggcagttgcaagcatttcaggtggactgaaggcaaactacagcattactgctccaaaggttatgtattattcggccagaggaccaaatccaaaaaacagttctctagatgatgcagacataatgaaaccgaacttggttgcccctggaaatttgatatgggctgcctggagttctcttgggacaaattcagttgaaa

SEQ ID NO: 1802 - DNA, 650 bp, Gossypium hirsutum
tgatctagaatgattattaggttttcagttttcactgcatatatcatttagctaggggtaacctggtgttttgttaggtctgtcctttgccaaaacagaaacatgagaagtgaacaaaatattttaacgaaaatgcaactatgactatgtagatgcagttcttactttcttgggtcttttgcaagtcaccaaggaaacctttagcattaaagaggaagctttttgttttatttacctaagttgtttgattgagtaaaactatacttagtagtatacaatcatctctatattttatttctaggctaacgtataccctttcattatcaaacgagaatttggtgttctagttcaatcttgactactatgaacacaaagcactagaaatatctctggaaacttttttttttttgatttttaattttaacccccccgaatttttattttggggggaggggggaataagtgctttagggggaaactcaaaaaaaaaggattcgtgaaatgggaaatgatttaagggggggggccccaaggcatgggggtttttaagggccaaaggaaaaagggccccccggccttcttttacgggtgggccctaaaattttatttttgggaattttggtggattttaaaatttccccctttccccc

SEQ ID NO: 1803 - DNA, 653 bp, Gossypium hirsutum
atgagcagacccacccaacaatttgactaaagaaaaaacaaaccgagcccaaaacctagaccctactattgtcacatagagtcaaggaaaatgtcatgatatgaaaaaaaaccaaccaaccaacctgaagcatggtgaattgctttttgacaccttgaaactcaagttccagcacagtatcctgccatgaagtaaaaggataaattatagcaaaaagaaagattttaccacattaaagtgtctaaaatgatatgatataaaagttgaacagacgaaccttcaatgaatattgaccagggggagctatgtaagtgatttttcccattgcatcaggaggaagggcaacatgatgttgcatcaaactgttctcaaagacggtctgcatttgaattccaaagtatcaatataaagatcttataagaaataaaagaaaaaagtgaagtgacaaaattatcatcctatttcgtctgaagtatagatattcaagggccattttttactgttaaaagaattaaatcttgaaaaaatcattttattaatatttatattttataaataaaattttaaaaattaaatgaacaataattatagaggccaaattgaaaaagaaaatccatccccattcgagccaggctaggcagataaattctaaa

SEQ ID NO: 1804 - DNA, 631 bp, Gossypium hirsutum
tatgattatgaacataccagcaagccttctttcaaggctaacagtttagcagtttcaatggcttcttcactggatatctaagaagttacaacagcaagagaagtataaatatgtggaataggaaactaccatgcatcatataggattaacaatgggtcaggtgattgatgcttgccatggtgaataaaatgggttcttaggaggaaaaagaattctatcattgtgaccgacatggaagttctttaatttttcaaaaatcaaagccattgcagagtttcattgaacagtatgtaggaaactacaacggcatcataaaggataatcaatggatcagatgattgatgctcgatatggcgaatgaaatcagttcatataaggaaaaagaataccattatcgaaatttgttgatttttcagaaataaaaccaatggcaatgtttcctagaactgtttctgagggaaaaaagaacattcagaaacttcgacaaacgaatttgaatgcaatgctattgagacttacctggacaacttcatcaaggaggccaacatccaaaacatcagggatgataccagcaccaattccttggatcagatgagagcctttgacatgcaaagcacacgtaaatgtaacg

SEQ ID NO: 1805 - DNA, 603 bp, Gossypium hirsutum
tggcttctacgaaacttgagcggaaactcaattcatggggtcattccatcgtcacttggaacagtcaccagcttagaaaccttgtaagtgcagcataatttcttgtccttcttgaagacacttgtgattgtattaacatcttcatgcagaactttgaaataataatgtacatgcgtataaactgtgctacacttacaagattgtccctctatatgcaaccctttgtctgtttcctccgtgatggatattatttaacttgtttgttccttttcatttttaaagacaaacacattatagcgttcggaggagtttttccagggaaccaaaagttttctctattagaaattttactttccaaatgtgaatgtgctattgattaaaacaacttagaactcaatgtagacctttttagtatttgctgcatgagcatgcggtaggtttgatataaatcatcatatctaatgcgttgtagatcaacaatgcatccatttcagttgttagctgcattcttttcttttgatagccatcaaattctggatgcataatatttactttcttctcttaaaggacaatttgagcctgaataatatatgggttatgaaa

SEQ ID NO: 1806 - DNA, 758 bp, Gossypium hirsutum
aaggtgacgggcgatggcagataggggatgttgatagtggtgatggcaattgtgatgctgatggtgacggtgatggcaatagggatgttgatagtggtgatggtaattgtgacgctgatgatgatggcaatggtgatgctgaaggtgacggtgatggcaatagggatgttgatagtggtgatggcaattgtgatgctgatggtgacggtgatggcaatagggatgttgatagtggtgatgacaattgtgatgctgatggtgatcgcaatggtgatgctgatggtgacggtgacggcaatagggatgctgatagtggtgatggtgatggtgatggcaatgttgatttttctgcacctactttatctttcaacaactcggaatgtagcctccctaaaggcgatgatggcaatgctgcattcagtgagctctttgctttatcaccagaagcattgcttgaattcaaatggggaacctctgatgtttttctcactggggaattgccctttgcttctttcttctgtttctcaacagcagcaaccttcttttggttcaatgagttctgaacatggacttgaaccttcggaagcatatctgactcgagccgcttcacatctacaggattcgatttcccaaccgcttgaacccgaagaggcaacaaaagtgatgacgaataagaggatttcggcgaaccattcatcaattcaggcaggacagaagttggtgtcaccggagaagggctactcgagccatactccgaa

SEQ ID NO: 1807 - DNA, 669 bp, Gossypium hirsutum
gtaacactgacacatggtgtttgggttttggcaagttcatataattgttttcttccatcagcttaaattttcttttgattgggtgaactttcttgtattttcttttttgcccaaaatattcttgtagttaatgatctcaagattggataaagtatcattaactttcttatttggaatgcattttgtgcttacaattaaatcacctctgaaagtgggaagtggttgttctaagaagagttattttcccatttgaatcttaaatgtaatttatgtattattctttttacaatatgtacacatgaatggagctaaaatattttaaagaaaacgtaaaaatacaattagtcttcccatctgtgatgcatttactatgaaattagaacgacagattccaaaagttgattgttttgctatttcttgatgtttcatgatactattgataggaacatgaatcggttaattcaatctttgggtttattttttgatagttactcctgtttacttcttaaaggacatttgtttgagtttgtttaaattctaactgcatatgttggacagatttatattgagggccttttccatggtaatttgttagaaaaagaagtagttgacatatcaaatatcttcaaaagcaacttttctgtacaaccgatgccagtcacaatgaga

SEQ ID NO: 1808 - DNA, 367 bp, Gossypium hirsutum
  misc_feature (340)..(341): n is a, c, g, or t
  misc_feature (354)..(356): n is a, c, g, or t
gtctatgttgcaggagggtgaaagtggagtagagtttattccttttttattcaattgacctaatatttgcttcacaagaaaggtatttttattcatgtaagcaattgctgaatgacacatttgtactctttattcctattttagcttccttttccagcttgcctttattcttttcttcggtaaacccgtttctgttcttgaacaggatacaaggttggtgcttcttaggtgataacttcgagtaccagagaagaaacttaattccgagtgcttttcattgttgatatggttatatagagtgacactcgtaggaaggttgtaaaatgggcttttgtttcannggaagaaaaactnnngattacctttt

SEQ ID NO: 1809 - DNA, 652 bp, Gossypium hirsutum
  misc_feature (621)..(637): n is a, c, g, or t
  misc_feature (642)..(642): n is a, c, g, or t
  misc_feature (644)..(646): n is a, c, g, or t
tgttagttagacttgggtgagagtgtcagaaaagggtttatgtccaagacgaatatgttcaatctatcccatagctatgtccagataatgcatcaaacatgaatacttcaaggaaaataaaagtaaagcaacatagtttcaacatcatacagcagatccaggacaatatttgcatccattaaaccaagaaaagaaatataaaatcagcactatgtacaattcaaacttaccttatcaatgcgtttagttgcctcttgctcatacttgttagaaggtgcaagcatttcatgggaagcagtttcagactggaaaaaattcaaataataaaggttaaatagcaccaaaatcagataaacattttttttaacaactaagcgaagaaataataaatctgaaattcacacctcgtttgatattttgttatccatttcagcaatcactgatacagatgcatgcagattgctattagcattaaaactttctccccacatgccaatctgttggatagggtcatagatatccatccgtcttgaaggaacaaactgagattccatgcttcttgaatcgaaaatggaggcagcttttgcataagttgaactggaaaaaggagtctgaaaggannnnnnnnnnnnnnnnnaattncnnncacctt

SEQ ID NO: 1810 - DNA, 394 bp, Gossypium hirsutum
attggaggaggagcaagtcacattctttgcaaaaaaatatccatgctgaagtttgggacaaaaggcttggacatttcaatcatgcaactattgtgaatttgcaaagaaaggaattggttcaaggtcttccttgccttgaatctaaaattctattttctagagcttgccaataatgaaaacaattgagacttccattcaagcaatcaaattggagagttattgaaaagttgtaattgatacacactgatgtggctggacctcacaacactccatctctcaatgaaagtagattcaaaataatgacgagggtaagtcaaaattttagcaatactgtacaaaagaaagcacttccagctgtgtcagctgatgtaatattttcttcgagtcggtttca

SEQ ID NO: 1811 - DNA, 624 bp, Gossypium hirsutum
aagcaaagaaattttaagttttttggctagcattgttgacagtccttatcttacccttttcttcaaaacaagcatgatatcagcttttcttttagttaccatattgactaacataaaacattaccaatggcacaatgcatgtttaagaggcatgagaggaaacatgtacattcatacgaaataaggatggcttcaaattttagcaacaaacaagtagtaaaacttacgaggcgcgaaaatcaaccccaacaggcttaggaagatgtatgaaactgcgagaatgcaaatcagtagcaaaaatagtctgcatggaaggccaataacatgttagtacaataatctgcctacactttcatcaaccaaatgcacttcaaagaaaatttacagagaaaaagaaacttttaacatcatacaaggccgcaaagtactgttctcataaacaagtacagcataaaacatacgtgcaagaaataaagttatgtacatcagtctgtacagagaacagcaattagtggcaataagcataacataaattcaaaattgcagtcaaattagaataaacaacataccatgagatactgaaacagcccatccaaattttgcggtttatgatgtacaccacca

SEQ ID NO: 1812 - DNA, 637 bp, Gossypium hirsutum
aaaaaccaaaagctgtagatttggtttgattagttatgataccgattatgagttttgaattgacaatggtggagagctttatataacttctctataatactaaattgtataatttggctagtatttcttgtataaaatgttgaaaaccttgtggtgtatatgcatctgatgtgttggactgagatctaactgccatggcagctttctatttatttctttgtttatctggtagcaattttgaatggttttcacatgctagtagttatgatattctcttttccatcccaataatgttgctattgaatctcggatccaattataaaggacttatcattgcagagtactcaaacaaaaacagcaacaacaaaactagacgtcagatatttagtgtaagaacatggaatcatgtatcctccattcctcacaaattctcttattgattatgtcttcatcaatgccgttgagtcctgttattctcattctgacttctttaattatttgcatgacctgcctgttgttaatctttcagtagaaaagagtcacttgtttctgtcttgccgaaggtgtggtatatggaggctgcttaagcaatttgcaagactacggaaataaaagttgtctttgagctggtgtatgg

SEQ ID NO: 1813 - DNA, 817 bp, Gossypium hirsutum
ctcgcgtcacatccaatgtcagctccagtaatccatccccaccacctgtctcctccactccaacgcctacaatacccccttcccagtccatatcttctcctttagcttcaacctcacccacttcacagatcatgtcacctagaaacgcatcacctatgcaactctaatccacccaacctgcaccgacaaacactcactccatgatcactaggagtaaagttggcattttcaaaccaaaggcttatctgagcatgacaccttcttcgaccggtgatgttccctctgacatctataccgcaatggcttttaaatgttggcgagtggcggttcacagtgagttgcaagccttgtctcgaaataatacatggtctttatgtcctcttcctgagaatcgacaagcaatcgttgcaactggttattcaaaattaaaaagaaggctgatggttccattgacaggtacaaagccagactagtagcaaaagggtattctcaacatgccggtcttgattttcatgacacttttagtccggttgttcgagcctccaccattcgcactattcttgcgttagctgttatgcaagagtgggttgtacatcaagttgatatcaacaatgccttccttaatggcgagctcactgaggaaatctatatggcacaacccactcttgcataacagctaacgcaagaatagtgcgaatggtggaggctcgaacaaccggactaaaagtgtcatgaaaatcaagaccggcatgttgagaatacccttttgctactagtctggctttgtacctgtcaatggaaccatcagccttctttt

SEQ ID NO: 1814 - DNA, 618 bp, Gossypium hirsutum
acatctcgaacagaaatgctagctttttcacaaggaacaaaacagcctacttgtgccattagaatgttaacaccaacctgaaaattcaaccaaatacctaacaaggaacaaatttttttataattggagtctagggggatgtctaacatgacagagcagaaaataactcccttgttgtttaattacataaaaatgaatgagagctatgtaataatcaaaatagcacctggcggatgaatgttgattttccacccccattatgacccgcgatgatcaggaaccacctcttgcctcttacctgttgcacatgaaaacataaagtaagcatgagtcactacaatttgaagacaccacaagatgattctagccgtggagcacactaatactcacaagtctacaatcatttggtataaaattaacccacccttgagcctccacacaaggatgtctacttccttctaaaacaatatcccccccatcctgttgtatcattaaaacaaccataatgtaaaggaatggaccttttgaaacatgaaataaaaaataacaatctcccaacagataaaaaaaaaaaaaaaggtgaaaatttttggggggagaaattctggggcttgtggg

SEQ ID NO: 1815 - DNA, 646 bp, Gossypium hirsutum
gcctctttcactgtgaggaagtggccgagcgatggtgcatcaacatcctcagcatcagtactatcccttgagcacaaggaaaatagcccaacttttgacctgttattgttgttgcttcttttttctctgggtgcttcggttttcctacctttgacagatcttttagacaattccaaaatgctagaaacaccaatgaggctcccaagtgtaacgctcttgtcatgaaaaaaggaccccgtcgactgaaatcgagcaattgaagagttaacgaaccagaaatggatgccttttgtatgaagtgtacaaatgatcatctaatacatcaatctacagaaatcactgctagattggtggaaaatcactagaagaaagatgcatagggttgttctttctcaaaagctatcaaacaggccaagtgtattttgctacagaagcagaaattttcatcccagaaccaaaccaaagcaatttagtatcctattacgtgcaatcttaatgaatctttaagaggttgtgcagagttttaggctccgttaggggctttaagtgacatgtttaagactgttattgaacaattgtacgatcagatagaaacttatcattacacgtttatacaatctgtaccaatctgttgacatagggatga

SEQ ID NO: 1816 - DNA, 649 bp, Gossypium hirsutum
cttctttgagtttcaggacatggaacacctgcaaatgagaaggtggcacataaaaagaaaattaatgtaagccaaaaccacaaacatgccgcattgatttatgtacaggaggtgcagatggggattaaggcataatagaatctgcttaaacatttttgtataccttgagagtatgcagatccaaaaagcaaatggaaggtgacggtatatccaatttgttgattttgttctcttctgactcaagagccgaatcatcaactacggctttcttcaaactcgagtcccggctgttattgcgcaaagttgagttcattccaattaaagcactcttaccatccatggaaatttccatgcaaccaacaccacccaaggaaggaagttgtgctcttgcaaccagaactccattgagagtgaatgtgctgagagttcgtttcgattggttccatgttaaaatgattccctcggatgaaaggcagacagcgtcagcttccacaccagcaagccgtctaatcaagcgaccccttcttatagaatgcaaaagaacatctgatgaaaagccacatgaaacaaccaaacatagatccgtactgacacagcaacaaagaatttccttgtggtgacctcgaaggacatgtatgggaccttctat

SEQ ID NO: 1817 - DNA, 340 bp, Gossypium hirsutum
gactggcaccagcagcggcagcggcagcggcagtggcagtggcagtggcagaagcaccagcaacatcaacagttccaagtgatgactttccgtccgacgaaatttctagagcaatactgtcatcagttgaatccttatgctcgtttgatgcgttacctatctctcctgcattagatataaaagcatatgcatgagaagaacccagaaaaaaatgataaaaaatttaccaaaagtttcaatataacaggagtgtgaaggaaagtatataccgccggagatgggcttcttattaatttgcttacgggagcataaagagaggaacaacaatgcagccatggct

SEQ ID NO: 1818 - DNA, 566 bp, Gossypium hirsutum
  misc_feature (186)..(186): n is a, c, g, or t
tcatgatggtctgttgatttgtaagagttgggaaagggggcatggttaactggtaatgttgtctaatattgttattaacttaatttttaaccactggtttgatataaaaaaacctatttaataatgaataataaaaaaccatccccttatttggatttaccaaattttggaaaaaaactatatatnttacccttacccaaacccttgaaaattcctggggttttcccccctatccaaaaaaagaatgaaaaccttttttgccccccccggccccataataatgatcttctttttttttttttaaattttttttttaatttttccaccaatattttttaaattttttttatttataattttcaaaaaaaatttttaaactgctgctttgaagaatgtttttatatttttttttttctttttttccccaacaaaatttttttcataaaaagtggtaaatgaaaaaaaatgttcaccaaaaaacttaatatggaaaattttttgaggaaaaagggggacaacctgctgctgtatcaaggagttttttcctcttattttgttcatggagg

SEQ ID NO: 1819 - DNA, 622 bp, Gossypium hirsutum
atgtgtgatcatttgaggcattaatttgctaggaattaatttcatgtacctgcagcgttaagagagttattcaaagcaaaacaaggaaaatatccttctgctgatatttcatctggagagttgatacgggctgttaggttgcaacagagtgaagaggactgtgtagttgatatgtgcacacagatagaggctggaaaatctaaggaaaatttgagtgaaggaatggaaaaggcaccttcagagcactcgagtctggtaggttttaatgatgctgccgatgaattctttgatgttccagaaccaacagactatgatcaatcaacagatgggtgggattctgactatgctcctgaagtatactctcaggtacaagtcaaagtaatttagcattgattcttacatgcaaactaagttgcagttagtggtgcttcatatctcagaggatgtgaccaactatagagtctctatttttcctattatgtttcttcgtatggctgtattactctagagtttttctctactaaaggttttgtgtgtgtatgttttgctcgaagtttctcacatgacatctatgtgactgaaatttacaggatacacgccaaacaaagttatcaactgctgc

SEQ ID NO: 1820 - DNA, 637 bp, Gossypium hirsutum
gcaaattgtcaatttcatgttctccaacatcatatgcaaaacgatgcttctcctcatcaactcaatcccagtgaaataattagatcaatagataaaagtgatctctgaaaaaaaaaaacaagtttcctcaaaagctcccaaaattgaattgtatgcccccttgcaacatcaagaggatgaaaagaatgaacaaattagacacacaaaattagggtcagcatcaagatgtgcttgatatatcacagggaaaagagacagcaatcgagatccctctccaagcagatcatgtcgctgatgatgatcctgggtttgtggatttgtttgtacgacacatgcaatcggggcacgggaaggtatatattgaatcaaccagctttttcagttcaaatccctttgaatcactatgagaccgcatattcagcatttgtctcttgaaacttttccacctggaataaaaagggaacataaactgaatccaacagttcttattcacaattatcacatcttagaagcattctaaaacaatccatgatgatatgtgtttcctcatagaacatacgaagaccccctagatttctagggacttctccaaaatgatcaaaattttaaaatatctctttgattttgtcccgggaaa

SEQ ID NO: 1821 - DNA, 411 bp, Gossypium hirsutum
acatccatgtactcaattagaactaatcattgtgaaccaattccaatttgaagagataattgcatggactaatccactccatatttattgaatctttgataaactgattaattatgttacctggactcgggtgagtaattgatactggcatatgcctgacaagtatatactttaaaattttttttaatattattttacttaattatgttaactggacttaggggtgagtaaggatatagtggcatatatccctataacattttcaaatatgtttcggacactagttccggaattggtactttagggaaaatgaagagtcctagtgacatagctgatcagtggaatgatagtcttatcctataaataaagatcaatactggtaacagtgccactaattgatctatcggatcg

SEQ ID NO: 1822 - DNA, 615 bp, Gossypium hirsutum
attggctagatccgaaatgtggagaatgtgtggatgtaattttgcccatttattgaaagatgtatagaataattcttgtatgctagataaaagaggtaattggtcttgtctattaaatatttttttttcatttttaccgttaaaattagtgtaaatgtcaaaataatcagacagttgcatgtacatgccacatgtacttcatgttgacgcacaaaatccaatttttaactataaaaatggaagaaatttgactaattttctcattttttaccgttgaccaagctacctaaaagccattaaatagttttgcatgatgcaacttctggacaaattagccttactcagtctgatcttgttgaagttggtctgcatgcagacaagaagcagagaagctgctcgagccatgcagttgcagctgaagttcacgctgctgttcattttttgttactttaagttaatgttttgttgcttggtttgatctgaactaagttggtaatatgtttgatgtaattaggtgctgatagattgataaatcagcttacctatgtgtgcaagttatgttttcataagtttcaaggctacttagtggaattaggttgatgattaggtggtgtc

SEQ ID NO: 1823 - DNA, 411 bp, Gossypium hirsutum
tttgaactgtatcctcttttatatatatttggggtaactactcctaaaagaatggctaaattgtctaatattagaaattagcttcctaaaattagttttgggattcatgcctctattctataaacccccccaagcccagcattgaaaggaaccacaataaaaaaggaaattgggacacacacataaagagaaacaagttttgagaatggccaccactaagacaacccttttgcttgctgttctgtgtcttttcctagtttgcgaggtactttattttaaggttttaaacagcaatttatgttgcaatccatcatgattttaagtaccaacacaaaactaatcatgccttttcttggcaattcttagattgggatgctaatggttgaagcccaagttcaaaggccaggtaaa

SEQ ID NO: 1824 - DNA, 642 bp, Gossypium hirsutum
aaatagtaacagatgagaaggctactactctgtcaactgcatctattgatgatgcagcagttatcaacgaactcatcttcaagctagaactttgcacaaaaaatttgcctcaaggattcaagatgaaacctattcagtttgaaaaggtttgtcgtatttcttggtctgattaacactcatgagaattggaacaaatgcgataatatcgattcatgaatttgcaggatgatgatacaaactaccacatggatctaatcgctgggcttgcaaacatgagggccaggaactacagcattcctgaggtggataagctcaaagccaagtttattgctgggagaatcatcccagcaattgccacctccacagccatggccaccggtcttgtctgcctagagctttacaaggctcttgatggaggccacaaagtagaggactatcgcaacacttttgcaaaccttgcactgcctctgttctccatggctgagccagttccacccaaagtcatcaaacacggtggcatgagctggactgtttgggaccgatggatcctgagagacaacccaactttgagagaactcatccaatggctgaaggataagggcttgaatgcctacagcatatcttaccgaagttgcttgcttg

SEQ ID NO: 1825 - DNA, 614 bp, Gossypium hirsutum
catggcactgttaaaagtattcggatagttaagtcatggtttgttaaaaatgaaaataaaataagaaaaaagcacatgaccatagatgaagaaaacacgtttaacacattacctctccgcatataaccaccaacggtgtaaatttgcatcacttcatctctgccatgaacttctcatactcagtatctgcaccataggttgttttctctccagaggatgctgccggagtcaaaagagggtttggagcccaagggacattactaaggctctgagaattatctgtggaagatgtaggtagtggaggagggggaggggggggaactgcattgtaataagaagagtaacctaaagaagatgtaggatatgcagattgtgaatttggaggcattgcagtcattgagttcccgtagatattagcaggcatagctggggcagacgtgctattttcagattgcactcctggtggaaaactttgtgctgtttcactagaagtcacaggtggaggtggaggtgcaacaccaggaggaaccgtctgcatttgtgggggatattgcaaaccataaggtggcataggctgaccatgaacaggaggataaatggttgagccaggatga

SEQ ID NO: 1826 - DNA, 646 bp, Gossypium hirsutum
catgccattaaaatgttaacagttcagtcagcttttccgtccaaaacaaaacagtttgactaaattttgaaagttgagggctaaagtgatccaaaaaaattcagggccaaattgacagaataagtaaatgtcaggggttaaatttgcatttatgccatatatattacaaggataaactgatacaacagtataatattctggttgtcctaatttcaaatttaaataaaataaaataaattaaccttctggtctgttttatcttttgatctgtcactagaatcggaagccacgatagcatttgtttgacctcttccaaactgcacaaaagggacgactactattattcattattcaccaagaagattatcctccaccacaaaagatgcccatgctgccctcacaacatatgagaatttgattattactcctcgatgaaaaaacaaaaaaaatcttctatcatcaataagatgagatgactactaaccccccaaacaaggaggttaattgttgctgctgatgtaagaattattcttctatgcttctcctcttcgtcgtctgctgatgactcatccctacgactgctgtctgctgtattgtagtcacctcccctcttcccaccacctgatgagaggggaggaatattctg

SEQ ID NO: 1827 - DNA, 656 bp, Gossypium hirsutum
atgatggccagcacctttaccccacactcaagtttcacatcttccgagtcatgttttactaaaatggacaagtcacctgtgcgatcctcatgaaggacggagtctggatggcccttgacatttaatctggaattcatgacatgttgtattgcagcaacagctttaaagattgagacatcaataaactggctatggagcaaaaaggccttgcggtctcgaataatcctctcctcttcggttttgcaaggaaggctggctaaaattgaaaaatctgtagcccatggccgaagatcatattcaccatttcttccctgacctccaccattaccaccccattcttcatcttctgatgggaaagaggggaagtttgctggacactcagcaacagggggagggacaagccatgtatttgcccgaaatccatagggaagattaccaaactggagggaaaaaaagcataagagcttgcagaattgcttttcgtgatgtcatggttcgcaaggtaaaataacctatgaagcaaattaagaaaatgtcaccttattgtgtcctacaaatgccttcataagggattcatatgcctgcatcaagcacaagcaagaataagttacaacataaaagacaaataaataagcgagagatgatagctacaacaa

SEQ ID NO: 1828 - DNA, 614 bp, Gossypium hirsutum
tgtataatttcagcccttccatttcattgtgaccgtctaaggttactgggaagttgtctaagctttaatgaattttgaatgattgaaaaagaagcaacataatgatatttcccggtgatcagtagttgggcgatagtagatagattagaggaggcccatatgttggctgtttgtaggaaaatgaatagcagaagcttagaactattcaggatgcaacttgactttgcatctcaagtcatagcattgtttgcgtttgaagtacatccaaggagattacaattctagagggggagctgctttcaatgaggaatcatctttctactcaggcagctttagttcatggtttagctgaagttaccatccttgattccttgacaactggtgcttacgaattggaagaggagaaagtatctggtgttaaaagtacaaagcttaataaaactgagaagtggtttatcaaatttgaggaaaaccttgaagttctattggcggaaaagagagtggatgaagctatggctgcattggatgaaggggaacaagtagcacaagaagataagactaaacagagcttaagtccagatgcactcctaagattgaagaatgccctcacttca

SEQ ID NO: 1829 - DNA, 610 bp, Gossypium hirsutum
atttttctttagtgttctcttatggctttcatcctttgttctgattttgttgattagatagcattttttttgctttgtctacatttcaatttactatttaaacctagatttatgaaatgtgtcaaaagcatgggctaatgcctacttgtaaactccacttgtttattcctgcactgtcatcatgtattagttgaaattactaccatcttaaataattagttatacagataatagaatatccgttaagcacatttactggtgtatagggaatgctttagaccacgtaacatgctaatgtggaacaagctgctggtttggctatgtcttgttttcatatttcctaataagaatgttgcaaaggcttaccctttttaaaagaaaaggggttaggatgatttgatattatgagtagttttacagtctcggccttcagaaactatgagattgatgccataaccttgagtgattaaatgcatgctttttttgagactaaagtaaaaatttgatgactagtgttgctaagaaaaaccaaactgctcaagtttgcttacaattttcctggtagaaacctgttcgtactattgttttaatccaaattctaaaaaatctg

SEQ ID NO: 1830 - DNA, 490 bp, Gossypium hirsutum
agggtacttattattattttgtttttgttcataggatactttttatttaaattcaattataaaatatattaatattaaagagaaacccttcaatcagattactggagaacatcaccaacactccggctccggcatcatcatcgaaatgacttaataaccagatacccgatgttagacaatatatgtcattatgagcataccatatgcaatagatttggtgcgataaagataagaaattgttggtcatagctaccacacaacacaattttagaactattactaacaataataaggctagtcattagacacttcaagatataaacatttcaatgccatgtacaaaacttgcatggctaatatctttagtccttttctagatttttcttttccttttcaaacttataactacatgtattctattcttctatgcagcttttaactcctttgcctctgacacttccttgagaaagtcaagactggtttgagtggt

SEQ ID NO: 1831 - DNA, 636 bp, Gossypium hirsutum
tctgaatctctagcttccaaaacatctctgcaatcaagaaaaagaattataaccatctggaactgcacatcaagaatagaaccatatcaagagttgcaagatatcagtactattgctttgggttgaacaaataaacaagaataacacatccaacaactgtttgaaaatcaattgtataaactcaaactctcaatgttgaagacgtagaagtcaaagcctaacctccaaaattcaaacataccaaaatctatacatgcgtcataagacctagtcttaagtccatgaaaaaataaagcccacataacacaaataaaagactaacaaaatagatcaagcaacaagtcattaatacatgaaatgctacttccaaacatactaaaacctatatataagcatcataagccccagttttaagtccacggggaaaaaagcccacctaaccaaataaagactaacaaaataaatcaaacaaagaagtccactgatacatgaaatcttacttcctaatttacttctagaataaacatgcttacaacatggaaggaagttcatcatccacaacataaccagaggtagcatatcataaccaatctaatataagatattcaacattctccacaattagcatgtgacaac

SEQ ID NO: 1832 - DNA, 602 bp, Gossypium hirsutum
  misc_feature (594)..(599): n is a, c, g, or t
aatatataaattgttctacagaaaattttctattgaaattgattaaccacaatatatcttatgggcgcatatatctaaggagtaggagatagagcaggagacaaatctaaaagaaatttttctcttctttctctctctctcaaatcaatttttactgagttgtgcacgaactgagagagaaccggggaacaaggggggaaaggaacctcctaactaattgcaaatcttacagtttacagactcttagaagccctatatgttttactcccgtgtaactcaatacttagatttaaccattaggcatataactattttaaggactaacaacacaggctagagttgaatagcaacaactaaatgcaatacgttgattgacactaaaactctgtcggtttgtcatagaaacagttctgcatgatcaaccatctatcaaaaatacattagaagccaagtaaaactcttgatagaaaaaataacaactaaacaaaatacagattgattgtaaactataatagcgatgctaaattacaaaaaaatcaaaatcgcaagaaagagagataccctgctcagcacatgtacccagctcctctccannnnnnaac

SEQ ID NO: 1833 - DNA, 341 bp, Gossypium hirsutum
  misc_feature (27)..(27): n is a, c, g, or t
  misc_feature (306)..(306): n is a, c, g, or t
agaggaacgatcttatgtctggaatanaagttgatgatcctaacataagtgcggcaaaacaattagatgctatcttcaccattgaagaagcaggggtcggcgatggtgaaaaagcatctgtttctcatctgggatttttacatggtggtgaacaggaagatgtctcatcatttgctgatacaccttgtagcaagcttgaaattagaactggtagttaaactctatcacgctcgagtgttccagtaaaactcatttttagtttcttcaaatgcttataaattttaacttaatgacagcaaaatttgntggtacaccttgtaactagctatttcttttctttt

SEQ ID NO: 1834 - DNA, 618 bp, Gossypium hirsutum
ctgttatggaaacagcaaatcttgcttattcttgaaggttatggcttgcatgaatttgttcttggaacgattcaagttccttcacaaactgttcttgataataatggtgttcctgttgctaaccctgtgtttgtttttcacaagcaacaagacaagttgttcacgtcttggctcttgtttactatttctgacaatattctgattcgtctcactggtgcgagcacaagttttgaggtttggagtgctgtcctcaagaggtttgcttctaaatcttctttgacagttttgacattacggcattctttatactctcagaaaaagggacagttaaccattcaagaatatcttgcgaaggttcaaagtcagtgtgattctcttcttactgctggttatgctatatctgagcaagaacaggttactgtcattcttgctggtttgccagtagaatatgaatccatacgtatagttgcatcagaaatgaatttttccatagatcgtctcactgaaatgttgactgattatgagactagacagcaagatcttgtttcgaatatgtctttgcaggctaatgtcgctcaacatactgaatctggtggtaatcgtgttaagcgctttgag

SEQ ID NO: 1835 - DNA, 600 bp, Gossypium hirsutum
  misc_feature (528)..(528): n is a, c, g, or t
ttaatttcttgggaaactaaaagtggatgtgatggtcatccacataattagctcttagttactatgttcttgttatttagaattgatttctattttctcttatctaggaattggttaggttcaaatagttggttttatcattttttggttccaaattggtatcctcctggatttggtagggatttatcactataaatacccccaaagtgtgggaaaaaaagcatctcacattttatcccccttcacacattttttatgagatcacgagactcctcaactctcaaaagagatataccctgggaacccccccctctctcccccctcaagggcacctatgtgtttgtggccaagacccactctcctacccacaacaccccttttgtgcaattatatgagagacacaacttctccctttggagagatcacgcgtgcacgcgctcgcgtgggcacaacccccagatcatcccgagggatctcaccggcgatgtggctaatctcaaggtccctgcttcattgtgacgagatcantcaaatcaaaatggtatgtgaacccttgcagaaccaaaaacaaagtgctatctgaacctttgctgatccaaa

SEQ ID NO: 1836 - DNA, 595 bp, Gossypium hirsutum
tatcaaccacagtgtgcaatccagtcatcatcatgcgttcttctttctctcccactgtgatattcacactgctatgcattaagaaagaaaataagtaatttgaaccactcatatctgcagattatgctatgatataagtaatgaagcatgccccaaggctttgaaatccatcatgagtattttgcatttgcctattccatggttcttcttgcaacaatgcatatacttcacttataatctagagatttgacaaactaagcagtcattaatgaagggaaatcatagaaaagtcatgaatgactaatttattttgagctgtctgcttgtcagtgtgttgtctagaatagcgggtagctgactggttcagattgttgacttcttagtgtttatttagtggaaataagatgatctgggtcatctttctttgtgcaaattgaaagaaaagagcatacataccacaatcaaaacctcacaaatacatagctctcactgattgcagaaaggagagaataaatacatagtaatatagtagaaaagaatagtgctagacaagactctacagactagagttggctttatacagtacgcaactgag

SEQ ID NO: 1837 - DNA, 620 bp, Gossypium hirsutum
agacttgatgctacatgttcgattatggtttcggcaatgaaagatgcctgaacctccccaggggctctcattgcagatctgctaggcaggtttgttttgcatatttttacatcaaaattcaaagcaccccaatcgtatcttttaagtgtctcgactacagtatgtgccatcattatactgatatcttggaatacacctgcatcgattaatatctcaagttttagggctgtaatcttcccactatctttgaatcctacagtgtatgttactttcatcggatgccttcctcctgccattatcatatcagtcttgcgattcagatatgtccgaactggtcgctgtaatttgtaagctgcaacagcgcaggctgcagcaacctatatgaaggaaataaatttcagtgatacgtataatagactagagatcagagactggttagcatgatgctatgcatttaactgcagttaatttcatgcaaagtacttcatcaaagcaaacatgaatggctctgattactctttcttctttgtaactaaataatgtccataaactcaaatatttagcttttacagtgaaataagaggtataataaattaaaaaagataatgatactcacagag

SEQ ID NO: 1838 - DNA, 641 bp, Gossypium hirsutum
aacacctgcctgtgatctgagtagtagtagtagtaccatgaagctcgtgtttgaggactgccatgaaaagagctacattttttaagcattgcatcatctttgcttatatgtgcagatcatggatgaagatgcagatttcccagtttctccaggttcattcgaggtcacattcatggtcggcagctgaatcccagaaatgaaaattccactgctgtttgcttacatcaaatctggaaggatcaacaaaagttgtgggtcggattccagattaactaacctataaatgatgaaatttcggtccatttttaaagcttcatgagtcaagtgaaaattatcatggttaagttaaagttattatgggtaaaatggtgatataacatactgcatcataactatttttaactagtttaaattgaataagagataaataataaatttttatattaatcataaattaaattaattaagtcataaattaaataattattttaattttagttaattaaattaacaagagataaataatatataaaagggtttaaatttcgtgcatcactccaagtaaaaagtttacatttcataagaattttttacttgagtgatttaccaatgttgttagaccttggactatattgaccggt

SEQ ID NO: 1839 - DNA, 359 bp, Gossypium hirsutum
tgtcacgttaagacaatgagataaaactttggaatgcagtaattatgatttaaaaccacaattattccattaatatacaatttgtttttctttcttggacactacaaatgagagtgattgcttcgataagtcaagaaaatggataactagttgtgacaacgaaatttggggttcaattagttggttaaatccaaagaaagttaatggacaccatgtccaacatatagtaagaaatatgtatattgttagatacaagtatgcttcctatgtttcatatttgaatattttattgatcaccgatatcagatacaatactctataaaataattcagttagcatgaataggttcaagtgcctca

SEQ ID NO: 1840 - DNA, 652 bp, Gossypium hirsutum
tctcaattaaactcaatggtgctcatcaccaacctacaaaaaaacatttgagatcgaaagcaccttgattttgccaacaaatctatcgtaccattagcatctctcccactttttctaaacagtacctcaggaatgaacatcttaatctcatcaatgcttgcaaaaatgtgccaatatttccgaggcctagatttctcattgatacaccaagtaagcacgactatggagtcggagtcaactatagtctttaatccactaggagttcaagaagaaatgaaaagctaacttaattgggccataatttcagcgaaattagaatcttggacgccttagggacctaaaacatagcaataaatgacctttcaaatttctaaaatacactccacaccccatcggccaaatttacctaatgttgaaccatcatctttaaactttaaccagccttcatttgaaggttcccaacgtgtcacactcttggtatgttgttacctttagtgcattaatcaacggccattgcttgcataatgaaatggataaagctagaagagttttcaacttgatgattgagaagggttgtgcacctgatatagttacttacagcaccatgatcaatggatattgcaaaggtaaaaggttagacgaagcaatggaa

SEQ ID NO: 1841 - DNA, 555 bp, Gossypium hirsutum
gaatgcagctgactagaacatagctttgcaaataaaaaaagattaaactccagagtcatccataaacaaatttataaaattccatcaccatcttctccagccgacacagtcataaaagcattgctttcacatcatgaaaagtatttttgacataggacagatatacgaatacatatttcaactttaaatctcacaccctgcctcccctcactcctttataaggttcaacctgttttgaaatgtaaaatgttgaacaaataaagtctcccaggaaataaaatgtgaacatgtatacaaaagcaaataatgatgacagagaggagttagttttctggtcatcataatatggaggccacatagatgatgcatttcctttaagactaagagactccgattgagaatcattgacaaatcttgaaggcagaaattttcagcttttatcgtgaaagcctctgatattgaaagagtatattttatctatctatttatctatatatacacacaactgaaaggaaaactcaaaagtctgattctaagaggttacagaagagaatc

SEQ ID NO: 1842 - DNA, 633 bp, Gossypium hirsutum
tttttaattttcaatttttcagccagtacatgacctattccagggagaacttttattggaagttgatccaagtactcatcaacctgcaaatgaaaagaacacagtggtcggcaccgaagaatttattgaagatatatcagtttacagatattttcaaaaggattcttgcaatccaataaaaccaaaactatatatcactaagaagcgagtctaacatgttcagttcgatgccatctatcaattatagaaatttaaacatatagaataaagcatatccatgctgatactggaagttcaagtccacttatgaagctccaattagttttgcagatagagcttttctactggctacactgcttgatagagccttgagttgagcaataaaaaatatcgaacgcttatttggtatcattcaatcataacacaatcataacaatatatggcactcaatagctgcatctacaacagttaaacaaaccttacacgtgcattgcagtttacttcactgaggctagtgcttttcttgcaccttgcgcttaaggcaaaataaaggttctagtgccaagagtgcacctcactccctagacaacactggtttcacttttaaaattaagcacgggatagttagctttc

SEQ ID NO: 1843 - DNA, 622 bp, Gossypium hirsutum
acatcttggaactgcctgcttggattgtgttatattgcaaaccacttgccaactagcaattgacgctgttgctgatggcaaaccacttggatcagggaattgactcggggtaactcgtatcggagacccgcattcgtattccggattcatagtgcctttgatcttccagttctgaggtggaactaactctgttctattcaagtctggtggcattttgtagacttgcatgttgaaagatgatatagacttgctaggatccattaaaggaggcagaatggtcccgtttcgacagcaaaagggaattcttccaaggatcgagtcattggctcttgtgggaggcaggtcaacaatagttggccttctctcacaattcaatacctgcgaaaaatccatttctttgtagtgctgaccttgcctgccgaaaatgcagtctgttgtatcaacaacataagggtaagctcctctcatggcataaatgaattcctccctcatccaatcaaagctcaattgccatttatcaaggcgaccaagagggttatgaattgaaattgaaacctgagcccagtaattatcactatatgtccttatcacgtcatacatgattacaagatcaccttcttgc

SEQ ID NO: 1844 - DNA, 657 bp, Gossypium hirsutum
gaatttgggatcttgatgatattgtacaatttcttatgaaaagaaaggccgtttgaactctagtaaatcctccaaagatttgtcactggttctcctctcatgagattggattttgcctagttggctgttaggctctgttaactaatgtaatctcaattttaggatgggttcagtttgattaaatgttggtcctttctttatatctatcaaattcaaaagtggtagttaatttgggtatatcaatcgacttttcaagtttatgtgaaattgtgctgtggacagaccaagtgaaagaaactgagcaaatactaggataagctctaaaaaaggacaatgaagttagggggaattaaatgcaaatccaccagagaaaatcaaaagccttaggaactaataggaaattaatgaggaaaatgaaattaaaatagaaggattattagctgccattaagagcttatagatggtttttgaaatagtaagaggagagttaaataacttgaggagtgcatagacctgtgaatcatattgctgttacttttttgtttatctatgtgttgctcatatcaaatgtatttacagtggtcttttttttttctggggaaattgccttgttgccaatgaaacaggtgcttggggttgaaactccattttccaaaa

SEQ ID NO: 1845 - DNA, 642 bp, Gossypium hirsutum
tctgtaattactatcaagatttgatatttttaatagataatatatataataacactaaagaaccaaggtcaaagataaagggataaactggattcccatagcatgtaaattgaaagaatatagaaatgaaaacaaaaaattgaatttgctttactggtataaaattctacaaaatgttagttaaagtatacccttagcacctctatttagtaattttcgataaaaatcacatcctttaacaaagcgttctataaattcatatagcatttcagagcacttttcgaagttgacacaaatcctgccagttgccttaagttaggaggccagttcccttttctagatttgttttcccccagataatgataacacattgcagggtatatataatatccatgcatgtaaatatttaatcctaacaggagatttgtattctaagacttccataactttcttaagacctaaagacaacaaagtaataaatttcaagtctaacaaacagcacttgaaatacatataaaaaatagcccctggttactatcaatcctacatagaaaatataactgttgaaatgaatcttctaataggcacaaaaaggtaaaacggggcaaggtcatagaaaatgtcaaatgtctccttatgggc

SEQ ID NO: 1846 - DNA, 413 bp, Gossypium hirsutum
tgggtttgatgaagcctttaactacaaagaggaggcagacctagatgctgctttgaaaaggtcagtagatattttttttgtcaaaaagatgggtaaactagaccctaaacattagatcatagagaaaattggtcctttttattaaaagttccatccattctattgttaaaaactaacatagcggatagaatagttaaacacggacatgtggcgtgtcacgtctatcacacgttgacatacaaggatcagtttttaacaatagaaatattaaaaaaatttaatagaaggactaatttactttttgatctaatgtaaaggactaactttttattaaaggtggcaaaatgcaatatgacttttagtataagagtctctatgatacttggaaagcatattccataactgaaacaggc

SEQ ID NO: 1847 - DNA, 651 bp, Gossypium hirsutum
tctgaattatgataaagaaacgtatcaaagagagctggacttggataatgcaactgtgcaaataaaatatactgtggatggtgtagaattttccagagagcattttgcctctaatcccgaccaagtaatggtaacgaagatttctgggagcaagcctgggtctgtatcctttactgtatatctggacagcaagttagatcaccattgtaaaatgaacggtgaaagtcagattataatggaaggacattgcccagaaaagcgaatcccaccacaagtgtatgcagatgacaagcgaaagggtatccagttttctgctgttcttgatttaaagattagcaaggggaatggcatcgtacatattctagatgacagcaagttaagggttgaaggttctgattgggctattttccttctggtggcatcatcttcatttgatgggccattcaccaagccatcagattctaagaaggatcctacttcagattctctcaatgtcctgaagtcgattagtaatctgtcacatgttgatctttatgctcatcatttggatgactaccagaatctgttccgccgtgtctcactgcagttttcacaaagttcaagatttgttgtgtgcctcaagaaaaatcaagacggtagagttccaaacac

SEQ ID NO: 1848 - DNA, 638 bp, Gossypium hirsutum
tctctacattttaaccacatactaatataccaaaaccaaccataaatttatacaagttctggaagcagccaagcatcttcacaatgacaccatttatatcaaatattaaacatcctaataccattctctatttctcttccctccctcaaacccccccccaacaaccaaaaccccaaaataagatggagtttcatgtaaagaatcacaacagtagaccttatctacaatctatcttgtaacctctcatatgattggagaaaacattactaaaattcacatatcaaagataacagcaaggaaagagggcgacaatggaatcaattataagaagaaaaagccacctcaatgaatcctcttccaatcacattagggatggagcaagaaaagttaatacactcaagctcgtcttgctccttcaaatcatcactgtcatccatcaactcatgagtagcttcctgtaccagatacttcccttctactgcacagagcaacctgtaaaaggaaatccaagaatgtaggaatctcttgagcaaccatagaaggccaaaacaaaatataaagtaaactaaatcttattttatacacgctgctactgatcaattaaagccatggagcttgagggtcaagatgacacaaga

SEQ ID NO: 1849 - DNA, 617 bp, Gossypium hirsutum
agaaagaagatgcagtaggtaagtttgtttttctgtgtgttctgataatatctctttagagtttagcctacatgactaagatgcaagcctattctacattgtttgggttgcattaatttgagttaggcaatcaattaagctgtgttgcaaggaattgcttttacctcataaatgcatatttatgcagccaataaatgtgtattcaacaaccaatgttcctggaaaagttacttgatggccaaatcagagaattatcccttgtttattaaggatttaatgattctctgatgttcatcattcaagcatggcatgctatctagattatattactctgttgcaatttaagattatattttgttgttgcatttgggggctcatgacttgccttgatatcttcctcctgctataaattttgttttttacggaatgagtatgagcatggattaagcaaagagattctagtctattttcaatacaagaatctgctttgtacttaactgtgttcaggaaaacaggtcattttccaaatatcatgtgttccatacaagtttttaggtgtagaatataattattctaatcttaaaatttataaatgttatctatgggtttgggatgtg

SEQ ID NO: 1850 - DNA, 664 bp, Gossypium hirsutum
  misc_feature (659)..(661): n is a, c, g, or t
gaatcatatcaaatattaggcatccgaatctctggccgaggatctatgcacagatgtagattttgtcagcaacaagtaaaaagtgcacataaggagacactccgtagatattaagtcaaactaccatccaacttcataacctttattggtcatatggcacttgcaaagatattgatcaacataattgaccatctctagcatgaggaatctgataattccatttttaccaaaatattaaagcccaaacggaggggaggggaggtgttgcaattattttttttaaagcatgccatcaattgatatttatgtttagcaattctaacaacagtttaggacactatgaagaaaattttagccacagcctaatgaccaggcagtgctttaaaatatactaaaaatcttttggagagctcaaagtggcattaaggaagaaaccaggcatggaaagaaacaatagaatgtctggttacatattgtctagtagcacagatgaaggcacaagcaatcaacaaccactaattcagtgcaagaaaagccattcattctcccaacaattctacaaatatttctatctttctagtaggcattaactctacataatcggttaaaagacatctatagaaggaagtattcttagtctaaagtttatccaatgctannncca

SEQ ID NO: 1851 - DNA, 581 bp, Gossypium hirsutum
cggttgtcattttgctgcttttctctttcttttaaaacataatgcaaaacaaggaaaagtgtagacctataatttgtagttgagttaatttgtcttttcaattaggaacagaataaaaacaaaagagagacagagggagaggtagtgatgaataggaaattgaacattgatgccaaattagcaatgctactgtttctggtttttaagtttttagttctttagaaaatatggctttgcataagtttaatgaaacctatagggtagaaagtagtgtggaaacaatttagcccaggcattgaaacctgtgttttgacttttgagaggtttacctaatgaattgagtgctttccgtgactatcaccttatcttcctagcagttgaaaatcactgtttccaaaattagaattcaaggtggcccaagttgtcatctaatttagatcatgtgtggccgtaaaatttgagagagttttattgatgcctcaccaatattatgatgttaatattatgatgtatgagtctgttgtaaacttgtattgtttctcatatcctgttttacttcacgtagagaatttcaaacttcc

SEQ ID NO: 1852 - DNA, 616 bp, Gossypium hirsutum
tgggaagtgaacgaaagtcagctgtcatttctgaagagtcacgaaaattgactgcttttcacgaggctggccatgctcttgttgccatccatacggagggggcacttcctgttcacaaagcaacaatagtccctcgagggatggctcttggcatggtgtcccagttgcctgaggtggatcaaacaagcttctcccgaaaacagatgcttgctaggctcgatgttgcattgggtggttgggttgcagaagagctcatctttggagaaaacgaagttacttccggtccacgctctgatcttgagaatgcaactgaactggccagatccatggttacaaagtatggcatgagtaaagaagtgggacttgttacccattcttataatgatgatggtcggagcctaagcaccgagactagacatcttatagagaaagaagtgaagtacttactggagaaggcttataacaatgcaaaaaccatcctcactacccacagcaaagaacatcatgcacttgctaatgcattgctcgagcatgagacactcacaggagctcagattaatgctctgctagcgcaggttaactctcagcagcagcaacaagaacagcatcaagaggt

SEQ ID NO: 1853 - DNA, 661 bp, Gossypium hirsutum
  misc_feature (34)..(35): n is a, c, g, or t
cttttttatggactttccttacatcataatatcnngaaataaattatttatattattatttagaattacgagtcaattttcaactaaaaatttacgaaaatgtcattttataataaaaataaattatattattaaagtatattttaattttttattataaaataataaaaaatatgcatataaaagaagttgaatccatgtcaattttattcgcacaatcttaaatttatcacaaaattaaaattttattttaatttttattagctttatatattcataatattgttgattgatatgatgtgtacatttgtttatcttttgtttcgaaatattttagtaaggttttaaagtttttaagtaagatgtcattgtataaattataatttaaatactatggcaaaaagagaaaatatgttaaatacaatccttaaaatatattttgtttgatgctttcacttatttttaattttcagttcccaactccaaaaaatgttgtcagagtggttagtagcgtctccaatagtatacttacgattttctctctcagatccaacccatttttaccagagatgaatgtgcatgctatgctatcatcaaatcctaatcgcattgcctaccaagatacagaacagtaaatcaacctccctacatcatgttcaac

SEQ ID NO: 1854 - DNA, 592 bp, Gossypium hirsutum
gtcgtaatcctggtattcctcctcttgccgatcagcttttggagctttgtgactacttgctacatgagaattctgatagcttggctgaagctgaagcaggtataggggaagcttaatcgggtaacacatttaaaatcattcatcatctgaaagccaaaattccctcacagtagaactgctgcttctctgggtattaggggtttccaggctttcatgaaccatggtaatagagctttgcatatgtatagttgaaacctcgagtgctcgagtcgtttcaggcataaaaaagaacctagttcatataggattattatggttaagaaaaagggatgatgacaacctaggtgacatagccagtaaggacgtctagagatgaaagcttgtagtgaagcagatcccagttgaaagcattagccgttgaggactaaaagacccccaaggcagtcattcagaagagcttcatgtctgcatactgttggccaatagatgaatcattcccatgtaaatatgggacctatcaggcaattatcttgaagagctttcatcttttggcattaattatgttttacttgggggaagaatctgaagctgg

SEQ ID NO: 1855 - DNA, 654 bp, Gossypium hirsutum
ctatgcagataattaatctgtaattaaatgttatacagataaaatggagaataaattcgagcaggatatcattgaatttaaacatggaatttttgggttaatcaaagggaaagaaaaaagaaaattctcacccgtagtggggatttatcccacttactccagctccaagttcatgcatattagtctttccaacaagtatagcaccacaggatctgaggcgcataacacagcatgcatcaccagtgcacggtctaaatttgtgaagccactttgtacctcctagaagaatcaagagcaagatagggacaaaaaaataccactaagaaaagaaaacttatgtgcataaaagacatggtaagtggagaacttaggagacctgtggttggatatggataacaatctatttcatccttgatagcaatcaggactccatctagagcagatattggattccctacagaagagaacaatgagaaaaccatatgaatgtctaggcgatattgacagagggatattataaatcaaaaagatttgaaatcaaaatgaaagtccacttctcctatgttcaaaaatcaactgataacttgtttttctattagaccttcggccaagggtttaaaaattaaaccattgtgtagaatgcgtatgtccttg

SEQ ID NO: 1856 - DNA, 692 bp, Gossypium hirsutum
  misc_feature (648)..(650): n is a, c, g, or t
  misc_feature (655)..(655): n is a, c, g, or t
  misc_feature (675)..(689): n is a, c, g, or t
tcaagtgcatgtgtacatacgagctaagaaccgaatattagaagtttgttaccttgcagacatgaaagccatcccgaagaacacagccttgacagcttgcttctgcccggaatagtcaaataccaatggcagcatttcatgtaatgttaggaaggccatcaccccaccaactgaaaattttaaacataaatttagagtaggttttcactagatgataatatcagagagcacagtaaaccagattctttttttcccgaaccaaaatccaatacgaatgattgatggtacgacaaacctgatcctaacaagccctcgagaatttcgggacttaagctgctcgggaacagataagctcgggacttaagctgctcgggaacaaacctgatccaatacgaatgattgatgatactttaacttgcactctttagcatgaataaatattctttgatagaacaatgaattaataataaatatatcaatacagagcagggttttttgattatgaatcaacaatgcagatatgctctctctgcttcgtggactgctctcagtcattctgtaactttatgaactttgaacaatggatcaggaccagcatttgcaactccatgacaccatgatattaaaaatcatctagtgaaaacctannntaaanttatgtttaaaatttttcannnnnnnnnnnnnnngcc

SEQ ID NO: 1857 - DNA, 612 bp, Gossypium hirsutum
catgtcaaaccttagagaacaatccaatacacctgatttttgtacctttagtaaacacatggtggggaagttgctgattataaatctcagaaaaatgcatatctcttgtgcctgaataaattcttcttataactttagttagtatataaaacatacatttgtggggtttcactcttttttcttttttcctctttcttatgtaatcttttgtgcttactgtttttagttttaacatgcatcaaatataaacaagctacaactaaagattaatttagttgatcccatccgagtcttgaataataacggtattgttatcggtgtagaaagatgtgaatttgagtgttcttaattgataaagtttgatcaaagatgaattaaatatatctatatctttagagaaggcaatcgatctgcggatgcccttgctagaattgaaagtggtttttttcttcttttttttatttactttggaagtgcatatgtacccggcttttgatggctaatgcctaagggacattttgtctcgaacccattaatttttaatcaatttatgtctttcttttacctctaaaaaatataaaatgattaaccacgagagttaggtgagatggt

SEQ ID NO: 1858 - DNA, 508 bp, Gossypium hirsutum
tagcagctcgactgcctcggttaagagctgttgttttgcacagtcccatactttctggtttaagagtaatgtatcctgtaaagcgtacatattggtttgacatttataaggtaacagaaagctgtataagtttgcttctccagattattctgctaataaggatttatttatgtgaatattgcaaaaataatgtgttcttttttgggctgtttgtttgcagaatattgataaaattccacttgtcaattgtccggttcttatcattcatgtaagtatctgtaatcctgacagtctataagacttcatatattataaatttcataagcctaccacatgcaaacatatctctttatgtttgagccattatgttacttatattgttcttatcttttttacattgaattcttcataattataatggaacttaaagaattctcatttttcttttatttcttcaaagtccaaaattacttttgaacttttttaggttgaaacttgaaaggatacc

SEQ ID NO: 1859 - DNA, 624 bp, Gossypium hirsutum
  misc_feature (614)..(616): n is a, c, g, or t
  misc_feature (621)..(621): n is a, c, g, or t
cgagcagcatagcagctctctctatgcgtctcaatgtaggtgtagcagcatctgtagcagccaatgtactagcacgcccagaatttgtaacaatctaacacatcatatacaaatgctgagaattagtctcctataattttaaagcaaaatctattcaccaaaaattgttttaataattgagactctaggcttgaagttatgcatgtatgtcagagagaataaaaaatacataatataaccttttcagttcagtgaaactaatatcaaattttaaaaaaaaaacacatatatgcacaccaagtaacaaagaatcagaagatcctacgacagaaggaaagttaatctgaaagaaattctaataggtagaatacaatgttaaattctgccacttgtggctcaacatttttgtccctaagccatatgatgattgccagttctatgcaaattactttttcattggatatttgaggagtcatcacaagatgaataatgatacttcaaagactaatgaatcaataagtcaatgataaagaagttttaatctcctattgaagtaaaccaggttgtaaaccagcaactctgtaacactactgtttacagaaatcagggcaaannntgatnaaa

SEQ ID NO: 1860 - DNA, 581 bp, Gossypium hirsutum
  misc_feature (566)..(570): n is a, c, g, or t
tatgtttctcagatgtagggttaaaaactttaggtacttcaaactctatatcctgcttcttggaattaatagaatctcctagcagcttatacacatcaaccggttctgcaagctcttcatcctgaaaaatagtaatgggatggatggatggatggatataatgacagttactagccaaaaatctcttcttcttctttttttaagaaggaaactaaaggaagaaccagtagactactaaggaatttggatctaaacctcgagagtataaaataacaatgattaaaaatgtaaaacttgattaatttgaagcactattaaacttatatacagctccatctcaaatacagctaagaaagtagcgtagctcatttttataccttgaccagattgagaacaagtgaatctgtactacaagcatcaaaatgtacctcatgcacaggatagtcctgcccttgagatacgaaattgagctctttgactcagaaatttccaagtcagtgatatgacaataggatccttcacaagtgttactctcttagttgagaaacatttaccatcaagatgcnnnnntcttctataca

SEQ ID NO: 1861 - DNA, 666 bp, Gossypium hirsutum
ccctggcaggatttcccaaatccaaacagttttatcttgcccacatgtcgcaagaagagaacttgatgcattccaaggtacacttttcacttcattttaaattgaatattaatgcaagtggaaatcatgtctttaaaatatatatttgtgtttaaactaattaataataacacgttaaatatggactatattaaaataaaaaattagattctattgtaagtgaaacgaaatttaaattaataaagtaagcataataaaattagaatgtataaaatgctaaaataaaactttagttaaatgataaatttaagattttactaacttaattagtatgggttcaaatatcatcatatgcatatattaaaatattaaagtaccctcaaataatataatttattttaaatgtgaagagacattaaaatatttttctttaactgaattgagacttagttgatgggtgataccaacttagtaaaaggctttataaatagtatagatgtctatcttaaagagcaattattaataccaccctaacataactcaaaaatattgtttctatcaaataaaccttaatttattaacaatgcaattacttgtatatataaaaaataatacagaaaatcaactgaaaatgatgaatatataaatttcgtttgatgttacacg

SEQ ID NO: 1862 - DNA, 632 bp, Gossypium hirsutum
gagtattaagggaaggatgagcaaggatgctgtcagacatattagcagaagcagagattccaagctgaagtatttcgcctgtaatgattttctgccacctccttgtaatccttcatattcccctttctttctctctacagccgacttaccaactctcatatttgagtatgaatctgcacaccttcaacaattcctctttatatgacaccccagatcaaaccccttctttagccagcccctatagactggatactctctttgaaatgcgaagtcaatgtagaatcggaaatgtgaccatgtttaggcaaacagcagcagagaaaggattgaagatgaatatgtagttagtgattgcatagccctttcatcccaaagaatatgctccccaattgcatcacccaaaacccaatttctttaaaccaatagaaaggatgctttatcgcacgatgcgattcaagcaccactaagattctgcaatgcagtccagatcaggcaagtaaaggatgctcaagtttcaggtgagacgcaattactcttggactgacagccaggctcaacaattggctcacttagtgagacgcaattactcttggactgacagccaggctcaacaattggctcactttcttcag

SEQ ID NO: 1863 - DNA, 636 bp, Gossypium hirsutum
  misc_feature (534)..(542): n is a, c, g, or t
  misc_feature (544)..(547): n is a, c, g, or t
  misc_feature (549)..(549): n is a, c, g, or t
  misc_feature (551)..(551): n is a, c, g, or t
  misc_feature (557)..(561): n is a, c, g, or t
  misc_feature (576)..(589): n is a, c, g, or t
  misc_feature (598)..(599): n is a, c, g, or t
  misc_feature (606)..(606): n is a, c, g, or t
  misc_feature (608)..(629): n is a, c, g, or t
atcgatagtcgaataattttttatagtaaatttaggttgtacatttagtgtagggtgacaacaaatgtagaaagagaacaactatcacatctgctgccatttcaatcttggtatgtctgcttttgagttgctcttcttcatgaattattctccttaatagtttgcagtggaattgaaatctggcgcattgaaaacttccgccctgttccagttccaaagtcatcttatggcaaatttttcacaggggattcctatgttattttgaaggcaagtcttttctattttacatattgcttggttgtattagcaccaaaatttgaagcttgtggatttgttaataatatttttgatgcgatcgctaccatggagaaaaggatctgctgtggcttttatttataatctttgcaaggttgtaagcatttggctgttgttgttctttgcattggggttatttataaaaactgaatactcatatatttactagattatacttgtagtttgaggctttaagatgcaactaagtttttcttctcnnnnnnnnntnnnnantnttactnnnnntttttttttgggccnnnnnnnnnnnnnnaaaaagggnncctttgncnnnnnnnnnnnnnnnnnnnnnngaaaaaa

SEQ ID NO: 1864 - DNA, 680 bp, Gossypium hirsutum
  misc_feature (581)..(581): n is a, c, g, or t
  misc_feature (588)..(593): n is a, c, g, or t
  misc_feature (596)..(596): n is a, c, g, or t
  misc_feature (598)..(598): n is a, c, g, or t
  misc_feature (603)..(605): n is a, c, g, or t
  misc_feature (609)..(614): n is a, c, g, or t
  misc_feature (623)..(671): n is a, c, g, or t
  misc_feature (674)..(674): n is a, c, g, or t
gcaggtaggacaccacacaggcattcagcgatttcggacatagcaaattggttcagatgtgactcctcaaatacttggttggcattctctagggttactctttcaaagaggatgcagatgcccaggttgcttcgagtaaagaacccaagaagaaagagatgagtgctttagtgatcaaggatgacagtatgcccaagtatgcaagcattgtcgaaatgttcctaccactcttagttgctggttcctacttctcttatagatacctcactacagcctcatcaatggtgtaactgatttggtatgaccagaagtttctagatgaaccaccaagccaatttcaaaatgccttctattttttcctttataaactaatcctggtttataatatttgatagagttggaattttgctcagagatcagtccctacttatccctgatgcgaccatttcatgaagatagataatcttccatctcttttttttcctgataagggtaaataatctataatctactattattactaggtcattagtgtcattagacattcatattacccagcaggaaattactaacaaaaaaanaaaaaannnnnnttntnttttnnnttgnnnnnnccaaaaaannnnnnnnnnnnnnnnnnnnnnnnnnnnnnnnnnnnnnnnnnnnnnnnnggngggggg

SEQ ID NO: 1865 - DNA, 537 bp, Gossypium hirsutum
  misc_feature (297)..(297): n is a, c, g, or t
  misc_feature (383)..(383): n is a, c, g, or t
  misc_feature (401)..(401): n is a, c, g, or t
  misc_feature (424)..(424): n is a, c, g, or t
  misc_feature (448)..(448): n is a, c, g, or t
  misc_feature (450)..(451): n is a, c, g, or t
  misc_feature (453)..(453): n is a, c, g, or t
  misc_feature (489)..(489): n is a, c, g, or t
  misc_feature (494)..(495): n is a, c, g, or t
  misc_feature (511)..(511): n is a, c, g, or t
  misc_feature (531)..(533): n is a, c, g, or t
ctgtatctttcctttttgcttctttttcttcttctttttcctaacaaagtttgcataataatcacatagatcaacagactgaacataacattaacaagttaggctgcctgcatgatataaataatacaaccgtgacatcaagtttagaaaaaactgttaagttgagggcatcttaccccccttcttcatcagtgtttttaatttttcttttcttttcactaatatcttttcttgtcttgtcgtcttcatttaaattttctctactttccttggcttctggtggatgatgctgaatancatcttcttttttttgtgaagaagaaaatggagagccatcttcttcttctttttctaaatctgtcgcaccaccacctctcttgatnataagttgaccctgtganttcttttgttcctcatagccggncaatttattctttctcttgtagcntnnanattcctcatttccttttgtaggatgttcatcatccntgatnncctccactactactantgttgattcttcaaaaaatnnnaagc

SEQ ID NO: 1866 - DNA, 593 bp, Gossypium hirsutum
ggatgcatggctttatctgcaaagtgaaaagaggaaaaaggaaacgaaaaaaatctttggctatgagagaagtttgtaattattaaagatcatggaaaaggataaaatggtgctaccggctgttgcctaaaagctgtgcaatctaagaaagttgttggactgtatgttgatctcatggaaaggaagaatttcgatagttatccattgatacagcacgttccttttgatagttattaggttttatttgggaatcacattagctgctggattttcatctatataggtatatgatctaggagttaattctcccatgtttcagttttacaagagaataagctaaaaatcctggtttgtgctgtactggtggctttgggagatgttcggagccttctcttggcaaaatgacccccctccccctggcgcacacacgcaaagggaggatatgtaattcactgtgtgagattggagtaatagttcttttaccatgccccgtaagttcaacttatttcaatgatagatgctatcactgccttaattcattcacgaagtatctgcaataagtttactaaaacaaccccctcaccatctcccaa

SEQ ID NO: 1867 - DNA, 592 bp, Gossypium hirsutum
gaaagttgagacctgttcttaccaaacttcaataaaaaacccaaacttaggatgtaaggtaatggatcaacagaatgcaaaaaacatacaaataaggaagactgatttggttcaaaaacctcttgtttttttttctttacataaacggtttcaacattgtacattatacagagtaaccctaaacaagctgacataaagcaatggaaaacaatgaggaaggtatcgactatcttcacaagctacaaactcttttaatgtacatataatagcactaaaggcctttgtataatgaatgtggacttatatgacctaaaaaagatcagaaaatgaataataattaagaaaaaactataaacggcaagaaagaagaccctaaaaatcttccaaaagaaactaaattcatgagcaatgctatgattgacgatgtggactctgtatttccatagacggttgctttctttgcaacttcccttttagttgcctgatctttgcatctacacgtgctgtgaagccgatcttggtttcttgtcttgccttggatctctcccgagaccacatgccttggtcctcgacatctttcttgtaaaacttg

SEQ ID NO: 1868 - DNA, 671 bp, Gossypium hirsutum
  misc_feature (657)..(657): n is a, c, g, or t
agaaagaagaaaggggaatagaagagaagagaagaaatggtcatttttaacggtggaactgaaacagaagacaagggtttatgtattaaaaggaaaaggaacacgaaaagggggtttagtggctgagtttagactcagaagagcaaatgggtgccaggccttccattacatgggtttgggcttcttttcttttacggataaaatttgatagaccttgtactaataattaaattgcattttacttttttactcacaaattgggtaagtttatctttttacattaaattaaattataagtaagtcttttattaaaaaatttatcaatttttattattaaaaactgattatacgtgtcattttaacaaatagagactaatttttaataataagaatagatgaattttttaacaaaaggaccaattttttaatttaaggtgtaaaaatcaatttgtcaattttttgaatagaaaaaaaaatacactttaactacctttaaaaggacttccatgatatttttactttcttttaacctttttctcacactttctttttctggattcccaatttcccatcgtttctagagtttaaacaggaaaataaataattataactgcatttgaaactagtaagaagcggattgagtcttgatttagttgnggggcctggattaa

SEQ ID NO: 1869 - DNA, 669 bp, Gossypium hirsutum
ttttcatctctctctgtgtatttgtatgtatatgcttggatcatatgataaactgtttggttgtgttcagagacctgaaaatgatgaaggtgatgaccatgcaatggacaactcaagtttgttcaatcagtacttatggaagctattacttgatttggacttgaacaatataagggaagttttgatactttctttcattttacgagtatgcactaatctaaagcatcttgaaatcaatatacaggtaagtgaatgtatgtatatatgtttatatatatgccattgccaaagcactacaacagtgaataatgttttatccttcatttgtttgtattttttctagtgatcatatgaaatttgcaacaatatatactatgattggatgcgaatatttcacgaaatactgtgataattcaaatgttaaatgtcattgatttttgaataaaaagtaacagaatttaatgtttcataaaatgttcataattttttttaaattgttattttatgtccaaacatcaataaaattcaagaaattgaaatattattgttttcttcataatatctgtgacatttttaacaacgtatatagctgcatcagatatatatataatttggacagtatctagaatgaaattaaactatataaaggttgatacattagcgatgact

SEQ ID NO: 1870 - DNA, 569 bp, Gossypium hirsutum
  misc_feature (560)..(561): n is a, c, g, or t
atgctcaatggcaaatggaatgcatatttgaaagagaagcatgtcagctgggatctcagtaaatggatcagataccctgcaacaaacaaatcatttagtaagctaaaaataagtatacaaaagtaaatgaattaaaaaaaggatgtgcagctcttacgatatatcaagtgggaagatagatggtgccatcttcatagcaaacttgactggcaaaaataccagcatcacaatcaaacttccataaactgcaactgataacaagaccctccgagcatgcttgtttacaggatcatcaattaaatcacggaagggattgtagttcggatcagctgggtctcgaaggaagtacagaacaccattgcgtaaaacctgtttataacaaaaataatattatcagactcatgctacaatataacagcttatgataataattgctattatgggatggagaagaggattacccctcgaagaaggctgacaaagatgcttatttgtaacatatatacaattcctacaacccaatgaatcaatgagctagctaaaggtgagactgagaaganntgaactca

SEQ ID NO: 1871 - DNA, 612 bp, Gossypium hirsutum
ctattaggcatgataattttcaactactgaaaagtagtgtggaaaactagtcagaattgtgcctaccatccaattcgtgacgcatggcgagattcgtatctaccctctatcatcttatacttgaatgatttctctacctttatcctatttttcttgtaattattcagcagcatttgaattaaaaaagaattgtgggtgaaaaatgttgaacatttgtctcaactactgcactcaaaataatttagctattgtagtttttttaaatttgttgctgattttttggatttattgattatgaatcttttagttccttatttctagtcactgattgttgaattttttctctgagtattagttttccagttcaataaaaaatacactttccataaaaaattagttttactttattcttgcctttgtttttccttttttcctggaagttttcgcaaaagcttcaacaatttgatatcagaaccatcttcttaaagggacatatcattgagaggattttttttttcttttatggatttagaaaactctttcactgcacttactccacctattttcaatggggaaggctattatgtctgggtagtaaggatggaggttcat

SEQ ID NO: 1872 - DNA, 749 bp, Gossypium hirsutum
  misc_feature (295)..(295): n is a, c, g, or t
  misc_feature (476)..(476): n is a, c, g, or t
  misc_feature (490)..(490): n is a, c, g, or t
atttcgtttgcactacaaggtagccagagcttgccaatttttcactattaggcatgataattttcaactactgaaaagtagtgtggaaaactagtcagaattgtgcctaccatccaattcgtgacgcatggcgagattcgtatctaccctctatcatcttatacttgaatgatttctctacctttatcctatttttcttgtaattattcagcagcatttgaattaaaaaagaattgtgggtgaaaaatgttgaacatttgtctcaactactgcactcaaaataatttagctattntagtttttttaaatttgttgctgattttttggatttattgattatgaatcttttagttccttatttctagtcactgattgttgaattttttctctgagtattagttttccagttcaataaaaaatacactttccataaaaaattagttttactttattcttgcctttgtttttcctttttncctggaagttttcncaaaagcttcaacaatttgatatcagaaccatcttcttaaagggacatatcattgagaggattttttttttcttttatggatttagaaaactctttcactgcacttactccacctattttcaatggggaaggctattatgtctgggtagtaaggatggaggttcattggagacaaatgatcttagggaagctgttgaggaatactacgaagttcctccttgcctgcaaacccaaccatggtgcaacaaaagaatcataa

SEQ ID NO: 1873 - DNA, 670 bp, Gossypium hirsutum
  misc_feature (652)..(653): n is a, c, g, or t
tagcaatgggtacaataacagtggataattaactattaggacaaacttccagagaggaggttttgcaagctcaaagcttaatataattttaggcctacctcatcatctgcaggagatttctgttaaaggcatctctataaccttagtgttaccttgtctgttttatgctctgcctatccccttttaaaagtggaagaattagtggaatgaggtaaaagcttggattttggttgctgtaacagattgtcaaatcatatctatcttcagaaagttgtaatgctttcctttgtttttctcacttattcattccttctgcccttgtttttcccttctatcttatcactgtttgatgcttctcatttagtgataagatgtcaatataccaaaatttgcttggacatgacttcattatatcagttatgaatcttctgataaggagatttgcttaccttcttaaaccttagcagtatagtttgaattcttgtgccttagatcaaattgatgcttgtgttactccactgtacatgttaaagctacttccgtttctttttgatgtaggaggacagtgctaaaacaggaaaagttacatctgctggaatgtattttcttggcttccctgtctattgcttggattaacaaccaactcagtgannattaacaaccaactcag

SEQ ID NO: 1874 - DNA, 612 bp, Gossypium hirsutum
  misc_feature (552)..(556): n is a, c, g, or t
tgttcgatccgagatgcttggttttctctcatgttttcttgaacagccttgaaagaaaatgcagtatatcagtgtctatgtcaaacatcagggtgcataatagatttaatcatatgagatcaaatgcattataccaggtattattcctgcatcttgtcagttctcatgttttctctaagattgaccataggatagaaatgagaggactgaagcgcgtgctgtgcctctagaaatggtgccagatcaactgccagatcatttcccaactctttgaccgactctttgacaccttgaacttctggtggttgtagggggacttgaactcttttcatgacttcagatagcagtttctcaaatggcatgccagtcatcgactttgcatctttatcctgtaaaccgtctgctggaagttgactatatgaaacagtttcactttgtatgcctttgggcacggtgtggttactactccgaggttgaggttgagtaggaaatatcgggtttccaactgttggtatctggttgacaggtttttcctcatttgttgcattggcnnnnncagacaattgttttcctttgagaccaaatgaggaggttggcttaattgtggctgaa

SEQ ID NO: 1875 - DNA, 698 bp, Gossypium hirsutum
  misc_feature (670)..(671): n is a, c, g, or t
  misc_feature (676)..(676): n is a, c, g, or t
  misc_feature (678)..(693): n is a, c, g, or t
ataatctagcagagccttctttgcgtaaatatgatggactgcaccttgggaatgaaactctagatgatgcttccctcctaacagcgctagaagagaacatgcagtgggagcaagcacgcaactgggcaaggcagctggaggcgagtggcggaccttggaaatctatttttcaccaagttactgaaactcaggtgcactttcaactacatctctgcttgctgtgcaatacaatttaccaaggtttttaacttgtgcatttgaccatctgaattagatttctttgggttcaatactgtcacatccacactctagttggatgccctttttacagtatattgtttgctctaaaaaattagtttaataatcattccttagacaccagcaatcgtattatctattccctggagcattttattgaacacttgagttttattctcagcaataatttcatcggcatgctaacatctgttctgtctttgttcacatatactcaaactccttgcatatttcatctcttcacctgtatatcactgttctaccattgccaagtatcattggctctatacccaaattgttacagccaagagtttgggattgagtcaaggatgatggactgggaaatcattcaagctcattaaagggagcttgaaaccttagcgaaagacaaaanngaacngnnnnnnnnnnnnnnnncaaat

SEQ ID NO: 1876 - DNA, 608 bp, Gossypium hirsutum
cagaaaacacaaaaaccagaggtggaccggcgatcatcaatatcgaatccccaactcgcatcagaataaccttcaagaagaagctttgagtttcgagtaaaatgtaacccatagtctagtgccccttgtaagtatcttaaaattcatttgacagctttgaaatgcgcatctaaaggtttgtgcttatactaacaaaccttgttgacagaaaaggcaatgtctggtcttgttatgaccacatactgtaaggcacctataatgcttctgaataagtgttcatcctccatcgggcttccttcatgaacagactgccgacaggtggtcaccattgaggaaggagaagcttttaacgtttccatgaaagctctttgaagtaactccaagatgtacttcctctgattcaagaaaatacctctcggattatgtgtttcttcgatcccaagaaaatagttcaactggcctaagtccttaaaagaaaatgaacattaagatccttgacaaagtgattaatggcaagagagtccgtgccagtgactattatttcatcgacatatactaaaacatagagaagctgagaccctactcgccgaatgaagagagaattatag

SEQ ID NO: 1877 - DNA, 653 bp, Gossypium hirsutum
acatacacgtttaaaccatccccatctggtaccgtattcccatctacctgattaagttaaagaagtttacagcatcgaaattatcaaatccaatatgtatacttgttgaggggaggttgctctttaggccggtttcagacctcaacggtggaggtattatactcagaaagtctattatcgattatccccgggtttttgtctcttgtagtccgaagcgaaccccaaaagttcacagaacttaggagcatctccccaccaaggaaatatttagcatttggctttggtggctaaatgttaaacatttccttggtggctagacactttctaaactttgtgaatctcttttgtttcttctcgaatttcagaagataaaacttgaagataatcaagaacaaacatctagagtacaataccttcaccattgaggattcaagactggcccagagagcaatctcccttgaacaatattgaaatggcatttaatattctcactggtaatgtatgcatttcaaattccactcattcaggcaatcttgtcgggacaccagtagaaatttcctccaaaatagaaggacgaggaagatcatagaattccaataaaccctaaaagtaaattagaacacaaaaagcatcattgcactagcattgacatc

SEQ ID NO: 1878 - DNA, 616 bp, Gossypium hirsutum
atttatccctgttatgagttctgtttatatcctaaactttctgcattattggcctgactgcacagtgtcttaaggatcctattgtttaaagatttcacaagtttttcgtgcatttttctaatttgcatatgtaaaacataactcaataagaattgaccactaggatgctgttgccttgaagctccacttatttacagtacatagtatgattaaatggctgatattgctagatacttccatacattctttcacagatctcaatggaagtacatactttaccatttcactactatggttaattaaacattgatgtcatactggtgctttggtctacatgtgtagaaaaatgtgattgcctcctgtgaatattttgcatttatctgttctctcttctcttggctcttttagctggaaacttcaattcatggttccaagaccagatttatttcttgtatttgttaaaaaaatactagacacagggtttctcttttcctctgtattaattgatatttgtacctttttaatcttgtcaatctagttcttaactgtaactctcatcatatttgtgttttgcagtgggccttgatgacaactctggatccatcatattgtttgg

SEQ ID NO: 1879 - DNA, 609 bp, Gossypium hirsutum
ctaagcagattttgatcaatatcaggtacatataaaacatcagtaatgaacttggtacctgaacaacttgtaatggttatagtgccctttcctttgactgcaatgtagtcaccgtttccaattctgacctttttggactcgataatcttcaattctttgaacaactctttgtcatgtgtcatatgattagtgcaaccactgtcaatgggccagctttcacttgcttcgtgactagtgaaacaagttgcaacaaaaagttgatcttcttcttcttgatttgccacttgcgtttcatctccttgttgctaatttttgtacttacaaataacagcttcatgtcccatttgattacacttactgaactttgcatctggtcctctccagcacttagggtgacttttcttgccacagtgttgacatggaggataatccttttttactcctgatcttctattttcagttttagtttttttctcaaatgtagagctttctccactcacagtgtgaaactatttgttctttgacctcctattgtttccatcatcttgatgcttaactggtagagcactttcgacagccctttcttgccttattacatgccttttgctc

SEQ ID NO: 1880 - DNA, 630 bp, Gossypium hirsutum
aacccggaaaaagaaaggtgagaaggggactgaagggaggcaacgaatacactagagaagaggagaagtttagaaaggagtgaaggaaggggaggagaaaaggagagtagagctcccaatgtaaccaaaaacttacaaacagatgttggggaccaatgactgaaattaactgaagatgaaagcaacaataagggacttgatctgttcacatggacgtctaggagagaaaaaacatagaaaggtatgttacgaaaaaagacatagacaaagaagaagagagcagaaagaacaaagatcaatttgcatgcaaaatttcccgttgctaatgttgttatatgaaagatttttatgtgttaaaagaatatatgaacaaatgctcaccccattagtcttactctttgaattatgggccatgccactccatttgcagaaccttgaacatagagtgagatttcacctaagggaagctaacttaaacatttttaagcccgtaacacactatttctaacagctacctgaaaccatagcactaaaatcaataattaccataatcaaacaatgctacctacatcattgcccaaacatagcacaaattcaggaacacgatccatgtctggagtgtactggtca

SEQ ID NO: 1881 - DNA, 591 bp, Gossypium hirsutum
aacctaaagagaaaagagaagaataggtacacactcaaaatatgttgaggtgcgttcctgtttgtcattttaatatcctactatgtatataaaaatccaatatataccttttaacaaaattctagaacacatatatagacagacatgcaccaaaaatataaacatggaaagaagagaaatagcagagcatcatacccaacatagttctggcacaaattttcatgtgatgtagcttggagaattaacttttgaacttgcaattttacggacaaaccatgttccacttctcggttatctccagaagttaatgtgctgtgatcgactacgttttgcatggaacatgcaggtattgatgagcatgaagatgaaaaatcacgtccagtcagtttgttactcatgcgagccataaccaccacagcccgctcattcaatacctcattagcatcaccaagttgattgacagcctagagagagagagtaatttggtttttaagcaccatcatgtgacacaaacattaaataacaaaaaaggaaatagcaaaacttgggacatcataaaacctgaagaagttccctttcacgtgccccccg

SEQ ID NO: 1882 - DNA, 619 bp, Gossypium hirsutum
gaatttgtcatcatctgacacagtatgtgaatggaaaagggagataaagtcaagaaaaccattgctcaattagtgcaccctcacagctacataaagggaaaaaaagaagagggaaaatcttgaaaataataccttttcctttctgataagcttgcaaccttcaacaggaccagtacttgcaaaaacctcttggagtagtggttcagtcacttgtgaatggatgtttcccacatacctgcagtttctcaaaaataaaaaaaactaaaagttaaaaaaaaaacaaaaaaaaaaaaaaataattaaactaatttaataaattttcaaattggtaaaaaaaaggcaaaaactggcaagcttcattcactttccaaaaaccttttaattatcattaaaaaaacccttaatttaaaaatttggcccgaagggcctaaccaccgaatccaaccaccaaatccaggaaggaaagggcctctaattctggggtttttaaccaaaaaatggataagggaaggggttaaaccaaaaagggaaaaaaaccaattcccataaaccaaccaaaacaaaaggaaaaaggggaaaaaaaaagaaaaaaaaaaatctgcgaaaaccccccccccgg

SEQ ID NO: 1883 - DNA, 607 bp, Gossypium hirsutum
tataggtccagtcttgtaattatgttaattaagtttatgaatattgcaggtggagattggaaattatgattccttctacgaggctggtgttattttctccccagagcaggtatatcaaaatatgttagtaactcgaagttactgtatgttaattgaactcgggtttgagtgtatatttatgtttaaatatgtcggacatgaacatcgaataaaatacgaatcaaaatgaataatttaagcaaacttatgtgaacatagccttgggtggttggtgagaaaaaagctttggaattttaaggtctttgttgaaggatttccgcctcttttgagaaaaatctttgaagtgtcgttcatttagggtcggttgatctctcaacacatccgcggcattgtttatgatcaaggttttgtcttctcaactctatggagtgctcgagtgccaaaggctgcctgaaaaggcatcaagcttgcactctattggacctactgcctctttaagcagccttaggcattcaggctctccacatagttgggagacaaccttgaccagggacaattccattccgttgaggggttcatcttaagttcaaattccatcgtgttcaga

SEQ ID NO: 1884 - DNA, 656 bp, Gossypium hirsutum
atccccaaacgtgtttgcactttgcagattcatatagataacgataattaattacaaaaaattattgttattctaaatagaacaaactatataagcttagcctaaaaacccaacaagcctttttgcttaaagcaaaagtgtgagagaaaaagataggtcagccatcgtccaaaaacagtctttcaataaaacatggtacggagaagagagattatcagatagtaccaccactttaaccaaactgttgcagtttcattctcatctttttactagataattttcaattatttccggttttctttacatgagtttgttagtttaagtaaagaaatatttatatatctatgttttgaagtagcgaggatgatagtccttgtgtgaccaaatgacactgatggaggcatatgccatccccaatggccacgtgtctcggacggatcacataatgcatatataagcacgtgatcattaattattccaagaaatcggggagtcagttttggaggaggctttggctgactcaagaggcctaatgttaaagctgtggttgaggatgggcgaaaggtgcggccatcgatggcgacaatcataattacccccaataattatcatatttacatatagggaaataaataagacaaggagggtaggcataa

SEQ ID NO: 1885 - DNA, 471 bp, Gossypium hirsutum
aataaatatagtttctaaatacaattcaagcatagcaatccatcaatctctccctcaaaacataccatgctaacacatacaagtagaagagtgaaaagggaaatgaattcatccagggtcatatatcacagggtatgtatacatataacttaaaaaagtgaatatgataaaaaacatgttagatggatgacgtaactacgatcatattcactttgtgcatttagcaaatcatgcatagcttctcacttccaagcctttccaaccatgttccccctacatcaggccatcatcacttttctaccgtggcctaatattaacagaaagaaatacaattctgaataataaccaggcacgatggttgttcatgagtggcataggaacacccagactacgtaaatttttgggtctcctattcaatcacaacgtgagaattgaaccacatagcacaaacatgaatggcaagctctatgg

SEQ ID NO: 1886 - DNA, 655 bp, Gossypium hirsutum
  misc_feature (626)..(628): n is a, c, g, or t
  misc_feature (631)..(634): n is a, c, g, or t
gccctgaaatgaaatgttttttaatcagatttctcccctcaaatcctatagcagctcaataggatatagcttaggattttacactactagttgttggagtgatctccaaaaggttctcaatcaaactcagcatttctctgccacgttcatttctacagtacaaagcattggaatgaaaattttagttctcttgggatttgaagcaactcaagtatcattatgcaataaaagcatgcaacaattacattagaatgatgatatctgaaacaaaattatagaaaggaaggaagaagaagaaatgaaagaataaagaagagaataactctattgttgtatgttgttctatcaaataatacatacatacatatatatactagggtttattcttaaaggaaagaaaataaaatctaatccctataaacctgctatgtaatctcctctaaatctactatacaaatatcacacattctttgaaggaaagaaatgcatggagaaaaaaggaggggaaacatactttagcaagcaaattgtgcaatgccaaagagaaagtacctaacggtaatatattgtggatgctctgtcatgctgattccagaatattttggtacacccatatatccaaaccnnnagnnnncacccatatatccaaccacca

SEQ ID NO: 1887 - DNA, 574 bp, Gossypium hirsutum
atatcgttttctaaggtaaaattgctgctttctttgattgtgttggtcctgaactgcctactggtccatttaatcatcactcacattcttaattctgaattacagaagcaatctgatcttctactaaatgctgatgatctggatgccatgtgggtttgcttaagagaaaattgtgtcattgatgatgccactggtgctgaaaaggtttatattcttagtcatcataatctccatctgttcaaagaattgaaactgctaggctgcttttagtttgttgttcataattgtgaccttatccttgtctcagctgaattcatagcttgactcattttctcgatttgcagatgaattatgaagatttttgccacattgcctccgtttgtacagaacaaataggtccaaaatgtcgccgctttttcagcccatcaaacttcatgaagtttgagaaagatgaatcaggaagaatagccatcttgcccttctatctttatgtgatgcgcactgtgagtctttgatgttaaagaatgttcctgattgttattatactttgcagtctatctcaatcatggcaagt

SEQ ID NO: 1888 - DNA, 648 bp, Gossypium hirsutum
  misc_feature (641)..(643): n is a, c, g, or t
catgaaaatcatcttctctatgagaaggtaactgaactggagtgccacttgatggagtaccaaagttacaagagcaaatttgatgcctgtgtcatggagaaaacagagttggctaatttattgaaggaaggaactctggaaaatgataatcttagaaacaataactcttctttgcaggatgagttgagaatgatcaaaactgagtttgatgaattgaaccttgtgaaggaaaagctgcaaaatactgttgactttctgcgaaacaagtttcttaacttattgtcatcctatgataagttttttgatgaaccatccctctcacttgacttggtttgtcaggatagagaatccatggacgtgacatctgtcattgtcgaggtagaagaggtccagaataatgcatatgaaaaatttcttcatctcttgaaggaaaagaaagatctgatggatgaaagagacaaggctcaggtgtctttaagtgcggtagaatcagagatggtgctaatgaaacagaagtttgaacgtgatatacaatccatggttgataaaatggatttgtccaatgtggttgtagaaaagcttcagttagaaattgaagctgttactgaaaagctcaaggatagctctgaagttgaaacctnnncacag

SEQ ID NO: 1889 - DNA, 625 bp, Gossypium hirsutum
atttctgttgactttgttacctgtattttacgcattatgtttagtatgttggcttaattgttgccaaattttacttggccatttgattttcaagttattcaactcgaggaagatcccaagagaaaaaaaaacaactcatctcaaattcacagcaatcttttgacctatctgatatactttttgattccttcaggccgttgaggtttcaagcaatgaatatgaaccatctcatcgagatatcctttatgctgaagggatcacccaagggaatggtttggcattcatagagttttctcttgatgatcgtagtccaacgtctgaaacctacactgacaatttggaagctccatccctccccctgaccaagtaattattccaaccattctgttattatcatatgtttaagatttatggatttgtttctaaatcatgtaattacctcctactctgtcaatggggtgctgcatcttacagattgtcatgttaggtcatccttgcatcgtgagctaatttatcatttttttttattttactttttacaggtatcaacttataagggtaaatgcaaaggggatgaatgagggatgcaagtgggtggaaatgtttgaaaatgtgcgatctgtag

SEQ ID NO: 1890 - DNA, 633 bp, Gossypium hirsutum
cctccataaaaaatctgccgacaatgtaaggaggagtcaatggaagtgaatacaaaatattttgcagctcgacgatgttatggagggctttaaatgtttcgcgttgggcaagttttgagagtggcaatttttagaaaattctacatcatcctgaaactaggagtcttgagtcttaagattgttttgttttcggacaatgatggcagaagtatgcgtactgcactatatatttccagttataaaatatcagatttttttttcttcaaatttttattatacttaaagttcaaattttgtcttcccttctttttccttcaatattgtaataataaaaaaaatgttaataatgtgaatgtaaagtttaataggataactgattttattttttttatagaataaaaatagtattttaattttaagacgtattttactttttaaaatataactataccatattttattaatctattttaaatatttttaagacatgtattttattttaaaaacatttatactttattttaaatttaatttaaataatttaaaatttttatttatattttgacctactaaatatttaactaaattacatggaaaatgatgataaaaaaaatgtatttaattttagagagg

SEQ ID NO: 1891 - DNA, 645 bp, Gossypium hirsutum
tttctgtaagatatttctggtgccttaataaagaaactgtttttagtcttactttgtttcttttttttctcttgctttatgtgtgtgttttgtttcgatgttcagctaaaaatacttttgttattgctttgtacttgtattcccaaaacgtggatcttgctctgatagtctcaaataaattaaacacgataaaagggtttcttattccacaacaatgaaggaattgtttcatactaacggattcggtttgagtggattctaatgcaccaggcctcgtaatacttttctatgagctcctatctattagtatcatacacaaacttagatctatattttatcaaatacgaaagatgattgtacaaaatcattgcccctgagatattatacgtgtacgaagaagtacttcaagcttcaatcaagcataaagagattgatgacacttccttattttttgagttgttctatcagatatgctgcttaagacctgtcgtctaaggataagcaatgaagtgggaggggcaaatgtcgtcaaatctattattactttatagttcacgtatagatgtataatattgaaaattactctactataaatgtataatattaaaaaatactatcactttcatagagggagcatctatccct

SEQ ID NO: 1892 - DNA, 600 bp, Gossypium hirsutum
ggcaagggtggatgtcagtgaaaccaggccatgtcacgggcatcatttcagttgtcgcatttagtttcatcgtacaagatcccaatggaatcatactatgacacaatgagagatcctttgattgtaacttgtgaaggtaccgaagcaactcatgttctgtgtgatacctgaaaagataacaaataatagtgagagtggcacatttgatttgtaagctacaagtaggtcgtcgtttcatgaaagttccgtacatgttaaatatttggtgggtaagatatgaactctgtcttaatagcccagaaggaattgcattctcaacctctggtgcaagagatgcagcagtgaatgagacctgaaagttgagattcagggtgattctaattcaatagggcaaaaaataagtgtgaacattataactatagaaaagattattagcactcactggtttgccaccagcaaatactttgaaaagcttgtccaagtcatccaaggtagttgtttcatcaaatgaaacagtgatctgaaaagcaaccgaagtcccggtaatctcgtgatatataataatattgaccaaataaaatcataaatgaatcagactca

SEQ ID NO: 1893 - DNA, 456 bp, Gossypium hirsutum
  misc_feature (366)..(366): n is a, c, g, or t
  misc_feature (379)..(379): n is a, c, g, or t
  misc_feature (381)..(381): n is a, c, g, or t
  misc_feature (387)..(387): n is a, c, g, or t
  misc_feature (390)..(390): n is a, c, g, or t
  misc_feature (394)..(394): n is a, c, g, or t
gaccaatatcaaaaggcacccgtgcttttatatggatacatgaaacctatgcataatgacagtttagacacaaaacaacttcaaccatattgatgctatctagctctattgatgttaatatccatgctttcaacttttaagctaacctgacagttaccgtctccttcaactttaagctccactaaattatagacttgcaatctgttacagtaaaagaattaccagaaccatatattcagcaaataggccaaccaaaggggaaaaaatggtaatagaattagaaaatagctagaaaatataaagataaagaattcaaagaaaagtccaattccaagttccaggaaacaaaacaaaaaaaaaaatgcnaaacctctctagnantctttnatnatcnaaagttgtttcatcaacaaagggaatcccacctttgattctggaaaaatgctacacacaaca

SEQ ID NO: 1894 - DNA, 655 bp, Gossypium hirsutum
ttgcagcaataattgcattccatgagattgtgttcttattgagcaatccatcaaagatgcattcgcttgattggagatcaccacacttggcatacattgtgataagagaattctgcacataactatttgattcaaatcctgttaagacaatatgtgcatgaatgggcaacccatgtttcaataagtcatcaggggtcaagcaagcacccagaacatttgacaatgtaatgtagtctgcttttattccttcttctctcatcaactgaaaggcttttactgcttcatcaggttcttcattctctgcaaggccaccaatgagagcattccaagttacttgatttcgctttggcatcatctggaaaaccttttttgcttcaaccattggaccagactttgcatacattgtaatagatgcatttccaacagccaagttctcatgcagacgtgaaagaattacaagagcatgcacaatctttccttcagcaatacactcagagtttgagcaagctgccaatgcactcataaaagtcacatagttaatagcttttttcatttgaagcatttcgttcaataattttaagacatccaggctcctcccacctctaacatagcaggtcatcatggaattccaagaaattaaatccctctctggcat

SEQ ID NO: 1895 - DNA, 629 bp, Gossypium hirsutum
gttttcttcgcctcttctatatttactcatacagatacgaatatcggtataaatacacaaacggatgtgcaccatttttgttggttcagtatgctgtttcatttttattgctattttcttttcatgcaatgaactgtataagtgatctacctcaaagctttcaggcttggttaatatttcccattcgatgcttgacttgaaagttgaaattatgccttaaaagtgggtctttcgctctgcttcagatttaatgtaggatattgtactacatttagctgaacagataattgcccctggcagggtgttaaagttttgaagccatattttatatgaattataaaattatataaaatataatagaagagtgtattcttttcctgtcttgaagcttggaagagatgccatttgttttgctaaggttgcatgaacttttagcttcaagagcagcttttaaattttgacttcataaaagttaccaagcactctgaaactaaaaaatctgacaccgataatgaaaatatttgaatcttactattaaattggaaggtgtttgacaagatgacattgcagggcaaaattgctgctttaataaaactcgcatgaatttctatctggaatatgagccacac

SEQ ID NO: 1896 - DNA, 614 bp, Gossypium hirsutum
gtctcttcatgcactaaagatgcttctccaaggttgagttccagcttccacagcgaacgaactaaggtgatgaaaggaatccaagccctcattggagaccaccatgacgtcgatatgtctatgatcgacggaaccgatatcactgatgtcgaatggctctatatgatgtcaatgactcgatccttctctgctggcgaagggattcctggcaaggctcttagtactgggtctttggtttggttaactggtgctcatgagttgcaattttacaattgtgaaagagctagagaagcccaaatgcatggacttgaaacactggtttgcatacccacttcttgtggcgttcttgaactaggatcctccgagattatcagggaaaactggggtttagtccagcaagtgaaatccctattcgaatccgatctcattggtctggttccaaaacaatcgactcctccaaatttaaccccagcttcgatccagtttcttgacagaaatatctcatttgcagacatcggcataatagcgggtgttcaggaagaagacgatgcaagccaggatattaaaacaaagcaagagcacagcaataaccaaaccaagaaagattcctcaga

SEQ ID NO: 1897 - DNA, 633 bp, Gossypium hirsutum
tgtcttcagacctccttagctatagtatcaactactatatttgatattcttgacataaaccaaagtttaagataccaatcattcgtcgtacaattacaaatctctaactccaatcaagagcttcctcctctctcatttcttaatatcaaatccatcgccattttactgacactctcaattaccaatcattgcacccttattctcatgccaatatttacttttaatagcatatcaatgtttatggttgtcaatacattaaatttaaatattaaattaaaccaatcttttatgaaagaaaacaagatttgaccaatttgatttggattaggaaaaagaagattcctagttgtcaaatttcaaatgccaaaggggatatttgcatgaatgaccatacaaaagtggaaaataacttacataagcatatcataaagtgaatattattcttactttacatgttttgaaatttgaaattatttttctttttaaattcaagatggccatgaaaaagggttgtcaggtaacttcaagaactggcaataaagttaaaaaaagaaaatgaaagatttgaacctcaaatatggtagacataatggataggatccgtcggctacacgacttcccatcaccttactt

SEQ ID NO: 1898 - DNA, 614 bp, Gossypium hirsutum
cgatcctcagcaggtatggtttttggaacttgattggggatagtccttcattactaaaactaaactacttggattccttcaaaaggttggactttatagagttcctccaccaagtcttggcaatctttctcgcttgcagcttcatgatgtccatatgacttttggagcttaagtttagacattctgtcttgaatggagtggcaaactagccttctttggaatatctagttgtgaatgaagttgatttccatggtaggacctgaacaagatggttggtgcctaccaaaatagtgaaatgatcatatacttcatggcacctcttggggatgctacaaggtgctaaacagaacaacatacctgacgagccttgacattttgtatggaaaacacatgcatccattagtcacagcatcaatagatccctacatcaagatgaagcttttcatttactccatcaagtgcatgctattttttttttctttttctttttttctgtaggtgacctatgaatttaattcattatataagtcgaatgggaaacatacttatatggcatgctttattgtatgtactaaatcagttgtatagagatcaatatgtatcaagcaacgtcc

SEQ ID NO: 1899 - DNA, 462 bp, Gossypium hirsutum
cttgcttcaagagactgctcatagagcaggcttaaatcttcctgtctacaccactgttcgatctggaccaggccatattcctagtttttcatgcatggttgaccttgctgggatgagctttacaggggatcccgctcggactaagaaacaagctcagaagaatgcagcaatggctgcatggtcagccctgagaaagtgtatgattcctgtcttccgtattttaggttccacttcatttagaattaaacaagtgcattgtttattcctctctaaggttgggtcttttttgggtttagtattgttgttccaactcttcatttttctcgaagtcaccatgtctgaggcatactgggatatatgtatgtcatattacactccatgaatattccaagtacatggtttattcctatctaaggttgggtctttttcaggtttagtattttgattctccgagtctgcatt

SEQ ID NO: 1900 - DNA, 642 bp, Gossypium hirsutum
acaatatactcactactacgtacaacaaagaagataaaatggacaaataaacaaaactcaagcatagccaacctttttgtcggcttccggaagttgtcttttctccagggccattttccaactcacaagatcctggcgtgatagtggactggagcataaaaaaaagaaggaaatgaggaaatgaaaagacaatagaaacccagaagtaatgcaggcttgtatcctcaaataaagcaacagactgaaaagcaaaactgcaatgcaaaaccgcaatgcaattttcattcacatcattccagattttattaaggctaagtcagaaagttatatatcaggcttttttgcacctcttttaagagcattttacttcaattaaatgaaatgggttaaccacgactttgggaaacgggaaccattctttagatatagaacaaaaggccatgcagaagtttagggcaaaaaagtaatggcaagaattgtattggagacttatattgcaagttcaatgtgtgaacagtaaaaacctttcaggagaaaagtaaaatgggcctagatcgtcattaagcagatctttatttgaaagagtgcttgagataagtccagcctccgctaagcctgaataaccaactccattaacaaaaa

SEQ ID NO: 1901 - DNA, 627 bp, Gossypium hirsutum
ctgatgcattgaagaaaaccctacaagttagcaatcttagcccacttctcacagctgagcagttgaaacagctttttagcttctgtggttctgttgtcgagtgtacaatcactgattcaaaacattttgcttatatagaatactcaaaacctgaggaagcaatggctgctttggcattaaacaatatggatattggtggtcgaccattaaatgtggagatggctaaaacgcttcctcagaaaccagctatttcatcattgacatcatcgtctctgcctatgatgatgcagcaagctgttgccatgcaacagatgcaattccaacaggctttgcttatgcaacaaaccttgactgctcagcaggcagctaatcgagctgcaagcatgaagtctgcaacagagttagctgcagcaagagctgccgaaataagtaagaagctaaaagctgatggacttgttaatgaagagaaggaaatcaagagtgaatctaggtatgtgtcctcatcaggacaaatgtacttccttacatacatgttttgttaagtaaggcttactttttggttaggtccgtatgcttcaatattgttaaagaatgaagttacttattgagctacataaggaatgcaag

SEQ ID NO: 1902 - DNA, 619 bp, Gossypium hirsutum
gtccagtcaaggcactagagaacctaggccacccaatgactgctttcaatccttcaccaatcaaccagtctctccccatgcaaacaaataattttatactcttaaaccataattatatccgccacccaatagactttaaaaaacactacccatgaaaaagttcatcatctttcatatttcatcactactgattaacatgcaaaagaaaagcagtctgacaacatgtattaccgtatcagaaactaattccaaatcccttgtctttttcattattacatctgtaatctagagttagaaactcttcctttttcttgacaactttttttatatgaaaaagggttagtaattattgcacttatgattaaggtcaaggaccagaaagtagtgattaggatccttttactctttgtttaatgtattctctgcacttaaaagctttctttttgttggagctttttaaatggtagtgggtttttcaatgtgcactttatctaggtaataaaaccaagaaacattctctaaagcttttcaagtcccaatcagccagttttgttgtccccttgattcaatccaaagcgtgcacttgaaagtcacccccaatctaattgcttagcacatg

SEQ ID NO: 1903 - DNA, 599 bp, Gossypium hirsutum
ttgtttctggaaattctgttctgctaattgtgctacctttctaactttcattgaaataattgtagggagtggtttactggaaaccacccaaacaggctttggataaggttaaagcacttgtagaggatccttcagttagttgttatggtgctgatgaaggtcttcctgaacttagagaagcattgataagaaaggtatagtttctaaagaatttgtcataaaattgtggttttcttggttgttatcgaaccgtggaagaatttcatgacactgtagactgagcttcttgccgccattgtatgtaccaacagacagttatggcagtgcgtgtcatgtgcacttgtttgatacttagccctctctccagactttggaaaagctcataggggctgtaaatttggttggtaggcttggattgatggccaaaccgagcttcattctagttgtccgattagcctctggacagcccaagtttatgatttttgcattgcttttatgtgtatcattataatattttttaactgaacatgactgtgatgtttacagttggatgcatgttgtgaaatatatgggaaataaattagacaatgagttcttgg

SEQ ID NO: 1904 - DNA, 727 bp, Gossypium hirsutum
  misc_feature (632)..(641): n is a, c, g, or t
  misc_feature (651)..(656): n is a, c, g, or t
  misc_feature (678)..(682): n is a, c, g, or t
  misc_feature (685)..(685): n is a, c, g, or t
  misc_feature (688)..(703): n is a, c, g, or t
  misc_feature (717)..(718): n is a, c, g, or t
  misc_feature (720)..(720): n is a, c, g, or t
gatgttaactagtacttcaccagcactcttgctgatacatatatgttgtgtatagctcgggaaaaaccggatttcatcgactaatctcggcattgcttcgtgaagttcacttactggttttggtattgtctcctgtgagttaaaaacaagttcttcaaataactttgagtgcataatttcataccagattccatgccaagttactgctacatgaggcaccatttttgcacgccaatgaggcaaggaaacgctctcggtatgcacgtaatcaaactgtccattagcgtttattgtgttgaatatctcgaatgctaatgaacaattgacagaaccatgatcattggctgcaaaatatacatggagattaccttgatggatgtcaatgtgaggctttcgatcggacggcactgtgaagacgtggatttcatggcctttagcagctaaagcttggtataatgttgcagcatgacgctccatgccaccaggggcagcaccaataggccatgttttggagaatacagcaagcttaagcttctcaaaattgttaccaaaacaaagactattccatgggaagttagcatctctaagatcaccattgaatcctgtctccattattgtcctagccaaaaaannnnnnnnnngttctgtcannnnnncattagcattcgagatattcannnnnatnaannnnnnnnnnnnnnnnggttacctgggtanncnagggggg

SEQ ID NO: 1905 - DNA, 610 bp, Gossypium hirsutum
aacttgattgtaatgaacttgaactgtacttcggttcacaagacaaggcatgaaacatcatagaccattagctgatcagcataaaacaaaacatgagttcatatacaatgagttttaatacaaaatatgaatgctgtcataacctgagaaagtatgatacaaaacattgcatgcagttcttaattcttatccatcaattattatactttcatgaaaaccacaaataaaaaataaaaatacatttagaaggcattttgcaaatagtttacttggaaaacagctgccgcctccgcctgctttgcttggcccgtaagctaccttcttcgccaatcacaatctcattaactaaatccttaaagaccaaccgttcaacatccagcaccatccccgaaatctcactgttaaaatccgtccaactctctgatcgactcattacatcttcccaaaatatgtttttcagaccatcctcatcttcctccgggtcacaattcggtttctttgcttgaagctgctcaatctcgagacataattcttttagaaactgttgtgcagtgagggtcttctttgccaacttgccagaatttatcctaggctccggaaatgctccaaa

SEQ ID NO: 1906 - DNA, 610 bp, Gossypium hirsutum
ttggtagttaacaccacttccccagctaaacacctcagtagcaactaaaaacacatggaaaaccgtgttatactttaaaaaaggcagatttgattatatataacaatcaaatgttctcccacaaagtaaagcaggtacccgaatcaagcccactttcgaaaaccttcaacacaggcccagaaaggaggtctataggtgttctacattttgaatcttccaatgtaatagaagcaccagactgaaggagaatactagctacagcaagatgaccaaaatgcagagctctatgaaggctactccatccagattccccatcctgaaacatacattctgaagtgtaatttgaaagaggattgaacataattggaccatcatagatctctataacttcataatgtttaacacaaagataatagacattctaaagcaaggtactcaacaggcatctattacgaaccaggagacattcagatcaactaaacaataagaagaataacacaccttagcatcaggatcagcatcagcagctacaagcctctgaataatgggaaggtggtttctccaagttgcaatgtgaagaggagtcaggccaaacctgttcctacagttt

SEQ ID NO: 1907 - DNA, 602 bp, Gossypium hirsutum
tctttttattacataaataatcatttataaatacatctaatttagtttaaaatatattttgtaaaaactaaaatatcagtataaaagattgcattagctcaatatataattcaattcgttaaatacctttttttttggaataaatattaataatgccaaaaattgtactaagatttttaaattgaaaaaagtgaaaaaaaataaatttaaaatttttttagtataaaaactaaatatcaagtacaaaatattttgagataaaatcaattgtgcaatattcataatcaaagatttgatatcaattttaatgtttaaatattaaattcatataaatttgatttaatatagttgatataaatcaaagaaatcatatattcaaatctcattaaattctgtataaaagtcaaatagatggatcttagagtaaataagttctaaaatttttattaagtcttaacttgtcaatacagaagaatgtgagttcggatgtgctaaagtgcattatactcttatttatggattggggaaggactagtcattgcctcaaaaagagcagatataatcggaacctataatgagattgtaaaaaaaaactaaaagtt

SEQ ID NO: 1908 - DNA, 632 bp, Gossypium hirsutum
ctagccggtccttaccatcttgtactggttggtatgaatatgagtaggctccaagtttaaaagttttatttgataatagtattaaatgatggatgagttaggttggatttgcacccagtttttcaattgtttcagtttacgatttgagaagactagcgttgggttcatagttgatcttcgaattgggggttgatcttgtgctgaatataattgcctctttatatgcttggtacaagatcatataggttgaagaaccaaatggcctctttatatacttggtacctgatcatcttatagatggaagaaacaaatggtgtactttgtacttaaatttttaccacagaatttgggtcatattcgatccgtcacttgggacttgttttgatggatagtctgttttaatgaattccttttttccataaagaatttgtcgagttttctctgcatctttccatttaatttcattgtttaggttctttagttactaacactcatgctttctcctgccttattaccctttcctttttttttttttgggaaaaaaaaaaaatttccttttttccccccggggtgaaaaaaaatatttttttaaaaaaaaaaaaattttggggaaaaaaaaaaacaacccccca

SEQ ID NO: 1909 - DNA, 618 bp, Gossypium hirsutum
  misc_feature (24)..(26): n is a, c, g, or t
cccctttttgctgctttcgcgctnnnacagttcctaaacattcaaattttttatatgtgagaagtttccatggctcaatagatcaagagaacataataaaccaataagagacaagtaagaaggcacaattctatcagggatggaaacttttaactgcaggtcgtaagcaactatcgacaagatgcagcggttttaaaggaaagatgactagggatcatgtgcaagtctgagaagaagaaggaaaacatattcatacaagattatgaccaaaatatggattcattgtaaaaagagagattgatgtcaactcgaaatttgcagtaactatgagcaattatcagagacgatatgtgcaggggaacacagaaaagaccaaattccgctcaccagctcttggcgaagcttgttattttgttgaattgctttatttttttcatcagtcagctttgttataagagcttttgcctgcaattatagaaagtattattgaggattattagaccttcgatatatcgacatcatatagaatgaaagagtttcaggccccaacccagaagcattgaaaggaatgcaaatatctgactagaaaaatatggaccttactatatccagaactag

SEQ ID NO: 1910 - DNA, 458 bp, Gossypium hirsutum
ttattgataatcagcttattggtttcgctccttcatgtcatctgtattctttaaccaatgtaaacaacaagttttcatgtattggtaggccatggaaatgatgaaggtaacaggctcaaacttttcactaaagaacacagggtaccaaaattactttgaggcatttattgaagacaaagccaattacactgcaaatgggtctgaattcacagaaggtgcattgaatcaagtcctaccatatataattttacttgtttctcccattgttgctgtattgatcattgctgtacagaaagggtatacaaaatagtattaaaccaagggagactataactcacacatattgtacatgtttcattatatacctttccaaaaatatatattcaaagatttcaatatttttctgatttcgttagccgtatgatgatataatataccacgttagcttgttgttacat

SEQ ID NO: 1911 - DNA, 670 bp, Gossypium hirsutum
aaaaaccaaaatttgcagttccttggtctttttagttgattctaacactgttggacgattttattgatcttccttgtgaaatttttgcagactatatgttcagtaatgaacatgttaactacctaataacttattcatttgacttccgcaatgaagagctactttcttactatatatcattcttaaggtttgttttcttttcttttagcagtccttatcactataggtgacttctatatgttattttttgttaatttcttaatcaatttaagtcttgaaagcatttttttaacattggtatttcaactgtcattctgggcttttctagagcaataagtggaaagttaaacaagaacacaatttctctgcttttaaagactcaaggtgtaagtgttcctctcttttatgtatggaatttgtttccccgtaaaaattatttctttattactcattttttagccctcgttaaaaactgccgcctgttgaatgacttcttctatttgtcattttttttctaggaagaagttgtttccttcccgttgtatgttgaggcaatacggtttgcttttcatgaagaaagcatggttcgcacagcagtgcgtgctataacactgaatgtttatcatggttggtttccatttttctatttttgttcattgccctttcattt

SEQ ID NO: 1912 - DNA, 652 bp, Gossypium hirsutum
cgggatcacaagtgttgcattcagtattttagcaaccgcaacagcatcacatatctaaagagaatttaatgtttggttatcttattggttttctgaaagtgacaaaaaatataatcaagcgaagtagaactactgaatgtaatatgctaacaatacatacccccattctttgctggttgagtcaaccatcaagaaatacctgaagatatccttcagagttctgtggcaatgctgcttaaagttatcgaagaaaaattaaatattgtgatcaatgatagtttaaaattattaaagaccaaacttgagtctgacaactcgaaataccaacaatgtaaagaaactaaaactagaaatctcattactgatcactcacatggggtatttacagattcaagacatggtctccacccttggtcagccaaaggagtccagagatcggactgctctccgttggactgaagaagtaaatcaaacagcaaaattgcaagttagaatacactctgaaaaggaaaatcacaacatatgtatgaacatatgctgcttaagcaacatctactcacacttttgccttctaaggcactcctgagtaaagataaatgtctaggtttaataacattccactcctgcaaaaagagtcaaagggcacaattag

SEQ ID NO: 1913 - DNA, 630 bp, Gossypium hirsutum
tacgttattaagcttacttccatttgtaagggtgaagcttcaaagtaaagccttaaaatcatactccacctctctgcttccctctcaagtcacggcggcggcgccacctactttgagctgcttctagctgaaaccatcgactaccgaataacaaaagaggaagaaacctgacggaaccatccgtggccgcctcctccttttccccgccgcgtggggatgccgatattgaggctcttcgccctcctgcattggctgacccaccgcaactcccaccgctgcaacctcctcagtcagacgctatgatatcatctagggacccgcacgcgctctttagtggcggcggcataaggttctccaacttctctctcttttttttttctgtttactaagtagccatatagcttcatcaaactagagtatcgcactgaaaaaaaattgtttggaaattattctgtttttctttttgttaatcatataatcgtttggcttgttctattttgaaggatgaccctattaattatacaataacatttttttaattcaatgcaaaattacatgtcaaggactgttgttgtgtcaaagggcactgccgggggggcatttgctggctctgattgtatgctaaaaaaa

SEQ ID NO: 1914 - DNA, 462 bp, Gossypium hirsutum
gcaggcagtttccaatcactcttgattgaaacatcgggaatacgagttgcaacgaagcgaatatggatgtaaacaattttgcatgcaaagagtatagtaaatgcgttgattcagaaaataactctggatatttgtgcaagtgtcttgagggttacatggggaacccttacctccctaatggatgtcaaggtaactataggtatatataccccatggatttgtagtttctaacattaaagatagtgttatttattacttgcatacaatctgcaaatttcagatataaacgagtgtgaaagtttgagcccttgcaatggaacggcaagatgtaccaacttacctgggacgtacaattgttcatgtccggtgggttatgaaggcgatggtaagaaaagtggaacaggttgtagcttacccaacaaggatccgtcgtccaagacatctcttactgttgttgcaaaa

SEQ ID NO: 1915 - DNA, 466 bp, Gossypium hirsutum
ggttttgctaagagtgtattcggcaaaatatgtatgtgcatgcttgtgtgtgtagcgtacaagaattttggtaaacactaacaactatattccccaattacatcttgactgaacctactccttaaacaacagcaacaagtgtattcttcccttctgaacaattttatttttcttctcttagtcagatttgttaacaaatccgagtaacaaatcctcaaaatattaaatcatttaacaaatcaaaatgcaatgtttctggtcctatcaacttgcattattgtttacttttgtagtagctcttactgggtttgctgttgatataggtcctgaatgcattccgtgatcttgaagaatctagtcttcagtcgtacatgagtgatgccataaatgaaatatctaaagcatgcgttgcttttgaagccaaagagtctgctcctcctaatgctggtatcctactttccctgag

SEQ ID NO: 1916 - DNA, 618 bp, Gossypium hirsutum
tgagcgctccagcaaggataaaaggccgccttctaccatatttggaagtgcatttatcactccaaataccaacacaaggttgaacctaagatcaaaatgcaaacaattctataaatcataaatgtagataggtattatttattctgattttgtttaactctagtcatttgcatttatcatgtgccaacacatttaaaaaaaataggcattaaacacaaaggtaacctgcttcctaatttgcacagacataccttgggggagggggagagagagagagagagagaatggaaaattgaataagcaaagaaattctctattatgcaatcaaacaaataaatgttctagggtacccccatctctaccttctacatgaaaggtagccccaactatttaggagttagttcaaaatgcagcacaagctattacagcagatctatcaaataaccacattaaaatatcatgttacacccattaggactcaaaaataaagagaaggcaataatatagaaaaatacagcaatatggtttcccatcacctaccacaagaccagttatcggaccacaaagccaaataaatgaagaaaaagcatgctctatccaagtgtctgcatgaatcaa

SEQ ID NO: 1917 - DNA, 582 bp, Gossypium hirsutum
atttttttattttctttaacccagcttgtcatacttgttgagtttatattaattaggttagctttcttggaatctaagttgcttttatgtttatggtttctttttggtcatgaatcccagttctaattgaatttaagaagtataagagtttagaaataccaatctaatgtgcatattcttctggcattttgatttatgaaaataccaatctaatgggacacctaggaactcgtgttcccttcttttggtctttttcttttcatcttttcaattgctgtagttgttttggatttctgttgatgacacagttaatcaagtcccttttatcttatttcatctcttctgagaactaattaaatctcttctgacatctaactaaatcctgtttcttatacttccaaactctaaatcttgcatattttgacactgaatcccactactaaggctttcagataaaacaagtaagtcctaattttgctgcttctgtaagctttgatgaccggattaatcagattcggtcactcttctacctatgaactgagtcctaattttgctgcttctgtaagctttgatgaccggagt

SEQ ID NO: 1918 - DNA, 620 bp, Gossypium hirsutum
cgatataagctgcaccaccatctcagagtcactctgacaatgatgatcttcttgtatcctcgctgccaagctagttttaaaccatatcataccgccagcaactcagtttgcaaaacagaacctgaacaaacattctactatatccaagtagccaatttccatggtcgtctcttagcaaccccaccagctgctgcccaagaatggttcaaggcaaccgctccgtctgtgttgagttcgacccatcctgggggaggtaaactccatctcttggaagaatcattaccattctgctgtggagaattcagatgatagacctgcgtcacattcatagcccaacttgagcagtgtttcaacaactcatcaacactacaagaatcatcctaaaaaatgacttgattacgctgcttccatatccgccagtatgtaatagtaaataaagttccccagggtatagaattaacaaaccgtccagaattattatcaatatcatccaacaaccaatcatttaaactcgaagaacagaaattttgttttgcagcagtagaaacaagatttaaccaaactgctctggcaacttggcaattacgcaaggcatgaagcacagtctcttgatcagctca

SEQ ID NO: 1919 - DNA, 613 bp, Gossypium hirsutum
tgtcttttgttaccatatttccatctctaggtttgacaaacattaatgacaaaccaggaggaaatttagtcaaacaactaacctcatattttgaacagtgcacccatcttgaaattgctgaccatctacatagaagcaatattagtgccgcataatctcattgtgtctcaaggtgaagaaacattccacaaaatttttattaaactaccatacacaagccaatcaacccgtcatggaaatccattaggaggactataaattggattaaatattttgactatatccttctctgtgatttcataaacatgattagcagtaggataaagtaattgtcatatgagttcgtcatataggcaaaattggaagcaggacaaatggattttatttttcaccaaccttaattgtccattatatatcaaaaatcatttcatctctactcctttactagaagacaaattctaacatatagctcacactttaatgggtttgtttataacttcattaccaatttacgggattcaaatctgaaaaaaaaaatgcaaacaatatgtaggaaatggtaaaaatgaacccataatagataaaatcagaatcacagaaaatgtctggtatc

SEQ ID NO: 1920 - DNA, 1266 bp, Gossypium hirsutum
  misc_feature (512)..(516): n is a, c, g, or t
  misc_feature (518)..(518): n is a, c, g, or t
  misc_feature (520)..(520): n is a, c, g, or t
  misc_feature (525)..(525): n is a, c, g, or t
  misc_feature (528)..(530): n is a, c, g, or t
  misc_feature (532)..(534): n is a, c, g, or t
  misc_feature (553)..(554): n is a, c, g, or t
  misc_feature (556)..(559): n is a, c, g, or t
  misc_feature (569)..(570): n is a, c, g, or t
  misc_feature (576)..(576): n is a, c, g, or t
  misc_feature (590)..(601): n is a, c, g, or t
  misc_feature (603)..(605): n is a, c, g, or t
  misc_feature (608)..(608): n is a, c, g, or t
  misc_feature (610)..(617): n is a, c, g, or t
  misc_feature (629)..(630): n is a, c, g, or t
  misc_feature (632)..(641): n is a, c, g, or t
  misc_feature (646)..(659): n is a, c, g, or t
  misc_feature (665)..(672): n is a, c, g, or t
  misc_feature (678)..(678): n is a, c, g, or t
  misc_feature (680)..(682): n is a, c, g, or t
  misc_feature (684)..(689): n is a, c, g, or t
  misc_feature (692)..(701): n is a, c, g, or t
  misc_feature (705)..(708): n is a, c, g, or t
  misc_feature (712)..(732): n is a, c, g, or t
  misc_feature (737)..(745): n is a, c, g, or t
  misc_feature (750)..(768): n is a, c, g, or t
  misc_feature (770)..(770): n is a, c, g, or t
  misc_feature (774)..(808): n is a, c, g, or t
  misc_feature (811)..(818): n is a, c, g, or t
  misc_feature (820)..(832): n is a, c, g, or t
  misc_feature (834)..(840): n is a, c, g, or t
  misc_feature (842)..(846): n is a, c, g, or t
  misc_feature (850)..(855): n is a, c, g, or t
  misc_feature (863)..(863): n is a, c, g, or t
  misc_feature (865)..(878): n is a, c, g, or t
  misc_feature (880)..(890): n is a, c, g, or t
  misc_feature (896)..(902): n is a, c, g, or t
  misc_feature (904)..(910): n is a, c, g, or t
  misc_feature (916)..(922): n is a, c, g, or t
  misc_feature (924)..(927): n is a, c, g, or t
  misc_feature (929)..(936): n is a, c, g, or t
  misc_feature (938)..(943): n is a, c, g, or t
  misc_feature (945)..(947): n is a, c, g, or t
  misc_feature (949)..(950): n is a, c, g, or t
  misc_feature (953)..(975): n is a, c, g, or t
  misc_feature (978)..(978): n is a, c, g, or t
  misc_feature (980)..(980): n is a, c, g, or t
  misc_feature (983)..(986): n is a, c, g, or t
  misc_feature (990)..(1001): n is a, c, g, or t
  misc_feature (1003)..(1008): n is a, c, g, or t
  misc_feature (1010)..(1014): n is a, c, g, or t
  misc_feature (1016)..(1028): n is a, c, g, or t
  misc_feature (1030)..(1034): n is a, c, g, or t
  misc_feature (1042)..(1046): n is a, c, g, or t
  misc_feature (1051)..(1056): n is a, c, g, or t
  misc_feature (1058)..(1059): n is a, c, g, or t
  misc_feature (1061)..(1069): n is a, c, g, or t
  misc_feature (1071)..(1072): n is a, c, g, or t
  misc_feature (1077)..(1080): n is a, c, g, or t
  misc_feature (1082)..(1085): n is a, c, g, or t
  misc_feature (1087)..(1118): n is a, c, g, or t
  misc_feature (1120)..(1142): n is a, c, g, or t
  misc_feature (1144)..(1144): n is a, c, g, or t
  misc_feature (1146)..(1146): n is a, c, g, or t
  misc_feature (1148)..(1149): n is a, c, g, or t
  misc_feature (1154)..(1155): n is a, c, g, or t
  misc_feature (1157)..(1161): n is a, c, g, or t
  misc_feature (1163)..(1171): n is a, c, g, or t
  misc_feature (1174)..(1188): n is a, c, g, or t
  misc_feature (1190)..(1195): n is a, c, g, or t
  misc_feature (1197)..(1198): n is a, c, g, or t
  misc_feature (1202)..(1212): n is a, c, g, or t
  misc_feature (1214)..(1225): n is a, c, g, or t
  misc_feature (1227)..(1235): n is a, c, g, or t
  misc_feature (1238)..(1241): n is a, c, g, or t
  misc_feature (1243)..(1254): n is a, c, g, or t
  misc_feature (1256)..(1256): n is a, c, g, or t
tcacttgacttctgcattgatgctgatgccagcagtttgggagtgggacctgtccttcatcaacaagggcaccctattgcctttttttgtaaggcccttggaatgaggcatcaatcattgtttatctatgagaaggagatgtcggcagcccttttggctgtcaagaagtggcatccctacttggtgggccgccgatttcgcatcaggacaaatcgtcaaaccctgaggttcctttctgaccagcacgccatcacacctttccagcaaaaatgggtagccaacactaatgtggtggttgatgccctttcaagacagcctagcagtttagagggccaattacttcagatggtaggtagctcagttatctctaggctgttcactcagtgcagctttcttggcaaaatgatcccaagctcatcaagttatgtctcttgctccaacaccaaccctcctctcaacaagttatgtctcgagctccaacaccaaccctcctctcaataatggttaaatannnnngngnagctnctnnnannnatcagaatggccgaacagnntnnnntattgctgtnnaacgtnctaatgatcaagtnnnnnnnnnnnngnnnctnannnnnnnnaaaaaaagaaanntnnnnnnnnnntaagnnnnnnnnnnnnnnaaaaannnnnnnnaaaagnannnannnnnnggnnnnnnnnnngagnnnngggnnnnnnnnnnnnnnnnnnnnnatacnnnnnnnnnataannnnnnnnnnnnnnnnnnnanagcnnnnnnnnnnnnnnnnnnnnnnnnnnnnnnnnnnntcnnnnnnnntnnnnnnnnnnnnntnnnnnnntnnnnntgtnnnnnnaacaaatnannnnnnnnnnnnnncnnnnnnnnnnngagtannnnnnnannnnnnntatgannnnnnntnnnntnnnnnnnncnnnnnntnnnannaannnnnnnnnnnnnnnnnnnnnnncgnanaannnntcannnnnnnnnnnncnnnnnnannnnnannnnnnnnnnnnncnnnnntgacactnnnnncctannnnnncnntnnnnnnnnnannctcgnnnngnnnncnnnnnnnnnnnnnnnnnnnnnnnnnnnnnnnncnnnnnnnnnnnnnnnnnnnnnnncntntnncaacnnannnnnannnnnnnnncannnnnnnnnnnnnnnannnnnncnntctnnnnnnnnnnntnnnnnnnnnnnnannnnnnnnntgnnnntnnnnnnnnnnnntntatcttaatc

SEQ ID NO: 1921 - DNA, 764 bp, Gossypium hirsutum
  misc_feature (557)..(558): n is a, c, g, or t
  misc_feature (560)..(563): n is a, c, g, or t
  misc_feature (565)..(566): n is a, c, g, or t
  misc_feature (569)..(569): n is a, c, g, or t
  misc_feature (572)..(572): n is a, c, g, or t
  misc_feature (618)..(622): n is a, c, g, or t
  misc_feature (624)..(626): n is a, c, g, or t
  misc_feature (628)..(633): n is a, c, g, or t
  misc_feature (635)..(641): n is a, c, g, or t
  misc_feature (643)..(674): n is a, c, g, or t
  misc_feature (677)..(677): n is a, c, g, or t
  misc_feature (679)..(688): n is a, c, g, or t
  misc_feature (690)..(697): n is a, c, g, or t
  misc_feature (699)..(701): n is a, c, g, or t
  misc_feature (704)..(711): n is a, c, g, or t
  misc_feature (714)..(715): n is a, c, g, or t
  misc_feature (722)..(733): n is a, c, g, or t
  misc_feature (738)..(738): n is a, c, g, or t
  misc_feature (740)..(754): n is a, c, g, or t
attagcagtgtttcccctccacaaagaaaccactccttcatctttcattgttcgcttgaaacaatcagcgatacccttgtagggctcagagagcctaccagttttgatcatttcatcctggttctgtatcaaaagcttaacacgctcaatcggagcagcagctgtttttgacacagcagcagaaactccacccatgaggaaatcaatggcaaagctggtaaatcctttctctgcaggggcttgaacacaaatggcggtagctgttgatggaacaataggatagtgcattccagcattggaataattcccatatgcaaaatgtccttggtatagggcaggcctcctgaaagacccatcatacccttgaaaatctcgggaaatgctagaagaaaggagctggccagctaccttctgcatgacagatggatgttgaatctgatccattctgatttccacgcaagaatgcaaatgagcacattaacatacaaaaatttgtacaacgaactacaaaattcatgcatggtaacgtaaaacaattaaagggaaaggtgcaacanngnnnncnntcnatncatgcatggtaacgtaaaacaattaaagggaaaggtgcaacaatgnnnnntnnngnnnnnntnnnnnnntnnnnnnnnnnnnnnnnnnnnnnnnnnnnnnnntantnnnnnnnnnntnnnnnnnncnnnttnnnnnnnnctnnacctaannnnnnnnnnnntatcnannnnnnnnnnnnnnnatactcttta

SEQ ID NO: 1922 - DNA, 654 bp, Gossypium hirsutum
ctctttcaagtgaccacaatgacaatggaacgactttaggcgatgcactaaactgggtcaaggatacaacatttgcatctattgaggaacttcaaaaactagctggaggtgctgacctcaaggtgcatccttcttctgtttgctgttatttgttttgattcatttgatttgtgggccttaacctttgtagcatttgctaggtgttttctttagtgaagttttcttttgattttgtggttcttaatatggaacttattgttttatagggtctagaggctgctcttgacaatgttgtgcatgttgagaatggtaaaaagatcacgaggtatgtgccaaagtattttaccctgtttgctagtttttgtatcttactttggctgacatttttgttgcaattgtttgttgatgtcgctatcttgactcttttgaaacttatctcagagggattgaccttgagaacatgagtcttggtaaacgtgatgcattgctagtgttccgcaccctttgcaaggtactaattatactgtcaccaattgttctttgcattttgaagtctctgctaggattcccttcatgaaatggttttttcttccagatgagcaagaaggaagatactgatgacaccaagacaccgattctgtctcttgagcttct

SEQ ID NO: 1923 - DNA, 601 bp, Gossypium hirsutum
attgatccatttggtcaatctgattcggttcagataactatggtttcaacacatttttttgttagaaaatgatcgaataaattatggcaaatcaaactcaagtgaatgatgggataacctcgaatgatttttttataagagggacttggggaaaattttcccattttcaatatatcttcatgcttaatgctacattctatacaacaatggtcacattttaatctttaagaaaactatactgaataattaaaatattacattgtatgaaatgcaggtgtatgaccactactcttcaacatcagaatcaatagggcaagttccatcatctacattagccaaagggttatataagtgtgaaccaggatccatacatccaggaacccaatcaagactgcatcgatcaccctgtaaaagcgatgtttcattcatggagttcatgcataaatcgaacattgaaaaagaccataaaataaaacaatttttttttaaaacttactccttctttagacaagttgccaatcatagcacatctatccacaacaatacttgtgtctggaaatattgctctgtcacatgcaccttctttactcagctcctctgc

SEQ ID NO: 1924 - DNA, 582 bp, Gossypium hirsutum
gcatggagaaaataccaccagaagtatgtgaattccaaccgtttaaccaggaaaggaaaataccaccaggtatgcaccatgaacacgactcaccataaattgtacatgtatgtctcaatagtttcatcaaacaatacaaatagattaatagatttaaaaatcgcaaggatcccctcgattgatagccctatatttccagtctatagagcacatgaatgaaggatacagatttcagtaccaaaatccaagcatctcttcccataagtaattatatatataagaaataaaaggaattctgatgcaaaagaaacatatatattttccttctgtttttctactacaaattttcatcttttcaattttctttcccctctactaagcaaagccatatgatttatgcattaacgaagtcatcaagtaaaataaagtaagcatagattttactggagcacaattattaagccaactacaaaacaaaactgcaaaatattagcttatctaaagtgcttacttgtctacatatatatgcttcaccctgccatatttgctgcattcttcttcgacaacattcttctacgacaa

SEQ ID NO: 1925 - DNA, 558 bp, Gossypium hirsutum
caagttggtgatggtgattgtgggtcaacagtaagttgtgcactcgagctgtcttggttatcattttgccttttggttcataatttagtgcttgatgtatgtgattcacctgcttttgcagatgtacagcggtgcaacagcaatccttgatgatatgaaaaaatagtatgcgctttctccaatttttttttatgttttcttttgactaaatcaagggaaattcttctagcaaagtaactgtggcaattctaggccagattgccaatatatgtacttatgcaagctgtctgcctccgtagtaattaggtttatgtttgctggatatctatagctttctgatgcagtacagaggttttgatgagtcattatctttagacatgtaggaagaggtatatttatcttatttatagtgctttccagtagtattgagtgtaatatttattttaagactcctcttccaatgtggagcttgtcatggcctgtgtatagatctttttcttggtcatacagccacttgatttcactttattatacacttctattattgtcgttgcgttg

SEQ ID NO: 1926 - DNA, 646 bp, Gossypium hirsutum
gattttcttgaggttgattggcagcttttcttggaggagcagaaaaggtttcagccacaacaccgctaggaccattggccattgcaggtacagggctgcaaaacataataataataaaaagtaattcaaacaaatcataataaagtgaagcaatatttttaataatagacactactaaaattgaaaatttaaaaaaaatagcagatattaaattgcagccacctggcaacaagggtagattcttttgtttttgactcctgcaaggaagacaaggactgaccactgcctttctctgcaacttgattcattccattgtctctaccaggaccagaactcttagaaccaccagcctctgataagataagcaggtggaaattacagtaagcacaattgctaacaagtacgcaacttatgtactaaaatatagcacaagattcatgaaaatcttattcattagacatctacattacaataagtacaaaagaattgcaatgttagtaacaaaagcaggtaaacaaccactacatcagcaccacaggggttagtaaaagaaacagaatccagcacaaaaatcaaaaacattgcaagcgtaggggcaaagaaaatatgttcaagataaaacttgagagtgttcattgacctagca

SEQ ID NO: 1927 - DNA, 585 bp, Gossypium hirsutum
  misc_feature (519)..(519): n is a, c, g, or t
acaaataaatgtaaggcaatgctgtatgttactctgacccttcatgtttcatgcatgtttgacactctatgtgacgcatttttagatatagatatgagatatgatccttcaacaatgctccaactttaaaaaaaaaaaatttaacatattaatatttaaatcatactgctatcaaacactaacaaattcaaattcaataacatagatgatgccaaatgcaatatccctccaaaatgctaattacaatgtcattcagatgaactaaaaaggagggaaaaaatgcatcaccttaaagaaaattggctagaaaactatgcaattttatcactctcaatctttttcaaatttattgttatctgactaattttattctcctttagctttgccaaacaagtaaagacaaagttaagcaatacataaaaaaatattatgatttttttcaaaaataaatattgcattatttttagaatatatgtcataatgtcgcaaatattaatttattatataaaatttgacatnttagcatattcttttaatatcttttttctgcatgatattatattttatgtaacattttaattaatt

SEQ ID NO: 1928 - DNA, 640 bp, Gossypium hirsutum
ttgatgaacaaaatatgccaccttgaaatttaaaatttagtttcttctacttaaaaatcaaattcagttacttttttatttaaaaattttagtctaatcattgacaccatcggtatttcccgtcagattttgcttactactaggtataccaagtctataaggattcgcttcttaagatagtatgatggcatgggtattgatggcaaattttgaccaaaaaaactataggtgtcaatgattagattaagattgttaaattgaaaaagtaactagacttatttttaatttttacatacatgaactaaatctcaaactttcttcaagtacatgtactgacaacatatttcgagccaaattgatatacacacacaattatatgtgtgcgcattagcagataaaactgatagaataaagaacctagtggagacctttaaattgtgcaaattgcccaatgtgtccggaagctctgacagaagattcgctgaaagatcgacctgaagcatattaagcagttcggttaaactatgcacttcacttggttagtgtactatagattacaagcaaagacaagggcaacgaatactatacctcaataagagaactacattctccaatgcattctggaacagtggttatcctg

SEQ ID NO: 1929 - DNA, 635 bp, Gossypium hirsutum
tacccaatcgaacaattttttttttacctaaaacataatttataaacaaaattttcgaagccaggcccaggttgaattaatcattgtgcctaaaacttccatcttttaaaaaaatcataataataaaatgaaaggtatagggattttgattcccttttgacttatttccaaactcttcactgcttttactcggacatgtctccatggttgctgctttatgcaatggttacacgcctcttcttctttaatcgcttgcgcaaacacgcgagggtgatgtcttccttattgatcttgctcggttctctcacaatgtcacggggagcaacggtcttgtttactacatcaactatctcaatgtttgtgccattctcgccatcacaatgttgcaaaccgaattgggtttgatctatcttgctacgttcatccattccttccgataaacaagcattatcaacaatttcacatcttctcttcttcaatttattacgaagaaagcaagcaagagtctgatgatctccgtctgtctgaccatcctcatctccagatggcttgttgctctttctgctcttgctttgctgctgcttagttctgttctttttcgtatttttagttgctgaaaggttcttgaagtgttc

SEQ ID NO: 1930 - DNA, 895 bp, Gossypium hirsutum
  misc_feature (205)..(205): n is a, c, g, or t
actataatcctataattcagtatattccgatataaaatttcctctctacccaatcgaacaattttttttttacctaaaacataatttataaacaaaattttcgaagccaggcccaggttgaattaatcattgtgcctaaaacttccatcttttaaaaaaatcataataataaaatgaaaggtatagggattttgattcccttttnacttatttccaaactcttcactgcttttactcggacatgtctccatggttgctgctttatgcaatggttacacgcctcttcttctttaatcgcttgcgcaaacacgcgagggtgatgtcttccttattgatcttgctcggttctctcacaatgtcacggggagcaacggtcttgtttactacatcaactatctcaatgtttgtgccattctcgccatcacaatgttgcaaaccgaattgggtttgatctatcttgctacgttcatccattccttccgataaacaagcattatcaacaatttcacatcttctcttcttcaatttattacgaagaaagcaagcaagagtctgatgatctccgtctgtctgaccatcctcatctccagatggcttgttgctctttctgctcttgctttgctgctgcttagttctgttctttttcgtatttttagttgctgaaaggttcttgaagtgttcagctacgatggttcttgaacttttagaggtcaatgagttaatgcaagttttcctcttcgatcgagctttagctttcctagaagcatcatccgcacagagaatttcagattcaacaccgctgttttgcatcacttcagcaccatcatcacctcccgaaacatgggaatctcagaacagatagaatactgttcttcatgtgattctgtgcagatac

SEQ ID NO: 1931 - DNA, 618 bp, Gossypium hirsutum
  misc_feature (611)..(613): n is a, c, g, or t
gtattatttggtctttggcatgttagcgcatctgagttgataataagctttttttcctttttcatcatcatccttaccgttagagatttatttgctctgctaaataggctttctgggttatgcagggtttttttccctcaggacttggatgctgcagctgatgctcttcttgctggtcggaatgaaagtcaatgacaaagctttatagaaaaaaaaaattaaatcgatataccaatgcttttaatctaccaagacttttgttttggaaataaagatctatagagatagatctaaatggtgctctgtttcttgcaaccctcatacaggtttagctcctcttcgttgttatccattaccatccggtacaagtttaatcactttttacaagtaagacctacacatttgaatggttatgatacgtgcattgaaaattagtgaatgaagaagtaagactgatttcaaaccccacttatatatagatgtgtttaaccattgcaaagaggctctgttaatgtctcccgagtcattgacattaatcttaccttgtcaagcacgtctcacgtcccaatcgaagaaagatcaaaaggatggaggtcaatgcagtcgacaannnaaatc

SEQ ID NO: 1932 - DNA, 510 bp, Gossypium hirsutum
agaacaaaacgcataaacttaaaagggttatttattatcaatcagcaagtaaaaatgttgttattagatgattgattctcataccctttaacgagttgaacttggctcagcacaccatcatgagactttgtcagattcacaagtagcttggccaacagatcacgttcaacatcttttctctcgaaagaatccattacaaaaagagcaatcattgagggatggaagctcggagaattcaagtctttgatgcacaaagcaacttctttctcatctctagcactgttaagaattaaaagagaaaaatcctaagtactttgataggcataaccaggtaataacatctaattctgtaaataaatcaaggacagcagtataaacatgtcaataactaccattaagatttgcactacttgcctcaaatcaagcacattataaatatcaaaattgtattgcaatatatcttaaccatactgtgaatgacaaaaccttgaatatcaacatcatcctacg

SEQ ID NO: 1933 - DNA, 618 bp, Gossypium hirsutum
  misc_feature (400)..(400): n is a, c, g, or t
  misc_feature (433)..(433): n is a, c, g, or t
  misc_feature (443)..(444): n is a, c, g, or t
  misc_feature (454)..(454): n is a, c, g, or t
  misc_feature (574)..(574): n is a, c, g, or t
  misc_feature (576)..(577): n is a, c, g, or t
  misc_feature (580)..(580): n is a, c, g, or t
ctataatatagttcaattcagataatcaagttttctttaatttttaccccctttcattttcccatacctagggttcatttttcagtggtgtggctgattgttttggtaaagagctgatgccccacctgtgagaatttgagatgtagttttctaaaatcagggtcattgtgttttagtggccaatccctctggtatcgaagaatagagagagaatgtgcttttattcattttggatttaaattccaaagtcattcattccattccttgcctttcaatctacttataatctcttgtaattaccaaacattctatatgaccttagtctgttggcatgtttatctatttctttagaatctaaatttttgaaaagatgcttattgtctgaatgatgttcatttgnatgattggaggctacgactgactgaagctcttntctatgatanncggcgactgnaatgtatatcattttttttttgaaacataagactgggatggattttaaaattttttgaaaaacaattatttgaatttgaattaaagggtgcggatatccattttttgaattggaaataanannaanaatgcaggactttggcaaatgggtaggaaaactaagta

SEQ ID NO: 1934 - DNA, 626 bp, Gossypium hirsutum
  misc_feature (616)..(619): n is a, c, g, or t
gtcctactctctttcctttatatatatggctcctgactattattttagtaatagtagaaaggcttcgccttgtgaaatatagtaaacattaggcatgtttctgttgatttttgctgatgttgattgcttcttaactgaccttgcaccaggtatatgagcagtctatctctgctgtctgtcaacttgattggccaaaggaccgattattgattcaggttctggatgattccgatgatgaaagcatccagtgtttaattaaagcagaggttgctacatggaaccaaaggggtatcaacataatttatagacatcggttaataagaactggttacaaggctgggaatcttaagtctgcaatgagctgcgagtatgtacaggcctatgagtttgtagcaatatttgatgctgatttccaacctaaccctgattttctaaagcaaacagttccacatttcaaggtgaagagaaacaaaccagaaccattttttgtttaagtcccttccctagtgtacaatctgcttatcaggcttttaccttgtcttgcaggacaatcccgagttagggttagttcaggctagatggacttttgtgaacaaggatgagaatttgttgactnnnntccagaa

SEQ ID NO: 1935 - DNA, 660 bp, Gossypium hirsutum
tctactagtttagtatcctcctttctcagattttgcatttttctttgtgaatataaccatctttgtaactacgagtcttagatctgattggatatggccatacagggaaactaaatccatcaaggtgaatgacatagctacccagatggcagataatgttgcagcagcagtggaagctaccaattccttgccaggtggcagcagatcactgtcatttcattacaataggcggaatccaaaacgaaggtggcttttggacacttcatgcagggctcccttgtctgaggcatctgatagttcaacaagaatattttctgctgagggcagtactgctggggaagaaaaaaaggttgaactcagtgagcagattaatgtttcaagtgattttaacgaaggtccagcttctctagccaagatggttgcagtgctttgtgaacagcacttgtttctgcctttactaagagcatttgaattgttcctcccttcatgttccttcctgccatttatccgggctcttcaggtatattagaaagacttaagtctagctttattatttatctttgctgccttttaagcaggagaggactgccattaatgtggtagaattgttgtgaaccagttatcaccaactggtggtagatgcgtcattgtgtcctgata

SEQ ID NO: 1936 - DNA, 643 bp, Gossypium hirsutum
gcattgcattctttctaactcttacttgaacatgaaaaaccctgctatcttctttttttgttaagacaactttcactaataattgacaacactcacaaaagcaaacaaaggacaaagacatttcagaaccaatatgtagaattaaaacatcagtagcacaagtcaaccaagactcgaacaccaagtaagaacagacagcgccaggacatggaaataccaatgatagcacaaagaactcaatttaacagaacaaatatcaccatcaagccaagaaaatacttcccttcaaatgccaaccttaattaatacatttgctatctcatttccctgaaaaaatttgaccagctgactgatccaattaatgaacccaataatttcaaggcatatgcccacttccacgttcattccttagaatccatcctcttaaatacaatcagcatcccttaaaattccaacaaattctcatctattacccttagcaagaccgctagtgaaaataaattaaacaaaaataaaaaacacagccctttatatagacagctcttaagacaaacaaaagaacctctactctctcattctaacttagaatgtgccaccccacaagtctccatacattactttaggccataggtgtgctacttga

SEQ ID NO: 1937 - DNA, 609 bp, Gossypium hirsutum
ttgtacatccaactggactggagttgaatgttctgatcatcaaggcaatgatggatacttacatgttgaggaactgtgtgttttctctttcccacatttacttttctcttcatttcagcattatccattttattgattatatatatataaagttgtagacaaagttatggttaagtttgttctgtaaattgatgcagtcagctgcaaaatatgaatctctctggaattttagcaccccgaactcggccaactttatcatctcaaaatactgtgagttatgaaataaagtgcatgttatgtcgttaaccattctagataaattccatttgtactaacaccttttctttgaatttcttgaagagatttcatgtggaatgttttaacgggtagtatacccaaggagataggacatctctctaccttaagactcctgtaagttagattttcttatgccttcttcttctcttaaataaagggattagagtgagcaaataatatatatatatttagttttaactttctgggtggcattatgtttgcagactcttgaatgggaacaacctttcaggttctttgccagataaacttggctacctccaacaactggac

SEQ ID NO: 1938 - DNA, 701 bp, Gossypium hirsutum
  misc_feature (660)..(663): n is a, c, g, or t
aacaaccagacttgcagagcagatggaatgtgctcaatgagattgctgctgagcatagcattgccctacaactccgtgaaacctctgtttccgctaccctggtatgcaatttatgacagaaacatacagagagattaactcataaattgctagttatgttatcaatgcaggaaaatttggacggaagcaagaatcatagccagcccaagttaggcacaataggtaaggcaagtaaccatgcagtcctagtagatgacaacgagttctctgattcaacaaaagcaaggaaaaaatataaggatgtagctgatgccgctcaagcagcctttgagtctgctgcgaatgcggccgcagcagcaagagcagccgtggaactctctcggtctgatttccatgatcctgatgatgatgatgatgatgatgatgatgatgatgatcaaaacagtcccaatagtcaaagaaaaagagtgcttgagagacaggaaccaaattctgaagataaagaaactcaacaaggcaatcaagcagaggacttgaaacagacaccagaaatcaagatttcgagcccttcttcaagtaaagattcatcacaaggaaacctggacattaggacagtgtcgttggatgaatctttacttgaagaagggctcgaaatcttgnnnnctggtgtctgtttcaagtcctctgcttgattgccttgt

SEQ ID NO: 1939 - DNA, 656 bp, Gossypium hirsutum
ctgcaaagttcagttgatatattagtggcaaccccaggaaggcttatggaccatattaactctacaaagggatttactctggagcatctctgttaccttgtaagtggtggactacttgtatgcattgcaactactattgggccttgacttcatttccaatggtatttttagaatgtttgttcctaaacattgtccatgggattgaaacattttacctgagatctgtctgttcgagacttgataatttctctatcctatcttgacttcctatggtaaattatttcaggtagttgatgaaacagatcgactgctcagagaagcatatcagtcttggctaccgactgtacttcaattaactcaatctaatgaagaaagcctctttcctcttgctaattcttttctttcatctacctttggttccttaaaaaccataagaagatggtaagttctatgctctttttcatttcttaatctttgatgtttactatttagcaatgagcctcagcacaaaattatctgaacttagtttctcatttgtttgtacatttttatttgtaaaatgtgcatttttgtttagaagcatttacatgcatatatagactggcttggatacgtgtaattgtgtatgtatacatactggaactagccttcttgca

SEQ ID NO: 1940 - DNA, 646 bp, Gossypium hirsutum
tgaaagcaacatcacatgcggctctataagagaagctgccaaatccaaccaacaaatagcgcaacaccaaactggtttcatcgataagatttataccggagtcaagccaacaacacctgcacagacattatcagaagaagatgagaggaagttacaaattcagtataatgtttgatgtagactagctttgatatgaataggatgtttatgtgggaaagaacattcgcatagacatcaaagatctgggactaaagataacttagtccgtctcaaacggaaccgcagaattgacaaaactatgtccaacaaaaagaagatagatacgtacaccaccatgttcattgccaagccatagtcaatgcacaagtatttcaaacagttcaagggtccatctgagatgggttatcagtcttaagaggctgcaaatatatcaaaaccttaaacctatctgtccttgtcctacccatggccttttaaatcccctccctccaaacatacatacaaatgaatgaatagaattgcatcaagctgaaggatctaatatactaaagatttaactttgtcaggtttcgagaaaagtttgaatcaaacacagaatcatccccgcgagcaaaatcaaggcttgagctgagacaatgaagtaaaa

SEQ ID NO: 1941 - DNA, 604 bp, Gossypium hirsutum
tctttaagagtgctaatctcatactcatgttttcgctttaatttatcaatctttttgtgagccttatcagtttcttgttctgcttccattgctcgcttctgcaattattttagaacagaaggaaatgagaacaatctaaaggcttcgaataccatcaaagattactttcactgccccctgggaaatcatatagattccaagctcatcccaaagcaaaaaaattaaaatttatgagctttgctaaagacatcttgggaaagcatactaaaggaaattttttatgagaaaggagaaatataagatacagaagaagcttactacttactaggtctaacaagtctaactgcagtgttatttaatgttctctgatttcaaagtacaagcgttccatctggaaagtatcttatattgcctcatccacatttacttggaaaatcaataaattgaaagacaatgctacttattactcttccagcaaaagcatttaaaatcaataaattagaagactggacagacacttcaacatctaaaatcaaatatgaaagctatcttagttaccagttatggccttaagctcaaaactgaatatgtagcaacaatcata

SEQ ID NO: 1942 - DNA, 624 bp, Gossypium hirsutum
aaactttcttggtttcccagttcgagaattttatatctccctctgtcagcttgctaagcttatcaactaattccatgtaatactcagtctcctccacattcgttgactcaaaattctcctgctttccaaggccttcagggattgaaatgcgagcactagtatctgtagtggtgagggagtcatgtttcactgactttgatgaccatttcttcgacttcacttccaaagaccttgaaacttctgtcagaaatgttagtacactactcaagttagatggcaaagacagtgtactgtgtaccacacacatataaagcaattgaaatttagaaccctaacctgagacgccatggacgacaaatgggttctcagagtactcaattttcttaactggacgttgattctttgtcttcctagtcacaacagatacttccttctgatttgccaccttcaatgcttttgaatttgttccattaatgcagctaccagccttgaaagaatgtttaccagaaactctccttggctcatttttaagcttagatatcttcttgtttttctctcgaatctgcttcttacaaactactttatctagtacattatccttttgcttaccgtgcttactacctg

SEQ ID NO: 1943 - DNA, 648 bp, Gossypium hirsutum
gagcataattagatcatctatacatttaacgaaggcaacttaatgcaacaaacagtagtccagaatcacacttaccggggctaagacaaagaaagaggcgataggttaatttagatttatcccttttaatgaaacactggatggttccatcgcgtggcccaggctgaaaagtcaaacaagagagttagagaaacaatctcaagctcttgatttatagtaagaactgattacgtctcgacataatgtccatgtaggagcaactcgaatcagaataaagacattttggatgaactgatccagtgatcccacctgtttcagagacacggggaaagtaagcttcccacagaattcaggactcttaacaatttctttgcagatgaatctccacgaccgacaaactgatgcacatgcaacgacattctttcgagtaggccatgtgctctcactctcctccaacctcttgatcacatcgacaagcagctcagggggtaggttagcccaccggctgctctgaactacaacaggctcatcgtgcaaatcgtgtaacgaaccatgggattttcccctatgatgccccatcaacctaacatcaaaacttcgcctagacaagctcccaaaactatccctcacatcacgaactatgctaca

SEQ ID NO: 1944 - DNA, 642 bp, Gossypium hirsutum
  misc_feature (43)..(46): n is a, c, g, or t
  misc_feature (554)..(554): n is a, c, g, or t
  misc_feature (633)..(633): n is a, c, g, or t
tccttatttctgtagagttgcttttcccataataatcacaaannnntctcaaaaattcattctggaaattgtaatttgcgagctcctcacgttctaagaatttcatagcaagttgccgcaacgaatccattacaaaaattgctacagataaattctcagacaatccaaccgaaacaaagaaatcagagagaacattccacatgcgactccaaactaatctgatgcggttcatattgtaatgcctgcaatagaacattgtagaataagggagatatatgtgcaggagaaatctagagcaaccttatctgtaagggtaaaaccctgggcctaatggaacttaaaataaaagaaaatttccaaaaaaaaaagggaaaaaacctaacccatttccactaagtttggcgaggttaaaaccccgggaactggtggaaaacggcacttccaaattaaaaccttggcaaggggttttcccaatggccctaatggttccctggttaacccttggataaggggcaacccctggatccacttcaaaattcccatccggtcccatnaattccaggttggcaaggaagggataatccggttcagaaaaacccaccccaaaattatggatcccaccaaaggggtttncttagaacc

SEQ ID NO: 1945 - DNA, 659 bp, Gossypium hirsutum
tatcctatgtcttgagttttcattagcatgagattttcttgagtgtatttgttagcctgactcctatacaaataaagaattcagaaaataagaaaagaagaccaaataagctttctacatttacaagcctgaatagaaaatagtataaacaagaaagctgtattttactaaggtttattaactccatccacagttcttgtctttatcatctaaaagtgaaattcatctgggtttctgaatgcagctttccccttgagtttctgtagagaaaatcaacaaaaaaagcacaaaaaaagaggaagaaattagtgagcacatataataatataaacagcaagaattgaatgcactaaacaaataaacttgtccgtaacgtttcttccttcttgtggaatgctttcgtacggacgacataatccttgtgtttctcaagaaacccaatatttttcctcgatgacctaaaatataaccaagtattgaacaacacgaaagccaatgcacaataaggaaaagttatgtagaatgcatggctataataaagggaaaaaaaagctgagactcacggttgagctcgttccttgtgagcacgtctgctgatagcattccttaatgatgacatgttcaattaaggaaaagcaaacaatcaccagaactttacg

SEQ ID NO: 1946 - DNA, 661 bp, Gossypium hirsutum
tagtttgcactttgcgcccaaaaatatttgaagcacagaagccatgaaatgaggaatttgatagcaatatcttggcctatctgaccaacaggttaaagcagattcattctagatctaacaaacaatataaaattatctgttcttttacaaggcgaggaaccaaaaagatagaacttttcgcatacaataagggggggggggaggcttaaagtttttaatcaaatttctggaaattagcaaatcaaagcaggttaaaaaaaatggtcatctcaggacaaagaaacgaaattgaagcggcaaagagataacaaaaaataaggcagtttagtaaatataaaggggagagttagaacactcacagtacttctcctttgctcagcagcaacagcaagggcgaaagcaatcagatcaatcacaaaaaccagagccagtagcaaggttgaagccatagttcaagcaaacaaagaagaaggaaaatctcgagaaaatatgagccagagaagcaaaaagacgcacacaaaaacagtattaatcaaaagcgctaagcaagtggaaacaatgctgaaggggtaagtactttagacactttagtttacgcagcataaataaatttactaattaataagcaaagggcaaagtgatccaataataaagcaacctg

SEQ ID NO: 1947 - DNA, 607 bp, Gossypium hirsutum
  misc_feature (592)..(593): n is a, c, g, or t
  misc_feature (598)..(598): n is a, c, g, or t
gtgcaaattggttactatcaatacgccaaaaatgtgaaggtggcgacactgcaataaattggaaagtgagtatgaaaggatgatcaaaaaggaaaataatcattatactaaaacagcatctatctacaattcattcatgcagtttggctatcaatagaaaacattatacctgtcatacgtttagtttcaaatcccttgtccaattccttataattgaaaccatcacaaccatcttcctcagcatcagatatgcccaactcagcattaatatctgcattggacttctcttgtgggattgaacaatcagcaaatgctttatccacgttgtccccacagacccttccaagtaaatgacaaaatagaaatattctaagacatcagactgcttcactcggtgcaacaagacaaaagtcaccaatgtcttaaaaacttgaggaaagtaaagagattacgttttgtatgtatctaagcttatgaaaagatacaaaatgagaacacacttggaatggagaacatattatgcaacacaagcttaatcagaagataaaacattcaatcagatagtaagatgccatggtctatgaagactgcnntcatnagaagaaca

SEQ ID NO: 1948 - DNA, 620 bp, Gossypium hirsutum
actgtggaagcatgcaaaaggaagtgaaatagtaaccaagaagaagattagtttagccttttgagcaagacaagaaacctatattgctcggactcttatttgattgaagtacctgtgtccaaaacttgtgtctaatacatggatatgggaatatgacctctaagaatcttccaaatacataaaagaactcagaaaaatccaaccatacccgtatccgacactcatacaagtccaagtaacaatagcaacaaacaccatgccaaaaagccatagcagccaaggcatttgataaactacaaatagttcatgatcaataaagctagtagtttaccataccagaaattgaaagttgagaatataaaacatacataaaggaatttgccgcttcagaagacatgaaagaagatgcaagaacggtggtgtttcttatgcaacaattatgagtacatatgtttagtgaactgactcaatttgataaaaacatgcatccatcagcagtgcataaatagaattgatttatagatttaatcctctttagaatctggcagctaataccacgagttcttcatccacaaaaaagccctagaggtcacagagaatatgcctaggaattggaaagg

SEQ ID NO: 1949 - DNA, 651 bp, Gossypium hirsutum
ttgcagtacatatgaaatctttaataactaaaccatgatatgactgggatgacttcttattctgttcaattgatctttgttcaatgcaggcaattttttctgatgattctgatgaagatgtagaagacacaaataccaaaaaggtggaggatccggagaagaagattgaagtggcaactacaacactgaaccgtttgatagcaggtgactttctagaatcactgggaaaagaactgggctttgaggttccccctgacacaccctactcaacaaataaagccaactcgtctgctcagatagaaacaccaaacagtgatgctggaattgcgaaagttggtactgttgaaggccatggaaccttctgtgctcctaatgttggcactggaacttctctaaaccctgaacaagaaactactcaaggcagtgaatcccccaaaaatgaatccattcctggcaagcctgtgagatatagtagcaaacatactgatggtttatctgagagcatatctggtaaagtcaatgcagaaaagtttcctccaggggataagaaagtcagatcaccctccagccgtcggagaaactggagcagcagctcctcatcagaagatgaaaggagtagaaaacattctaggcgacatcgttatagaagca

SEQ ID NO: 1950 - DNA, 627 bp, Gossypium hirsutum
cgattctaactcttgaccaagtagcattgggcgttcactccaaaaatctcgcaactgtttgaatcataggaacaagcctatttgcagtcatagtctggtaagctcgctcttgttaagggtgtgtgcgagttaattgtaaatgtaaaaaataaaataaaaatgaaaatttagtataacctcatgtttggttggttgtaatatccatttcattactgatcaatttggtgataatcagttatccctttgtttggttcaccgaatcattcattccatggaatcatcattcatctcttattacagtttctcccgtaataagcgttcctcaccatacccaaagaatagctgagaaataaagagaaaaatcttacctcaagccaccacacccccaaagtaatcgacagagttgatcccggtaaagttattattcccctcaatctcacttcggttgttacaatttcatctctttgcttatttggttagaaatctaagcttgtttatatattaggtccatccctctaactctaaaaggagttctgtatgaaaggagaaaattttttgtttgacaggtgattgatcagagagagcgagtgaattaacgataatggcagaagcgaagaaatctatggg

SEQ ID NO: 1951 - DNA, 462 bp, Gossypium hirsutum
ggggactaataaacagtatcggttaaaccccaataatctattaacaagctacctaaagaccaaccgtaattacctgaagaggtccatcagctgccagaccaaacgaattcttgttgaactgaatcatgaatccatcaagtgtgatctgtgagttattctcaaacattaaactgtaaaatatttgaccatcttgtcgagctaactgtgcactgatttgcaaaccctgtccggtagatgctggaagtaaaataggcaaaggagggctgcaatcaagggaaaaaaaaatcagtgaagcttgacacatgtttagtgtttaaaacttaaatattatcacaccaaaagcaaaatgttctggtagatataacgggacttctatcagcattccagcatacttacccagaaggcattgctggctgatcagcaaggacaatagcattgttatcaaggccaattaggtcgcaa

SEQ ID NO: 1952 - DNA, 616 bp, Gossypium hirsutum
ctgccctgagttgggccagggatcggttccaagctgtctggactgggcgccaaggcttcatcagacacggacgctgattgtggtaattgataaacggcggaagccgaagatggaaggtgttccatggctagtgtgacctcaatgttaaccttttggccggccagacagtggcctgggatactacaaatgaagtacaagtggccgggtcttgtgaggttgatggtgtcggcacctgatgagtagactgcaattggagatgttgcgttgcatgacttgaagttctggtgagtcacacggaccacgttattgaacttattgttgtacctgaaaactgcaattggggtattgataaacgaacttaatttaccatcatgtatttcctaatcatagtgagcaaaaccagtaggtttaaaggaagaagagttttaggtgagatatctattaggtaaaatttatggaagatccctataatttttcatcttgccagttttagtccctttattataatttgattctttctagtttctctacgttttgaatattaaggtcctttttttcataaatcatttgatgttcctcactttttttaaatatgtggcgatgtggatgtattata

SEQ ID NO: 1953 - DNA, 619 bp, Gossypium hirsutum
aaagactcaaaggcagttcatggatgatagaggatctagctcatgaactaagggcccatacttttataaagttgcaatactaggttaggaatgtaatagaagtaattgaacactttttcatttgtttgtggtcaaggatatatgtattgagtgtaatgaatggttacccacctcactgaaaaatacaccaatattaagaagtcaaatgtaatgaaaggttacccacctccactgaaatggaagtccaagagcagctcttgtagcatagtacaccccaaaattgagaaggaaacccctcacctgcaactttcaatttcttaagattttttccaataatgcctttagaaacaaacatgacaagtttttgcagtagtaaatgatggtgccaattaatgcaaaagggtaccatttccatgtaggttaaggtaattatcacaaaaccaacaactattaagatcattaagctggtccacttactgaccagacttcatttctgttttacaaccaattctggacccaaatcaatcaacatttatgctgcataaaattcaattaatcaatgcaccagacacaaggactgaaatatgatataaggttatctctgatgacttctgccatg

SEQ ID NO: 1954 - DNA, 466 bp, Gossypium hirsutum
  misc_feature (414)..(418): n is a, c, g, or t
  misc_feature (430)..(434): n is a, c, g, or t
tcagtcatggatattgttggacgagctggatggcttgctaaagaaagaaaagagctggggaatgtttcgatggacttctacagattgaaagacacaatttgtgcaattgatttacctgaaaatgtctcctttcctgatttagattctcgcttggcttggcttaaggagtcctttttccgggctaaggatgacataaataggttgcaaaatgaaatttccagaataaaagaagctgcacgtgatgagatagatcacttgagtgcttcactttcaactgtacaacaagagaagcattacatcaaggatgagttagatcaactcaaaaacaaatatgaggaaattgttggcatgggcacatcagatatcatcaaacaaggatcatttaagtgcttcacttgcaacagaactagtagnnnnngattatgttagnnnnnagttggacaacctctcaactgaatatgaaaat

SEQ ID NO: 1955 - DNA, 626 bp, Gossypium hirsutum
ttagtccttgtagttttatttctaggaatttagtcccttttcaaattacaaaattcaagtctagttgttaacaatgttaaaaatattttattaaattcaggttcattgcaaaatttaacagctttactgtaggacctgaattttgaaatctgaaaaatagagggactaaatttctaaattgtgaagagtataaggacttatgacatattttaacctttatttaactgaaactgggctagtggtcggactgggaaccagtggcttaactggttcggccatcggtctggttccgaaaacatcggataaaagtaacactccattgttgtcttctccctaggcaaggctcaaaatatatgtacctttgtgtacaactttgatacaggttctgtttctaataagcatgtacgatagataatgcataagcagaacattttatattagcagtccgttttccatatgaatctagaattgttgttaaattagcatagtgttttctcctatctgacttacggattagcttatttctcatgtctttttatatcgcaattgttttcttttttttccgctttatattctccgtccttacatgtactttctcttgagctgatataggttgtgatgctaag

SEQ ID NO: 1956 - DNA, 615 bp, Gossypium hirsutum
  misc_feature (607)..(608): n is a, c, g, or t
aaaactcacccggcttccagtttcagagctgagattaaatgagccgccactggaacgctaaacacaatcaagaattcaaccaaaataaatttaaatcagtattaaaccataaaaaatatcttaatataatatagtaatcatcacaatgcatgcagatgatgtagcattttgtttgctttatacactgagaaggatgtgttatagagctcgcttttggccaattaatttcttagaattgaaagctatgttatatgaagatcttaaagaaaacatacaagagtttcaatactagccggcatgttggcctttaaaaaattacaacgaaacataatcaagagatgtgcaaatttaaagccacaaaattttacattcaataaaatcctaagcattataatcagccatcaagaagttgagttcatgtaaaatataaatacgtaaacatgtaggagataatccatgcaaacttgccttaacagagagagaaagtgataatgcaacagctccccggagccccgaccatattaggatggcggcctcctttaaatccaaaccatatccaaaatatcgtaagaatggatataatactccaacaacaatgcaacgtganncttggac

SEQ ID NO: 1957 - DNA, 1284 bp, Gossypium hirsutum
  misc_feature (614)..(615): n is a, c, g, or t
  misc_feature (638)..(642): n is a, c, g, or t
  misc_feature (646)..(648): n is a, c, g, or t
  misc_feature (650)..(653): n is a, c, g, or t
  misc_feature (660)..(660): n is a, c, g, or t
  misc_feature (662)..(663): n is a, c, g, or t
  misc_feature (685)..(689): n is a, c, g, or t
  misc_feature (702)..(704): n is a, c, g, or t
  misc_feature (727)..(729): n is a, c, g, or t
  misc_feature (733)..(745): n is a, c, g, or t
  misc_feature (748)..(749): n is a, c, g, or t
  misc_feature (753)..(756): n is a, c, g, or t
  misc_feature (758)..(758): n is a, c, g, or t
  misc_feature (760)..(760): n is a, c, g, or t
  misc_feature (762)..(767): n is a, c, g, or t
  misc_feature (771)..(775): n is a, c, g, or t
  misc_feature (777)..(777): n is a, c, g, or t
  misc_feature (779)..(796): n is a, c, g, or t
  misc_feature (798)..(805): n is a, c, g, or t
  misc_feature (807)..(809): n is a, c, g, or t
  misc_feature (813)..(818): n is a, c, g, or t
  misc_feature (821)..(826): n is a, c, g, or t
  misc_feature (828)..(828): n is a, c, g, or t
  misc_feature (830)..(831): n is a, c, g, or t
  misc_feature (833)..(839): n is a, c, g, or t
  misc_feature (841)..(841): n is a, c, g, or t
  misc_feature (846)..(857): n is a, c, g, or t
  misc_feature (859)..(880): n is a, c, g, or t
  misc_feature (884)..(896): n is a, c, g, or t
  misc_feature (898)..(910): n is a, c, g, or t
  misc_feature (912)..(916): n is a, c, g, or t
  misc_feature (918)..(933): n is a, c, g, or t
  misc_feature (938)..(939): n is a, c, g, or t
  misc_feature (945)..(946): n is a, c, g, or t
  misc_feature (948)..(948): n is a, c, g, or t
  misc_feature (952)..(958): n is a, c, g, or t
  misc_feature (960)..(963): n is a, c, g, or t
  misc_feature (965)..(967): n is a, c, g, or t
  misc_feature (972)..(978): n is a, c, g, or t
  misc_feature (980)..(992): n is a, c, g, or t
  misc_feature (994)..(999): n is a, c, g, or t
  misc_feature (1002)..(1005): n is a, c, g, or t
  misc_feature (1008)..(1009): n is a, c, g, or t
  misc_feature (1013)..(1015): n is a, c, g, or t
  misc_feature (1018)..(1027): n is a, c, g, or t
  misc_feature (1029)..(1029): n is a, c, g, or t
  misc_feature (1031)..(1034): n is a, c, g, or t
  misc_feature (1038)..(1038): n is a, c, g, or t
  misc_feature (1042)..(1050): n is a, c, g, or t
  misc_feature (1057)..(1060): n is a, c, g, or t
  misc_feature (1062)..(1084): n is a, c, g, or t
  misc_feature (1087)..(1093): n is a, c, g, or t
  misc_feature (1096)..(1096): n is a, c, g, or t
  misc_feature (1100)..(1105): n is a, c, g, or t
  misc_feature (1110)..(1118): n is a, c, g, or t
  misc_feature (1122)..(1144): n is a, c, g, or t
  misc_feature (1146)..(1164): n is a, c, g, or t
  misc_feature (1166)..(1177): n is a, c, g, or t
  misc_feature (1180)..(1196): n is a, c, g, or t
  misc_feature (1199)..(1199): n is a, c, g, or t
  misc_feature (1203)..(1208): n is a, c, g, or t
  misc_feature (1211)..(1214): n is a, c, g, or t
  misc_feature (1216)..(1230): n is a, c, g, or t
  misc_feature (1233)..(1239): n is a, c, g, or t
  misc_feature (1241)..(1241): n is a, c, g, or t
  misc_feature (1247)..(1252): n is a, c, g, or t
  misc_feature (1254)..(1258): n is a, c, g, or t
  misc_feature (1260)..(1267): n is a, c, g, or t
  misc_feature (1269)..(1274): n is a, c, g, or t
tgtcatgataaagtaagttctccccatattagcttctctggattttgaacatttttttaaccagtctgttgtgcaggaagttttagggttacatttttgtggaataaatactaaataatcaaaaaataatatttcaagctgtgtggtcaatgttgatattttgagcatgtaatgggtgggctctgattcctcattggtgataattttgccgatttaggtgttttcctcttaaaatttcttggctgagctcgttttgcatgtagcattgtacttcactgttgaatataacatattataaccttttaagttggcaaaaaagggtccagtttgacagtgtaagtgaatttcatggcaggttgcatcatggtgggactatggttaccaaaccactgccatggctaatcgcactgttattgtcgacaataatacctggaacaatactcatatcgcaactgtcggtactgccatgtcttctcctgaaagggcagcttgggaaattttccactccttggatgtcaaatatgttctagtagtctttggaggtatggtttcttttttgttcacatgaaatacagtgtcttaatatattaattttctgacaatttacttccttnncaggtctcattggttaaaaaaannnnnaaannnannnnaggtatnanngggggaactttcttttttcttnnnnnttgttttttgggnnnaccatgcataagcctctataaannnatannnnnnnnnnnnnccnncaannnnanancnnnnnnactnnnnnanannnnnnnnnnnnnnnnnntnnnnnnnnannnaaannnnnnaannnnnnantnncnnnnnnntncattnnnnnnnnnnnncnnnnnnnnnnnnnnnnnnnnnnaatnnnnnnnnnnnnnannnnnnnnnnnnntnnnnntnnnnnnnnnnnnnnnncctcnnacattnntncttnnnnnnntnnnntnnngttannnnnnnannnnnnnnnnnnncnnnnnnctnnnnagnntctnnnacnnnnnnnnnnantnnnnctancctnnnnnnnnnccccttnnnntnnnnnnnnnnnnnnnnnnnnnnnttnnnnnnnacncctnnnnnnccatnnnnnnnnntctnnnnnnnnnnnnnnnnnnnnnnnannnnnnnnnnnnnnnnnnncnnnnnnnnnnnntannnnnnnnnnnnnnnnnccnatannnnnncannnntnnnnnnnnnnnnnnngannnnnnntntcttannnnnncnnnnnannnnnnnncnnnnnncctcctccca

SEQ ID NO: 1958 - DNA, 608 bp, Gossypium hirsutum
tgctgtggctcaaaggtattctactgattgtggggggaatttttattttttggttatttattttatattgtgaaattgcttgattttgtttctcaatgcatatgcaggttttcaaaggcttatatgagaatgcatccaatagtcttcatgtcaatgctcatcttgctattctggcagctgtccgtgatgtttgcaagcttgctgttaaggagcttactagttgggtatgctctgttctgcatttggaaggaggcttgttttccttggtgtataaaacagtgaagttgcattagttgcctgtaaatattagttatggagtcctatagctccattgctttggattctaaacttgttacatgttttatttgtaaagagagtacgagtaactgctataacagttggctgtctatagtggttaatctcttgccgttgttaggacttcattttaatgggtaaaatgatgtattctggctaagtttttccatggtattctgcatttggtggctttttgcataacttattggtttgttctgttgtagtggctagatatgtctggaattatctctcaatctgtgttgattgttcattcttctcttacaggtgatata

SEQ ID NO: 1959 - DNA, 643 bp, Gossypium hirsutum
tgctgtcctccgatgcttaaggaatgcagctgaaccatcgaggcaaaaaatagtcaaataatgcaagtttgccgaaacattattatacaaagacaccaaaaaccaattgcactgttcctacctgcattagaaggctggacaagaccaggaggacctgccaccacagcagttgcatgaggtaaagaaggattaccatttgaggtccaccctgcaataacatcagaagatggggaaatgacaggctgaaatggcttcacatcggagtcatctaagaattttttttaagaatgatgtatatattttgtatgagataaaataaagcaaaatacttacaacatgagcaccgatgggagggaatgccccagccatgggaattggtccgataagaggactgctagttggtggaggaggacgagcaccattagtagagggagaacaagaaagatccataaaaagagatttaatgttagggtttggatgaggattcttgcaaagctgatgctaccaattcagattgaaaaattcaacagagaaaaatgagcgggttttttgccaaattaatacaaaaaaaacaccaaaatagtataggaaaaatactatataccaaaatggtatacttgaagtgatgccacctatgtcagag

SEQ ID NO: 1960 - DNA, 649 bp, Gossypium hirsutum
tttgaagtatccaacctaagaaactttggtcgaacaaggttcaatatgttaaatacctctttaacatgattttgataaagagttcctgaaagcaccacttttcgagctgtttgcacttttgcaagggattgtagcacatcggtgttctcattcctcggtgtgtggccttcatccaaaattaaaattgaaggtgctctgagcagtatctctcggcaagatatagaagtctggctggttccaccatcacaaattatggtagagaactgcttgtatcccagaaaaaggatacttttgcactcaacccacttcttcaaaacatccaattgctgagatctattatctgctttcacagtataaaaatcaagcagtggaatatcctctacttgccatgtttcaaactcctttttccatgtagccaagatgccttttggaagcacaactagtggtttagcatgtgggcatttggctaggaaactctgcatgaagctgattatcataaatgtttttccagaaccaggggcatgtgccaagatgcagcccccagggttatctgccaccaaattgctcagaagaaaattaaagccttcaacttgatgaggtttcatttgcttcatatgccttggatgcgcagttatgtcggttactgcta

SEQ ID NO: 1961 - DNA, 574 bp, Gossypium hirsutum
aagagcacacagcattgttgtagcggaaagaatagctctcaactttatgcagcggatgagtggtatagctacactaactaaggtgcttccatttctttgaattttgtaaatgaagtaaacaaaagagttctcataatcatagctatgtttctttgttgtaatcaaacaaatcttgatttatcatatagggcagatgacaggatggcaataggaaaacccaaactgcttatgtttcattttagattgctgtggattgaatgcaaaacaatatggtggatgagtataaattttactgacaaaataagattcatcaactgtttatgtcattatttagtcaactattttaaactatgaattcagtcatgaattgcaaattatagcatgcatgttcaataactatactaaagaaacaaaacacctagcaaaagcttaccattgcaataactttttgagggtagaaaagtgttttagaatgttaattgttcctgcaggcaatggctgatgctgcataccctgcatacatcttagagacaagaaaaactgctccaggcttacgtttggtggacaagtgggc

SEQ ID NO: 1962 - DNA, 575 bp, Gossypium hirsutum
gcatgcagcacatctttctgcattccctggacctgtcttgaagctgtctaaatcacacaaagagacaagtcaagaatgatttaatcaacaggaatgaatcatatatatgcgttccaaattcatgcttcaaagtagagaatgaatagaaaaatcagtttaaatattagaacaaaaccaagatggacaaaaattaagatatggaaacaaactcttaaagctaacacaatatttcatcaacataatcaaaggactgaagatattaagataaagaaataacaggtatggatggacgacatatacaatggatcttagagctaaatcttgaagagaaaaagaacattctaagcaaataaaaggtagatgagatatgaccaaaaggcaaagcaaaaacatataaaagaacagaacattgtttttggatcacatttaaaggtgtgagcatagttttacagtttaaattcatgttagcttagatttttagaaggcaaaaaaaaaaagaagtaccaagagatgaacatgattcaacaaagaaactcagccaaaaaatagagaagtaaagaaagaaggaagaactc

SEQ ID NO: 1963 - DNA, 658 bp, Gossypium hirsutum
tcacacatagttatcaaactatgctctataacatccagagaagtgcatggataagctcaaattacctggaaagcaatcgtcagaacagtgagattttccgggtcctttataatgcatgcttgacaatgaaaccagaaatagtgaccaagcagccagacttcaacataaaattgtcatcctaagaaagccttccagtttcagaggatatattggaaaagatcaatcatttgaccctaattaaatgaaataaaagaaaattcaaatgttcaaaaaccaagcatgggattcaggcataattggaacaacaaagtaggcccacgcgcatatagcttaaacacctactcttttggaatgaagtaactgaaataatcggcagtcagccaacagaaaaagtaaaggaaaaatccattttggtaactctatccaagagaagacttctacctataaataatatcctaaacccatagaagattgttaaaattgatagtcaaatggtaatgtaggctcatgtagaatttttcgactttaagaaaagtacgattgaattcatttatagtcaaacaatagacatttcaagcttaattcaagctttgaggctaaacatgactttacatctaaaaagaacaaaattgaatcagtctacaatggaaacattggg

SEQ ID NO: 1964 - DNA, 636 bp, Gossypium hirsutum
atgtgttcttatctgcggactgcaagattggccacattcgacttgcaatgaaaacaaaaatggacaaagaaggtgcctttgcaattccacctatcattgggatggcttggttttaaactgtactcgaggtcagtgctaaatttgatgtataaaagtatggtatctatagcaattaccatctaacctgttcttgcagaagctggacagttgggagagtcttccgataaaagcaagccactcgctttgattctaggaatatctttgccaattgggtcagcctttttgtgtgctgcagtttcgatttatgtgtggagagaaaaggtggtaaagaggtgaggtaagtgtttaactttaacgtaaaacaaacgatgcttttgggatttaaaaacgcagttagcatttaacaaagcttgcccaaatgtatgtttcttttgaattcagaaaaacaaagacaagctgttcttcatatgtatgacactgagaaaggggttaaagagttaatagacttgaccccattcgaggaaaaagatcatgggacgggcatagacgtgcctttctttgattttgaaagcatgcgagctgcaacgaacaatttctcagaagaaaacaaacttggaaaaggagggtttgggcctg

SEQ ID NO: 1965 - DNA, 610 bp, Gossypium hirsutum
tttttggctgttgtttttgttgctgttaattgtgttataggtgctcactaggccattacatttcagttttttttccttcatagctagtatggggtctgaacatactaatgattgcaatgttgcaatgtagctattgaaaatgaactggaaactgccattttcaaggctgggggaatccgtgacagtaattatggtgatctgcacaaaattgcctgggccagaagcagccgaacagataaaggagtaagtttcttgttattattttgtatgtgctcgatgtgaggttggtgctgccaaaacttgtattgtcaatggatattttaggttcactctttggcaacaatgatctccttaaaaatggagatacctgaagatgcttggaaagaagaccccagtggcattgccctggctaattgtgttaactcttatcttcccgacaatatccgagtcttcagtatattaccttcacaaaagtgagagcctagtttgtttatttggatttttgcttcagtattttacataaatatttcatttctgagcgtcctttcttttctgtatcatcgccttttttaggagtttcgatcctagaagggaatgtaatctccggaaa

SEQ ID NO: 1966 - DNA, 617 bp, Gossypium hirsutum
atgctaaaaatatcatttcctctaaaaattccaggaaagggattttaaataccattaaacttattctcctaattagggctttattcattgttattgaaaattctctgccctggagataataacaatttcggatcaaactgaagttttctcttctgaaaagtgctccattttgagccaaagtgattgacccaaccttccttagttgtgtagtgaggaagatactgcttaaccttgatgccagccttttcacaaaactgcaatatttccttattttgatcctcaaaagttctccaatcatcaaatccacttgattgcaataaccccactgtgtagaaaatttcttcatctggtataacagctgacatcctatcatcccatctgccaataaaacatatcatggtataagccttctggattaatttgccaaaaaaatgaaatataaattatcaaggattctgagctctagacagagttaaaaactaggtaaaaccggactaattggggtacgagccctcaacaaatatcatcaaaatttagtttatacttacttttttctgttcatggggtaaacaaggacgggtccagtagtaatgtttctttgaaggacaatgctcttg

SEQ ID NO: 1967 - DNA, 637 bp, Gossypium hirsutum
agaatcataataaaaactggcatcgtaaatgtgggccgaacaagacgaacaaggaagttacttgcctggtaacagccaatgaccagcaatgaaggactcgtaggatggaaaacacaagagtgaaacttgttgccattacaactcaattcatgaacacattccccttcactccctgatccaaagctccaaactctgacagagtcctcactgacagatgctagaagctcacctgacaagtcccagcatacggaatggatcagctttgtatgtccctgtttcaaataaaaaaacaagggtaaggcagtcgtgcagtagcagagtataaaatgcagaaaaaaaaaagttttctagcggtttcaactgacatagcatgcagtacatttacatccaactgacatgacatatgtgcacatatatttatccacaactgacgcaaactgataataacttccgcttttagttctttctgttacgagataatgccttggaatttctttattacatatatgtatgttttttgtaatccatgttgactaattcacctgtaatgagtatcgacaagtttgagtttcagcatccaatattgatacaacattctccgcagctaaagcaaaatacttcccaaagcgaggttgaa

SEQ ID NO: 1968 - DNA, 627 bp, Gossypium hirsutum
tatgcttactcaggaagtgcctgcctctggagccacagttcagaaggaaaagaaaaaggtagattatagattgcactgcttggtctctgcattctagacaaccttctgaaactgaagattgtccccaaattgttacttatttggcatgtcagggactttttggctctgtcctcaaagacataactggcagtaaaaagcatgcacctgaaatggaaacagaagatactaaagaaagtattgaagagctttctaccatcttttcgactgctaattttccatgcgaggttgagaataaagataaccaggctgtggatgaggatgaaatagacttaaacataggtaaccatgttgcaggaatcatgatatattgcatactgtatgagttggctatgcgtatggtgagtgacaagttcttgcatcagcttaataaattcttttttcacgttttggtttcccttctttgaagatgatattgaccttgatgatcctggagagaaacccaaagaacagaatatcctagcaactcttaataagcataaacttaaatttcaggctttcacagcaggtcagtgtcatttcatgttcttgaatcaacaaacccccatcagtgtatttcgcttgacgaca

SEQ ID NO: 1969 - DNA, 814 bp, Gossypium hirsutum
  misc_feature (682)..(694): n is a, c, g, or t
  misc_feature (697)..(703): n is a, c, g, or t
  misc_feature (722)..(733): n is a, c, g, or t
  misc_feature (735)..(738): n is a, c, g, or t
  misc_feature (743)..(746): n is a, c, g, or t
  misc_feature (760)..(765): n is a, c, g, or t
  misc_feature (767)..(767): n is a, c, g, or t
  misc_feature (774)..(779): n is a, c, g, or t
  misc_feature (783)..(787): n is a, c, g, or t
  misc_feature (789)..(793): n is a, c, g, or t
  misc_feature (797)..(805): n is a, c, g, or t
agtagtcatttactgctatggaaaagaagaagaagaagcataagaaacttattgccacttcttctaatcaagagcctgaatcaaatgatctcttggtatgtgacccttttcttcttcttaaatgggtttgccttattttgtttgttctttgtattagctgaaagtttattgattgataatctggggtttcattttcctgccttaatttttttttcggggtgttctcaaatgtgttgtggttgaaggaaaacgagtgttttgttatgtgttatgccagggttcattgttttggatgataagagcactttttctttatttagcttaatggagtgagaagttttgcattgtcaacaaatccagttgtaattgttgcatttcaatttccactccgcttgcaactggtggatggttgtgatgagtgcatctttgattattttcccaattttaatgagctgaattcgtcataaacagagcaaggaacaacaaaatcaacccaatgaggcacttgctgcaaaggttaccaaaaatggcagctcttcacaagaaaatctttcttccttgaacgatcaacattcacgtattctacaatggccatacaccacccaacaggcggcagagcagtcttccttgtatccaaaaaaaaaaacaatgaaccctggaataacacataaaaaaacacttnnnnnnnnnnnnnaannnnnnnaaaaaaaaaaaaaaaaaannnnnnnnnnnnannnnacccnnnnaaaaaaattcgggnnnnnnancaaaacnnnnnntttnnnnnannnnntttnnnnnnnnntaaaaaaaa

SEQ ID NO: 1970 - DNA, 619 bp, Gossypium hirsutum
catacagcagtggcataggcatcagattttcatgcaggtgttgttatccgggcacttgccagtgttgttgccaccatagagatcataggttttttgcctggattgataacttctgcgtattaggcatcctacagttagattatgttagctgctgagaaattttctctcaactgtccggcttatgatgtatcacttccatttcctagaagctaaacttgctggaacactagaaacagaatcttgatatttcattattttacaggaaagaaaactgaagctttattatgtctagtttacatgaaattatcattcctaggagaactacctagaaagatacaaaccttccattgttatatgtctccattgacatccaataaaagtgatggcagaaaaataagaaaaaaaaaatgggtaaagtactagtcatcaaccaactactcaacggaaaatagtcatggtacatgcgttctgcataccactctgtcagcaagcctccttatgcagcaaaatcaaactgtatcagaaagtattcaaactgcctcggtttaacctttcctgtcaaacatgtcacaaacttggtagaataaacttccccatccttgcgctttctctagtctct

SEQ ID NO: 1971 - DNA, 649 bp, Gossypium hirsutum
gtgtacaaggttgtttgttagagactgtattccgtctgctgtaaaattgttttcatcccaaagaacatggtagtgcgctggccggcttgttccctgccatcattagacaaacacttacacatacgatacacaagacagcttaaacatgtttaaattacaagagaattatataaccacaaatttctaatgcatttctggttattatgtataagtagctatgagcatcagtgatgtcgtatcaatcatcatacagatataaacaacgataaggcaacattcgttaaggaaatttcaggaaaaaaggttcccaagattaaaaggaatgaagaatgttaatgttcaacctgaataccagcatgactgcaaaggtaaaaatcaaattccgttggatgacagattttcgaatcaacaacagttcctgtgagaacaaaatgcaatgtcattagaacaactaatgatgctcatccatgaatcttgaatatccaagaaacttaatcttttacctggtaaaatgtttccactcgtatctgtgctgcttcggtccctgtgactattagcaaagaggcgagtgtggtgtcgtttttgcacaacaatgaaagtcaccggtggttgatagttcggttctagagaagcacacgcctacaaataa

SEQ ID NO: 1972 - DNA, 628 bp, Gossypium hirsutum
agctcaagaaacatgtccctgttcaactcttgtacaagaaacacgaaccaattgagagtcctaggacagatgaagagttagcacggaagttgcaccgagcaatcaacagttccccaagaatctcaaagaattcaccaacttctgcatggagaggtcataaacataaaaggcctaagatcatgccaactcttgagaaaacaaaagcttccaatgggggtattgtattgggaggaagcccgtcttctacatgcaatggaggtactatagcaggtgaaattgattctggggactcaatggaagaatcagttaaagcagaggcaaagggtgctaaatatgaaaaatctgggaaatcagagttggataatggtgaagcagaatcaagccatttgaaggaaaaagcctgtgacgatgtaacccctagtaaaaaaaggggaagaatgaagttaaagaggctgcccttaagcatttgttcctttagggatcgagtgaatcccaaggaagatatgattactaagagctctccattgactgaaaagaacatggataattctactgctgctgttaagaccttttattctttggagccctctgatgatggtgttatttcaattgaaggtatgcggaaatg

SEQ ID NO: 1973 - DNA, 556 bp, Gossypium hirsutum
aagtagaacttaatatcatcaagtacaaaaatagcacttgcttttgctcacttattttgggttttcttttgttatgataacagtgtgcttgggggatttctaataattgctggtctatatatggtcacttgggcatcctacagagaaaggcatacagctatggggatgctgcctcatgtcagtcggtcttctgaacctctcgttcacaaagatgcatcgattaacaagaatccgtaccagagaggacatattttcttaggacctggtttatcagcaaaacccagtgattaactttgcaaccggttgcagtgtatagttccctcgagctcttttcccacaggcacatttcctaggatcaaatggtgtcactcgccatgttgtaaactttgatgggtagctaaagataaattcattaaatccatcctcaaattgcaataattttagattcttgctcctttatgctgtcttaatttgttccaaatacagatttttgagacctcaatgatttatatatacattcaatgcaataaatttagtatgttcttgattggcaagg

SEQ ID NO: 1974 - DNA, 561 bp, Gossypium hirsutum
cttgctggttatattaagggcttgtacgagaaacagggcaatgtgctctatggctggcttattaggagttcttttgaggtcagctgagaatatttttactcaggatgttggctcaataaagcagataaaatgggacggaactcccttatgctattgcatccaacatttggcggggcattcgcttaatgttattgatttgcacggatggtttcaggtcgtgacaagaacaattactaccatttgggcacctcacttaatgcttgcactagagaaggcagtttgtgggaaagagtctaggggaccagcatgtacttttgaattttttggtgaatgctctggcttactagcttctggggacagtcgttggccatttaccaatggatatgccttttcaacatggatctatattgaatcatttgcagattcattaaacaccgctactgctgcagctgccattgctgctgctgcagcagctgagtcaggaaagtcatcagcaatgtctgctgctgctgctgcaagtgcgcttgttggtgaaggcacagcacttatgcctcgtttatt

SEQ ID NO: 1975 - DNA, 599 bp, Gossypium hirsutum
gatattagatgcggcagtattgcatccagccatgtagtttactgccgagcgagagaaggatcctgctcgagcatgtagatgattgatattggaacattttatttgattatataaatctgaaagaggtgatgaatcgtgacggatatgactttctgttttcgtacctgtggccacgtaacaagatgtcatcgaaccgacgacattcattgttcccaatgctaccatttccttgtttccatccaactggtagtccttcatggaagcaaatgttcttccaattgccacagcttcctaaaagatgaaagacacggctattacgatctaatctccttaagcaaaatcaaggaataagggggctggatttgcataccgtcaacgcaatcataccagctaaaacacctattctgaaacctttggcaagatattctccagagaaaaatatttcattcaaagatgatgggttgattcccctcctaatatgtttcacctgaagataaacattgagaaaatgaatcttcattacttttgcaacaagccaaggctcgtaaataaatcgaagagaagaaaggattatgcatacaatctgaacaccatgcttg

SEQ ID NO: 1976 - DNA, 622 bp, Gossypium hirsutum
ttggtttgaagcgtcaatttttctatgtttgtttggttgctttgtttgattttctctttagaaggttgctatgctcaatatatgttgatgtaatctatttaaaatttctgagcggatttttgaatgatgaatttgttttataaaacggagtaagttttggcccgaagatgaagagagcttctgagaattgtatgagctggtacttaatgcaaaaagctgaaggttagatttgttcaatggggagtggcattgttaatgggcctgtagacttatttttcatgtcagtagtgaagcagaagctgaacaatctttcatggactagaaccttgtgaaatcttcaaattcaatgaccctaagattattgttaaggatgttgacagccatacaacctcttcattttaaacgttctaaccaggatggaaaatagtcatacttatttctgttgtgagttttagtttaaatggtagttcaggattatttaagctattgctttgggttttttttatcatataatgtagggaaactaataacaactataaagtaatgtctgttttcacattttttattctttcaggtacgtttaagctgactcttcagtttacggaagaatatccaaacaaac

SEQ ID NO: 1977 - DNA, 1043 bp, Gossypium hirsutum
  misc_feature (518)..(518): n is a, c, g, or t
  misc_feature (614)..(754): n is a, c, g, or t
  misc_feature (757)..(757): n is a, c, g, or t
  misc_feature (759)..(762): n is a, c, g, or t
  misc_feature (764)..(769): n is a, c, g, or t
  misc_feature (774)..(782): n is a, c, g, or t
  misc_feature (785)..(788): n is a, c, g, or t
  misc_feature (793)..(796): n is a, c, g, or t
  misc_feature (800)..(803): n is a, c, g, or t
  misc_feature (807)..(807): n is a, c, g, or t
  misc_feature (812)..(822): n is a, c, g, or t
  misc_feature (824)..(824): n is a, c, g, or t
  misc_feature (826)..(831): n is a, c, g, or t
  misc_feature (834)..(839): n is a, c, g, or t
  misc_feature (846)..(847): n is a, c, g, or t
  misc_feature (849)..(859): n is a, c, g, or t
  misc_feature (861)..(863): n is a, c, g, or t
  misc_feature (865)..(873): n is a, c, g, or t
  misc_feature (880)..(882): n is a, c, g, or t
  misc_feature (884)..(890): n is a, c, g, or t
  misc_feature (892)..(892): n is a, c, g, or t
  misc_feature (897)..(900): n is a, c, g, or t
  misc_feature (903)..(914): n is a, c, g, or t
  misc_feature (916)..(922): n is a, c, g, or t
  misc_feature (924)..(951): n is a, c, g, or t
  misc_feature (954)..(954): n is a, c, g, or t
  misc_feature (956)..(977): n is a, c, g, or t
  misc_feature (980)..(983): n is a, c, g, or t
  misc_feature (987)..(993): n is a, c, g, or t
  misc_feature (996)..(1002): n is a, c, g, or t
  misc_feature (1006)..(1009): n is a, c, g, or t
  misc_feature (1012)..(1027): n is a, c, g, or t
  misc_feature (1029)..(1034): n is a, c, g, or t
  misc_feature (1037)..(1039): n is a, c, g, or t
gtggcaaataaattcaattaattcagtacttcatgcttgataatgctcaccctctaccaaatgtagttttttgtgtatatcacttctaggatatgttttgtatattttcctagagtgaagaaccttgctattttccctctatttctcaacatcacatttatcttctgttgttttgcctgcatgcttcaacttaagtgctgtatttattttcacattgtttcaaatcaggtaggagatagatgtgaagttgattcaggggagaaaagaggtgttgtcaaatatgtgggtcgagcagaagcattagggccaggcttttggattggagttcaatatgatgaaccgttgggaaaacatgatggaatgtatgtaaactctatattcttattttcttaatgttctcttcattttttaagtaatgttcttgttgtatggtacttctatttttttttttttgtgtgtgtgtgtttgtgggggggtgggtgtgtaaaaaaaaaactaaaaaaaggattttttttttngttttttttttttttttttaaaaaaaattttttttttttttttttcccgtggagggttttttaattttttttctacacaaaaaggaaaaaaggggnnnnnnnnnnnnnnnnnnnnnnnnnnnnnnnnnnnnnnnnnnnnnnnnnnnnnnnnnnnnnnnnnnnnnnnnnnnnnnnnnnnnnnnnnnnnnnnnnnnnnnnnnnnnnnnnnnnnnnnnnnnnnnnnnnnnnnnnnnnnntcncnnnntnnnnnntaccnnnnnnnnnctnnnnattannnntatnnnntatntctcnnnnnnnnnnntncnnnnnnttnnnnnntatttanncnnnnnnnnnnntnnnannnnnnnnnatttacnnntnnnnnnnanatatnnnnaannnnnnnnnnnnannnnnnnannnnnnnnnnnnnnnnnnnnnnnnnnnnaantnnnnnnnnnnnnnnnnnnnnnnaannnnttcnnnnnnnatnnnnnnntatnnnnatnnnnnnnnnnnnnnnntnnnnnnttnnntttt

SEQ ID NO: 1978 - DNA, 459 bp, Gossypium hirsutum
tgaggagttcaacatctcaccatttcctggacgtcaaaatggttactacagtggtggggataatgtcctgaaccgtagctccgatgggtattactatggacctgcatcgaaagttctcgttttcgaaacacaccacgtttataaaacaaatgctgaggatgtctttaaggttgaaggaaacttgatcttcgaaacgtcgtattactatgaacgaagtttctccaatggtaggggatactaccattcgtattcaagtgattcaagtagtcgcggagctctggagttcgatttacatggcttctggtccagaacgaccgggaagctttgcatggtgggatcaggctacacttactccaaagaaggtaatgtgctccatcttgcagctgttcttaagttcaataatgtcaagagctctagtgatatcaatactctgatcactggaaccatggatagcttgaa

SEQ ID NO: 1979 - DNA, 440 bp, Gossypium hirsutum
cactttttatatataaaagtacacattttaattctaaattaatgaaagaaacttgaaaaaaatgctactataaataacaattttaaaagttttaaaactaatgaactgaactgatacaaacgaatggactacattttgggctagttcggttatctcggcatttggtttaaataaaaatcagttaggtcatctatgacatttggtttcggtttataaaatcacgttaatcatatgtatatattaaaccaaaccgaaccattatcaatcctagatacgtgtctgtgtatatatacatagagagagacagagagagagaagcgtgccttgctgacgaatgcaatggagttagcacttgcagccttgccgaatgctccaaacattggccttgacaacacctattacaaccgatatggatatgttcaaattaaaaaaaaaaaaaa

SEQ ID NO: 1980 - DNA, 628 bp, Gossypium hirsutum
atttgacagcagttgctccagtggcctgatttaaggcaattgtaaacaagctaattctgatttattgcttcgtttgttaaaacagttgtgagtgtagatctttccccattgaattgcatcctcatgtttctttttccccatcacagattggcactcttggaattaggggaaaatccatcatcttccttgaatatgctgtctgttgcagctgataccgagaccatgacttttgaaccaagtaatgtagttgcccttgctaagaaagcattgtcagcttctaaaaaagctgcatcattggctgagggcctcgaattagaacttgatgattcactttctaataggttaatctctgtcttgtcttagtagctggacaagtgttctcagataatctgttgactgctgatacctaatgctattgcagcttggggtctgttgattcctttactttgcccgctgaggagatagcggttgcagttaggtcaaccaaacgtttagagaggcagtctaaacgaaggagggtgcaacctaaagttgtgatatgtgagacatacagttcacaaaggaaggatgtaagaagaaagtcgagcgaaggttctgatcccaatgatccccttcggttgttcttgtg

SEQ ID NO: 1981 - DNA, 697 bp, Gossypium hirsutum
  misc_feature (646)..(647): n is a, c, g, or t
  misc_feature (684)..(684): n is a, c, g, or t
gtttcaaagtttcaagaagagtaatatttatataccaaatatatcataaaaaatttgagtaaattacaatattcattcaactttagtgtaactgacaaaacagtcaaggtttaatttagttacttaacattcaaaaaataataaaacagtcactacattgacctttacagacgtaaaggagttatatttttctgttattcacttaataggaatgcccttttctgtttcctcctccttccccactatccctcccctatcacaaatttctttacttttttgcagacctcccaaccattagcttcttcttctcttctccctattcttttttcaccatcatccccaaggaaaatgaacaccaataatgcagtaaaagtgtggccacaaagacctggcctttatgccatatgcaccatgcttgcacgctgaatgttaccacatttccgaagcctaaaacaaaattggtcttaattacaaagcttcgatttgccaaaatgacaaagctaacatgaggagttgcagtttgcttactgagtagaccacagaaatgagctctatatcaagactcaacatctaagtgtttgggtctctttcaaaatcgaagtaaccaatgcagattgaatagacccaaacacttagatgtggtgtnnagtcttgatatagagctcatttctgtggtctactcantaagcaaactgca

SEQ ID NO: 1982 - DNA, 616 bp, Gossypium hirsutum
  misc_feature (225)..(225): n is a, c, g, or t
  misc_feature (576)..(578): n is a, c, g, or t
  misc_feature (602)..(613): n is a, c, g, or t
tataaattttgctacgttaataattcatggtatatatgattctgacatatttgtgcattagtattatctttttactcttgttttagttatttcatgcaattattattcttgtttagatttatattcaacaatcaatcacatgaaacatgatatgcaatgaaaattatttcataatttggggaaccctttctttgtcaagttaaaataataaaaatacagtaagantctctgtattgaaatatggaaaccctaaacccgtcagtttgaccccgaaacaatttggctcgaatttattcaattatagctctgatttcaagatccatgtatgcaataagtaacaaagtgagattcaatcaaacaataaaaagtcacatgttaatatgcagtccaaaggttgtcgaaaggtatgttacatagaagtgtgagtctgatatgggtatgtttaattatcttgtcttttaagtttctgaaaatgtgttagatacggccatttaaagacttagttgttgctctgaaggggaaaactgattcattcattcaagcatcaattgctgttaatgaaatgacaaaaccatnnnctgttcttcaacatgcttcaaaannnnnnnnnnnnttt

SEQ ID NO: 1983 - DNA, 641 bp, Gossypium hirsutum
tgcctaattcggccttttaagtggcctttaattttaaaattaaatattttacaaccatattttaaaattaaaactagttgggttattaaattttctccggttaatataacaaattctttttaaatttgtataagggtgtcggccatcaatatcatagcaccctaaattttctttttaattttaaaaggggtgttggttagtagtgtgtcagaaccccaaatatttttttaatcaaataaagggggtgtcggctataaatgtcctagcacctaaaaaaaatatttttttaatttgataaagtggtgccggctatcagtgtgccaacaccccaattttttttttcaaatactggtatgaatgtatacaaatatgatacagggtgaaaaaaatacatgtgtgccgaccgtctaatctctagcacctcaaaaaatattttttttaacccctgacataatcatcaggcaatgattgtgtcagaaaaatactggtaccggccatttagtccccttacctaattttactactcatttcagattatttgagtgattacttttaaaccagaatcatttatataaataattgttttttgaatcatttgggtaaaataacctcattgttaattttaatattaccatagctaa

SEQ ID NO: 1984 - DNA, 482 bp, Gossypium hirsutum
  misc_feature (61)..(65): n is a, c, g, or t
gtatattatattctaattcttttataacaagtattatttttgtctttgaaactttatatannnnnataccggaagggagattaaacccatcatttctcactttcctggcttctctaatatttccttggcattacttcttgttttaattttttttgtgtcaaactgtttaatggaaacaagattagggcattggaaatgaatttggggtgcctaagtcaggagtatagataggtctggaaccctgtcatattggacacctgaacttgcgattggtggaacttgtgagagacgattgtgatgtgtacaagattgcagggtgctaaataaaactggtctgatttttggaggttctagtgcttgaaacatttttagagccttttgatgttttagactataggaactattcctttgtacctctttactgtttacagggtagcatccttgtgcttgttagtatcgtctctgtatttctttactaaaaa

SEQ ID NO: 1985 - DNA, 629 bp, Gossypium hirsutum
  misc_feature (624)..(624): n is a, c, g, or t
acaaaatgtcgcagttgatcaacctcctaaagaattatcctctgatggtagtttttgttaaatgggtttcaatttttgctccatctgttgaaacctataattatttgttcgtgtaaactccttcatccccctgttgaatctaacctgtagcttcgccttagctagttattattacctttgtgatatggggttatttttagccaatttcatcttcaaattttcaaagagatcaagtgtgtccgtattattgtttgttaacaatcaaggtcaaaagtagtttttgtatggggaagatgcttcttttatgatacattgtaaaatccttgtttcatgatatcaggcttgttgatcagaaaggctgaaatttatcaggaatatatgaagcaattaccaattccgacacaacggggctctgttattccgtttaccacatggatgggattaggcagatccatcaaacaattatatgggcagcctttgcattacctcactaacattctcctaaaacagtgggatcattcaagagtcggcagtgaggacgagcataggccccttgacatcatcgttcatccttgcaaagctgaagctactgtctggctcgttgaagaacttcatcgacagacntcatc

SEQ ID NO: 1986 - DNA, 690 bp, Gossypium hirsutum
  misc_feature (680)..(683): n is a, c, g, or t
tctcattcgccgcgggtttcaccatgcctggtgggtacaaaagcgatggccccgaggaaggaatggcgattttaagcagaaaattggcttttagagtgttcgtgatagctaatgcgttggccttttgcttctcgtccacatcgatgttcctccattactgcaaatcgtttgtggaaaaactcgatgcccatgcattttatatgtatattacttcgttgttaacgagttatgggattactgcaatggtgatagcttttgtttcaggcacttattcagcattgtctgattctcctggacttgctaaagctgttctttccattgggtgttcattctttgggcttcaacttcttgtttattttaaatgaatttaatgttagaactatgtatataaatgaaagcaatgtgattttgttttgtaaataaatgccgacaaataaggcttgttgaatgcattgtgaattaacacagtgattaatttattcaatggctaatcatgatatgatccatgcacaaagccacaatctagaataaaagcagaaccagcaactggtgttaggccataaccatagcttgagacacactgggacaggacaggcttatgatcacatactaggtttatggcattatcatgagaaagaaagggatgttggtcataagcctgtcctgtcccagtgtgtctnnnnctatggt

SEQ ID NO: 1987 - DNA, 651 bp, Gossypium hirsutum
tttctcttctcccttcaataatgaatttgaatgctgattcttgtccattgaagctaccttactctctttgatcctttgtttgcgtgcagatttcacggcgaagtcgcatagcttttgatccatgtcaaatttcagactttctacctgtccaaaatcaccttaaactagaatcaaaataattttccttcctattgagactagatggatttctcaaagtatcacgactaatatttttaaccacagcattagtggcagaccagtccaacggcccagtaggcctggcctgccccggcccagacctggacaaggaaaatgtgacctcgagccagcccgacttactatttattagttttaatttatataaatattaataaacaatatttttaaatcttttactattaaatgaataatgaatttgagcttccaggctgagccaaaaacagttccaggcaaagaaaataaaaagaaaaattcaggccacagcccgggcctatggacagacctaatttgcagagaagctgcttgcagaaatcaacattatacacttattgagaagcagtagtttaagttagattcaaacaaatgactcaaaatgctaactcaaatactctaatgaaaacaacagcttgcccaagccatagatttatttcc

SEQ ID NO: 1988 - DNA, 618 bp, Gossypium hirsutum
tgagtggttagattggtcattaattgtctaaggtattttactttgatgagacttctttcggttggaattaatcaataccccatcatagtctttgccatatagttaaggctgtttatttctgtatgggcccagttatgttagggtaatcatctgtcagaactcaattgctcttttcaaatgtttgatttcttaaatacaggcaagttcagtaagtaacaccatattcgtgccatatatgtaaggctgtttatttctccatgggtccagttatgtcagggtaaccatctgtcagtatttccgttacatacagcatcattttaaaagagcaatatagttttgaaggtcagttacatggattgttgggcgtaatctgttccaatggaaaaatagaagctgacgtaagcattgggtttttcttgttttttctttgtagacagttcattactaagaaatgggtgtatcctggtttggatgtagagtatccatttttggccattttcaatgaatggcatttaaaacagtggtaggtatgaagtaaaaaatggtaaaagttctgagcaagtctgacctatcattaggtaattgacattcttggtctgtgtgtgtgaatgacctcca

SEQ ID NO: 1989 - DNA, 616 bp, Gossypium hirsutum
gttgacccagttttttaaaaagaaataaaaaccaattttcaggtatgtgcatgagcatgcatgttaattcacccgatggttgcaggactgcatgcatttgtttgcatgtttgtatgcatatgtttgctctgtgatgagactgctggctgaaatggcattaattcaacttagctagtatcttcccaatataaattgtccatgcaatgttgttaggatattttacaagtgctgttcacagcatgatcattagagaaatgatgaaaattgggaatggtttgataatatgaagattgcttttgtgggtaatattttcaatagatgatgagctttatgggatccataagtgaaaaactcactgagcttgttacttgaggatctcaggatcagtgattagtatttgagacgagtgaacactccccttttaaggtgattgctagcttccgtaggtctcaccaggtgaatgaatttgggtaagctctacaaggtaatttgtggtggaagtgaatgccgttcaatgttcactcatgtaatattttgtttttattaaaattactagcttctttgtggttggatatgtttgcatggaaggccaaataaccatgattggttccttaaa

SEQ ID NO: 1990 - DNA, 618 bp, Gossypium hirsutum
cttactatacttatttgccgaagcgaatcaggtaagaatttctgtttcatggtagtaaattattattgcatttctaatggactgaggataaacttttctttctacaggaaattatccaagagcaaatcacaagagttttgttggaacggctgattgttaataaacctcatccttggggtctcctcattaccttcattgagctcataaaggtaaaaattgattctgaatgtgacctcgtcttttagtttttctggtatgtaatatgatgtcaaaacagttaatgttttttttttctcttttaatttcagaatcctagatacaacttctggaatcgatctttcataaggtgtgcacccgagattgaaaaactctttgaatctgttgcaagatcatgtgggggcttgaaacctgtggacgatagtatcgtttctggttgggtttccgacaatgcacactagccagttaaaaactcttttcaatgccataatgtaatagaactgtaattttagagtatctgtaaactgtacaagtcttactattgttattgtccctaagaattctgtattacaagccagttaaaacttattccaaattactgccttcttattctttgttgta

SEQ ID NO: 1991 - DNA, 360 bp, Gossypium hirsutum
agaatgcaaatagaaaattatataaatttaatttcttaataaaaatcgaatcaaaattagaaaaacaaattgattagacttgagtattagactttagtaatgagaaataaagactattagcattctttatagtaaagaacaagtgatcatccccaataaaatctcaagcaagcactcacgatttttgatccaaacaattaaattttaatgcttggaatccaacaaaattttgatgcaaaataaaaacctattagtctttgaataaaatcgtattgataacgtataacaaaacaaagagaaatataaaataaacaagagaagaaaataaaaaaatgaaaggacgattcaactttcacatgg

SEQ ID NO: 1992 - DNA, 630 bp, Gossypium hirsutum
tcgtccggggcatggcaacggtcagcgatttcttgaagcgtcaatgattcggcagggtcttcacagctgaatgaagcgaaacagaaaaacactaatcagaaaaaacaaacaacgaaaataaggaaggcatacaaataccgcaagcacattgaaagaactgagcattgaaatgcgagaattgcatttgaaggtcatcgagcctttgaatcaaagaggaagaagggagagaaaaatggctacgaggcaagaaagtgagaatatccgcagctgtaatctataaaggtttcttagtcgaaactttattaaattcagtgatttataaagacattctaattcatcaaacatttgacatcagatacctggcctcgttgagcaccgctaaaacccgcttttgtagagctaatacttcaccagcagcttttttcccagcttccacacctacgatgaaaattaaatgcgaaatagaaaagaaaagaccaatcagattaattaaccccataaaaatattaagattaaacagctaggttgcagaacatgaaaccaacaacaaaatatcctgcttatttcacttcaagaattgaattttttaaaattgaagacaaaacttatacttacccggttgatgataag

SEQ ID NO: 1993 - DNA, 495 bp, Gossypium hirsutum
  misc_feature (408)..(409): n is a, c, g, or t
  misc_feature (419)..(421): n is a, c, g, or t
  misc_feature (426)..(427): n is a, c, g, or t
  misc_feature (444)..(448): n is a, c, g, or t
  misc_feature (476)..(477): n is a, c, g, or t
  misc_feature (485)..(487): n is a, c, g, or t
tgtggcagaagggtgaagcaagaaaaaaatggggtgttggtactcaaggatcgatagggaagaaattgtttcgcgttgcaaggggagaaagaaatacatgaaacagttagttaaagcaagacaaactcttggggcttcacattctatgtatctacgctctttacgaggcacaggctcagctctccttcagttttccaacaatgaaactactacccactcccaccaccatactactccgccgccccaacagccggcattgccgccgccaatgagtcctacttcatacaattggacatctgctaacacggcctcccctgttctgccgccgccttctcctcctccatccagaaactgggacttttgggatccatttgttcctgctacagagtcacggtcagccacagacgnngaaggggagnnntccgnntccgtgcctgaggcggnnnnngccgctaccaaccccaccaccagggctnngggcatgnnnccgccccc

SEQ ID NO: 1994 - DNA, 650 bp, Gossypium hirsutum
aactggtacatataacttatcagtgaatacaagattcaatttgatcaattatttatgatatcaggagaaatttccacacgtttagcaaaggaattcagcactgtgagaccaacaaagtcaaatttcaacacattagctccttaggtggcaatgaaattatttatttatttgttatgatccaaagttacgaaaatctttggtccttactattatcactagagcctttacactcattgagcaaaaactccaccactcaatctaaaactttaaggcctatgggccttggatgaaatggcaaagtgtgaatagaacccttgtattgcctcaggcgcaccatgcagaaagagctcctgccttggtgaagttaggctatgtatatatttctctatgtgtacattatatgccatatatataagcttgaaagttttgatgataaactctaaagagtggtccagtttacctacaaaacatgcaatttttttttttttgggccaaaatgcatgatttccttatgggcccctgttcgttgtggaaggctaaaaaattgaaaaaaaaagtttgatattttcccttttttttctataaaagggacttttaaaaaaaaaagctgaaggtaaaaaaaattaaaaaaaacttcaatcaaacagggg

SEQ ID NO: 1995 - DNA, 677 bp, Gossypium hirsutum
  misc_feature (671)..(673): n is a, c, g, or t
tcagccaatcaatttttacagcataatgtaaatgatagaagacattttcatttgttgttccaatttttaaacttagaccccttattttttcctcctttagttgcatggcatttggggttatctttttcagaaatatctttttggccattttcatttttattaatatcttgttttcttattaaaatggttataacagcataaaacaaagcaagcaacctcaatgattcaaagttttcgaaacacagtcatccatacgctcacaaagaataatttgggccctatatttttctgttgacttacgtagtatactgttgtatctagttctacaatggaccagttaatggttcaaagatggggatagatgctgcaaggagccttgatgcttctgccagattgactggagataagcctgtgtcaataatggattccaggtttttccctcttctttctggcatctttgtttatttgaaaaatgatgcttcatcattatggtgttcaccattggatcttgttctgtttccaaaatgattgcttactctggatgagatacatggagataatcaattgggaaacatgttaattgttttcctctttctgttgtcttctatgtagatccacttatcttgttaatgcagggcttcaaagttttattacttcttctccctctggcnnnaaaa

SEQ ID NO: 1996 - DNA, 608 bp, Gossypium hirsutum
agcaattgatatatacttaaaggtaagttactaagtttcagttcataaatacatcaacgtatgtatgcactatacactataatcaaataatgtacttacaggcacatccaatgctaagtgatcatgaatgcaagaagctatgcaaattcatagactgtcaaaaactatctcaagaagctaccaaccatgcagcacaaaacgagcgactcccagtacaaatggcaattaaggtgctatatttcgagcagctacggttaaagaatgccttgtgcgggagcaatggcgatggattcttgtcccagaaaataagcagcggtgtcccgagtgccgctatgtcgcctcgagataactacgcctcgttaagaagagaaaaccgagaactgaagctcgagatatcgagaatgagagtaaggttgagtgagttggagaaagagcaagtggtgatgaaacgtgggatgatggagaaatcagggaatgggaagactttcttcacttctttatcgaaagggatcgggaggatcgggatatttagcggtcccggtggaggaaaacgtcgcaagccacgcggatcagaagggaaaagcggaaggagtcgaaggtattctgtg

SEQ ID NO: 1997 - DNA, 607 bp, Gossypium hirsutum
gggaataatcaagatgcagagggtatccttgtttttgtcattattgcatagttttcaaatagttagtgtgccgtttatttgttatgtgcagtatattgattatttatttatttttgtatcgatggaccttcacgcatgatttacttgcatattcctttttattgtggacagctgagggtccctctgtctatgtcaaaggtctgcccttgaatgctacgcctggcatgctggagaatgaatttaagaagtttggacctattaagagtggtggtattcaagttcgaagtcagaaggtagatgttagctcacttttcaatgtataaatttgtgcatgcatagtcaattaacattttctttattcactacaggggttctgttttggttttgtggaatttgaaatggcaagttctgtgcaaagtgctatagaggtatttcaagttttctcaatttctgtgttgacaacttttcgttagttttcatttttcaacatggtgctatttgttccattctttggagttcatatcatagtatgggtggtaacattttttgcactaaccttgctttggtcaagcatacatgttttgcttcacagctaatgataaggcta

SEQ ID NO: 1998 - DNA, 612 bp, Gossypium hirsutum
gattgctagtaactaatattataccatttattggttccatagttcagattcgatccatatctatcttcttcaattctgattaatttttctgctcatgagactatctttctgattttcttatgttctaatagtaccaaatagaatcataacttgtcatgttgaatatgattaggccaggcttcccccttaaatatcatgggtttgcacgtttcaagcaatttgatgttcaagttgactagcaagtgacaagtttatgtgcatttatatgttactgtttctcctaggaacttgtggatgtctacaataatgatctttgcttactaacctcttcaagtctgtgtaaactgctgaatcagtaatcatgaagcttcccaaaatctggagtgtgaaagctggttggataaactccacaatgagctggaaaatcaaggaattagtttaccagagaggtgatgatgatttctatacatgaatgcatgtatggtatattttatttggttttttttggttgcaagaaatgtaccacattacaaattcccccctataaatgatcttgctgaaataaaatggttaatcaatttgcaatcctcgtgtattcaagtgctagaaccc

SEQ ID NO: 1999 - DNA, 629 bp, Gossypium hirsutum
ttattttaaataataaaacaagcgggtcgaattgattcaggttgaaaaatttaaaccaaccccagctcaaaacgagtgggggaagtcagtttgactaaaacgacgccgcttggcttaaagacacgcacagatttcgttattttagaacagttcccaacgaaagcggtagaaatagaaaaaatagcgaagagagggacaaccaaaaccctctttgaaatccctaatcccttgaatggacaaagagaaacccgcaaccaaacggtcccgggaccaccatgacaagcaccaccgcagccaccaccgcgactctgaccaccaccacagccacgattcccaccgtcgttcggatcgtaaatcttcatcatcgcgccgtgaagaacgcgagagatctttcgagagggagggttcgagggataggaagcatcgtgaggattcctacgaggaagctgaagctgaagcgaagaagaagaggaaagagagggaagagagtgaggagagaggagagaagagggccaaagttactgaaggaaatagagaggtaaaaagagagagaagaaaatttggggataaagcaaaagaagaagaaattgagttctccaatgctgccagtggtggtgatccagttcaaa

SEQ ID NO: 2000 - DNA, 661 bp, Gossypium hirsutum
tgcattggagaaaaactggcggtccgagatccagattcctcgtggaggaccacacaggtctcgctactgctctttcagagacattctttcaagattcccttcccttcccctcccctctcaacctccctttttaacatgatctaatcatgcaacccaacgttttaacagagcttgtgttgtggacaatgatcggctgttcgtaatcggtggtcaagagggagattttatggcaaaacctggatctcctatcttcaaatgttctcgcaggaatgaggtatgttacagctagttaatggagattttatggtatgtttttctatgtttgatattccattttctgggcttttcttaacctatattcatcatctttaggtggtgtacggtgatgtttacatgctcgaaggtgaaatgaagaaatggaaagtcttatctccaatgccaaaaccaaactcccatatagaatgttcttgggtgattgtcaacaactcaatcataattacaggcggtacaacagaaaagcatccagtgaacaagaggatgatacttgttggggaggtttttcagtttcatttagactcactggtatgtgctttctcatactaaaacattcctagttcgaatttcaatagttcaaatttccatatctacaatcacttgcggt

SEQ ID NO: 2001 - DNA, 633 bp, Gossypium hirsutum
gaagaggtgctgaaaaatgagcacttatgagctgcccaaattcatgttgtcctatgcatgttcctagacaaattaaatggaacaaattgattagtttaggacatctttaattcagctgaactaagaaaacttaaatatgcagcaactaagacaaattaaatacttagatttggctggaaaaattaaatagctacaggtaataaatttgtcccaactaagacacattaaattgatgcatgaactaaggcacatttaatactttaatttattatgtccagattttgacacatttatatgatcttaaatattttaataagttaataaatttattccaacaacattaatgtataaaattaaataaaaatgaaacaaagctaattgagatagcatcaagacgccatgagctccttggagctgaaacgagctaaatcatcttgcacaatattgcaaattgagctacttgagctggtcacttgatgttcggccattccttctatcccaaatcgagcaatgtaacttgacaaagcttcttgaaacctcttggcaccagctcgagtgattggtcccaatgccaactccataggttcgacatttaactccttggccgagctcgcatcagcttgttatctaacg

SEQ ID NO: 2002 - DNA, 621 bp, Gossypium hirsutum
  misc_feature (614)..(617): n is a, c, g, or t
tcttcctcagagtccttttactaacatgaatattgattgagctagtaagtgctgcaaggaaaataatctgccctctttgtcaccttaatttatagaacaacaataaaggccatgcatcatatcaacatgtaaggcctagataagggtatatagcaggtaatattataggcaatgcctgaaagcaataataacaaaaacaactgctgtaattggttcagttattacaaagtgctttttaatatggtacggtcagattaaatcttaatagctcatggtatcatgacacaaacaacacagaaactaaagcctgctacaatcaggtacagcaaaaagaattgcacaaaaggttcgacatcctcgtcttcttttatcgctgtttgcttcagtcctttgtcttgggttcctttataaatcaaagcaaatgattcacagtttcacatcatagacaaggcaagcaactcctagatgtacttaaaagcaagacttttcatccaaaccggttctgagttatagccgttggagtatacccaaaagaaaagttgagtagaaaattttctaaccttggtacaaacatagatgtaatggacgtcagggttttttccaagtacatcttnnnntgaa

SEQ ID NO: 2003 - DNA, 860 bp, Gossypium hirsutum
  misc_feature (137)..(137): n is a, c, g, or t
  misc_feature (141)..(141): n is a, c, g, or t
  misc_feature (162)..(162): n is a, c, g, or t
  misc_feature (178)..(178): n is a, c, g, or t
  misc_feature (259)..(260): n is a, c, g, or t
  misc_feature (352)..(352): n is a, c, g, or t
  misc_feature (477)..(477): n is a, c, g, or t
  misc_feature (500)..(500): n is a, c, g, or t
  misc_feature (546)..(546): n is a, c, g, or t
  misc_feature (577)..(577): n is a, c, g, or t
  misc_feature (599)..(599): n is a, c, g, or t
  misc_feature (618)..(618): n is a, c, g, or t
  misc_feature (624)..(624): n is a, c, g, or t
  misc_feature (666)..(666): n is a, c, g, or t
  misc_feature (818)..(818): n is a, c, g, or t
  misc_feature (832)..(832): n is a, c, g, or t
ttgaactaatccatagttgaatgagcaacaaacacgataataagaattgtcctttttgagcacctatagaccctcaaggtgcatctcatttggttcgaactagagatctcttcctcagagtccttttactaacatgnatantgattgagctagtaagtgctncaaggaaaataatctnccctctttgtcaccttaatttatagaacaacaataaaggccatgcatcatatcaacatgtaaggcctagataagggtatanngcaggtaatattataggcaatgcctgaaagcaataataacaaaaacaactgctgtaattggttcagttattacaaagtgctttttaacatgntacggccagattaaatctgaatagctcatggtatcatgacacaaacaacacagaaactaaagcctgctacaatcaggtacagcaaaaagaattgcacaaaaggttcgacatcctcgtcttctttnatcgctgtttgcttcagtccttngtcttgggttcctttataaatcaaagcaaatgattcacagtttcanatcatagacaaggcaagcaactcctagatgnacttaaaagcaagacttttcanccaaaccggttctgagttntagccnttggagtatacccaaaagaaaagttgagtagaaaattttctnaccttggtacaaacatagatgtaatggacgtcagggttttttccaagtacatcttccactgagcttccactctcatccaacagaattgggtctgtcaatgcccttgttggctgttcggaacttccctctgctccaaatttcgctgcatgatnaagagctagattanaactatgtcattcgtggcaggctactat

SEQ ID NO: 2004 - DNA, 685 bp, Gossypium hirsutum
ctgcatcaataatcctctggtttgcctgcattaatcaaatccatcagataaccattataaccaacagtattcaagaaaacttcaatggttgctgacgtgtaagggtaatggctggaatcaattgtatcctaaatcatatacctgatggagcaataaccagtcaacattgcctgaaacaagaccagctttttccaaggcagactcgatcgattgtggtacacatcgcacagcaaagcgaaaaacttctttgccattcatctgtatgcaggaataagaggatttttttggagggaaatctaatgctgaaccatttgaacccaacagctcatcagtttcattatcatttatgggggcaccaagatgtctgcaacaggattgacagctctgtcaaattccttaagaggaagcaataaagtatttgtttagtactttagttatataacatgagactatgagaggcacttaccttccaccctcaccatcactatgcaagtcaaagcttaataaaccatcctcctcggcatcgcaggcctacggaatcgtttgaatgacaaatcatatcatgttttgttgtaaaaaatatattatacacacaagaaagttaccctagacccattagtatgtaataatgtcttaggtagttcaatctctaatatatggttcctccaccaaggctacaagtgtc

SEQ ID NO: 2005 - DNA, 650 bp, Gossypium hirsutum
ccctttttttgatgacttgatagttttgttagtcttgtgatgtgattacgtaccttatctagtttgaactgccagtgagacaaaaatctgagatgcttaataagtttcaagtctccatctttacatgtcctagaagtattcttttgagctccttggatctatatgttctgaaaaattgcattcttaacttggacaactagctttaatgttctttttcgaaaagaaaaattacaaagatttaattgtgatagtcttggaaaacttaaggatgagttgaaagctaatgttaatggcagtagaagagaccaagcagcgaatttagttgtcctttttctttctctccctcttcttgttttgggcatagtcaaagtagaaatcatgcatatgtagatgcttatttatgcttttggagcacattttaccaggtaccaagaagaggtaatggctttgccactagctgggattgaggcaatattgtccagtgatgatctgcaaatcgcatctgaagatgctgtgtatgacttcgtgttaaagtgggcaagggctcagtacccaaaactggaagagcgtagggaagtggttggttcacgccttgctcgctttattcgcttcccttatatgacctgccggaagcttaagaaagtgttaaa

SEQ ID NO: 2006 - DNA, 613 bp, Gossypium hirsutum
  misc_feature (535)..(535): n is a, c, g, or t
  misc_feature (556)..(556): n is a, c, g, or t
  misc_feature (558)..(558): n is a, c, g, or t
  misc_feature (603)..(606): n is a, c, g, or t
  misc_feature (608)..(608): n is a, c, g, or t
agcaaacgaaattttttattgtccattgtcacaattaatagcgacaaaaacatgttgaatcaaaactttattgatagggaaaaattaagatggaaaccgcatggtgtctagtcttcgtctgaagaatgcctcctccttccaccccttctacgatcttcgtctgaatccctacctctataatccctttcctattatgaattaatgaataggttagttcatgctcttaaactcttttttttgttttgttttcttaaatacttggacctcccacttattccttacgcctgttcacttatggatctatatgtatatataacaagaaaagcttaaaactaactctttctggagagtgccttcttcctctaggggaatcatcccttctggaagttcgatcctatcatgaagtaatgaaaatattagtcaatcttattcagattttatatatttttaaaaatacatgtgtccaacacttatgttaaacacattaaatatgaatatgaatatgaatatgattatctaaaagaaaaaaaaaaanttaaactaactctgtctgagngngaagactccttccttcctctaaaatattcttccctatcatcatannnncngggaa

SEQ ID NO: 2007 - DNA, 674 bp, Gossypium hirsutum
ctcttgtggttgcttatcaaggttttcacagtgactaagagccgctttccattctaccttcttatctttacagtcttagcaaattcagcgtctcctgtagtcattcggatgattgcagaatccaagtttgacaatgctgatttaggccgcttggcaatttattcttccctcatcagtgaaatgtcttgcgttgcatttgtcgctacacttaccgcctgctcctccaccataagactcgtgggtgcaatcattgctactcttgtcaccgtgctccttatctttctcaacaattatctacctttctttttcaacaaaaggaaccgccacaatagattcctcactaacagcgaacttttcctcatcatatttattctcttggctatctcactgcttgtggaatccgctggctacacagctataacctgttgtttcctggcaggcctcatgttccctagggaaggcaaaacatgtcggacattgctacataaactcacttacgctgtaaatacattcgttcttcccgtatactttggctacaccggattccagtttaatataagtaagatctttaataaactaactcttattctcactgtcctcatcatcctgctcagtgctggcactaaaattgtggccacccttgccgcttgttattacctcaagatcccaaggaa

SEQ ID NO: 2008 - DNA, 642 bp, Gossypium hirsutum
aactagagggaaagagcaaacttatacctccaaaagctgcactgggcgccagaaaacattaacagcagaggaatctgtcaagcaaaaagatcatagaattaaattaagtgacctctaacaagataacaaaaaaaaattctctaccagccataaaaaggggaaaatatgtttgagatttgtcgcagattaaaaggattggaaatgcaatttagaacaaagaaatggcataccccagttacaaaagggagccacttaggtcccttgatgtgattctgaaggaaagggatccctgaaaataaaaaaccataagagatgtgcatgcaaaagtaaaagtcagtgaaaacaaaatgagtccaataataccagtattaaaaccatgtactgcactaagcattcccccgataccagagccagcctatttgcaacaaaaaatgcaacacatgttgtaacaatcaacaacctttcagcacattaacttaaaattatggtaactttaggattgtaatccatactatctcattcaaaacgtgaaatttttggacaagatttcaatttggtgatcttgccatactctgagctgttcttgaaaggcataagaatctaaatgccaaattattccacgttgaattagagcaagaagta

SEQ ID NO: 2009 - DNA, 622 bp, Gossypium hirsutum
cccgtttcttttccttcaagctgtgtgataatgtttttatcaacacgccctctgtacagaaatagcccaagttcttcatcacagcctccctaacatggaaaagacgagaaataattatcataaacctaagctgaatcaagtcatgacatgaccaaatgtcctgaaaaaggactatcggaacctttgaggatttggaactgtaatgcaaagattccaagcaaatagtgcacatcatggatccataattagataatcaaagttatacgcagttaattacggaaagaacactcatcagcactgccaacatacaggagaaggaaaaactttgaatccagtagatggatcaaggaacgcagagaggtcaaccatgtcttctagtttcaatcgaataccaatctcctcctcaacctatcagtttcaacgcattaagaaatcatttatataacagaggaaaagaagaacaagtaaaaagaagctaatcctatggagtttttaacaaaatgttatgtcaaaaatagtaagttgtctcaactgaaaggcagaacatcagcatatctgtaaagatgacaaaggctggagtataatctataagaaaaaccagcaaagtggagaaatggtctca

SEQ ID NO: 2010 - DNA, 520 bp, Gossypium hirsutum
tttcttttaaatctttaatttcatttaaatatgttaaactttagctttgatctacataactttatggtcaaattctgctattaaaccctatactttgtgtaaattgtaaatttagtacctctcctttaatttgatcaattttagtccttgtactttttgatttttaaaattttagtcctaaccaatagtaacagtaaactttgtttggttaaattatgttattagtcttgtattatgtgtaaagttatagatttagttcatgtttactaattggatcattcttagtagctttactttttttaatttcaaaattttaatcttgatacaaacgataatggttaaatctattaactacttttttttttataagtaatatgtgaaataacaaacagacataacattatgcatgtaatatatgtttgacacattaaattttaaaaataaaccgaacagagaaacaaaaaggacaaaaatagatgaacggatagtttctgttctattttgacaggaacaaagcatc

SEQ ID NO: 2011 - DNA, 647 bp, Gossypium hirsutum
ttgacttcctgagaccgtgcaagtaatgatgggaaaaattctcagaagaagaattcatgcatttactccggtaagctccatgtgtaaaattgggaagtacaatttatgatacaactattttttgcatttatacagtttagctgaattcatcatgagaaaaagatgtctatggagaagccataaaatctaagaacaaactaaaacatatgcatttgaagttaaaaagtttagaagaaaaatctaaatgacaaagcatgtaggaaatggagcaaataatctcaacaagggttactcaatttagctacaagatgattgctaacgtaatatacctatatttttcaaatctatttgcagttgtgattgtaagtcttcaaactctctttttgctgttaacaacaaatccttgaggtcctgacaataaaattttaaaaaaatatatgattaacaacaatatgagcatttcttgttatcaggttggttaaagatttcagacctgatctttcagctaaaacagagaaatgattcaatatatttggattactccatcactgttagacacctcatatgttagaatagtctaaaaatgagaaggaatccttgcactttttgccgtctggaatatccaagtggtagaatgcaacatagac

SEQ ID NO: 2012 - DNA, 618 bp, Gossypium hirsutum
gtatttcaaagacaaatggttgtgcttcggctaattctagaaccgaattaaaatgaccttcatcgctatatgtatatatgtttttttttaaatggttaacacgattatgcaccgccagaaccgtacttctttccgaatacgatcagctggagcttatcgtagcccgcaagcacaccagcaccggcgattgcacggaggatgttagcacctgcacctttaaagagagacttggaaccctcatttttaaggatctcagaaaatgcatgaatggagctcttgtatttcacggcttcacccgatgtcatcatcatccttctacggacagtgtcgattgggtacgacgcaagacccgcaccgttggttataacccaacccagagcaaagctagcaaagaagctatcctgatatattatccaaaaccgaaaccacaaaacaccaaaatgcatgtgaggataatccttaccttgatcctcttgtcagcattcagaaggcacttgagcagtgatcttaatattatcactagatagttggaatactaacctgcaatgttccaacgaggagcaccggcttcaatgaatcgtacattccaaagtaaagaccacggtatacaatgatgca

SEQ ID NO: 2013 - DNA, 636 bp, Gossypium hirsutum
ttgctttttctaagaaacaaactgttctttacaattctcttttgaagcaagtcatggaaagtctaaatgttattggagaagctaactccgatgctgatcttcatcctaggtatggctacttttatgtctactgtttttggttatcagttaaattacctaacaagtccctgtactataagttaacaagtaaattagttgagcaatttagccccttaacatattaactttcaggcagaaaagtagaattaacttgatcgttacttgttgcgttttaatgtgatatttggtctttagttatcatgtatacaataactaagttgcttcaaaattagtgagcgaacttttccccaccttttacaatttttactatttggtttaaaattagggataaggcagcatttagttttgataactttttcaaactaattttttgcttagtccattttagtttgaagtttgaaaatttttcttaatttggttcctgaacttagattctattaggtgtgatgatgatgtaatactttgacattgtgccatgtcattatatggaaatttaaatttttatataaaatctaaaaaatacataaaatatttttagaagtatctttttaaaaaaattcatgtgaatgatgtggc

SEQ ID NO: 2014 - DNA, 620 bp, Gossypium hirsutum
ttgcttctttgtctttggagaatgaagtttctagccaagatgtgtctgcctcacttgcaaagatggtattcatctttaaacttttgacagagatcctgttaatgtacgcatcatctgttcatgtgctgctttgcagagatggtgaaattggtagctctagggcccctcatcaaaagggctcaactggtttaaccggtggtggaatatttcaccacattcttcacaggtttatcccatattcacagaattcaaagaaggaaaggaaaactgatggtgactggaggcataaactggcaaccagagctagtcaattcctggttgcatcttgtgtgcgttctgcagaggcaaagaggagagtcttcacagagatcaattgtattttcaataacttcgttgattcctgccctggtttcagaccaccaaggggtgatatgcagcattttgttgatttgctaaatgatatactagttgctcgtaccccaactggttcatgcatctcggcagaagcttctgccacttttatagatgttggtttgattgcgtcgttaacacgcacccttgaagttttggatttggatcatgctgagtcacctaaagctatcacagggctcatcaaagct

SEQ ID NO: 2015 - DNA, 613 bp, Gossypium hirsutum
ttattgaattagtctagaagaattttttcctgcttaaagattaaaattgaatatggatctaatcatttatgatttataccttctttaattctcacgagataagattaagtcggcttcagttgaagtttgataatgatgaacaaaaatactttatatataatataaaattaatagtagaatttaatcctaccgtcaattcaattcttaaaaaattggtttcagccagctactgacaagtttgtttgatattgtaagctagtgtacattatttgtatcaacgaaatattaacaatttcatattctacaaatttctctctgttgttatttttgttattattcttttttagattttactttgttctttcatggttgtatatatacagagcttttctggtacatttaactaaggagaaaagtaatgattttatatcaaacagatgaagaacgctaaaaaaaactaggaacagtaaaattggttcttaaaaatgttgtaaatttatgggaaattaaggagcacgatatttgaattctaatgaaccacaaatcacattttttaaaaaaaaaaaattctgttcgtaatctataaaaaaatctaaaaacttcaacattgtga

SEQ ID NO: 2016 - DNA, 265 bp, Gossypium hirsutum
acttgtagactgaaatctaatagaactccttaccaacagtaagctcaattataagtgatcctccagattgattggcaacacaacctgtaccatctgttcttccatctccatgataacccttggggcacaagcacgtgtaatttccttttgtattttcacatatcttttcacatttattgagatttgggtctttacattcatctatgtctgtaaaagaatagatcccattcccaccacaatttcaccaaaaaggagctactgtaat

SEQ ID NO: 2017 - DNA, 643 bp, Gossypium hirsutum
acttgcaattttcttttgattcaaaaaaatccttttattttgaattttgctaatattatggttttcaacttttgaatttcttttagaagcattcggaaatagaagtggagagagaaaagaatgaagaatcatcaaatgaagcatggcaacgagctttagaagctttcaaagaacaagccttgaagatgcagaacgtgtcccaagaagcttacgagatttactccaagaaagctttggttactctgaaagaaacttcggagcagcttaagattcaagcagaaaaggccagaaacgatctgattgaaatagttaaagaaaccagtgaagaaggcaaagtttacctctcaacggcagccgagaattcccctccacaagtcaaagaaattgtcggaacatactattcctctgccgatgatttcaatgacatttccaaagttcttgactttcacgtcggcataccttatggtatcggaatttttcatattcattaacacaatcagtgaattttatccctatcatgcctgtcaattttcaattctacaccggtttatgaaagcattatttgaaaaagttgaattacataaacagaaactttaaatttcttttgtgcgtttttgggtttggcaggtaccattctttcagt

SEQ ID NO: 2018 - DNA, 628 bp, Gossypium hirsutum
gtttttccttagtgagtatccacacctctggaacttggtgcctcaatttttgaactcttttatctcctttacaaattgcttgttcttgtttaagcacatatccttgttgactgatttattaacttttaacatatagagcatctatggttgttaatgtatgaggatatccattccaatatactcttacaaaattctgatcaataattttccaagcatgaagtaaatagttaataacccttgtttccgatgagctcagtgacctaattgtattgcttactctgtgtaaaatttaacccatgttgagacctctctaatcttctaactactaatgcgaatttaactatgcctttcttcaattggtcttattcttccatcacaaatcacttttgtttgtgatatgtcattgattttgaaaatttaccttccagaaatgttggggaccaaataagaacgtccatgtaaatcaaaccagttacaaactcctattgcttttttgcaatatttatataactcgtaaatgtctctcttgtttttttcttctcattcttccaattgaatgcagtggaaaaattttgaatgttgaagttgtggatggaggactagtatgctcaaaaaaaatttcccaaaa

SEQ ID NO: 2019 - DNA, 250 bp, Gossypium hirsutum
cgttgctgctttgtttatagagaaagcagaaaaatgaatctttcaactccgcgtgcttacttttttaaagaaagttgcatttgaataattttaaatttattttttcaaaaaaattaatttaataatataataaaataaaaatttatcagttcaaaaatatttttaatagagctgcaatgtttggttgatgggaatcgaggaacaaacaagaatgtgtatctgtcccataattaacttaatcccaaaattc

SEQ ID NO: 2020 - DNA, 658 bp, Gossypium hirsutum
tagatgtgttgacgcttattatgattaaaatgggttttgtttagaatcaagatgaagagttttgggttgatgataatttcaagtttatctttcacctacaattgaaaaagccagaaaattcgtcattgtcgtggataaacattgatgggatgatcttcgttaacttcgctcagctatcatatattaatggaggtgagtttttacattatctaggtttaaatcacaaacatttacaacttctattcctaggctatgattttctatgtaacaaaagaatttaaatacgtgaagtatgactaacaataattatatttataattttttttgtttattacgaaattatatattttttaagatttctgcatatcattatttttaattatttattttattatgtagtgatctataaatttatacattattttaatttaatattattattaatattaaatatgtttttaatatttcttgttatatccaaggtgaattgtaactagtaattaataaaaaaacatgtgaaagaaaataagatgaagcaaagtaaaacaattgtgagtataacccccacatctttagcatcagcaacaaatcactgcttttggcacataaccatcaaagccaaatattctggcaacagcaagcacagcataatggactt

SEQ ID NO: 2021 - DNA, 499 bp, Gossypium hirsutum
tgcattccaattgcatcaatggatttttactcatacaatctgttttgttgcaaaatccatatcaacttgctgtaaaactgggatgtagtctgtattttgtatctatattaatatgatttatttcatcaattcaaatggaagtgttctatttaatcctatcaacaatatcaaaatgcaagtggcaagcttaatgctattcatgggggcagatatcccctcctcagatactgaaatggtcgttgttggtatgagcatcttatctctcgaaagaagaagtctctgctttgatatccttgttctatcaaatcattgtatctgctgatgatttgcatttgattgagtcattttgactgtagttaggctaatttctgatgaatatgataaaataagatagcattcttagaatttatttaaaaaagtgtgttccattcatgtatctttggagttttattggcattaaagtcttttagacaactgggagatgattttgtttccagtc

SEQ ID NO: 2022 - DNA, 630 bp, Gossypium hirsutum
tactcgaaaaaagttgatagcaatatgcatacctatgcattcaccgaaccggtaacgaggcaaaactccattgttggaagcagtgatatcatcaaaccgcttctcaacagcctcccatccatgtccacattcattcttgctaatgaacttgaggcccatgagagcatgagccgctgcggatttagtccgatcgaaccgagcaggcttcttggagaaagatgtcaagcgcttgagttcgtgccccacctgcctaatcttggccgaagcattcctcaccaccttagatttcttctccagacctttagccagcaaactcagctcaggatcttcctgcaaatcgccaccattcgcagcctttacgctctgaaccgctaccgaatcggcagtaacatggagggtgatctcaacgtaacggtcgtccttggaagagctggagtctggaatgttaaagtgggcagttttcttccctgctgcaacctttttgtttaatggtccgctcaatggaccactatggggcactttctcggaccctaaaacatctgtatcagagtaatgatgtcgatggtggtaacgaactccatcctcagaactcattttctccatgttcctcgattcccaattagccagtac

SEQ ID NO: 2023 - DNA, 644 bp, Gossypium hirsutum
cttggcatggaaattatgagtgtctaacgtagaattatgctgatctgttctttcactccacagaatcaaacttagtaaagctgtctatgttgccggattctttggttccagtatctgttaggggagggaggacctaacggatcccggcttgcaggcattcatagtaaacggaaccacacaatcagtctcggtgagatcaatcacttcgatctcgtggtgaacgagtcggtaatccgttgggcatcctgtacgcatattcctagagccccatcacttagattatcactagtctgctagaaagtgttcataccaagattgaccatattgctgggccgaatggagtaaatagaacgagaaaatagagaaagaattgcagacactgacattcgaattctctgagataggtacaagagaaatccgagtttagaataattttgtttgcttaagcctgttgtgttgagtgatgattcttttttgaatttgtaagtgattttcatatgtacagtcacaaattgtaatattatcctgcttaatcatctctaacaaggtgcactgtaacattgagagaaacaattttgatgccttgattgtttgtaaaattgtaaatttccaaaaatgattaacgactgcccttacagcacttt

SEQ ID NO: 2024 - DNA, 641 bp, Gossypium hirsutum
ctcctgtaatacaccgcgacatcaagtcatccaatatcctgttggaccagtccatgagagctagggtatgttcttcgtgtttgttatatatttcatggaaatctgttgaaaatctatttgtttttgcttgggtaaacctttgatgttacaactaacttttagtttctgaaatattgtcatatttatgcacattaacgaaatatataaagtttaatcttatgggactgtcatttcaagtaggtagccgattttgggctttcaagagaagagatggtagacaaacatgcagctaacatacgaggaactttcggatatcttgatccagagtatatatcaacaaggacctttacgaagaaaagtgatgtttatagctttggggtattgctatttgaactcatagctggcagaaaccctttacagggtctcatggaatatgttgagctagtaagatctctctttcgctttctctcttataacttgattcttttatattctgaatataataatgatacgacaagcaggcagctatgagtaccgaagagaaagatgggtgggaggaaattgcggattcccgattggacgggaaattcgacgtgcaagagctcaatgaagtagcagctcttgcgtataaatggtcaacc

SEQ ID NO: 2025 - DNA, 640 bp, Gossypium hirsutum
tgcagcctaacaacatgacaagcatgcagcacaattctttgtcgcctggggtttcgacagcacagcagaccatgttaaattcattacagccaggctccagtttggattcaggacaaggtaatgcccttggcccagtacagcaggttgctccaggacccttgcaacagaatcctgtgagtacctcccagcagacaaactttaacagtaacagtttgtcatcacaaagtggattaagtgtcctgccgcaaaacattaatcctcttcagtcaaattccaacatgcttcagcatcagcatatgaaacaacagcaagaacagcaaatgctgcagtcacaaaagtgcaagcaacaatttcaacaacgtcaaatgcagcaccagtgtatacagcagaagcagcagctactgcaacaacaacaacagcaacagcaacaacagcggcagcagcagcaacagcagcaagcaaagcaacagctgtccactcatcagatgtcccagctgcatcagatgaatgatgtaaatgatatgaggcaggggatgggtgttaagccaggggtatttcaacatctctcagcaggccagcgtcaatcttatacccatcaacagttgaaaccaggtgctcagtttcctgtttcttcaccctc

SEQ ID NO: 2026 - DNA, 642 bp, Gossypium hirsutum
gcttcggcacaaataagaaacggtctctccagcgcataaatggttgggagttcacattttcatcatctttggtaaaatcaagcccgccacgtagacattcataaactgctctaccgtagttcttagcggataaccccaatttaggtttaatagtacatcctaatagggggcgaccatacttgttcaatttatctctttcaacctggatgccatgaggcgggccttggaaagttttaatataagcagtagggactcgcagatcctctagacgtagagcgcgcagggctttgaacccaaatacattacccacaatggaagtaaacatgttagtaacagaaccttcttcaaaaaggtctaaagggtaagctacataacatatatattgatcttcttctccaggaacgggctcaatgtcgtagcatcgccctttgtaacgatcaaggctggtaagcccatcggtccacacggttgtccatgtaccagtagaagattcagcagctaccgcggcccctgcttcctcaggcggaactccgggttgaggagttactcggaaggctgccaagatatcagtatctttgacttcatattcaggagtataataagtcaatttatactctttaacaccagctttgaatccaacac

SEQ ID NO: 2027 - DNA, 614 bp, Gossypium hirsutum
aactggagtgtgtgaaaggcaactctgcatctaagcctctgaaactcagacaggataggtggaagaatcggctgaaaggtgtacagttagtacttcaatgttaatcttatagttagtcattaatttagaaagaacttaaattgcaagaaacagtaaatatatttgataaatgaatattaacacataaacatcatcatgcaaaattgctctcgcagccacaagagggctagaataaattagacctgagagctagaaagttgctttaaacaagaagcaatcaagttcccgctgagctaagtacacactaacttggaatgatgagaaaaatcccgatgagggtggtcaaatgaatatgaaactgattcaaacaatagatataaagtagaggaattttttgtactagagacagtgatgcaatcactgctaagactcttaaacatggaaatcgcatgaaacaaaaaattgattattggactgtcaattaaaatcattttgcaacgtaaaattatggtccggaatccaatatgaacaggcaacttctaaccaaaattaacaaatgttttctcaaaaaaaaaaaaaattttttttttttccccaaaaaaaaatttttcccc

SEQ ID NO: 2028 - DNA, 543 bp, Gossypium hirsutum
aaaataaaatggaaattaagaaccaacattaagagctatttaatctattagcccaaatttgttaatttctgtaacaagcacagcaaattaccttctctaggttgggactagagcttctctcctcatcaggccaaagaatccatgctgcgatgcacatatcaattccatcattaatcagaactggtggtaataacaagcatgagttgtcaataatttccagacccatatctttccctccaagatgcatgccagaaaatctctgaatagaaatggcagaacttttaagcacttgaatttgcactttcaagttccatgtaagtttttggacaccattttttcccattatatcaccaattctcttccatctcaatttagccatctccaacatatgctctgggggtaggctgttgcatttatcactagaggcacttgttgataagaaattgttttttctattatccaaccatagtaaatcctttggcaaatttacatagtacacaggagaattttcccaacagattgctatgccatgtatctcaaagg

SEQ ID NO: 2029 - DNA, 571 bp, Gossypium hirsutum
  misc_feature (560)..(562): n is a, c, g, or t
caagacatttctctgtggagatgttagtggcccactacagcgccttgtaacagtaagttttactatgatttgtttgaacatagagaattctagttgtttttaactttactattatttaaatagtttgtagtatctatttgtacctgtgtgtaaaatatgatcaattttaaagtacagctttttaacaatattattgatgtaattgacttattggtttcattcttgccttttttgaaggtaactgaagaatgcatggagaaaggcatagctgtttgcaaggatggtgctagtttcaaaaaaataggaaaaagaataaggttttctctctctaccttccctctttattgttctgggtttgaaaggaataaagatttctttctgcacccaaaattataagataatcttatctacagaatggctgatgcatagatgctggttaaagtatgataactgatcaagagtcatttgttagtgttaaaatttattcaattacatgaaaattttaaactccttatagcttaataaattttaaaagtaaattaattgaagcaaaagcttcnnnatgatagca

SEQ ID NO: 2030 - DNA, 622 bp, Gossypium hirsutum
atatttattttaaatgtagtagtcgactattaatgaaatgaattctgatgcattggagaaaatattacgtaatatgataacattttttttgaaagttaatatgataacattgaagtctgtcctttggggacctttttacaaaaccctatttatattcaaggcattttatgttatattagtttgtctttaattatttactgagtgtgaggcttgtagaataccctaaatatgagtctcgtccactattcatgcttgggctttgggcttttgctcaaactattacgagtctcgttcaattgacattatctttttgtgacagccatttgtactagatttgttgtcgcctttgttttctaaaggtttcctttttgttgttgctgtctacttgtattcactctttcatttattgcatttatttgaggtgcctttgctatgttactttttcaactatatatataaatccctatatttactatgcatccataaattatctggtcattattgatttagtcatgcaaattgatcacttttcaacatgaattgaaaaagtaaattcaagctactggagtacccttctctaacctttgggaacccctttcttgtaacgtgacagtaaaaagat

SEQ ID NO: 2031 - DNA, 563 bp, Gossypium hirsutum
atatttattagccttattttgtcaccgtcaccaaaaacaacagacatgtgtagttactagtgaagccttatttatgctttcactcgacctatttattttcgctaatgaaaagatggggaccttgtaatattttaaatatgaaacaaatcacatcacacaaaaggttaggggcgccggattataagcacaatcacccgtaagcagtgttcacacacaaatacgcaacgcaatttgacaatccgcatgggatttaggaaaggccaaaaataaacaaaagaaattcgtacacgaatccacctggcactttgcacttttttttacttccccagtgaggaaacaaaatataaaaaatgaaaatagcatgaaggaatctgcttttaggtgtgagttgtgtggcaaggactaattaggagtcctcctgcctctcccagtgtccatgtggcatggtggtgtgggcatattttgcatgatcgaggcgtggcaccgaggtgagatgagtcgctatcattactcaaaatggggccttactcaaaagttgccccttatgccttggcgtttgtatt

SEQ ID NO: 2032 - DNA, 614 bp, Gossypium hirsutum
attccaccttcgactagtaaactggtaggtaaactttctatgttgtattttgaagggtcttttcagattttcttttcttctgtgcccatttgggtccatatatagctaaatgtgtccgaccaaatcttctatccttgatctgcattttatattaacaaataagtacaataagacttgctgatgtgctgcccttaaattgcttggcatgctaaaattttagtaactcagaccggaggttcattaacttccacttcttacaggaagctcaacgcaaagtaacaaccaattaattaatggaaatacctttacaaggcatccacaggaatccagcatgtccgtcctcaaaggatattccactacctagaccatgaaaatatgttgagaaacaaggcaaatggcactcatataaacctgatctttgaacaaacaacaaattgccactcacaataaaggtgtcttctccaacaataggtgacttcgaaatttgagacattagcattccataatcaacttgtgtgtatggaggtgttacactaatgtaatcaaatggtccattacctataaaataatcaaaaagttagtttctaacatctgaaacgaaaggaaaccattaa

SEQ ID NO: 2033 - DNA, 649 bp, Gossypium hirsutum
  misc_feature (57)..(57): n is a, c, g, or t
  misc_feature (568)..(569): n is a, c, g, or t
  misc_feature (602)..(603): n is a, c, g, or t
  misc_feature (614)..(619): n is a, c, g, or t
  misc_feature (627)..(627): n is a, c, g, or t
cctgaagattgtcctggcattaatcaatacagcgataatacatgtgttcatgaaccnttgagtaggtctgtagtggatcgagacagtgataattccgattcagaggtatttagggttaaacgacgttcgaaggttgagaaaagaagtgggaatgacagcatgtcatcaaagaagtctgaccatcaggtacaataatagctttccgaagttatatccctaagttatattgcaaacttgaattcatatgaaaaaagaactaaaaaaggaaaaaaaaattttactactatttattagtcaaaggttgaaatcttatttacgttagtttcttcttccaagtactataagttgttggactataacaaactttatcttacttttagctttacttttgacttataattgaagggaaatttgcccgggaacttttaagttgcgttttcagggtcaaaactaagaggctatctttttattcagaatttaattagttccagctatccttaatttttcccctatggaagggtgggtctggaatttgatttcagggttgtcttgttgtgatttgcaatgnncactggttttctttttaatctttgggccttccnncttgtttgcgnnnnnnctgacgtnttggttgtgggactcttgatgt

SEQ ID NO: 2034 - DNA, 364 bp, Gossypium hirsutum
  misc_feature (279)..(279): n is a, c, g, or t
  misc_feature (281)..(281): n is a, c, g, or t
  misc_feature (284)..(284): n is a, c, g, or t
  misc_feature (298)..(298): n is a, c, g, or t
  misc_feature (314)..(314): n is a, c, g, or t
  misc_feature (326)..(328): n is a, c, g, or t
  misc_feature (345)..(346): n is a, c, g, or t
gatatgagggtgccacaagttagagttttgatcaacttggagaatctagatgccgaagagaaggcaagagagaatgatgttgcgatgcccgagttgcagcataatttgaagttaattgttgacttggcagagcttgatactcagaagattgatgaggataactcgtctggtaaattgaccttggagtcccttgcaaatgattttgaggatttgcagattgattatgctgatcgatatacagattgtgtaacttgtcctgcattgtgtgttcgtgctcgntnccnatgattataagaangcttctgagatggtancctcgtgctccnnntgcttacaggatggagnngatcagaatgattatgct

SEQ ID NO: 2035 - DNA, 633 bp, Gossypium hirsutum
gagaagagaagcttagctctggccatcatctcgcatctgctgctgaggctggagctttggtgagtatatatacttctaataatgatttggtggaaaaatggaaggttcatacttactaattatatcaaagttcacagctgaaagaaaattttcttttaacagtaaaatttactaataaccaagcttaaaaccatttaggatggtctaagatgctaactttcaatagcatgtcacaagatgttgctgcatttggatactatttgagttgtcttggtttgaattagtcaggtactctattctcactgctgatgctaggttgaattggcctttaattgatgttaattgagatagttttcggtttgttttctattaacaatttcaatcttgtggccttagattgatgttaaattagttatgtactcgtgttctcactgctgatgctaggttggattggcctttaatctatgttaattgatatagttttcagtttgtattctattaacaatttcaatcctgtggcgttcttcaggtttccttgtgcacaaatcctatttggcttataaaaacgagattgcagctccagaaccctcttcatcaaagtcgacgttattctggcatttatggtcttctctt

SEQ ID NO: 2036 - DNA, 640 bp, Gossypium hirsutum
ttccacctctaaatagattaactcatcagtcctttctagttgcttggtggataccagcatcaacattttatcgaaacttttcaccatcgtcgaattctcatcgagaaatattaatcctccccatactccaactattcttttgaaagaagtatagttccaacagtgtaagggaatgcctaatacttcaatccaaaatactctctccttcactgccaagctctccgaccaaggctcaattttaacaaaaaaactccctcagatacggtccaatcgtgctgctttaataactctaacagttccatgtcgggtatttcaatcaaaaaatgccttctttgagtccttctgattttaatctcccccaatccaattctagctattctttcagttaaactctttgtatcacaacacatagaagtaattcctaccaggcatttttgaagctttcacagttgctcgttgttaacatgtccctgaaccaacttaatcaagttcctctccttgcaatatatctttaccttctgtcttactcaaatcgttgctacttctcatggagttttctcctaaatccattctactatctttcaatatttttactttctccttccctgcatcgttattaaacacctgctgctgtaaaaaa

SEQ ID NO: 2037 - DNA, 651 bp, Gossypium hirsutum
aaattacattgcacatttaaagtaaagatccaaatttgaatcttgacagatgatattaatgaaagcatataaaataaaaatatttaaaccaaaaaaaaatggttagaaaataggtaagtagtcaaaaaggagcaccaaataattatagatagtactgtctgtggaactagctataagggttttcaacatttcaactttatcatcagaaaataatattatatgcatatatatattttattttacatgcacagtaacaagagactgagcttttcttaccttccacattcattggaaaaaaagaaaaagaaaaaatcatttagagagaaaatgcagagttaaaaactttaccagtgcgataatccatggtcagtgctcctttgcagagatcacttaactgtgattcaatgttggtcaagaacgtcgtcgcttcatcgaacggcttggacagttcctctttgtatctatgaagaacctcacaatatgattccttcaagcaaaagtaataataatggatgttacgattcatgcaacaagtcccttttcctctaacgtttttcccgagaaccaaacaaagatattatgagataaaaaaaagagacaaaattaagaatcttagactatttaattaccatgaaactcatcaagttctgg

SEQ ID NO: 2038 - DNA, 559 bp, Gossypium hirsutum
gcaccctatgattttgctaccatatgatacaaacttaaaaaagaaaaattattttgttccatgtaattactgtgatgaatatgataaatcatgtatgggatttaaccaaagtagtcattgcaagttattttcggtttagttgatcttgcttgtctaataaaaagttctagattttgaccctgaatcatatattttgaaatgagagtatacatacatacatacatacatatatatatattggtgcttttccctttcatctggatatttagcctgtttctgtgatcagaggctgttaccatgtttttgtatcttagttgatacaagtttatttcaattctcgagtactaatatgtactcaatccaattaagcaaaaagatgagacagctatggcttcttttctgtgaattttgtttctctctaacacaatagttggaacactatttttcagtagttataggaacacacttgtgtcctgtgtcttccctttctgtctctaatactgtaacatgcatgactgtaatgaacacggttgaggtaaagaattcgaggtaagccttg

SEQ ID NO: 2039 - DNA, 769 bp, Gossypium hirsutum
  misc_feature (88)..(90): n is a, c, g, or t
  misc_feature (101)..(101): n is a, c, g, or t
  misc_feature (103)..(104): n is a, c, g, or t
ggataaagggaagaggtgataagaggaaaagaaggcagtcgaacatgactatttctacagctaactcatttatattcgtccgccatannntttttggatananngaagaggtgataagaggaaaagaaggcagtcgaacatgactatttctacagctaactcatttatattcgtccgccaaatcttgtcaaaggagaaatagaacattgacaggtcagctatatatgaagtggagacccaccctttgaaaactaccaactaccaagtggaaaacacttcaagaagtcactagcgtaatcatttttttcacttgttctttacctgttcgcgaacagtacataaccgcatcctttggtggcaggaatcttgacacacacaatttctcctaatggcaagaaaaattgcttcaatacctcttcggtgacatttagatccaagttgccaacaaaaatctgcaaaggaaggatggttagtcaataagaaagaaataatctgaaacaacttgtgtatgcctcacttacagtggtatttgtttggtcattatctggtggaagcaccggcatggttgttgctgtgtatgcaagagctggatatacagctgctgaaaaaccgtggataaattcattttagaaattttcgagtacagaaattcaagttccagcataattaagtacagtgtttgatattacgtcatgctcacgtctcgtctaaactaacaaacaaggagaatatgaaaaaaaaaatcttaaatcgccatggaactggcaag

SEQ ID NO: 2040 - DNA, 618 bp, Gossypium hirsutum
gatgagaatttgatcatgggaggataatttgcaacagttccccagaaaatttagtcgtaaaattcagttggcagattgtattgttatactctcaaccaaaaataagtttgttagatgcggcatggaaatgagacggcatacttcatcaatatcattatgtatttactttaatttgaaatgcatatatattcatctttggacaactatccaaagataaacaaaatgaaacaaaataagttcaagccaaatataacgagcatcacaataatacaaatttcggattgctactagccaatatagtcaatgcccttcaaattctctgatatacaatgacaaacctatgtacctcaaagatgatcataaatttccatgaacacaggcaaacaacttatcaatggtaagacaccattaacaagccataatatttgacaacaattcgtcgaaatcaggatatacatgaaaacattgctgataatgatggccattccagtgaaagaaacatacccttcagttatccttgcagtactttttaaggcacgccatgcagtcaatgcagcaaacggaatggcacttgcttcctacaacacccaaaaataattctcagatccatgctgtgca

SEQ ID NO: 2041 - DNA, 622 bp, Gossypium hirsutum
tcttttccccagtgtccagagttggaaatatttttgtcaatagttataattcttgggtcattatatgttccgcggtggactatatagttgacaagatgaattaaatttcattataacaattaaaaaaaaagagttggaaagcagtatttccatgtacattatattttgttgaaatccttaatatttaaaatttgcaagttttgaaggtaattatgaaaactacttttattctaactttttcttttgtgtaagtcctagtactaaccttcaaaactttttgcctgaactttctcagccctttctgaacctcttacttatatcgatggctatatatagatcaatacttcttgagttgtcgggatacttgtacatacagaaacatataggttagtccttctcaagttgttggataaggtcttgactcattccattgcacttggcatgtctacagttttgtccgactgaacataattcaccagtaacaagcaaaaagttaaaagacaaagttccctataatatggttacaaatatactgtgtagtattttcttatttgaatctggccgctattattccataatttgtttagctttctttatattatcacacgaggatgtcaaacag

SEQ ID NO: 2042 - DNA, 648 bp, Gossypium hirsutum
aacctcttagcatctcgcattatgatctctctgccaacaatctttgacatgatcttaaatgcagcatgacaatcaccacaaacacgaaggttcttgataatacgaatctgtccacgagctggactggtgaggagaccattagcaagagcaagtctctcactatgagcaagaagagcttcttccttactttcctgatctatatcgtgcaaacaaaatcttgtttcgggaacataaccagcttctttcatgtgttctttcaaacgtctaagcagagcatagattctatcattctcaggatgtgatgtatctcctgcccgatactcgttgaccctgctactgacttcaagaggactttgacttgccaatttcttcttctcattctttttaaggtctgaatctttcaaaggtatgagacctgctttagattggtcattcaaacgagaggcatctagctgattcaccagctcagcacaaagatccccaagttccaagtgcccatgaattctgcagagattcattaaagtttcccagacatcaacactggcttcagatggcatattttcgatgaattccaatgcttcatccaaatgccctgtactccccagcatgtcaacaacacccacataatgctccatggatgggataata

SEQ ID NO: 2043 - DNA, 604 bp, Gossypium hirsutum
taatgtttaatgcaacaatgaacaactctgtcgccagctttgggaggattggactttttggagaccaaggccataaactcaacattccgttatcggtgattttaaaattttcttaatggctgacgaataagaaaattgtgattttggtgtgggatagggtgttcttttgtgttggtttttcttcgcctccttcagcttctatggatttaaccaattttttcattcaatttatcctgtaaatgcataaaattactttgtaatctataaatataaagatcaaataatttgtaacggttcatttagcccactttatccatccttttgcgtctggcacatgttccacgtaaggcatgcatgagaatcacgaacagaagtttttcaaggcaagggaataaaatactgaagataattctcaagtgagtaattactactaaagttatttatgtttgaaaaaagttggtgggaaggtactggtattatggaactaaaaatgtaagaaaatgaagcacatttaataaacaatgtataacaagtcccaacatatatatttgtatttgatgaacaaaagtaattgaattagctaaggaataacccgcataaagct

SEQ ID NO: 2044 - DNA, 579 bp, Gossypium hirsutum
  misc_feature (8)..(12): n is a, c, g, or t
acagcttnnnnntaagtgtgttcttttaccgccaatgggtacggatttaccgtactgatcatcgaattatcacttagagcttactagctgaacttttttttttaaaaaaaaacaccttaacccagtgacttaaataaaaactttcaagttaagtgacttaaatgaataatttagtgaccattctgtacctttaaaccaaaacataaatttagtaatagtttagtgactttgggtgtagtttaagcaaattttatttccatagggtcccaagggtccaatatttatattgcgtgcatttctcttacaccataagaaatttgtgcatttctacttaacatcatacatcaatctttggatttggaaattttgataagataagcatcaactttacattaccttaatctcacagcttgctagattgtcatacatcattctgccaggagtatgctcaaagagatggaatcgaacaattcctgtattatcatgtaaaatcatgttaaatgtcgaatcccatcgcggactggaacctggcctcacatttgttcttctggttagttctcctaactcaacttcaacaaa

SEQ ID NO: 2045 - DNA, 660 bp, Gossypium hirsutum
tttttcttttttgtaaatttggttgttagttacttgcacgatcacctacaaatattggttataatctctagcattggtctattgatttatgctgctcctcagatacaatgttctttggcgactttcgttttttcttgtgtgtctttgtgtggaattgtgggtaatgtaagaatgttttacatttgccttttttgtaaatttgattaggagctggtagttttgtctcagttgctgcctgagagaatggttcacttgcaagtaaagggcatagaaaccgtagtcacagtttcaaattttatgctgactattctactataattagttttcttatttcatctgaagaaattttctaggattgttggtttttcgatcaattcaccactgcagtccagacttaattctcctgaaatttttttttgtaaatgttgctagacagtctcttttttcttttctttctctggtgagtgccaatgttaattacactaccactatccttggataaagataatctgagatctccttttcagttctaatttaattttatatataaacttattagctaaagggaaaactggtaaatagttttgttttctgcaactattgattgatgagatggtgagaaaagtttatcaactgtctctttaggcctgcctgaattaa

SEQ ID NO: 2046 - DNA, 615 bp, Gossypium hirsutum
tgatttaaaccatcagttaataaggaattcaaagtgagaagtgtcctgtcaggtttcatagcctagatatagatcctaatccaaagttagaaagccgggaaagtacgtttaaataagtactttacaggcagtggtaaaagaattatctctacaatctcgagccatcaactgcacccctacatgcttcggtggtagatatttgtcaaggggtagctctccgtcttccatagatgtcatgatgaggcaaccagaacttgtcgtttactctctataagacccagaaaccacaaaactgtaaacccgagggtaactaaaaagcctatgttaaaatataaccaactccgagatcacccctgagcttactagttccccactcggaatatacagtcatgcagctgatacacctccttgcctcgggaaaaattgaagtcctgtttcagtttttaattctaaaaacaaacttttcgaacatttcaaaaacagcatgctctatggtgctcaatttggacaagaaactattcaagctctctatgcatctgcacgatgatgaaagtggcacctgctccatcagttcctccatcgggtttttttcccgaacacttatcacagctaaaa

SEQ ID NO: 2047 - DNA, 588 bp, Gossypium hirsutum
ctcactaccttctaattctcctccatatgctcaactttctgggcagggaccactgaaccacaacagatacaatttagttatccattttaattataaataaataaaaagttaaatagtaagtacttcaagtttaattaagacatcaataacgggagaagcattactttcccaatcaggttttcgcttctctgtcactgggttgactacaaacatcagcctcaacatccttctcggcctttaccacattaaaagtttccatcatatcattagaaccggtaggcgatgcttttttatctgttcctttgggagaatgtgcaacaatagctggggacttctcaggagtatgtgaacctctgtgcataccttcagtgacatctgttttacactcaacatcaacttccatggagggtgcagatgcagatacttcaaccacttctttctgaaagtttacacccagatcagaaaccttatcttcatttgccccaaatgtgatattcttttgtttaatatccaacctgtcatcatcatcaacagcaccagcctttttctccagatgttctttggaatctccaatatcacttgtcttct

SEQ ID NO: 2048 - DNA, 595 bp, Gossypium hirsutum
gtgcctcgtagaacttctaaaaaatgtgaacttacatgttcctcatggttggtcgtgttcggttcgatatcgatttaagaattttggaacgatttgtgacaggttttgctagatgtgctctgacttctttttttctttttggttgtcgtacagaaatttctcaagcaagattttctctttgaaaatttatcttgtgaaactccgatatacatagtcatggaagggagtgagccgcccttcttcactcgtttttttacgtgggactctgcgaagtccaatgtgagtatctttgctgttgcatgaaaagtgatcatggttgattttactttgcaaggattttagtgtttttaccttgcttgcagatgcatgggaactcatttcaaaggaagcttactataatgaaacacgggggtacaccaataacagatgtaaggctgtagtttactcttttgaaatagttgaactttctatgtccttagtgtcgagttatctatatccaaacttgttgagtgtttgtttctctgtgtcctcttcagagtgactcattgtcatttatatatatatatacacgaagcaagttccactaatatgtcgt

SEQ ID NO: 2049 - DNA, 615 bp, Gossypium hirsutum
ccctgacccccaattcaatccccctccaaattcaccccaaaattcaatccccataaaagaatgtttctaaagggtaaagccctatgattcctctgcacttaattgagttaaatttagtatttatattatttaaaaaattaaattcccataaaattaatatttattgtacaaaaattgttcgaatttttttcaattgtaattaaattccaaagcacatatattatttatataaccataaaaatttcaaaagatattaactctgttaaatagtaaataatattttttaaatcaatttatttaatagtagaagggctaatttgatcaagtctctataatagatgaacctctcaaatacatttatatttaaacatttaaatatatagggaccttttaaaaaaaataatccattgtgaattatatcgcataaaggaaagaaattgatttttcaaagaaaaacgatgtattccactaattgatttaacgagtttcatggtcaccggcacaatttcttaatttttgatgtgacctgatcaaatagttgaagtattctaatttctatattttaactatagtcattgatttaaaaaggatccaatatcccgttataataagatc

SEQ ID NO: 2050 - DNA, 611 bp, Gossypium hirsutum
ggatgtagctgttccgcttgaaataaccgatgatgcatcacctgaaaaaggattgcaattttcctttagtaattgctttcctgctaaaagatatgatacaaaatgtagcactccaataagagatgggctacaatctttatcatcttgccaagggcgtgttctcagtgaatatgatactgggaggaaagatctaaacatgaaccatgctggagagtctacttttccaactaaatctcaagttgatgcctaccttgggaagggaatgtgtgttgatctcaacagtaatcaaaacacatacagaattccattcctgaatgagaggcagaagcacagatctcctgccgaagttgggagctgttctacgatgcagcaaatggtatgagcttttcttctgttactcaagtagtgaactggcttttataatggaaaagagaataagttcataagatattgttgcagaatcatttgtgtgatctttccccaaatttggtctttcttcctttgtaaccaagtttctttttacattcagttttggtatgcatgaattattcaagttatgattagcgtttagaataaagtttctggaactttcagatcaatcatatccgtgc

SEQ ID NO: 2051 - DNA, 588 bp, Gossypium hirsutum
  misc_feature (542)..(542): n is a, c, g, or t
  misc_feature (547)..(547): n is a, c, g, or t
  misc_feature (549)..(549): n is a, c, g, or t
atacctttgacctatttgtaaacaaattcaacatttccaaaaattacactttcttaattgcaactcagggtttgattatgtttcctttgaaattgaatgaaaggaaatcttaaaatgaatttctaactgtcctcgaaagaccagtgactgacctctcccgcaaaatgccgtacactaaaggccctgcctctatctcctttgaagtaagaactagaatgcagatgctgcttcaacttattagcaagggtaaaatcagttgaattggggaaatttgattcctcatccaacaaagaaaatatccccaatggtttctgcaaaataaacaattaaaaagaagaataacagattaacctgaaacattttgctttgaaatgaaacgagatatgaaaataaaaacttcagcctgcatcagcaccgaagctaagataacatacttcactaaaaccaagctcaatttctaaatagaaggaaaaccacacaatacacaagaaccacatgccgcgcaatatattttgaaaagaaacaatccaatgcattgtatntgaantnagctgagctaaaaactattctattcaattaccttctctt

SEQ ID NO: 2052 - DNA, 641 bp, Gossypium hirsutum
  misc_feature (17)..(17): n is a, c, g, or t
tctgcagtttggttcangttgcaagtttaaccatcctatgggaattttcacgtacaattactccatatcatctccatccggtgcccctgtacaccatttcttggggtcttcttcaggaacttctgggttaaacctgtcgtcggaggggcttgttgaatcaggctctacaaagcccaggcgaatttcgctttcagagaataggcaattgtcttctagtgatgaaaatattgatgcagagggataaacactgcaacatgataggagctgattacagttgacaatcttttagttgatgaggcagagtaatctataaatttatttcccattgttggagatgttcacagttaatgtcaagttgattatgttcttttaaaatacacaattcagttgacagttgtgtcatctgaatttcttgtataaatctgaaaatgattccacatttggtaaaacctggtgaacagttcatctgtcccgaaactccttttactttctattttttttttttgggttatttttttttcacaaaagggaaaacaaggatttgtttttgcatttttaaacccccccccttgtttttttcagaaacctccttcaaccggcccttttaaaaattcccagccaaacccgggttttaaaaggcc

SEQ ID NO: 2053 - DNA, 686 bp, Gossypium hirsutum
ggtgttaaatgatagaataatgttgggtccttttgctgctgggattgtcttttttcttctttttgctttaggtgttagatgatagaataatgtttgggttagatgatagaataaagtatgcaattggttagattcattcagcacgccacgtgtatgactctaatattttttaatctatttggagcttcttttttcctttgaaatttgcgtacttttgcaaaagcaatgaaaaagcaaaaactagcttatattccagctcgataaaagattatattaatttatttataaaattaatttatcacgtgaatggcttagccattcctaccttattcaacacaataaaaccactcaaactagcttttaaacatattccagtaatgtacaaaattattattcttccttttctaccatctcacatcctcttcagcttcccatcggagatcttttcaacaaatctcaaagataattgggtgagtatgaaatttctctattttatttaaactttctcttcttaaccattctcgttaagttaaatcctataacaatatacctgtgtagaatttcgagtgagcaagaagaagaggggtttgaaagaacaacagcagcagccatggcgaagaagatcagcgtaacaaagaaagccttgataccaggttcaatcaaaccctcaagaatgtccaagggta

SEQ ID NO: 2054 - DNA, 604 bp, Gossypium hirsutum
atttaacggcacacgctgcaactctttcgctgtaacaatggggaagaacaatatgaatgctactatttgtgataattaccaactgattaagatgatggaatgttataatttataaacacagtatatctatacattcatacagataattgtacgagaaatgtaatacacgatgcacatgtaaattaccttcttccagtgagagctgaatcgatcttttttcgagttctatagcatgtttactgagttcaactgcagaaagtgatcgaagcactgacaacataacacgaaataactttgtgacataagatttacataagattgttacgattgggagagtagatacagtaagattggtaaagcaccatgaagacctatgtaaagtgtcggattgcattttgccctctctactaaaaaaatggacaaattaatacctgtatgttacatcaaagagcaaattcatcattttgttaaaaatttcatctatttttactaataaaaaatgggcaaattagtctctatacggatagggaccagttttagcataacaaattgatgaaatttttaacagggaactaattagttctttgatctaacatatagcgac

SEQ ID NO: 2055 - DNA, 200 bp, Gossypium hirsutum
tgctgcctgttaaaagccctaatatattgctggacttgtctggttttggggacccataagatgcattaactgacaaagttgatacgtgttttaagccatcttccaatattttgagccttaacttgaatttctcctgtaccatatttacaattgagcttgagaaaatactgtctgcattaatattcaagtcaaatttaatt

SEQ ID NO: 2056 - DNA, 633 bp, Gossypium hirsutum
gaatatttttgttctaaatgaaggttaaagcccccttcatatcactactacatgtctacatcataattattcatttgccaatgctgcttgccattacatttggtttgctctaaatgaaggttagtgcccccttcacatcactaccacatcttaattattcccatccttgtaaattgactgatttttcatttgccaattctgcttgtcattgcattttgtttgctcttgttgtcactaagaagttgatagtgagcctggaactttgtgtataaaacttgagtaatgctaaggtacggagtagacgaatcaggcgtcgtatttgcattgtgtgaaaatgtcttcctttttccaagactcagttttattaggactatgcgctgtgctctatttgttgttttaaatgggtacgaggctcctagcacctttagagaactagaactcaagttctggctttgccttacccctaatagttgcttctagttttgtgttccaaaaagaaaataaaatatcctgatctaaacaaaggcttaaattcccgatgaagtacttaggaagttggtagactatgacaatgtttctgcctaaaatatcagagcgaggtcattacttgtaggcaagtgaagatttaactgg

SEQ ID NO: 2057 - DNA, 655 bp, Gossypium hirsutum
gctgcatccggttcgatactgtcatcacacgtggctggatagacatctggaccggtgagcttctcatagcagccaatatctgaagatttctgccacacagcaatatcatcctgtgtagcatacactgtaaagcacattgatgtcaataagtcctgcaacttttctaaagctgctctctgctcttcgatagttgtattccatccttgatagcggtgttcgtagtttataggagggccagacaagacccagaaaccacctgggcggagtattcgatgaacttcaaggagataaattccacctgaaaaccaacaacatatccaaagcaatgtgttacttggtggataaggaaggaacatcataaacaatgaggaatactcattttaccaaattcagtccatgggataaggcatcttgagcaatgagccatatcaaatgagcttgaagggaaaggaaggcgctgtgtagaaatgacaccaaggattgctggtatcccacgttctagcacgaactggacctgagcttcatgattatctctcggagcaagagaaagcgtcagaattccacgatctaatagatcgcccccccaacttgctacctggaatcaaaagagttttaaatctataatgggatgagggaaatgagaagaaacagttgg

SEQ ID NO: 2058 - DNA, 647 bp, Gossypium hirsutum
atatttgcacggctaggaaatgtcacaattaccagctgcagtcaatggaatactgcaattcagagtatgttgtgctacagtaaacagcattcattgatcattggtgcaggtgactaatgttttcatagtctaagtagcaatgattcataattatgtcatggatatatacaaactggagtaggtatgataattcaataccagtaagataactgtaaagctagccatttgccctctttgccataggactaacagaaaaagcagagatattatagcatcaatttttcaacactcaaggactatgcacatacctctaatttatcctcgtttgtcctatgatcacgaggaagcacacgaaattcttcagtcaagcgaacacactcaccaacattttcaggtgaaacaaaatcaagagcgacctttatgcatgactgtggtatataaaaaaaaatgttagggcatcaaagaaacagcctatacatattgaattaccagcacaggatatcaattctgcatggttgccaaagaacaaaacatacagcattattagtttttactgaacatagccattttgagtgaagttctaaaatatataggtgggcaattacggtttttaccacagaaggtatgaccaaacacaagaacccatc

SEQ ID NO: 2059 - DNA, 610 bp, Gossypium hirsutum
tctctgagacaggaaactggaaattcctagcaagttctaatcctttgcaaacttcatagaaatcggagaggctgtttgcctgccatcattacattaaaccaagacatcaccgaacccgcaacaattattaaccgaatgagaaggtaatcgactactaacataagaaactatatatcatatacatatatcttaacctgctgactggctcgcctgtatatatcaagagctttgacagcttcatgtctcggcatttcaaaaaactgcaataaaagcacaactcgagcagccattttgaaaaaaagaaaacacatctgcctcaaaataggacagcttcatgtattaccttgtccacaagattgatgattccagcattgatagcacaatatattttgaaactctcctttaatacctgaaaatcgcgatattacgaggtcaaaatacttttgaatacaaaaagaatacaacacaaatacgtaataaagaaaaagagagagaaaatataccagagccaaagcatattgtatgacataattcgctacagcagccccttctggctgcaagaaaagcagggtagtctattaactttcccgatcaggtgaaacaaagttga

SEQ ID NO: 2060 - DNA, 623 bp, Gossypium hirsutum
cctcacataaggcaaatccaacccgtgtaaccacaccgctaaactttttcttttttattcaacaaccaaaatttgaaccaaaacattgatttaggtagatattgctgaatatattgtgcacacacagtactatcgctctttcctgatataagaatgacatagcctctcctaatgatgaatgtgctaacaaactcaattcatgcagccctaagttacaaactacctaatgcaatttaaccaaaagaactttcaaccagtaagcagacagccagaaggaggaatactcataaacagatgcttgatgaaagaaggaaaacttgatttataaaagataaaaaaacaaccctctgagactacaataatttcatatacctatgctgataggttgagaaagaaacagagttgggctaagtaccccacatagggttaaatctcagaacttatcatttacatctatagcattgatcttgagtaaggataagctataatgaatcttaagtagtaaacttttgatgaaaaatagaaaaacaaaaaagcagataattttagtttcatgagtcctacataatcacttttgtgtagctacgcacatgttctagatcctccaccagttaaaccacaac

SEQ ID NO: 2061 - DNA, 649 bp, Gossypium hirsutum
attgtgtatacgttgcggccatagttttgccggagaaggatgcactgatgctgtgacttgacgtggggaacggtggaagcgaaggaagggatgaccgccatttcagagttgaggattcgtgactgcaaagactaaaagctgtttcttttaaatatctcggtcctcagtgaacgatggccacagaaacatctccacacaaaattccagaaaattgagaaataaaagtaacataattacgacagcaagcaatggatccagggcttgagctcttggtttccatattttcttggctatatagaacgggccgcaagttatcgaatttttctttttgcttggtgcaaattatgaaaataatatgatcatggccaccaaagcccaatgcatgcaatttaacattggatttgagttaaatttaattgacgttgaacctcagccgagtaacaaggctacaaacaggaagggtaccctgaagttaagctgagtagaaactgtaatttcgggaaaaagaaaattgataaatgataaaatcttttacattgaactcagtagtcagtacagaatcgaatcccagattggaactaccctaaacgatgatatattacaaccaaatcacctgcatttaatcattctttagggcataccttcacaa

SEQ ID NO: 2062 - DNA, 603 bp, Gossypium hirsutum
actatttctcgaggtattcacgagttatcttagaaaatacaagtatatctttgcagcatttgtgttccttgtatatagtcaagttggattttcaattgcattttccattccgtaactatcttttcgttgtaggccttggagcatggacttggtggggttgttttaaaagttgaggttgtcaaagctgttcttgatttgaaggtaaactgctctagttctgcatatttgagtttattgatggttgttccttaacatgctttaaattatcaggagtacttcaatagaaggaatgaagttcacaacagattgagcttgacaaaagctactataactcaggttcatgcagtcggaatgggtgatcgggtttgtgtggacctttgtagtctcatgaggcccggtgagggacttttggtacgcacgaaatctttcttatccataaactatcttgggattcagatgtttctgctcttattaagtgtaagaaccaccattcgacaggttgggtcatttgctagaggactttttcttgttcactcggaatgtttggagtcgagttacattgcaagtagaccttttcgagtcaatgctgtaagttttgccttc

SEQ ID NO: 2063 - DNA, 617 bp, Gossypium hirsutum
tgagatccctgtctgctacatttctaaaatattactaaaaagagtgaaagatgctttttgtttatggaaaagttcaacttgctttctgttcgatccttccatttttgcaattgtgcactaattctttctccttttatctggtagaacgttgatatttagtgatcatgcacaatttttatactgttgcgtgagtaaaatatgtgattaatcatgatattagatgttctttatcacctatctctcattcttcttaatacataaaattcattcatttacattttattaagtcttgtagaatatcctaactcagaacatgaattttgttgtagatccgggtgttcttctctgtacctgagagtgtagcagcaaaaattgagctaccggattctttctataacctatcaagtgaagagttgaagagagaagcggagatgagaaagaaaaagattgcagactcccagcttttaatccccaagtcttacaaggaaaagcaagcaaaagcagccaggagaaagtatagaagaacaattatttgcatccagtttcctgatggagtggtgcttcaaggtgaattcgctccttgggaaccaactagtgctctctacgaggttagtcca

SEQ ID NO: 2064 - DNA, 648 bp, Gossypium hirsutum
tgtgttatgcttttcaatttagttatttgatgcttataaaatattgctactcttcggttcatccgaaaggaatttaggaccaatgttttctttgctatttgatcatacacattttgtggtgtttgttgcactgtagtactgaaattttcattcaagcttgtaacattatggaatcctgctctcatcaaacatataattctacatgtttcatgaatgctgctgttgaaccgcatacaatcaatttataacgcattcttttacatgtttcatgattccatttacagcagcatagatagatttactctctaggtgtcttgtatcatttaccatgaacttgaacatcactccttctacctcaacagtgctccatccgccatcctttttcataccttgtctaagctgagccctaaccttgacaacatcttcccactggcccctgctagcatgaatgtttgataatgctaccctccaaactatgccttcgggatcctggatagacagcttctctgctactctttcagctatgcagatatttccatggaacccacatgcacccaataaagcataccatacatcattgcttggtgtaataggcatttcctttataaaggcttccgcttcctcaagttttcccgacctccctaacaa

SEQ ID NO: 2065 - DNA, 611 bp, Gossypium hirsutum
aaaaattggtacactgacatatcacaacttcaaatatttgaatgctcattccagaacagacagattaacttttcggaaatagatatatcagcctttagcatgcacctagtcaaaacaaaatagcatgggctctccgctttggaaaaggataatgggaggaaaacacctaacaaacaaatttgggaaattggacaggcaaaaggatgaggcagtttcagatgcactgggttagcttttatgaaacaggaatactaacaaaaactatagcccaaaattaataatgataaccaattacatactgttgcttcaaaatatacaaaataactaccattctcttctgtagggtcaaatcagacatcccagaagaaaaaggataaaagatcataatgatcttctagtccagaaacaaagctagacatagtatacagatttaatgcctcaaagcatctagagtttagcataaaatcatcattgaatgttcctcgaacaccatcaacaattaaacttaacctgtgcacttgccttcaacctagaaattatgatttcaaaactatacaggtaagaacattcacatctagtggaaaaaaagatataaatttagcccataaaga

SEQ ID NO: 2066 - DNA, 620 bp, Gossypium hirsutum
ctatgtcttgatactacctgtattggatggtcagtttcgtacaagtttgcaagggacaccagacaatgaactagagttttgcattgagagcggtcgatttgcccccttttttcatctatgttttattgtagttcaatacaagctacttctgttttcttagttcttctgttgattatccattgtttcaggagatcctgatgttcaaaccaccaagattaaagaaccagttttcgtaaattcggggaacaacccgtttaagctcataaggaattctattaagtatgttggtgagcataggatcagggatttaaattacaagcgcgttttatcgaatatgaagtttgaattgcttgtaggatattggagaagcataagggtacgttcaagcatatcgataataagcaggtaaagaaccaagaatccatgttttccatgtatgttcttgttagacaacttccatggttgaaaatctctgttttttttattacagaagccagaacatatagattggtttggatggaacacctgggatgctttttattgtaatgtagatcctgaaggaatcaaagatggactcgaaaggtaaatattattctcggtacttcaaataggcttcaaaa

SEQ ID NO: 2067 - DNA, 601 bp, Gossypium hirsutum
tattgcttcaatctgataaaacttttttggcttttcaatttccatttgtttgctaattgtccttttgtttattgatgcgcctctacagtctaaggatatgacagttgacctcaagtttgaagctgaaggactaatcaggttagctaacaagattggcggtcttcaaacatgtgtactttgccttagcgatgtctttggatctggtgaaacacaatttgtgcctttgctagtgaatctagccaaattcggtttggcaaaggtttgtgaacaatcttaacttcgctttatttgtgtagagctgtagttttactattatcttgattattttaaaattcttactgttatctaccgtagcgtaatggatatttctacattgattatcaaagtatagactaaaagtgaaatatggcaatgtgtctttaggaatctctttactacaatgaaaactgttcccagggtctatatgttgtcatttgcaagtggtaatttggtagagatataattataaggtacatacttattaccgcatgcttgttttaaattgtaaggttttaagaagttaaaactgtaataagctctaatgtgtcatgtatctgatttg

SEQ ID NO: 2068 - DNA, 628 bp, Gossypium hirsutum
caaaagttgttcaaagctaaacttcgagtagcaggttcttttcaccaattgccatttaccttcgatccctatcttttctttcttgtttccatttcgcattttcttttcttctccctttgactcagtttttgtccttacgtcatgttcaatccatgtccttacgtcatgttcaatccatgtctagatgtagttgccgttcctttcttttcttttcttttttcaatcgaaccttgtgaagacatccgcgtgcttaatgggtatcaaaacccgccattaacaacaacagcctgaaaaagatgaagtattttgtattttaatgattcttccactttagactttcattctttatatataaaatgtcatttttctctgcttttgttggcttaatccatttaaatacttcttctatttttgagttcgtttacctcatctatagtgtaaaagctctctagattgtgactgaaactgggctcttatcatagagagatgagaatttccaaatttatgttgatttgaagtttaaactaacatctaactataaaaagtttaacatgtttttaccgaaatatattgtggtttcatagtttctgatattggaaaagaattgcaagtctttgggccaatcata

SEQ ID NO: 2069 - DNA, 644 bp, Gossypium hirsutum
aatatttttaagacattaactaataaacaagcttacctgaatacatgcggctataatgttaagcaatatttaatgaagaaagtgatggcgtgcaacagctaacctacaaagatgccaaagtaacatatatccccactccaaaggaaacctgtgcagtatcatgcgataaacaaattgcaacacccacagttctaagatgccaaagtaatatacatcccattccctagcaaatctgtggaggagcatggataaactacaatcaaatccaaacaataccataagattcatttaacagtgagaagaaacaattctcaaactacagtttaaaagcaccaatattcttgttttccaacaaagatacaatctgctcaaaagtagctcttgcataataagaaaatatagaacatataatccatttcaataatctgaattccgaatctcatatttatggaatgaaaaaccaatatcaaacacctaggatcatgcatgagcagaatagggtatatatttatgatgtacatatatataaaatagaggaatttgaatattacatgcaacatacataaataaaaataaaaatacagtttgagaactgcatttatagcagaaaaaaaaaatacacaaacatctaacttattccgcag

SEQ ID NO: 2070 - DNA, 653 bp, Gossypium hirsutum
ctttctgatcaccatacagattcgaatgtctcagattaccgtcttttttcatcatattcatttcagcacttgccatatgaactttagaggcacggttggctggactacatgcaacagatggttcagtttccctttcattggcctcagctaacgccacatcttcgagaacagcaaaaatgtcatcagggtttgccggctcatatgcaaattccttgatttcttggacattaactgaagcagcagcttgtcgaagtgattctgcttctctcatgtctttcacatccagagttccggtccttgaccttagaaaagtatctaaatctgcaacaagcttgttcatctgtgaatacctttcttcaagtgctacttttgcatcaatgagcttcatctgtacacgttcttcacgccagacctcagccatctgcaacatctttctttccccgtcaacttcgtctcgaagcttcatggaatctctatttaatgcttccacttcactcttgtcttctccaatttccttagcaagctcatcgcatacttcttcaattagttctctgtcctttctttccttttcatagtcctgcatatattgctttgctgataaactggcagcagccagctctttcaccaatttggaactgacaatctcgagtctc

SEQ ID NO: 2071 - DNA, 617 bp, Gossypium hirsutum
gctgtgtactggatcttggattttgacgtggctgtccaactgaagggtacggccctgtgctctcacggtcctggaagttgaaacctgccatttgcctttgaacatcttccatcatttctcgacactggatgtttcgagtcatcacaaaatcactacattgctgcttgatattattgattgcatcctgttgaataaaagcagcacttttaatatatatgcatgaaaaacttaataataatgaccttaacatactgccctcagtaccagatgtgaaattgcttacctgaagagtaacataaaactttaggccctcgttaatattttccttgatttctttacacttggctaaagctgcttgaatttgtttgtaacacttctctcgtgatgctgaaataaatagtgatataaagcataaaacaacagatcttgtcagaaaatcaatacaaagttgcaaacataaaaaaaattaaagactgaataaccatacaaatcatcacactaaataatggacatgactgttataactaatagaactttagacaagtactggttccaaaatctgtgcaatgtaattagaattacatattaagacaaaccatacagtacagatcttcagt

SEQ ID NO: 2072 - DNA, 624 bp, Gossypium hirsutum
ctgacatgggtatgttcaatttttctaagatttccatgtattttgagagtccttagagcctggctgatcatatccctgtacctatgtccagacgaatatgtgttagatacaattggcagacgtaggtacttaaaagaaaaacgaaaagttggaacaacataacatgtgacaatttgagcttaacaatatgctgaattgatattgtctgattgcagcttctttcccacccatttatcaaaaagcatgagcatgatacagtagacctagcagcatttgttcgaagtgtttttgatccaactcaaagactgaaagatttggctgatgtgagtatatgaactcgtattttagattatattccaaaagttaaacacatgtttggtattttcattgtggcataggacgtaggcacgaagtttgagatatttaaacttgaaatattgtccatattgttacataatagtatagcatttcaaggttcttactttaggggcatataggacctcaaatgctgctgcggattagatggtcaaagttagaatatcaatcatacattatggcggttggcagatcaatatctgttaaaagaattctctgttagtttgcatccatttactttcgctgtct

SEQ ID NO: 2073 - DNA, 337 bp, Gossypium hirsutum
tgatatttcaggccaaatcgaactaagggatgtttatttcagctacccagcaagacccaaagagctaatacttaaaggcttctctctttttatacccagcggtaaaacagccgctctggtgggacgcagtggaagtgggaaatcgacggtgattagcttgatagaaatgttttacgatccaatgactggggaggtactgatcgacggtgttgatctgagaaagttgcagcttaaatcgataaggcggaaaatagggctggtttcgcaggaaccagtgttgtttggttcgaggagcattagagagaatatagcgtatggaagggagggtgcgagcagt

SEQ ID NO: 2074 - DNA, 622 bp, Gossypium hirsutum
taacttgtccaagcaataaaaatttcccttctatgtcttccacaatgtcacttgtgccaagatcttctggtcatgttggtaatcttggaaacagttttgtgaccccaagattaaggggcaggtctgcaatatacagcatggcacggacaccttattccagggttaactcatcaactctcctcaaggctgttatgctttgctatctttcctcttctataattgcttgtttgtcatttgtctaatctgagtttttggcttattcttttagagttctggcactgcaagtgatgcttttggtggaccttcatcatcatctcagagtgcttgggagcaaaagagaatttctggctctacacaaggggtacttattcaggatctttgtatttctccctttgagggtgttttttcctctctctgtctagagagtatcattcagtggatatttttcttttcttagcaggttttaaagcgcaggagttcagtattagacaatgatataggatcagttggccctattcggcggattcgtcaaaagtccaaccttctttcttcaagaaacttaagcttacctacttctgccggcccatctgctcgcatagctggcaatagttcagctgctcta

SEQ ID NO: 2075 - DNA, 618 bp, Gossypium hirsutum
gatcaacaccaacaaaatcgtaatcaaatctaaatttgaatcaaaatcccaatatttaataaaagtacttcactttgtacatttgttgttatcctatcacccttttcgagcttgatcttaagctaaatgctaattcatttttgtagcttttaagtatgcatattcagggaggatgatgttttggagcataaatgggtccaatttatttaatcgtgttaattctctaggtattttaggacattatattaaacaagtttgcctttttagtgtagtggttaagtgcctacgctaatatcagattaactgctgagacttaatcccaaatctttctcactattattcctcttctcaatttgcctctattttcctgtaatttctctcgaaactccattctctctttgccttatctttgtccttgccaattcagtccctcttgtttgttctatataaaaaagactatgtaataggacatctccttattactgttttgtagctattgtaatttgtaatatcttttaagagcttctgtcaattctttcttaattgaaccaactttgtttttgaaacaattttttgacgttttccttgcttggagatttgaaacttcggctgcttccc

SEQ ID NO: 2076 - DNA, 466 bp, Gossypium hirsutum
ggcagtgagtgcaaggaatgcagtgatgctctcagcgttttttcaagttttggattgctgagaaaaaggggttactagttcctgcaatggacacaaatgttagaatttcatatagataaaagatctcattagagaataggatatcgttgttaaagaatgaaaaaggttacctcagaatagcggacatgatcatgatgcaagtaggaagttttgacaattgtttcccacttggtatcagtagaaggtgccttaggttcttgtttcttaggtttaaaacgagtaccggtgtaaggctgtaaagatgattttctagatgtcgttgaaggcagagcacgccaaagccaagactcggatggtgtttttggcaaaggaggtggaagaggagagtgatcagaaccagccttagtttcatcagctgctttcgaatcatcaatatcggtagggattagatttcaatcagctctga

SEQ ID NO: 2077 - DNA, 639 bp, Gossypium hirsutum
tggcaccacccatcttcctcatctctcacgcacttgagcagcttgcgggtggaagggtgtcacaatttgaaatacctgtttccctctttcttagtaaaagatcttgtggaactctacgtccttgaaattaaggattgtaatatgatggaacaagtcattttcacggatggattgggtgcagaagatccagcgaggaatcatacgattttctctatactacacaggctgtcgctggaagaccttcccaaactcacaagtttcggctttcaaaattactctgaactcccacacttagaagatttaacactgacaaattgtcctctgctgaaaacattcatctctagatctgcatctggagatgaacctcaaattcaccaacctgcacaaacaaatgactctgctgtcctcaatcaaaaggtcatttcttcttcttttactttaccattcttctccttttacttctttcattaatctttttcatttcaacatattccagttattaacccaatcaaatgatttattaggttgttttccctcatttggagaacttgcacattcagaattgtgattcgttagaagaaataattgagctgcaaggactcactgccaatgaatcacagtcaacatcagctactcggt

SEQ ID NO: 2078 - DNA, 547 bp, Gossypium hirsutum
tcgattctgccgttgttaatcctcccgtgccattgagttcgtccaagcgaaggagacccactgatagcatcgttccgaggatgtcgaagaagagctcgaatggtaagaacgatgaaaacgaagacggtaaagcaggggtcgaagaggttgtggggaataagaggtcagctggaaataagagaaacaagtcttcagggaataacggtaataacaaggaaggaagatgggctgaacagttgttgaacccttgtgcaacagcgataaccaccggtaacctcacgcgtgttcagcatctattgtatgttctcaacgagcttgcctcatcgaccggagatgccaaccaccggcttgcggatcatggcctacgagccttgacgcaccacttatcgtcatcctctgcctcgactgcgcctgttactttcgcttccactgagccgaagttctttcaacgatctttactcaagttctatgaggttagtccttggtttgcattccctaataccatagccaacgcttccatactccaaattcttgctcaagagcctga

SEQ ID NO: 2079 - DNA, 616 bp, Gossypium hirsutum
acactgcatcaagtggtagggggaaagctttgggacagactggtcatggaagaggccgcggcattggcgtgagtaacacccctaagaaaaactcgttgaagccgttgcattgggtcaaagtcactcgagcaatgcaagggagtttatgggctgattctcaaaagcaggataatcaatcaaggtgcgtgcatatataacttgtacatcagtaccaaattgtttcataatttcttataattgccaaaagttctaattgatgcttagattgcacaatatgtgctggaacgtggataaaacattttatagtagttgcattttgttggacattcacttgaatgtttttgaaaaagcgctttgtcatgttacatgtccgtttactttctatcttgttatgtgataaagagagaaaaaggaagcataaattcttggtcaatctgtactttttctgtttccccttttatttatctttagttttacttggattgctttttcctctaatatgggaagatgattactttttaaccctatagatcaatatcttttggtgtagggcccctgaaattgatatgtctgaacttgaaagtttattctcagctgcctctgcttcagatggcat

SEQ ID NO: 2080 - DNA, 588 bp, Gossypium hirsutum
  misc_feature (559)..(562): n is a, c, g, or t
  misc_feature (573)..(576): n is a, c, g, or t
  misc_feature (578)..(580): n is a, c, g, or t
  misc_feature (582)..(582): n is a, c, g, or t
tggatttagaaaaataaatttaaaccttaaacacaaaatttatcacgaagctaacattcaagattcacaataatcacactaataattataaaaatttcttatcaatattaaaaaaaattcaagcttataaatacaatcaatcttaatttatttaaggttttgtattagttaacctctaaaaattattaaccaatcaaaatgttaagaatctcgtacaaaatcaatatcccaaaatcattcaatcaataaaaaaactaaatcttaatctatcactagaaaaacaacaatcctaattttctatagattaatcaataaagcttgaaaagaaaagaagaattgttaccaattagagagatccacttaaaagtattgaaagatttatcccctttcttataaaaatactagagagtgtatgagagaataagataaatttaagagaaaagtaatgagtgttaaaagaaaataaaagcattagagattcatttatttttatataaaataattttttaaaaaaatattttgatggttaattttcaaaattttatggtgtcaattcacnnnnttatataatannnngnnntnaattcc

SEQ ID NO: 2081 - DNA, 503 bp, Gossypium hirsutum
atggaaatgaagataggacttgagcataaacaagtcgatgaagctcctctatgcttattccccccaagttctgacgctcttcatgtaaaagcatttctgcatggtcactcccagcagtcaacaactctatggcatgcgcaaccatcctgatgaaaagaaaacacatatttctcaaaagaatgtacaaggaaatccaagctttaatttcatgataagctcttatagttgtcagaacaaaaataaattgaaatagcaccccatataaggctccaaaattgcactactaacaaacagaaatatatgaagatgcaaatatgacagctcaccaaggaccaaatcctttcaagcattctgctaatacaacctgagaaatacacatagcaatatttaatttaaagttaaggaatcaaaaggagaattaacagagaatgcaaattgatattatctccccatacgtcacctcagtattttccccaagaattccaattataagccccatcaac

SEQ ID NO: 2082 - DNA, 637 bp, Gossypium hirsutum
tagtgtcactatgctcttaaccttactaaattaatttcattaatagtaatagtcactgcgagtccaaattgaaggacattccttaatggttttcaaagtgcaacattaaaacattatctgatatttcgacttgattgggcagcaacttatgaaacctcagataatttgattttgattttattattaactgctatgatcccattatgtattacgaatactttattttctgatgcaagctactttcgtactctatattttctagtttgttccttctgttaataaaaaaaaatgacccatcatcattcttaccgtcaccagctgatgcaatgccaaggagcaaagtccaaaatgccaaattccagtaccatcactatactaaaatcttatatattcaaattaaattttacaattaatttatattatttgcttaaaaaatattttatatttctaaatatttataatgaattacaatatttttattgaaatgtcataatactaataaatttaaatgcatattatcactttaaaatgtctaaaaaaaattagaataatctaaataattcttaaaccaaacttttttatcagaaattttatcaagtaatggtcaaattaacccaagtcatacaattgaagagct

SEQ ID NO: 2083 - DNA, 606 bp, Gossypium hirsutum
attctgacccaaggtaattgcaaagagcttccattgccataccaaaacctcgaccacccatcaatacgccatctaactcttgacctgttcctgggggcgttctctcccatgaagtagttggtctgagaatttcaagtgcagatgtgatacgatccttacaagtatcaacctgtataggttattgatttcaaggagaccagtaaatactaaattacatagaggttcgattgatataaacaaggcaacagaacaatatcataactaaaagacgctaccaactaggctttttaccaaatacagacagatatacctccccgctccttttcccaattctattcttatagaataactatttcattctttatatataccattcagagaatccaatgggccacccgtatgttttataaagggctgtggcagaggacaaaaataaaggaaaacaataagtgaagattacatactggagccaggaattgtaacaaaggcatgacatcttcaagctcaattggcaaggtaccctccgcatcttgagggataaaaacattctttacaacaggtataggcccttgaacatcatataaccctaatttgtggctgaaaggg

SEQ ID NO: 2084 - DNA, 615 bp, Gossypium hirsutum
catcccactcgcactactcatggagatctgcttcacctatttgatatcaaactttgtaataaaattagtcatcttgaagccaaagccaattctgttgctggtttccgaacaaatgcggatggcatcgagggagcccaaatgggtgatggtaatctctaacacttggtgtaccgaagatcaaacaaaaccttacctttatttctaaatcatgttacatcaattgaatttttttccttttattttctaatgaaggacgctagcatacgaccagaggtggattttatgagtggtcacaaattcatccaccaaaccttctgttcaaacatgacacctacacctaaaacttatgcggttaattttgaataaatttacccttgtagtgcaattaatacaagaagaacctttctgatcattagattcataagaccgcaatcacttcaaaatctttaatttgcattattcaactactccttcagcccccaatgccattgcgatgaagaaaaagagagtgaaagtggcaaaaataggaaggataaggataaaatgtagggaaagtcagtgcaaagcctatagagaagaaaattgcaggtttgggctccattagctttgtcttta

SEQ ID NO: 2085 - DNA, 639 bp, Gossypium hirsutum
cagatccctagtcctcttcagcaagcatctaaatgatctcccaaggtatttggcccattctgctggtaaccctcctccagtgagccaaaccgagaattgggattgatcacctctggcagctacctcggccctgtagaatcttgccagttcgctaagcatagatggctgaagtggaagcacagccacaaattcagccacaaactcttctgtgagttctggattgagcatctgattccaaaggactagggcccattctgtcggctgattaagaccataggcttctgcaacaataagagcctcttggaatcgagattgctcaactagagctcgcctagcattggtttcagataggttgagccatttagaatccggaatgcgtatttgaagcgagacaagagaagcctgggcacaagccctgcgtgttttgttgccggcatcaattgaagagtgaacttcagcagcttcaatgaaatagcgcatcgattccaggagatcttcattctggtctctgtcgtagcattcaaaccactgcagggaagcttgctctgctcgtgactccagcagagaagctgtttcatgcttcatatcaaaatgattataaacctgcaaataagaaaagcatgacagaaggaaactgat

SEQ ID NO: 2086 - DNA, 678 bp, Gossypium hirsutum
cacaaattcgagtcgccttcgaactgaaatgtttaagaggctgataattatcaccccgcatacaatcagaacagctgctgaaattgcgataatggcagaaacactaagggagttacgatgatggaatcttatcgggtttgcagattcgtttcgtcgcctatgatcacccattcgacccttatacgcatccggatcgagaactaaaggtttcggcacattcaacttacatggtcctttcaacaatggcgaacaaatccccaaatttccctgcaaagcactttgatccaagcttggaaatatgcctcccacaggaagcctacctataagttgattgtatgatacattcacagcaagaagattttccaacaacccgagctcttttggaatttctccacttagttcgttgaattcgagtttgagaatcttaagctcggtcaactttgaaatcgatttcgggattgaaccggttagattgttgtgagataatgtcctacaaaacaagatacagtttcgcataatcattagtccaagaaatcatagcttacatcatgataaaacaaaaatggattaatgagaacttacagtgagtacaatgacgaacagttgccgatctcgtccggaatcggcccagtcaatgagttcccatctaattgaagaataaccaaggtcccagattca

SEQ ID NO: 2087 - DNA, 635 bp, Gossypium hirsutum
gactaaagtcgtgatcggcgtcccctttttgaacttgagacctttgtgtttcttgaagaatgatgaagctttgttggtgattaatgaaggattgattgtttacaatccaagagaagatacacacagggagattgtaatccatggcatcaatggcagggggaaactggaaatagagacatatgtggagagccttgtttcacctaatgtatggaactgggagttgaaagagatatcagattaaaatttatgaggattggatatgtttttaatttcgatataattactgttcaagttaaatttattcatattcgtaaaatttattttaagtttattattattaatttctatttttttaaaaaccatattattttaatttaatatttaatgtttctcaattaaagttttaaatatagacgatttaacctctttctttaatgtttatgttatagtatacatttaattttatatgatataagctatgctataataactttgtattcacaagtatcgactttttcttaaagaccttcaaagactatttgattaaccggtatagtgaattaatggcaagacatatagtaatttcaaggaaaatactagaatgatattgttgaccaagacgacaatgaacctct

SEQ ID NO: 2088 - DNA, 618 bp, Gossypium hirsutum
ttttggttggttgatcacaaaaaatttcccagaattttgtatcacatcaaagtgatgctaattagaacaacattcataatcagattcaaatccagcatcattccacgattagatagtgagaactaaactaatcagcaaatcttttgtatgcaatccatcctacagtcaaaaaaggtactttgtcgggtgagcatttctaataagatcagaattgacaggttcttgcattgcgttgcttttcagcttcaacagaataagtagcagagtacaatcatgtctaatatgacataagcagtgaagatagagattttcaatatcataccaagcaatttatccccctgtccttgtcctcggcactcgggagaaactgcaatgcaagcaacttctccacacttctccttgaagaaaggaaaaagagcagcacaagcaatgatttgaccttccctttccataacagcgaatgaatctatggccttaagcagctgcacaaacaaaaagtgacaacaacttaattttcaggatttcggctccaggcctttagctcagaagaaaaaaagcctttttccccttcccatttttgttcttcagtaagatttaaagccaaggccaatttaagat

SEQ ID NO: 2089 - DNA, 654 bp, Gossypium hirsutum
acacccggtgttgacaagccaccctgttgcaccatgcttctgcattttctcagcaagcatggctgcatatttggtaggatgcaacatgatgaacgccgcaccgaagcaagccgagaacgttgctgttggctccttaataccatcttccgtgccagccacctatatttcattatcaaccaagttttagtcctgataattatgaacccaaagcagcctgagaaccatagcacaaagacataaaaacataccagagcagtgtaaccgctaatgaaatggtacatggtttgagccaggctcagcttgctcacaggtggaaggacaccaaaggcatcacatgccaaaagaatgacattcttaggatgaggaccgacgcatggtatcttagcatttggaatgtattcgatcggataggccgcacgagtattctctgcaagcaaaagaaaaaaaagataatattaaagattatgtgtatttcgtaaagtataatccacattgccagattttctgcatattattctattatcacatggcaaggaattttgcattgaaaaccttattttaaaacaactaaacatgtgcattgaaaatgtcaacccattagattaatcggattaaacaaacgtgaaggaaaattctcagccatcacgatgactc

SEQ ID NO: 2090 - DNA, 652 bp, Gossypium hirsutum
tgcacactccaagtgaaaagcacaagataatcactcccaaaattgtaagcatggaatgcaactcttaacaaatttctccttcaatctaaaatgatgggcaactaaagcaatttgtgctttcaacaactcagagggaagtcactggcaatcacttgattttcagtacgaatctaccagatgggaaaaccaagagttcatttccaatcaactaccacaaacatcaaggagcagaaagactactatgctcaataaggtaaagagttggtagcttccatcgatttatgagatgcaaacaaagagatatagatacgtaagcaataaacagacctcatcacggatatgagttcgagcacgaaaggtcaagcgttcatgaatatctgccaaaattctttctaatgtaggacgtaatccggccaatgactcactccttcggctaagctgttctcccaagacttcaactttgaggatatcaaccagctcacaaagaaaatcaacatttgtttcatgaatgagtcttggacgcaatgtatcatataagtatgtagacctacaatcaaatacgacttagtaacacatgcaaaatatttattcttaagtcaaactctgaaatattattttgattaatttccataaagcatcataaagccgtgta

SEQ ID NO: 2091 - DNA, 305 bp, Gossypium hirsutum
ttcatcttcttcttcctcaccttcactctcctggccggactcaatctcaggtccaatatagttcccaaattcatcatacaagttatcatccatagcttaaatgcctaaatctgcccacaagaaaaacaaatgaatgttaaacaaatcccaagtgaattttgctatttggatacaaaaatggacccaaagaataagactaaataacctaaactattgccaggtgtcaacatcaaaacccacaaatgagaaacaaatatatatatatagtcaatctatgtagaaggttcatatagtccaaacccaaa

SEQ ID NO: 2092 - DNA, 544 bp, Gossypium hirsutum
taaactgtcatacatctttttacaaaccagactaaatctagcaaaagaaagtattacaatgcctttggaataaaatattaacagtataaaaggtacaggttttatttatcatattctcttcacatgaataaaaaagataagcaagctggggacaatagatacaaataagttcacattctggattacattagaagctaatccaaatattgattaaaaataatcataggaaatttagaagccagaaggaaacttgcacctctttgatagcatcccgaatgtcattgagaccaccaacatcgtcccaaccagagcgaccaacatcaggagctgatatagttatgtcacgcatggcaactggaaggaactcatgcatagcatgagagaaatcatccctaactagcatggggttcatgtgttcttcagaaccagaatcagaaggcaaaaaccggccaacagcagcatgaacagctctatcaaccaatatttcctgaaataataaaattaattagtatcaacttttacccaaaattttaggataagcaat

SEQ ID NO: 2093 - DNA, 608 bp, Gossypium hirsutum
atccctcgcctttccgacggcttcatgacttcagagcgacctccatgagaaggatatggcacagaatgattttcctgcatggatgatttaaaattaaggggggagtctgagacagtaagaatattaaacagaatattaactaattattgagatgagaactgtatgttgatagaaggatggagaaagccttcacacaacattaaacccgtctataaacgaacaaggacaccacaaatcagtacacaacaacaataataacataccatagttcctatttcgggcttattctcccctggctttgaaagaagccattgtggtgaaagcggaataggattgtcagatccttgaacatctacataaaataatcagaagcatcaattagaaacatggcagctattcaaagcaagtatttgaaatcaaaatgcttagtcccattcaaagacagtacgcaacaagtcattagaaatgcctcaagcccagaattttattgaatacacacattttctggtaaattactgaacttgcctcttgaaactgccacgttgattcatcattgaatatgaaaaacagaagcacgaaacaatgaaaaataaaaagcgtaagactga

SEQ ID NO: 2094 - DNA, 402 bp, Gossypium hirsutum
atttgccggagatgatggtggtggaagatgaccaaaggaaaataaggattaatagaaagattgcaagagggatacggtttagaattttgaacaaaagcgtatcagaaaactgatggtgttttgtttctaactttttggatggtttagacttctttttggacattgggattgccatgtctgatggatttagtgtctgttcagtgctttgtttcaggtttttctagtgggagaaatctgcatatacatggctgcacgtataatggttggttccaaaattgcatgcacgtttgtcttgcaaaatgatcattaggtggtgctacattcattgattgaccaatttataaaaatatttgtccaaaaaaacatatgcttcatgcaatgtcaatgaaatgaatatgacag

SEQ ID NO: 2095 - DNA, 647 bp, Gossypium hirsutum
ctgtgtcaacctcagacaacctttgtttctaaccgtaggcagtcaactgaagctgctcatgtagagaaacgtttgactgcaatagaggatttatctttgcagagtattccaccagggaatctaaagcagttgttgattgcatgtgctaaaactctctctgaaaacaatatcgataaattcaatatgttgattgcaaaggccagggttgctgtgtctatctacggagaaccaatccagcgtcttggtgcttacatggtggaagggttggtagcaaggaaggaggcatcgggatctaacatatatcgagcccttcgttgccaagagccggaaggcaaggacttgctcacatacatgcataccctttatgaaatttgcccgtacttgaagtttggatacatggctgccaatggggccattgctgaagcatgcagaaccgaagatcgcatccacattattgatttccagattgctcagggaacacagtgggtgaccctcttgcaagcacttgcagccagaccaggcggagctccttatgtgcggattacaggaattgatgatcctgtttctaaatatgcccgtggtggtggattagaagctgtcgaaagacggctgatggcactatccgagcagtttggtgttccagttga

SEQ ID NO: 2096 - DNA, 427 bp, Gossypium hirsutum
agttgtgtgattaagatacttacgcaaaatttgttaaattttcccttcaatccactaactttttgaagctcctatcatgttctcagggctcaactaacagactcagttataaaaggcatgatgaggttcaaattaacccagaccacaaaagtgggtacaagatgtttgaggatttgaaggcacggttacaaaaaccatgatgaggttgaaattaacccaggaaacaggggcaggagcctctgaatggcaatacatttaggcatgggaagttccaattacatgattccggctccaaatctacactttttcattaacaatgaatggaataaatcatgattgattttagtgaggacattttaaggtttcagtagagcatccttcaccaaaaggacaataagaagtccaaaacaaagaactataagtcacc

SEQ ID NO: 2097 - DNA, 608 bp, Gossypium hirsutum
  misc_feature (577)..(578): n is a, c, g, or t
atcacttccaaccaccggttcaacaaatttgtttcctctaccaacagcgagaataccagcctgccaacaacatacagagatttatagcaccttacgatgtccagatcactttctaatagcaaaatttattagtggctttgatattctaaatattgcctctaggaaaaagtacaaagaaaaaaggagatctccactgttttcaaaatgaatattatcaacaaatggcaaaaacagaactatgattctccaaatttatcactttttgttttaaaaaaatgtcattagaccaactccttctgaattttaaggattgaatgtaacatattatttgtggaagggataaattgaagtaacatcaatgtttgctcagcaaaggcacatgatgttgacatagacaatctagcagggtgcgagtgagagcaaatattcagctcaatctcagcttatgcacatgagcgcatgtgagagagagagagagttacctgtgggggatttataatcgcacaaaactggtcgacgggaaacattcccagatttgaaatgctgcaaaaattagaatttctcaatatttctttcnnactattaaaaaggccagtgtgagaactaac

SEQ ID NO: 2098 - DNA, 1168 bp, Gossypium hirsutum
  misc_feature (1122)..(1128): n is a, c, g, or t
tttatttcatgatttaaaagcaacacatacattctaaaagatgtttatatatatatatattagagtgttttgctctgcaattattcctatatgtaatttttgatgaactaattgtagaatatggcatgggaagtgagttatcaacaaaaggggatgtgtatagctacggcatcctcttgctagagatgtttactgggaagaggccgacggatgaaaagttcaaagaaggtttaagtcttcacaactttgttaagtcagctttaccggatcgagtgattgagattttagatcccattcttgttgaagaaagagtccaacaaggaactctcaagggaaaatgtctgagaaatgaaatacatcttcagtgcttgaatttgatatacgaaataggactcatttgttctgctgaatcaccaagtgcacgtatggacacgagtgatgctgttaccaagctttgttccattaaagacaagctttatcctaccggattacatcatgagttttgtaacttaaatatgttgctcaatcaacgggtaataacatctttttgaatgcagtaaaattaaattggcattttcccattgtcattatcatcataattaatgggagacaacattaatggcaaacaatactgaatatggtgcacgtttagcaccctaaagttgactttgaaaaagtggcatgggataatttttttttggtccttgagataatgggctatttattgtttggtccttaaacctcaactataaataggccttctcatttctcatttcaattcatcccaaccaatctttctctcttagttttctctcttctcccatttgagaattcttaaggaattctatttgtttgtaatactttggagatagtaaagttatcatctggtgttagtgcccgaggacgtaggtataatttaccgaacctcgttaaaactcttgtgttctttcttgtcctatttttctttcaatatttgagggtataatagtagtatttaattgtgctattaaattactatagaagggatattctgtctaaggaaagacttggtatttaagagatccatgtgatccacctctcttccctgggaattgaactttgtgtgattttttagtacaatannnnnnncgcttccgaccctctggaacaacaattatcatcataatta

SEQ ID NO: 2099 - DNA, 768 bp, Gossypium hirsutum
  misc_feature (746)..(747): n is a, c, g, or t
  misc_feature (749)..(752): n is a, c, g, or t
ttttaggatatcttgttaatgctatcgaacttttctccctcattttcgagccaaaaaagggttcttacgcattcgttaatgccatcgagatcgcggctgtccctgatgaatttatctctgattcggcatcttcagtaccgcaaggtgagaccgttaatggcttgtcgaattatgctttggaagtgtcgtatcggttgaatatgggaggaccaatattaactcccaaatacgatacattgtcgaggacatggatgcctgataccccatacaatgtgttcccacaaggaactgaatctgtgagaggttcttatatcaaataccagcctgataaatggataacttggttaatattgctccatatttggtgtacgaaaccgcgcaaaggatgaaaaccgaggcgtatgctcaaaccgtggagccgaagttcaatctcacttgggtggtgaacgtcgatgcaggcttttcgtatctcatcaggatgcacttttgtgacattgtaagcaagtctctcaatgatttgtacttcaatgtgtatataaacagcttaatggggttttcgagtctcgatctctcagctgaaaccggtggcttggccactgcatattacatcgatttcagctgagagatcgagactcgaaaaccccattaagctgtttatatacacattgaagtacaaatcattgagagacttgcttacaatgtcacaaaagtgcatcctgatgagatacgaaaagctgcatcgacgnntnnnncccaagtgagattgaa

SEQ ID NO: 2100 - DNA, 622 bp, Gossypium hirsutum
atgcgccttgaaccgtcaccgttttgtgggcaaagtgcttgcagttgaggcacgaatgctgggctgattgtggggtctggaccaccgttggtgaagttgtataatctgtagctaaaaagctggcaagctgaagtccctatggtgtgtcctcctgcaacaacaaggaacaaatgttaagtcaaccagactcgatgtaaatcagatagaaactttagaacgttatagaagtaaaattacttaccaacgagagcaacaaggtcttgagtgttgagaccaaaggcggcgaacttttgcttttgagaatcaatggactctctaaatccaggcaaaatggtggtatccgatgccaatgaaaccctcccatctctgcgtccagtagggaccgcccagtttattcctctcgtctgcatttcatatatgcaagaaaaacataatcaaccattcattgacagagcttttagtagtatatgattaagaaaacgtagtaatgtttaccagaaagacggagtcacgagctgcaagagttagaatatcagcgcatgagacgacaccaggacatgcagcttcgagctgagtttttgcatcgtcaataacttcataacctctcaacaatcgggtttaa

SEQ ID NO: 2101 - DNA, 610 bp, Gossypium hirsutum
gaggctctgctactccctctctcttcttcttaggggaatctactgcatcatcttcttcttcttgtctatcagctccaactgattcaggactaacaggaagaagaagacataccaggatgcccatgaaagcaataagcaaaccaggcacaacaaaggaccaaccccatccatagctcaatagtgttgaagcaatcaaagaaccagtaatgttcccaatagacgtgtgggcattccatatgcccataattagccctctttttttcttcccgaaccagttaccaactactgcaactaccgaaggccatcctgatgattggaatagaccagcaatcatttgtactatgaggaagtagtaaaagctatggatgttagcccagtacccaacaccaaacagtgaagtaaacaaaccagttccaatcattcccactgttagaaagatccttaaattcattctatcacccaagtgtccggagaagtacatcccaatagcataaactgcaagaaaggccacgtcgagttgaccaagcaaggctgtcccatcggatccattaaacggtgcccaaccatctcctagaacccatgagcgtctttgggtttcagcaggtgagct

SEQ ID NO: 2102 - DNA, 629 bp, Gossypium hirsutum
aggtgttcgtggtatctctgatataattacggtatgcaaacctcccaatccaacattcatatgtgaaatgttttggacggcacagaagttgaagtattagaagcttggaaccatacttctggatcctaattgcttttgaatctcctcattgcagattccggggctagtgaatgtggactttgctgatgtgcgaactataatggcaaatgctggttcttcactaatggggataggaactgctactggtaattcaaagagatcattagcgtttataatgtcgaagtagggagaaaataggagaaaaaaatagaggtttctcaagcttattgcatggttcattcataccttaatgcaaagaacttggaccaccatcatgttacatgtttctcagttgtgtttcataaatgataaagacggtacggattggactttcttttttctcagaagataatgcaccaaagtttcgactatgaatgcatgaagtttctacctcttttcttttcgccatgtaacaaaatacaagtgattgtagattatccattttctttcctttttccttttattggcagtacttattgatgatttttcatgtcatatggtcgtgatctcttcccattgcaacacttaag

SEQ ID NO: 2103 - DNA, 610 bp, Gossypium hirsutum
acggaccgtcatcggagaaaggtattttattcttgactttgcagtttcacctgatgcttatgtctcctcagacttcaggggttgaaaattgtggctgaggcttacttctagagtttatttttgatacattgactggaggtttttaactccacgagcttgttaaagagattgccagatgtcacattaatcttttaagtaatttttttcttaaaaagaatttagatataccctaaggggtatgtctcacctatctaactgtggttgtggactctaaaactcctctagtgtggatgcattatggctgcgcttgacataacagttgcattggatgtttctgttaaaaaatatggtccaaaagtgcataaggtttcttttgcttttcgatcaaaaacagctagtatattgaagaaaataacaggcaggtggtctttggtggagcctgcttttggaattggataacagcttagaatgaatttgtttgaagttaaacaacatagaatgagaatttaaagcttattaataaatgaaccagatctgaaccaaggtgactttaaaacatttatatggatgagcgagcttgatcaaatagtttccggacgtgattgataaa

SEQ ID NO: 2104 - DNA, 589 bp, Gossypium hirsutum
tttgttcatgttttcaattgggtgtattgtctattttcctttttgaaacatcccaagattccttttctttatggcatattatccggcggtataaaaagcttaccataaaaaatcagggtgtgatagtttaaataagtaccttaagtcacaaatccaattttgtctggttatttgcttcttttggacatgaaaccataaccattcgagttttaaggagtattttgttttcctttttacaagttattatgcagaggctcaaagttcaccatcctcattgtcagaatttataatatttgagggtgtgtaaatgcacctattatgcatgcatgtagtagaagtctagataaggaaataaagtaggatccaagttgtaatttatgcatgtaggataaggacaaatcatataccatttgtacttgttatgtagaggctggcagaaaattgagcctcaagctgacataatgtcttcggttaaaaagatttccttgcatctttctcccccaaaatgattgtatgagtacagtttggaatcttgggagttgctctcttctaatgatttgaaataggaatagtttagtttttgacaaaa

SEQ ID NO: 2105 - DNA, 508 bp, Gossypium hirsutum
gaaattaagaatcttaaatttaaatctaaaatttcaattctaaaatatgatggaatttgtgcattaaaaatctccatatatctataatcaaaatgcaaatttgaaaaactcaaaacaggaaatcataaataagtcttgaaggtaccaaggctcattgcataggttgtactgtatagtaacttcccgtacaaatctttgctgtcgtaaggcattctgagaagtgaaaagcattacatgagcttatttctatttaataaacagaaaaataacatattagatgatactaatagcaataaaagaaagatttcaagaacacaaagtatgaagctttgcatttcttaactatatatgaatcattactcttaacaaactgctgtcagaataatacgcagataccatgtaaaccaataccaaacttaagaagaaaaaggcaacatatccaacttatggggcaaatgattccgcctttgcctcatacttgtaatccgcctttgcctcatacttgtaa

SEQ ID NO: 2106 - DNA, 654 bp, Gossypium hirsutum
atgacgcgcttcttaattagataagtttttataacaaggatgcactagatgaagcagagtactaacctgtatttccgaaaggatgcaaccatgcagtgccataaccgtgaaagcacagtgcttcactgcaccgcttactttgacaaagttttcccaaggataattatgcctataaggtccatgaggaggttcccaagtcgcaaaaccaagctgcaaaaggacagatttgattaacatcatttcaacccctggaatctgttgtgcaaacaagtgaaaactgttgcataatttatagctcatgcaattgcagataccaatgtatcttcttcgcttgtagactgcaccactgatcggtaacaattataaagtggatcatcggcagcttggtatgtaagaattttcgacggaattctctcgtattccacacatttcaagtacccgttgacgcaacctgaataacaagaacaaaattagtgaagaaaggaatgtaaggagtggttagactgttttgttacgtgaatgaaaaggcaaccttccaaagaagtggcaaggtccttaaaatttttcaccaccaatttatgcagagattcaccagcccaaattgggaaaatacatatatttacgaccaaagtaacaccagctccagctgctata

SEQ ID NO: 2107 - DNA, 608 bp, Gossypium hirsutum
  misc_feature (598)..(598): n is a, c, g, or t
ctagagctaaccatctcagatgtaactgcctgttgattaatgttaaacattgcttgctgttaaattgctgaaaccattttatatgacatcaaattaatacatttgaaacatcatttggcagatatactgaggtgggaaggtcttttttccatacatcattaggtcctagaggagaacttggtaatggaatagaatactggtctggatattatcagagtcttcgacccactcagatgggtttatctcttaatattggtaggtactttgattgctcagtttgtgtagccactttgttcctaatgtttcagtatgaagatttactggttttgctttgcagatgtgtctgctcgatcattctatgagccaattttagtttcagagtttgttgtgaaacatttccgactatcaaacctgtcaaagccgctgtctgatcaagatcgtattaaagtattattacattgaattctcgtgctctacatatatagtgttctcagtgtattaatcaaaacttgcagaatatttttggaatgcttcttttgccgtattttttaggtgaaaaaggccttgaagggagtaagagttaagctcatctacatgnattatgccaa

SEQ ID NO: 2108 - DNA, 400 bp, Gossypium hirsutum
  misc_feature (375)..(376): n is a, c, g, or t
aagtataaatcgatttatgcatcaagggttccagccattagcagaatttatatgtttaggccaaaccgagtcatagtagttttcctatgcaaagaccacaatggctatttagtatttatgcctatgttatatatattttacacatttctgttatcatcgaacagtaaacacccaaattgttctcaagtttaccatgcaaaagttacaaatatttagagacagtttatattgataaatgcaatgcatgcaatttatatctgagtaatcaagaacatgggaacatattcatatttgaaccttcctggcaacatccattccactgaggtcatctcgtggatctgcaatgacaagattaagcaaaaaaattgttcttannacattatttgtcccgatcctggaa

SEQ ID NO: 2109 - DNA, 636 bp, Gossypium hirsutum
taggttctaggttgagttcataaagtttgctagtctaagtgctagtagttgttaagacgtgtcttgcaactgaaagcaaagattcatctctccattatttctaaatcattggaaatctaggtgagcttttgaacccatcaaacacttctatcaggggaatatcaaagtgccggacatgctccgacacagtgaatacatgccgggtcacttcaaaaatataaaaataaaaataaaattggaaacagtcaaagacactcagacatgtgatggtttttttcttttgcatttttctacccaatatggaatcaagaatgagtgatttggttccaatggtttcctaaggttcaagtttttaaattaaaaaaaaattaaaaaagaaataaaagtgtatttgcatgtaatatttattgaaaattatcaaatttacatttttattgtatattatgatataaatttatttttttttgctgtcatgccatatttatgtattactttttaaagcaattctcttgtcatgtcttagctgtattatatgcccctgctttttagtttggacttatatttgtacattgagtgttttggaggatttcgaccagaagtgatataggttcatgattataaaccagtttacgtgtc

SEQ ID NO: 2110 - DNA, 613 bp, Gossypium hirsutum
gaaagaaaccactgaaatgaccagtttcaagggaaatggatatatatacatgaatttaacatatgttaagggaccctacaatctacattaataaggaaattacaaaaaaaagaaatattgaaatgccttccccaagtaaattgattcatatatatatatatataaagttcttactttggaagccttgaaaataaaacgcataattaattaacaattcattcattcttttcttttctttttaaatttattcaatcactgcatggagtcattatcttgttccacttcagatgcaggctcatcatcttcttccaggccatcgatgccataagcagcatggccattcccaaaagccttaatgtggtctttaagagatcttttgtgcttgaaatccgagccgcaaatgcaataccagagcttcccgcagttcttctcatgggttctccagtctcctctcacagcaaatgcctttccacatttcctacacatgaagggcttgatcccatgcttcctcttgtaatgtgtttgcaaggttcgaaaatccttgagcggcttcgctcttggatggtcaatgttgttcctacaccctggtgcacaacaatagcaaggaagtcat

SEQ ID NO: 2111 - DNA, 516 bp, Gossypium hirsutum
ctcttgtttttcaaaattttaacttgcatctgttgaaaaattatgattcatctaaattacttacattaatgtcattgccatccttgaattttcttttggcttgaaactggaaaatagttgatatggtgcttatatgcattgaaatttgttgatgtgcctcatgtaaattaaacaaacttacacttactggtacatccatatcatttgtgaagcaacaaatgttagcaactgggaacgcattatatcgtttgatcattgtctgggttaagggataacttttaacgtcaatttgataaatatagaaagaaagctatatttatttctaaatctggtattttgatgctgctcctagggtatctttacaatgattcttcttttcaccattaactattccctgtttttctttgttgcagaaaatttgcttgtttatccaccagaacatgttatctatggagactatgtctttgagttctgggatgaggaaatgataagaaagattcttggttacttcactcc

SEQ ID NO: 2112 - DNA, 407 bp, Gossypium hirsutum
ttataacagtgacgggcacaaaacattaattttattttctaatttgaccctttgtttctctcttccttttttgcaggaatctgcaaagaccaagcatccacagcttcattacgagtcaaaattgtatatgcttcttcaaggaggaagtaagtctatgtttgtgcttcactctcctaacttgactatggtcttctctggtagccttgtccattgcacttccattaatgccattatgtgaaagggaaaaaaagagagaaaaacatgcaagctctgtggaagccataatttctttgatttatatctttgcaaaccagtcttcattcaatttacgattgctcttggtagtggttggtttagaaagtgaatagctggccttctttccttcacatgattatcgcactaacaac

SEQ ID NO: 2113 - DNA, 621 bp, Gossypium hirsutum
gaaggagaagttttttattttactacgcctagacatgatttcttttacccatttatatggtaatacattgaaactaatattattgaagaaaataaaccacgtgctattaaaactataaatcaacctctttccatacaaacttgtaccctacaaatggatatatttcctttttataacactaattcaatttgcaacattcttaacttcacaccccaagcctctaatagagatgataaaataacccaaactcgataggttctaatagagatgaggtgaagggtgagggaggttgatgatggtgaaagctaagaagaaaggtgttcaggataaagttatagagaaattaaacaataaagctctacaatttatcaaaatgaaaatctggattaactctaaaattgatgaaaaggtaatagtcgagaaattttcattagcaaaagaataaataataacttgcaatggtcagcaaaaaaccggttttaataaaatttacatatttattgaatttaaaatgaactttttcgaaatgcacttaattccaaatactcagtacaaccaccataattaagcaataacaagttttggacttgctaattattgtgaaatgttaactctataata

SEQ ID NO: 2114 - DNA, 656 bp, Gossypium hirsutum
gaaattctaaatattatctccaaaattgattcaatatttttcagttcagctgaaagttgtgtcatatagttattaactttatattgacttccttcatagctatttcaaacgaggaggattgcattcggaagcaaaaattacctgatttgaagttcacctatatcatttcttgtcagatatacggaaatctcaaacgttcaaaagatcctcgtcaaaaggatattctaaacctcatgataatgtaagctaacttgcagagtgcagtcataagattaaagttcttgacataaacctatggctgattcctttactttcaaaaggtatccgtcactacgtgttgcttacatcgatgaagtagatgaggctttgaaggaaaagactgagggaaaaactgagaaagtgtattactctgttcttatcaagggtgatacgatcaattattctgaaagagtaagtgctagtttgtatgaaattaatttcccaaatgaattttgtttaaagtacttgattttgaatcttcaccctctttggaacctggcaatcctcaaccatttataataaatttgggcctggtggggtttcggtgaagattctatgaatatgattcttgatggagtgagttaaatatttcctgctgtgaccatatataatcatgc

SEQ ID NO: 2115 - DNA, 509 bp, Gossypium hirsutum
tcgagtgacaatccagaagagcatgagacaggttagtaaatgaagtgttttgtttgcaaatatatggttgtctaattacaatcctggtaaatgcagaaatgaacaacacaaatgctgaacctcaagagaaacctctagcaaaagatgatattgaagaaaaaaatccaacaattcgtgcagctgaaggtgaagcttataataaaacagaggccgtatcggcttctggtgaccctgtggtagtaggagatactcttgataacaagatattggaagggcaaggttagtaagttctcattctaacatacagaagttgaacttgaaaatgtcttaatcaagtttcggtattcatctttttgtcaagcgatctgtttaaaacatctttggtccttcgttgtttacagaacaaggaaaaactggacttgatcctccagctgaatctacagaagttgatgcaaaaccaggtgaagtagttgaaggcagtgaaaccgaatcaacttccttcaacctaa

SEQ ID NO: 2116 - DNA, 610 bp, Gossypium hirsutum
  misc_feature (61)..(63): n is a, c, g, or t
  misc_feature (338)..(338): n is a, c, g, or t
  misc_feature (590)..(590): n is a, c, g, or t
acatcatatgacatcaatcacatcctttttcatttttcctgagctatagaattattataannngggtctccattaaattattatggtttgggaacttcatctgatgtatatgctgtaagcacagggttctccttttgttgtctcatctttctaaaactttactttcttcttcctcatgatgttgttgattcaatttttatgtaacttcagtactttctgtgcttatcttagattgaaatctgatagtgtctgtataagggctgttttgacttcatgctgatataacaacttagcaacctcttaaagctgtaggaaatttaaatctcgaaaatttaaanacaattccaggaagttaactgtttttggttagcttcttttatcaccatatttgttgtttaacatgggcctgccatcttttcaggattcgaaagagatttcattgactcaggttcaggcttttacaaagccagttgttttgaaatgcaaagatgtaagtcactttgtttgggatgctatggttgtcacacggaccattctattcatatttaatttaacttatcaactcaaaaaaaaaaaaatttttttttttnggggaaaggaaaaaaaaaaa

SEQ ID NO: 2117 - DNA, 629 bp, Gossypium hirsutum
tggcttttctcttctgcaagtggtccggtgctgtcagtagtcatgccactgacagacactgccctttccttagcaagcatcacgttgaagaatgcattaactgctgttacgaatttgacatctgaaggccaagaaaatggcatgcctggccaggttgcagaaatgttgaaagcaaactctactgcaatcgctgaagtttcaagcaacacaagtgcaccattttcagcagatcttttgaaaggagtaaccattggagcatcaagactctcagatgttacaactcttgccattggctacatgtttatattctctttagtcttcttctacctgggtattgtcactttgattaggtacagtaggggcgagcctttgtcaatggggagattctatggaattgcttcaatagccgagacaataccatccctcttcaggcagttcttggcagcaatgaggcatctgatgacaatgattaaagttgctttcctgcttgtaattgagcttggggtgttccctttgatgtgtggatggtggctagatgtatgtactataagaatgtttgggaaatcaatgtctcaaagagttcagttcttctcagtttcacctttagcaagctccttgatacattgggg

SEQ ID NO: 2118 - DNA, 515 bp, Gossypium hirsutum
aatgctatggcactaataacttaatcacaacaattttgtcaattgacaacgaaaaatgatggcatttcatattttgtgttcaggtaccgggtgctaaaagatacggaagccataaattttagattctcacaaggctgaaaactcaacttcctgagtgcaaggtctatatgcaacaaatgtgctatcatctgagaaggaacctggattgaagcaagtaattccagtatacttgaatgccttctgctcacttctatcacctaaaacgatctgcacagaaaggcaatggaataaacaaatattagatctttgctataaacatgaatcatgaaagccaagatggatctgaccttccaattgctctaaacatgaaacgcttgcaaacaacatcctcaactattaaaatgttattcagttggattcaattgtttccctatttcacccttctccaatataacacatgcctaacaaaaatgtgaggacaagaactttaccgtatgtggagtcggatatagatg

SEQ ID NO: 2119 - DNA, 527 bp, Gossypium hirsutum
  misc_feature (463)..(465): n is a, c, g, or t
  misc_feature (492)..(496): n is a, c, g, or t
tcataatctttgcccacttcgtatcttcttcacattgattttctctaacctaaacaacgataaatgccttcaatatcctattgacagtaccaatacccagtgtgtggatatacaaaaaactaaatggaaaaagaataaagataatggaactttgaaaactatttgaggtggtggatattggtttgaatatttcacctaaaaatcattgccattatgaaggtaacggcaggaactatgttaaggaaagccgacgcatatgttgctgatgtgtacttcattcccaaaaagtataaattctggtcaagcactggcctgtttcatcaaatcaacaacatcgattacacctttgcattcttggtttgcagttgacaatattccattttcttttccattgtatcatatatacatatatgctaaacgaagaaaaatcatcatctttgcatgaatgtgtaaagccttttcnnntcggagatcaataagtttcatgatcannnnncatatatatgtatacatgtgtgtatgcaggt

SEQ ID NO: 2120 - DNA, 603 bp, Gossypium hirsutum
agcttccaggcacagcaactaggcaaatttaaccttacaaataaagggcattataaccaggaaatagcataatatgctaaactaattgacaaagctgtcaaacaatccccgagagaagtaaacataataacaagaaatgtcaggaaccatttgtggaaaacagcttgacaaaatggaaccatagtaacactagcaatcagacgaaaaacagaaacccaatgtgaattcatagaacataaaaccaagtcctacaggttgattgaatatttcatattaataaaatttgaacggccttttcagaatgcaacctcatgaactgaacttgtatccaagtctctgcaaatatcataacagtacaggaaggttaaagatgtgagtcccaaacttccaacaaagtcatggcaagaggtaagaaatcaggttcacaagagctccaagaaacatcagtcctgtcaattatgtaataataacaagggaaatggttaagaatgtaaacataaaataacaggagacttggaagataaaatctgtagcatttatatgcgaaacccaaaagcagaaggcattttcccgaaggaaatatgcagatactgtgaggtccaa

SEQ ID NO: 2121 - DNA, 648 bp, Gossypium hirsutum
atggctaatcagaaatatatagaatgataaacttttgactcaccttgagacaatgttagcagagtggaaaatatcaccatgcctaagttcagcaatgaccctcaaccgactaatgtgaacaacaattacaaatgttacatagaaggaaagaacagttggagttagatagacaaaatttcctgaagaaagaaaatattacttttagcaaaggcaaaaccagtggagaagttatgtacctgtatcgtgtaaatgtagttagcactgcctgaaaatcctgaagaccaggattataaccatctacatccattgcagttggaccttcatcttcctgtttattaaattgtttggtccaatgctgccgcttttgcaagtaacactcttgtaggtcattaaactgagcgaaagagaataattataaaaaaatcaaccagtcatttttgaaggagtgactattattgaacaaaaaaaagagtgactggtatatttatatgaacagagaatatatgggaaatgtatctcttaacaataggaatcttcagttcctccataaatcttttgaacagactgctacttagaaaagttggaactataatataaaaggaaaacactagaggatcattagtaaataggctaccttgctctcaccac

SEQ ID NO: 2122 - DNA, 645 bp, Gossypium hirsutum
gaaatgtttcaaatttttttggatggggttatatcaaaatattgtaaaagagtagaagatgggctcagttttcccttcccgaggagtagggttctgaagagtgaatttttgtgcatttctacttgtttgagttcctttaaaatgtgaataaaaaaaaaaccaagtgtttttctttcatgtccatttgttgcctcagggttcattaatttatgcagtcatggatgttttatagaaattctttcataatataggagaccactttatcaactttgtccattggattttgcttgctaggagggcattttgggtcaggaattatatgcatgcttgtgtctgtatatgaatcctgtgtcttttattggtaaacacatttgtgtcttccatctgagtcatggaaacttgtcttagaaacctcactattatagtaatcaagcaagtttctttggttatgtctcatgcataatcttcttattgagctttatgtgttttgggatccattttaggggatcatctaaatagaatcttgtattctataacttaatcttttatgatgcattaactttgtcgtaatatagtttgttccttcaaggatctgataggtccttgaaatatttgtaatcaaaaaatgtgtctagaaaaagcgaa

SEQ ID NO: 2123 - DNA, 642 bp, Gossypium hirsutum
tagttcttcagtcgagaatgtgtagaaaaatccccgctacaataaccaaaccagagcactgttaaggctctcagaagtataaaaatcaagcaaattaataggattccaaatgctttttaccaaaggtgattgcataatacttttgaaggtgttttaatggtaaccttatatataaaaagaaaaaggaaaaaaagtgatctgtggcagcactagtaataaagatttttaaaacttgagaaataatatttggcaaggattagaaatatagattattacctcttcagcattaatagataatctgagttctgcattctagcacgtccttgagactgtatgaaactacaaattgttggtgaaggatcaaatctgataattaggttgcatgattgaacatccaagccttcttcaagaattgaagttgcaacgattatattaacctgcaggaatggaataccatcattcgaatgcagtggataacagatacattatttatctattgtacgtgacataccatgcctttgcggaattcttctacaatttcattttgttttttccttgtctgattctgcaatccagagttatttcccgcaatgtacttagtcttccaattactgtacctgggaagcaattctctgaatagcg

SEQ ID NO: 2124 - DNA, 619 bp, Gossypium hirsutum
tgacattttttatttaacataaatatatctttgtcttttgtgtttgttgtggatgaacaaatatttttcctaagaagtggttccttcacatgataattggaaatcaaaatttgcaacataaaaatgcagttaagatgttagcattttgatgcctaatgtattttttaaccatttgatcatgctggtttagaacttactttttgaatatttattttgttcctatgtggctttaacgagtctttacctctctttaaatgtttgggatttcttctaataaaaattcactctcctaaatatgttttctccaagggtacaagggtcctttcggcctaggagtcttacaagtctcaatgggctttatttaatggttatgctgttaattttttttcctccaatacaatcattctttggcatggatatagttccttgcctgttttcaacaaagtgtttcccaactgcctgcctatctgtctcttgttttggctaattagtattctcaaatttgatatgtcgaactgctaattaatgttgtttgatgccattttctttgatatgatatttattggtctttattgaggtgtattagttcatttcagctctagctttatatctcacttgc

SEQ ID NO: 2125 - DNA, 643 bp, Gossypium hirsutum
tgcacattcggagctgcacaagctaacctgcacgccagtcttaggatggttagatcgtgactgccaaatgggaaggccaagatggcaacatgttcttttaagctttgggtcggtagcatttaggaaccctatttttgactgatggagaaaaacatctgggcagttgccgagaaataggaatttggagattgaatagcaaaagctttaaaataaaaataaagggctaaaatccatatccatgaatagtacaagatcttttagcatattttaacctttatttatttataacataaataccaaaattagaacttcatattgatttcccgaagcatgtgagaatgcatagctaaaatgaataccacactaataaattaattaacataattcccaagccacaattacatagtctgcttcaagttcaatcatacgatcaaagcttcaagatctcttttatctttagtaaacacaaagcattagaaaagagaaagaaaaataaagagtcagttccaaaatctagcttgatagaattttcatataaaattctgtaaatcttttcatcaatcgatcaatcattgaaattcaatggcggaagaagcagctgcatcgacgccgcctcaatcatccgcggctcctttgggatctc

SEQ ID NO: 2126 - DNA, 642 bp, Gossypium hirsutum
atgagtcctccttcagagaaggcagctgaggtttggtcaaacaagaagtatgctgctcctcacaattgatccctgaacaacaaatggtttacaagagggtcagcagccaccaataagttgttttagagactattttcacggaaaaagtttatgtcctaaaatgagtggacatccacatcttacatatgccgcaattagtgtgggtacagattgcctaaaactaccatgattgatagagggaaagtttttctgaacctgtatttccattctcatgtatatcatgtgcagaaggcttcaaaggtccattcattaacctttcgggaaagtcttcatttttcttcttttcaagggaaggaatagataatctttctgagacatttaatctgtcaatgccagtggataagtcaacttcatagggtactctagaatgcaactcaggctgagaagttgatgaattgaataaaccaggcgcttgccgccaaggtgcaggacccgaaccagttagctgactccaacctttagcagaacaatctttgaacctctcaggcaaagatgaattgaaaagcaaagaaggtggccatgaagaatttggtccctgtgatagaatgtgaaagaaaaaggcttactacagagtccactggc

SEQ ID NO: 2127 - DNA, 664 bp, Gossypium hirsutum
gtctttttctgtttttcttttactgttgattcatttaattgtttttttctttattctattcatcaataaagaggtcggcttttgagatcaaaatttttttattttttatcagaaaagataaaataatttaaaataatttcaaaacaaaaatcatctcaactattatcttatatgataaaacgaacaaatttgaaaaccatcccaaaaatcatctctgatttaaagtttgtatatagattacaaatattgacttagcatactctcatgcattattatttttaaccagctggacagtcttttctttagtttgcattcgtaaaattatttccttttgaaagtataggagaactcttaagatttaagattcgtaaaatgagataccaattaatttttagatttaagatttaggctgtgttctttattccatctgagatgggcttttacatgcaaaaacacttttctgtcaaaagtaataaagaacacactgcatctcttgcaaatttttaacttacttgaagttttttttgggcagatgaaaaaacaaatttttttaccgttttcagccaaaaattgcttttgggctgatcttttactttttttagccacacaacacacaacaacgtttttcattgctggttctttgtttctgccgtttctttgttcc

SEQ ID NO: 2128 - DNA, 465 bp, Gossypium hirsutum
ttaaactttatgttttcctggttcctgtattgttttcatgtttatctttttttggatgatttcatgggggcaatttcttcaatttttgttttttgtttatatacaggacaaacttcacttggcaagactgacgttagcaatggttttctttttgggggttgatgatcacagttttaaagaggacggttagtgggcactaccaggttgttcagaaagtgatattaagctgaggtttgatccaactttgtcctatattcgtcactcgttggtttcttttggcaaagctaataaccagagtggcggcttcctggatttggtatgtactatcttttatctgttgatgaaactctatataataaagtgatcataaattgctttagaacctttcagttttgtcatgttgttttgctttggctcagaaaaaagtttcatccatggatggcttgcgatgggatggcccagaaa

SEQ ID NO: 2129 - DNA, 552 bp, Gossypium hirsutum
aaaccctcaaaccctaatggctggtggtcacagcctccaacagtgtgacccaaaccctaaccacaaccagaggagtggcgtgtaccatgttccttttgagagtgcaacttcagtttcaggattcaaatcctggttgagacaaactccatttcctggtggaaaagcttcgggtaatgaaacaaataataactttaactttcaggcactctctcttaccatgagcccaacctctcgaaatgggttccctgctacagcaccattggaggtggttgataaccgtaaacgacctgtgggaaggaccctcaccagggaatcagttcctcgcaaatctattgatacttttggtcaaagaacttctcaatatcgtggtgttacaaggtatttttacctttcaattttcattgttatccgagtttaataacattcagaaatttacttccttttattcaataggcatagatggaccggaagatatgaggctcatttgtgggataatagctgtagaaaagagggacaaacaaggaaagggaggcaaggtgagcgcagcagttc

SEQ ID NO: 2130 - DNA, 461 bp, Gossypium hirsutum
acatacgtagacttgaacttgatctcagcgattcactaacatcattgtcgtttcgtcattttagcttatcatatatataactccaaccaagctacgtacgagtgttacatgcttttatatgtgtataatttcaaatattaattaatgcccatatttcaattttaattttctatttcgttgatttttagtgcttttttttactacatgttcaactgttgtacttgccaatgatcatcagctcttgctggaagatgattgagttcccatcgtttcttctgttctcaaatccatcaacttatggtacaatacaaatactaaaaaattttgaaacattttgatttcgtcttgaattggattaacagttctgtatagaaatctctagctaaaaaaatttctttgtttcgaaattgagtaaattgatttttctcaaaaaaaatcagagttattaatcactgtaatta

SEQ ID NO: 2131 - DNA, 624 bp, Gossypium hirsutum
attgttaaattaaaggtgctttctcctgcctctttttctactttttcccccttccatcaattgcatagcaggtttacaatttttgtatcaggttagtgatcatgttttaaaccaaatgatagctctttgttagtgttcggtaacaaatcctgttgaaatgtttttctcattatatgttgttacaaaaacacaaagttgaacttatctctgacctttcaaatggtagaatgattaaaaatttctttaactacaggagataattatcatacttattttattctgtgacagggatggaaatatacctgtttcttttattcaaaaatatctgaagaagaaactggacctcactgatgaagctgaggtgagttaatctctccttgaataatgttctttaatgacatgcgaatatgaaattttaccaaaaagattttagcttttctgtatttttactatgaggctcatttatgatgtcatggagatgctttattattatgcatggataattgacgtctggttaagatagaagagcttcaagctttattctccacttcatgcatgtgggataaaccatatgcatgtataaccagtctgatttatagaatccacatcttacttgttgccttg

SEQ ID NO: 2132 - DNA, 362 bp, Gossypium hirsutum
ctggaacactgctgctattaggaccatttctggattattggttgacaagccagagagttgatgcctataattataatatagtatctattgtaagtgttctatctatttgtattctttgcattatgaggtttttgtgtcatggtagttgttgccatcagtttagaatgaggttagatttacttgttttagacttcagggttgctgtcagaatcgtgttcatgaatgtgcactgtaattcatgcagttacttgtatttctttcgacctactgttatatttaatttgcattgcatatcatgttgcaatctgcattcatttctaagaccacttacatgacgtatggtgcctaacatcccttaaaaa

SEQ ID NO: 2133 - DNA, 630 bp, Gossypium hirsutum
catagcatggtttgtattaacttcattgatcagattcaaagaacaacatataatcagtaactaactgaatttatttcttaaacacggaaagcaacatttgatatggcaaatctgttaaaggatagaggaagtaatatttggtaagaatatagatatacttgaacctttaatggaaagattaccaaaccagttatcgtgtcgtaatgatgaatgtagatatcgtgattacctgaataatacaagcttgaacaagtcagaatcaaagaacaaccaaaccagatcaactgaatcaggcaatgtagatgaagcatattcatatataaactgtatgttcagccgtaggcaagtccaattaacttagaatgaatgaattattaaaaaatttattaaaaacagtatgtgtatatatatataaacaaaaaaaaagagtttaaatgaacagtttgaatcaataaaaaagaaaagctatgataattttgaagactttcatgcctagataaattaagttgaaaaaaaacaatttcaaggcaaagtatttcaaagattactacaaagcatatcctgtaacaacaaatgcttcatccaaaacagtaaatcaaaataataaagcaccaaacttgtatactgccc

SEQ ID NO: 2134 - DNA, 622 bp, Gossypium hirsutum
ttttcatcagaatcgaagtctagctctgaattcccatcattattgagccataaattgtagatgataatttttgtgccatgggaaccaatgtcatcaaactgcacttagatgaagatatgtgaagttagtgagacaagaataacttcaaagaccaaaaattttcatgaaatgtcaaataaaagacatttctcagtttgatccatgctccactgctccagatgaggtgttgtataaattcaaagtagatttcagtttgaagtgaaatttactttacccaattaaatgtaatttttaggaagctattttaattacctactgtctcaccaaacccatgttccccttgtgcacttggccattcttttctgactctaaaacaaattaaggggacaacaatacaaagaatcttcttaaaaccataacaacaaaaacacatgagctttatttgaatgcacggttaattttatgggttgaatcaagtcactcaaaccaatgtaaaagaatgacataactaggcttgaaggtcatcaagccaagggttaaaaatttgaagtcaaatatagaattcgccagtcaaaagtctataaagtattttcaagaaaaactcagctcggatttaggatat

SEQ ID NO: 2135 - DNA, 607 bp, Gossypium hirsutum
  misc_feature (22)..(24): n is a, c, g, or t
tgtatgtaggtgctaatatacnnnttgattaaatgttaatttcagaatttccagatgaagtggatactccactagatgttcctgctagaaagcgatttgcaaaatatagaggcctcaagtcttttaggacatcctcgtgggaccccaaagtaatttattgtgataccattttggtgagctttgttttgggtttaatattatgaagttattaaaagtttactggttattgttaggaatctctacctcgagaatatgccagaatttttgcttttgataattttgcaagaacacaaaagcatgttgttgcaagagctttaaacgtggagcaagagggcagggatgactgtgcgccggttggttcatttgctaggttttatatcaaggaggtcccttttcatgttgcttccaaattgtgtgcggcctcaagaactgcgcccattgttttatgtggtctcctgcaacatgagtctaagatgtctgttcttcattttaggtatatatttctctttacactttcctggttatgagtagctacaattcacccttatttatttattttttcccaatatgaattctttttgcagcataaaaaagcatgatagttatg

SEQ ID NO: 2136 - DNA, 623 bp, Gossypium hirsutum
tccattttcaaagctgagtcaagaaaaaccctggtatttctgattccaagccaatagatccatcatcgccatcgtcttcacagaatcaggaactccatctggccagacaccacaagcctgttgcctccggccttccagcgccagcgtgtgagccgtcctattaacatttcgaggcacaaaagtgtaagttacaaaatcaaagcatttttccagcaaactaatttgatgcgttattggcctaagaactaatttatctttttcctttttcttaatgctcttgatgactgttaaagagtccccttcaacgatcaggcaccgataacccatctcaactgcaaacagaagagccctttcacatgccctagcttcagccacgcaagcatcaatcacctccgtaaaaagataagttttcgctcctattaattctcctgccgagtcttttgctaaaactgctgttgtagcgattcgaaattcattttgaaaagacgcatcaaaatttagtttgatgactctacattcagggtttgccaaaactcttttaccatagatctaggagaagggcgaagactcttttgatttaggttaagatcttgaacataaccatgaataaatcccaacagttc

SEQ ID NO: 2137 - DNA, 634 bp, Gossypium hirsutum
gccgagccgcttgcttgcatctttctgcagcagctgtaggaaataacaaaattcatttatatctaaaattccacattaattatttgaagaatcaacctataccatgatttgtcatctagaggcaagaaaaattcaaaccgaatcaccaggcggagtgattacagctagataagtattggacttttcagagcatggaaacgtacattaaaggcgtaagaaactgaaattacccccttgaggattgagtgtgcttcactagacaaaaatgccggcagctttatcttttcctttattatcttatcctgtatcttctgtctgtttccaccactaaagggtggctgcaaaacagtaaacaataaacaaaaataagctaagaatgacaaagcgatgaatgacacgcactcaagatcataaatcaagaataccaaccttcccagtaagcatttcatacaatagaattcccacactccaccaatcagctgccttgtcatggcctttgccaagtacaatttctggggacatatattccaaagttccacacatggaattggatcttgtattttcattaaattcctttgccaggccgaaatcagtcagcataacctggtaaaatagaggtagcacgaaccaccat

SEQ ID NO: 2138 - DNA, 614 bp, Gossypium hirsutum
  misc_feature (578)..(578): n is a, c, g, or t
tcttgtgcataattgttgataatgacaccttttattgggtttattgacactaacagatattcttgagttcagcaaatttgcaaaagacaaaagtttggactccaaggtatggtgcactctttaatttatttcaagttttcaagaataacgtgctttaacaacttatagtctggcatgttacaattcaagggacaaggggggaaaaggaaaacacagatttactcagtaagggtggaggaagaagtgataaaaattgagctatgtcccctctcacgcaaatgctaaagtagttccctttgcaactcaaaatagattaaaattaacttcaacataggattttgtcttgtggttgttctttcttcgggggtacaatggtaaagttggaagattgaaattcatctgagtcaattggtatatgtaaagctttctgcttcaccatatcttgaaatcaccatcttaggtgtacatccaccccaaaaaggggtaaaatccccctggtggttaatttccgtttcttttcaataatcctaacccggccaattaataaaaaaccccggcaaaaggggttttgggatctnaaataaggtcctccaaagggggaaaaaggaaagggg

SEQ ID NO: 2139 - DNA, 674 bp, Gossypium hirsutum
caagtgagttgagggaagttttggtttataacttgtacaagactcaaaagctaaccgaattatatcaatggcctcggtttatacatcccaaaacaactttgatttctctaatataacctagagacacaagattttgcatcggaaaatgccggtattatgcggttgggaaggggtatgaatgcttaaaagctactcgggatcgctccattacaacaatagcaatggtggcaattgcaatgaaagatgacataatttccatagcctaagaaatatgtttgcaatgtgagttgtaaattttgtagaaaaggttaccgggataagcaaaaacggtcgcatcttcgttaaactcggaacagtttatatcaaaattaagtatcttagaaaccagtaagcattaccttcgggggcattcaatatctgccttactggagatggcgcatcatctcgatatattgaggtgtcaagaacggaaactgggctaggttgctctggagtaaccatagcaagttctgccactgatccatcctcgaccagtcttgatgttgatttctgacaaaaaccgaacacgacattgtaagataaccacaacaaacaattggatgaatggtcaagactgaagaataatatcacctactttctgcattatgcccgaaactgaatacttggttgtattc

SEQ ID NO: 2140 - DNA, 611 bp, Gossypium hirsutum
tttctactgttaaaaactaacatagttgatgaaatagctagacagttatacgtggcgtgccacgcgtactcatgctaatgtaactaattttgtcattttttgagtagagaggacaaaatgcaatctgactcctaatacagggccctacatggtatttttaccgataattctgctaaatgttgttttttcccatgttattttgtgttatcatgatgtgccttggattaatatttctgttcctcatcgagtttggaacattgtttgtgcactattaatctttcgatacgataacaagaatcaaagtgcctgtgtatatatgagctaagaactgaatattagaagcttgttaccttgcagacatgaaagccatcccgaagaacacagccttgacagcttgcttctgcccggcatagtcaaatgccaatggcagcatttcatgtaatgttaggaaggccatcaccccaccaactgaaaattttaaacataaatttagagttaagagattttcactagatgataatatcagagggcacagtaaactagattctttttttccagaaccaaaatccaatacgaatgattgatggtacgacaaacctgatcctaacaag

SEQ ID NO: 2141 - DNA, 609 bp, Gossypium hirsutum
ataatacagcagctgcaattgatatcgggcttcgcctgcaaagttatttaaattattagcaaatacatacagaaactaatataagtgaaaaaaaaattaaagaagatatacataagagatctaatgtctcaatagtcaatagtcaattcaacaatcttgactcctgattctcaacatccttattaacatccgcatccctaaatgttttcgcttatcactcatcagaatttcataatccacctccatcttaatagtcaataagatctaagggcaactattgcaaaatttcaactataatggtctttctatactcgacaagcttccttttctttgcatcattattcaaacattctaactttcctaatcatgtgagttgctcaactgaaaatacccacttcctaatcatgcagtctgttaaatggagagatccatacagaattatccaagtcacagaggatagtgaattaaatttttatttgtaaggaaaaggcttaaacagaagcttcagtttaggctgacatcgtcatgataaagacagaataaaaactaccttatatcaaactcctcagacttctgaactgattcctgggcagctttaactgcttgatt

SEQ ID NO: 2142 - DNA, 650 bp, Gossypium hirsutum
cctttgaactctgtaaatcctcatcaactgattcaatttttttagatcaagctttatagggaaaactctaatcccgatctctctaaaatcccatccccaaggttgttttctactcatctacttatataactagaattatattgtaaagtttaaccattaaaattttaaaatattaattatatacaaaagcataaaagtatataaaacaaaatttaattttccactacatacacctaattttatccaaaaaagaaaaaaaaattgttgataattttattcaaaatttaaggtaattaatttttcaattctaaatgaattttatttttggtaagtgagtaaaattttagtaaataaaaattaaaagttttgagagtcaaactctcaaatagaaacacccacaaattatagaaagagaaaaccacacatctccaatgaaactcactaaacaaacaaagaccatctaaaacacaccttcaatatcactaataaaagcttcaaccatacttcactactagtaatcacacttcacaaattctgtaaccacaataaaactccacaaataccactgaacgcaaagccaacaagaagttccaattggatccactatgttacttgccttcttgaatacctttaacgaccaacacctactc

SEQ ID NO: 2143 - DNA, 562 bp, Gossypium hirsutum
cagagagataaaagtaatcaattgcaaacaataaaattagaaggaaaaaaataatgatgcttctataatcttgtctcttaaaagcataggaagaaaagaaaaaaggtaagtaaatgacatttcacctccttggtatcatgatgtccattatagtaaactaaagaggttgttagtttccccagtccctctgaagtagcttccaaaattctagcactcctccagccgtatctagatgcaataggctctaacacagggacaattttccaatagccagattggttgtcataaaactcaatatcatcattctgcaatggaaaaaaggaagtctgatttgaaaatgaccaagaaaataatgagaaacatactagcgtatcaaattagacaagtgagctaacaactgagtgacaacaaaatctttaacctaaaaattttttgaccctttaagtattgtcaaaaaaagaacaagaacccaatcatcaagcgaatcaaaccaaaaagttcttgatgttaacatagctcaactatatcaatggataacagaaataacccataagggtacctc

SEQ ID NO: 2144 - DNA, 597 bp, Gossypium hirsutum
gagcaaattggtctcctatctgctagtcaaaatcctcttgaaaggttgttcctttgagcaagaatgatgcacaacagctgttataattagttacttagatttacaccagtctcctgcaatttccattgtataggtcttcctagaaacttagtttcgtggaaaccaagtttgtcataaaacagaaatattttagcaaggattggatacactcaggtaagtaccataagaatgcatctttcgtgaagttgagctgaggttttattctaaactttgtagccgaaatgaggcatcccctgactgtttttgcttggtttctggttaatgatgtctttcatttgttcttttgttcgttgtatttgcataatgtttgtgctattgcatcccaggattttgaagcatgtaatggcattgaggaagttgcagagctcatacgagacaagcaagtggatgaaaatcttaggtacttgaaaatagtagttaggatatttatttcaaggccttcgttctctttttctgatgctcttgtttgtttttcttttattgtatcccatgcgataaaccagtggaaatgaattaggttattcatgtagattacat

SEQ ID NO: 2145 - DNA, 641 bp, Gossypium hirsutum
actatttaacttaaaaggggtcaaacaaccaaatagtctgcacaacctattctttatttaactcattgattcattgatgtatcaacttttcacagttttggactcttgtttataaacaacaatatgagaataagccatctcttaactacaaaaaaagaatcaaggaaaaatttcttaccaagtctaagctaagtattagtttacaaaggtgcagtctggatggtgcttgaagtggcgttatgtctcaaaaatgcaagttttgatttgagtttaccgatcaaattccttagatcctgcccccaggaccatgacgggtcatttagtgcacggatagagttgaggcaaacaagaagagtacccccttcgtgcaggagaacctgtacattacccgagacagaagaggagctcagttcatgatgtcagattgatatatacatgctagttacttataatatacatacagcttcaacagatgtaagtcgacaggaacagtttcaggtgtcatggaccatgtttttattctaaaaattaaaacagggttcataagtttttgcaagacaaggcaatcatcaaattgatcataccgtcagccaaagcggaagaaaccccaagactgatgggagagaggccaagattataac

SEQ ID NO: 2146 - DNA, 485 bp, Gossypium hirsutum
ttaaaaaaagtctggtagaaaaaaaaaggtaaaaaaagtaaaaaataaaaattggtttgtgcttccgggcaatagtcttttctctacatacaatattttattaaattttttttcctgcgtttagtctttcaaactacggttttttttatttaatcaaaaagagtgttctgtgacaccttaacagcactaattaataatatgaatataaacccataacaaaaaagttaatcttttcggttcattcactgagataatacgtagattttgtgacattttttttagtgccgtaaaatatcaatgtcactgaagagtttagaaagatatagtttttgaagatgaatttacttcgaaagctgaactgccttttccattactatcccaaaagtgcaccattttcatctttagtcagctcctttaccactcaccagctaactctcactaccttcccgccagacccacaaattgttttaactaccttatcctcc

SEQ ID NO: 2147 - DNA, 638 bp, Gossypium hirsutum
  misc_feature (635)..(635): n is a, c, g, or t
gaaatttttggtcgaatataccactattggagcgagtttgcatcgggtgacagttggaaggtacggtagtagatgaagttgctatcgtctgttcagcctggacaccaactgtagactcctcaactattgtaacgggatcaacaaacataccagagatggttgttgtgagatcagctgatcagaagacactcctgtagttgagtccgctgaagtactagctgaagactgattaagatgtgactgacctgaaacagttcccaggctagaacgcaagagaggatgtgcttggttgatgaaaccagtattgggtgtgactaacggaagaacagacatacaccgactttcccttatttctgggaactccttgctgaaaccatcatgataagggaacttactttcatcaaatttcacatgcctcgacaaaaatattcgaccatcagcagcaagacaccggtagcctttggtgtgaggtaccatcccaagaaaaacacattgttgtgatcgaaagctcaatttatgtcgttgaaaaggtcgaagatcaggaaagcaagagcatccaaacaccttgagtgagctataatctggtttgctttataaagcacttcatacgggctaaaatgacccaaaaccggagnaga

SEQ ID NO: 2148 - DNA, 631 bp, Gossypium hirsutum
ctcttgccatgttttcctctgtctagtctagagacattgaagtaacatgtttccctgctcagttcaggttgcaatttcatagtattaggcataaacttgtatccacttgagctaaggtacgatcattggtatagcatttcttacacttgctctactcttcaaccacaaactgcaattaattgggaattctcttgataacttatgattatgttaaatttctgttgctgtatcttatttgaacaactgctccatttcctgatagcatataagaataaataagaggggtagtgacctttagccgttgctttccttcaccctgtaatattcagacacttatattatatatgcttttttatcattataggaactgatattggagtagccttggtcaatgttgaaagaggagcaacgaagtgggtgtgtcgtagcaaaagtgatgttttggctctacaatttgatcagacagtaagaattatatccttcaaggtctaatgatgtgaaattcctctttactttaatcgatgaaccttttagtaatatatcagtttgtaaggggaaaagtatgttcattaatatcagtattcaattgtgcttaattttgtttctcccattacccactgggagtcaaata

SEQ ID NO: 2149 - DNA, 660 bp, Gossypium hirsutum
acgatacaaatagcatcaatattctgcctattagctatggcatcacaaaatgagaatatcttattgaataatgtatgaactagaagaaaaatgcagttgtgccgttaacattaagaaattctttaatacagttcagcctattatccagtaaaaaacttccatgtcttatcatgaagctttggtagtggtaatcatgataattattgccaacttcctcgtaagtcatgtccacatacagaatcaaaaactgcaatacctgttggcttctgacactgacaatccccaaagagcaccagctgccctctcttgaagacctggggaagcatttgaacaggattgggctagagtaacctgcgcaaaaataataataaaagaaatttagagaaaaaatcaatacccttaagatgtaatgagctctttaacaaatgaagcacatattagtatcacgacaaaaattttattccgattggctctaccagagaatatcatgaagccaagagcataattcaactaatcttcaattaaaattaatcaatttccatagcacttcactgtagtggttaatattatttcaggattcagacttttgcaccatctcaccaaaacaagggaaaggaatgaaacatcaaatatgtctattggaatccaggcatacatgaa

SEQ ID NO: 2150 - DNA, 627 bp, Gossypium hirsutum
acaaaatttccccattggaagtgaacttcgctgtttaaagctcaaatcttgtttgtttgtgagtttaacattatgattgagatgaaacatataaaagaaatagaagaatcttgggatctgcaaggtcaactttacatggaatattttattattgaagtcggtttcttggaacgtagccccaactcatctttaatatttaaaatttgtctcctcatccttaatttattcgttgctctttgggggtctaaatcctattttgcttcacaagattgtcattaatggcttacaaaatctaaaaacacactaatttgttgttctactctttcataggacttgaaaaatataattccagcaccaacataactcaagtatgtcctggcaatgtggattacgcgagtagttaaactggaagaacaactcgactgaaagtgttccaatgtataatttttttattaataaaactggtgtgagtgttcagacactgtatatgaacaagtatttgccacaacctattggagaagtgagaaaagaaaagaggcacaacagcatgcaggcaaaagattccctagcaaactaaatcgagtttcttccatgataaatcccggcaacgaagatgaaggtaagaat

SEQ ID NO: 2151 - DNA, 617 bp, Gossypium hirsutum
gggtccttcgtagttatattaaagatattgataactttttacgagtttctttcgttgacgaggagcttgggaagatacattcaacggatttgtcgacgccgagtacatctagtactgatgggaagcctagtaggatatatcagaggatattatcaactttgagaaacgggatacttgttggcgataagaaatttgagtttcttgcttgttcaactagtcagttaagagaaaattccatttggatgttcgcatccaagcctgggcttactgctgatgatataagaggacaaatgggtcatattcatgttattaggaatgtggcgaaatatgcagctaggttaggccaatctttaagctcatcgagggaaacattagaagttcatcaggatgaaatcgaggaaattcccgacattgaagttgaaactggtgggaataagtataacttctccgatggtatcgggaaaatatcggctaaacttgctaggcaagtagcatggaaatgtggcttgagacaaactccatctgcgtttcaaattcgatatggtggttacaaaggagttgtagctgttgatccctcatcgtcggtgaagttatcgttgaggaagagtatgcagaag

SEQ ID NO: 2152 - DNA, 614 bp, Gossypium hirsutum
gactttgtgggttttccttgttattttacacttattttaatctgggtttttcttgttttaacttatgatttgcttttgagttaacccttttgttggaaaaacgtaaacattaatagttcattcgtagccttttctgcacattgtaatgttatgcacttatttatctttcttcatgaagtggtagctatggctgcaaatatgtttgtggttcctcagacaaaaggctctgtcttgtgttgcaaatgcggtattttgatggctccgaatcctgccaatatgtgtgtgacctgtttgaggtctgaagttgacatcacggaaggtttacgaaagcatgccactattatgcattgtcctgagtgtgatagctacttgcagccccctagaacttggttaaaagctcagctcgaatcgaaggagttattgacgtattgtgtgaaacgactcgagactgatttgaaaaaggttaggctagtaaatgccgagtttatttggaccgaaccccattctaagagaatcaaggtcaagctgaaagttcaaaaagaggttcttaatggagcgattctagagcaatcttatgttgttgagtatgttttgcaagatcacatgtgcgaatc

SEQ ID NO: 2153 - DNA, 629 bp, Gossypium hirsutum
  misc_feature (425)..(426): n is a, c, g, or t
  misc_feature (445)..(446): n is a, c, g, or t
tagaagtgatttgagattatatgtaagaaaactgactagcaacctagagttgtaaaagaacttagaatgataggaacttgcactaacttttttttttttcactataaaggggtaaaaaataaaatttttggactttttaaaaaaaaaaaataaaatataaaggtgtaggtaatttttcaaaaaaaacacaatttttccatatttgtatattttttcaccccacttgaacttgagaatgcaaacaacttgaaatatattcccggaatttagcctggtaataatttacggttaaactacaaatttttaaatgctttttgtatttaattaaaacccatttaacctaattgctttgttttaaacttgataattttttaatcttttggggggggggggggggggaaaggttttgttttttcccccccctnntttaattttaaaccccttnntttgtttttggaaaaaaaatcccccaaacggggtttttgaaaacccgggtttaattttttccctttccaaccttccaatgttttttcccggccccgggccccccccccatttgggtttttaaatttttaacccccccgtttgggggaaaccccaccccccccccccccaataaaaaaaaaaaa

SEQ ID NO: 2154 - DNA, 624 bp, Gossypium hirsutum
aagtaataacagttataatcaagcaacaatgctagtaaattatctagaaacaaacaaccaaaagataaaagaaaaagaaaactggcaatgaagcaatgaagaattggatccaatagcagtccaaattatcatattgcgaacttgtctatatataagggggtaccacctcctctaccaattaccataaagtaacacagaatctcatgtaagaagttcaagatgactaacaatttataaagataaatattactgatgcggcatgcatgcatagatgaactccatgctgatcaatattttgaacttcataagtgaagtaacaatgtcagccttcttccatcaagtaataactttcctagcgacgattcatgcgtggcttctcccaagaagcagggccaggtccgtaaaaaggacccttgtcagcagcaccctgttaagtaacgagaaaatttaatcgaaaaaatcacaatcctaatgtaatagctttatggtcaaacaaaaaaatcaaacaagtagatgagcacaaataccagatgagccccatatccttcatatgaagctggaaaagcgccctctgaactgttgaatttcatcccatacggtccacctggagcaatcattcattaa

SEQ ID NO: 2155 - DNA, 612 bp, Gossypium hirsutum
caaaatatagttcagtattatggtagtgaaatagtaagtaacatgcaagttgcacatttaagatttctctccttacaccatttattatcttatggtcttgtattaaggctctcaaactatgcatatgcaggttgaagacaagttctacatatatctagagtatgttcatcctggttcaattaataaatatgttcgcgaccactgcggtgccattacagaatctgttgtccgcaattttactcgccatattctttccgggttggcttacctccacagcacaaagacaatccacaggtacagtggtttgaggggaggaaaatgaacctattataataatctgtttcatgagctggtagcttaatatgcttttttacctgttctatttagggatataaaaggggctaatttgcttgttgatgcatctggagttgtcaagcttgccgactttgggatgtccaaacatgtgagtttcatatatttcccttctcttcagattcatgctcgtcatagataaggcatgtaaatgtatagccgcattccccacttgaccataaatattttaatgcaaaaatgaaatttgttgcaattcaattcatcctcccaacagcaatc

SEQ ID NO: 2156 - DNA, 628 bp, Gossypium hirsutum
catcccatgacattcacatctcaactaatccttgtcggtctctcaaccctcaaaagtctggttggacccaattcaataacttaacttgggagtcacaaattttaagctctatcccatgtccttgcaaattttagatatcctagctcaaacttatcctcaaaatcagtttctagtggcttccatatcagcctatgatcttacactatctgcatatcatatagggaaggcaatggctgaatgcatttccaaagcaacaatatttttcttggcttcaaagctagagatatcattcccccttccatactcttcttgtttcacaatttcagatttgtaaatgagtattagtgcattaattagtatgtttgggtggtcatggacattgtagcacaagccacgtgtataaatatgtcatcctcggaagattcaaaatgcggcttttgggttagttttcactgccatggatacttgcaagagatgcttcattctttccttggtctttttcatggttttctttgaagatttggggaccaatgtccatggttttcaaggggaagagcagattgaaaccacggtggaggatttcctcgatcattcaccacattttaccacaacacaagggtaaacaatc

SEQ ID NO: 2157 - DNA, 640 bp, Gossypium hirsutum
tgatgccattcgaaacattgggaacctctatgccggaggtttgttctctcatatgctctttctttcggtttattaattacaacaaatttcaaatttggatataggtagtattgttttaattagaacagattccaaaattgaatagagagcatttgtcttgatattttgtcagcttactttaacctacaggtttgggtcctggaactctcctgggttcagctgcattcgaccttttccctatccatgctgtttgtgttgtagttccaaaagctggagagttgaaaaaaatatctgatataggtgtttggctggtggagctcttttggtccttttgggcttatgcttggctgtacataattttagaggtaacttcaagtaacttcttctgaagtaaagttttatgatttgtattttatagggatatttaacttgtgctgttagccgaatgtctttatccaagttatactgagaagacctctaatatggcccttttagacttgtgtttctttgattttcagtaagtgatgtaagaaaattgcttgccttttgcataacctgtgattagtttcactatttttctgtatggagtgtttacatgcattacattaatggttcacatctatggagcacttgctcatgg

SEQ ID NO: 2158 - DNA, 520 bp, Gossypium hirsutum
tatggagatgctttagtttgaggtgaattgagtagcttgtatgaagaagcaggtgaccaggaggccaatatatcaactcctggagcagcaatgtctggctgaaaatgcattgacatatgttaaaacagaaggctatgtaacttctctatgaaaaaagactgctaataccttcaacactgatggtgaaagggaactaggtcctcgtgatgaaaaatacgctatttctggggctagctgttgtccgataaccgtctttgagaagctgaacttgacgactggctttctgttacatgaaagagttcattaatatatcagagaccttctgatggaatctcaagacatagggttcaactcatatctgatgcaaatgacctgcttgcagccatgtaagtcagcagagatgtcccagcttcaaagtccacttggacacagggaaaactccatggacaagagacatctttagtaggaaactgtgcaaatataacccctgcaccattgatctcaagcacagatttcgaat

SEQ ID NO: 2159 - DNA, 326 bp, Gossypium hirsutum
  misc_feature (49)..(49): n is a, c, g, or t
tggcgattggatttgcaatttgtagttttcagttttacctacttttttnaatttgatttcctttttgtccttatcaatccataaataattcatgcttttttctgtcttcatgttttacgtggagtacacagtaaatggctcctaattcaattcacttcaatcgcgacaaaccttgtattagtcagttctcacctttctggttttagttcctctagatcatttatcgtatcagcccctttagccttttcgatgatttataatcgtggtttatttgctacagtatacttgctttgcctgcgaggtgaacagaatttggaaaaaagtta

SEQ ID NO: 2160 - DNA, 560 bp, Gossypium hirsutum
agtctcatattgtgtttaataaatccttgtgttattctaataagggtcataatggcaaagttgtctaatagtaacgtgaatcaagaaaatctgaattacacttgagctggtttctcttttcctgttcacctattagttctctaagctcaatattagagctcttcagattttccgttgaaatgctttgccttggtctaaaacgtgtctataaagtatgtcctgcaagattgttgccttactatggaattgataggtaggaaagaaatacatgttagccctgcttctattactaaaggctttttggatgctggaaaacttgtttagctgattttttatccaggttgttgtatgcattgtttgatcatagttttaatacataagtgttaggtctgcatgcttttgctctggccttttggtcataacactaacaattacctctggaggccatgctgcttgtttctctttcctttatttctccatgttgtataagcacgtgatggtttatgctgacttgcaacatatttgttaggttgttgctcaaactatacgttcatgtttgg

SEQ ID NO: 2161 - DNA, 646 bp, Gossypium hirsutum
gaactgtaacagatacataaactgtacataaagtagcaagtatgcaaccatttcacatcatatactatttggtatgcaactcaatcaaacatttgcaaggattatgaatgacagttctctaatggcatacttgtataactttcatgcttgtaaacaagctcacagttgtatgaaagaatttcagtaagcaattcaccttaaaatggtttgatccgagctttgcttgctcaatagactccttaatctgaaaaaaggaaaaccatgaaagaattctaaaaataaggaaaataatatccggaaatattttaaatattttgcttaaaatggaacaatcagaattctaaaaataaggaagctaaaaataagcttcggttgtaaatatagaaagcaatccactttgtattttagataaatggataaaaccgcttccatccaaatgaaataacttacatataattgagtcacattagtaaaaggaattatgtatttatgaagcattcatgtatttttatatatcataataaagtttaaggtcttatatatttatataaactttgatatgttaataattcgtcttatataaattttgatacatttatacatttgtattgatgctattttttatgtagtgtgtgtccgccttcaa

SEQ ID NO: 2162 - DNA, 577 bp, Gossypium hirsutum
gttcgttaaatgatagattgccggaggccagagaagcagcaagaagcattgtgttttcagtatacaaggcatttactgaaaatgaagatgagaatccaggggaggcttggcaaagcttttgccaatcaagcttgtcacctattcaagctcagtccattatcaaagctgtaggttcacagtagggtttatggtaaaagtttttagggtttctcaaacttttttaatgtaaatgctgtttttacatgattttggtggcgaaaaataactttgttttcatccacttttttcctgttcgcccccattttgtaatgttcgaataacacatttgctgttgttatattctttaacgttaaatggaagttgacctagtttcatttttatttaaagaacttatcactaaaagtaccacaaaaattattacactcaatattttacattttttatttaaaaattgacaaattaatttcaataaatcaaaatgaaaaataaatcttttctattaaaaatttcattcaaacaattaaaaactaacatattaactaaataaccaaaaaatgacacatgtaagttatgttga

SEQ ID NO: 2163 - DNA, 600 bp, Gossypium hirsutum
tatccaatcagttcgatttcctttaatatgtaaacacatgcatccacggcaaattaaaaccaatgaatgaataccctgaacctgactcggaaagtttttaattaatagaatgaatgaatactcaccaaggaagtaggggctatcgaacaagaggaccgtcgagtatcctgataatattgagcttcagatactccagatggtggtgaaaacgtagatggaccccgatcagaataattacctgtttctttaccatcttgagaactccatgacctcgttaggtccgatggtgaaggcatttggatagatggtggggattcattgaagtaggtatgggcttcatgcgattgatggctgattatgctcatttcttcttcttcttctactcctagatcaccagctggatgcaaatgtctctgtaggtaggacttcacttggaccattctatcctcatcgtccgcctcttcttgacttgcacctccatcctcttgcataatttgtacccgagagttcattaatcggtccattctctctcggaaatcacttgcaagacaagttgaaactcttcccctgcattggtaggtaattaggaaattatgacac

SEQ ID NO: 2164 - DNA, 449 bp, Gossypium hirsutum
ttgtttgtttgtgagtttaacattatgattgagatgaaacatataaaagatatagaagaatcttgggatctgcaaagtcaactttacatggaatagtttattattgaagtcggtttcttggaacgtagccccaactcatctttaatattttaaatttgtctccttaatttattcgttgctctttgggggtctaaatactattttgcttcacaagattgtcattaatggtttacaaaatctaaaaacacactaatttgttgttctactctttcataggacttgaaaaatataattccaacaccaacataactcaagtatgtcctggcgatgtggattacgcgagtggttaaaatggaagaacaactcgactgaaagtgttccaatgtataatttttttattaataaaactggtgtgagtgttcagacactgtatatgaacaagtatttga

SEQ ID NO: 2165 - DNA, 530 bp, Gossypium hirsutum
  misc_feature (30)..(32): n is a, c, g, or t
  misc_feature (337)..(337): n is a, c, g, or t
  misc_feature (339)..(339): n is a, c, g, or t
  misc_feature (344)..(344): n is a, c, g, or t
  misc_feature (347)..(347): n is a, c, g, or t
  misc_feature (349)..(349): n is a, c, g, or t
  misc_feature (352)..(352): n is a, c, g, or t
  misc_feature (354)..(354): n is a, c, g, or t
  misc_feature (359)..(359): n is a, c, g, or t
  misc_feature (382)..(382): n is a, c, g, or t
  misc_feature (384)..(384): n is a, c, g, or t
  misc_feature (387)..(387): n is a, c, g, or t
  misc_feature (390)..(390): n is a, c, g, or t
  misc_feature (392)..(393): n is a, c, g, or t
  misc_feature (399)..(400): n is a, c, g, or t
  misc_feature (404)..(404): n is a, c, g, or t
  misc_feature (409)..(409): n is a, c, g, or t
  misc_feature (411)..(411): n is a, c, g, or t
  misc_feature (414)..(414): n is a, c, g, or t
  misc_feature (417)..(417): n is a, c, g, or t
  misc_feature (420)..(420): n is a, c, g, or t
  misc_feature (422)..(422): n is a, c, g, or t
  misc_feature (432)..(432): n is a, c, g, or t
  misc_feature (436)..(436): n is a, c, g, or t
  misc_feature (441)..(441): n is a, c, g, or t
  misc_feature (443)..(443): n is a, c, g, or t
  misc_feature (445)..(446): n is a, c, g, or t
  misc_feature (449)..(449): n is a, c, g, or t
  misc_feature (453)..(453): n is a, c, g, or t
  misc_feature (459)..(459): n is a, c, g, or t
  misc_feature (464)..(464): n is a, c, g, or t
  misc_feature (467)..(467): n is a, c, g, or t
  misc_feature (475)..(476): n is a, c, g, or t
  misc_feature (486)..(486): n is a, c, g, or t
  misc_feature (504)..(505): n is a, c, g, or t
  misc_feature (507)..(508): n is a, c, g, or t
  misc_feature (510)..(511): n is a, c, g, or t
  misc_feature (514)..(514): n is a, c, g, or t
  misc_feature (522)..(522): n is a, c, g, or t
gctttcctgtgatgatcaaggtgattattnnngctcctcagcaatcaatttatgttctacagtgtcagtttaatttaccaactgaacatgcgaatttggtgcacctttttgctattctacttatgctttgtttagaaactttagattaaaatttcatattttctggttagttccaagattaagtgttaaaaagaaacaatctagcagacatgcatgctgacaggaaaatcggcctaaaagcctatattaggaagataagacatctatgtaaagcagatcgaggaataataatggaggcattccctttttttttcaaaaaaaaaaaaaaaatttttgngnccttnccnancananagttnaaaaatttttttttttcctgggngnaanttntnnaaaaannttanaaaancnaanatnttntnttgattgccntttnaaaantntnnggngttntttttnttgcnccnaaaattgnnggggttcaanaggggtttttttaagggnngnngnnaanattttgtntttttttt

SEQ ID NO: 2166 - DNA, 351 bp, Gossypium hirsutum
ctaacaagacctgatattgcattttcagtcaacaaagcttgtcagtttatgcacaggccattggatactcattacaaagctgtgaaaagaattctgcgatacctacgaggaatgttggattgtggcttatgttttactcgaacctcgaagttgctccttgaggcttattctaatgcaagttgggcatctgatgttgatgatcgcaggtcgacttccgatttttgtgtttttccgggtgaaaatctgatttcttggagtagtcggaagcaatctgttgtgtcacgttccacagaagaggaagaatataggagtttggctcaggtcagggctgaaatggtgtgggttaagtct

SEQ ID NO: 2167 - DNA, 487 bp, Gossypium hirsutum
gttattggtgccactagatcctgcaacaggctgtaaactgacatgggaggttgcagaaaggtgatttggaagacccgagaaaggggacaaggtacaaggtcgtggaatatgtgtctgcctttgagtcacaggtgccgttttactttgagttgcagaagaaccgtttccagcaagtaacataatagcttgggcctagaaatggaagcaaagaactaaatattaactgtgtccaacagttcaacaaaatacgaagaagcaatatggttaccttgtcgggagatacatcatcgtacacacatacagatccagcatagaagatagtcaactgagctggtgccttagaagatttggcagcattcctacaaaaggttgcaagtttaagctaaatatttatcatactgttattcagattcaataaacaacttgcaatggaagtttagatacctaagatcggtggtaccgatgataggacttgatggaggaacaa

SEQ ID NO: 2168 - DNA, 653 bp, Gossypium hirsutum
tagagacatgttcttcaggatgaatgatgtgagatatcctgtaagctcaactcagcaaatcaattcatcatataatttcccatcaggccctcaagtttcaaactccgacccaaaagcatgcagagaagcttgcttgagtaactgcacttgcagtgcatatgcatataacacaagtggcaattgcttaagatggtatggagacatacttggtcttgaacaactgtcagcaaaggatccaaatggacgtacaatcttcatcaaacttgcagcttctgaatttgacaatggaagaggtacttgtaaaaaaccttttaactaaattgaccattaaattgtttcacatacttacttcctcaaattcgagttctaggagccaattggtacctatggataattgcaattcctattgttttattggtggttcttcctgcatcttacattgttattcggtggaagaagagttttataaacaaaggtactttgtttcttatcggcctttgtgaattgatttgcaactcgtagcgaatggatgtacttacatatgcagacctctctgtctatggaaacaggggacagagaagatccaagtcaggatatactactctttgatatggagatgagcatcacaactagtagcagtgaatttccaggtt

SEQ ID NO: 2169 - DNA, 577 bp, Gossypium hirsutum
  misc_feature (562)..(564): n is a, c, g, or t
  misc_feature (568)..(570): n is a, c, g, or t
tgagaaagctaagttttagtactatcaaatataattgctattgatactatgtttgttttattgtaatataaatgctatagtaagagaggaaggttatgttatgctactccattctcggtttaaagctgaacatttaatgccgtgctctatatgaagaaaggttgatggttgttagttcttttgatgttttgtctttgatggatgtttgaaaaatggttcagttgatatccataatgtctatcactatagtttcccccttatgtatgatacgactgctctgctagtttatcggacaaaattatatttgtatattatattctttttctttattgtcttcaacatgataacaagtgaattactagttactttacttgattttgtcatggcgtttatctctttgagttttggcctttgtgaattaacttttgaatcaagtagcgaagcatttctgatggttcttatggctaacagtaagttttcttgtacaagctctcgtatatatgcatttgttaaacttatgctcttttttattttattttcttcaattcaattttgcctgccnnntggnnngtacttg

SEQ ID NO: 2170 - DNA, 605 bp, Gossypium hirsutum
aaaggcagtatccataacatccaagtgaacaaccacagcatagagattgtatatgaccgccttcgaacttgatccgctcatatatggggccaaatcaaggacctcaggaaattgaactgacttatttaacttcccaaaattaccagactgcaaaagtacagacagtaaacgcgagtcggcatttaaataagcacatggaagcataaaaatagaaactaggcatcttggaattacctggaacctctttaaaacaatggtaagaatattaggtgactctaataccgtcaacttctttcttgcttttacataagatttgcacctgattaaaagagggagaatttaccaatgagaaactcaaacagttatgactcctagatatttccttagaacatacggcagtacttacatgccaatccaagtaaaaatgttacaataggaacaaatatgccaaaaaagtgggatttgaatagttaccgtaatagtatcacaataaaatagccaaagttagagttcattaacatcaaaagtgggatgagaaagcaatgatgcacattaatagatatctaacaataagccataatggccaagaagcacggttattcgca

SEQ ID NO: 2171 - DNA, 521 bp, Gossypium hirsutum
  misc_feature (437)..(439): n is a, c, g, or t
  misc_feature (443)..(445): n is a, c, g, or t
  misc_feature (447)..(449): n is a, c, g, or t
  misc_feature (452)..(459): n is a, c, g, or t
  misc_feature (468)..(468): n is a, c, g, or t
  misc_feature (471)..(471): n is a, c, g, or t
  misc_feature (473)..(476): n is a, c, g, or t
  misc_feature (479)..(485): n is a, c, g, or t
  misc_feature (487)..(493): n is a, c, g, or t
  misc_feature (496)..(499): n is a, c, g, or t
  misc_feature (511)..(511): n is a, c, g, or t
ggcctacctctaatgggcaggttaacgggaacggcagtggtgggggcggggctgaaagagtgggtgggtcccttctcacggtggctttccaaatactggtcaacagtttaccgacggccaaactcactgtggaatcggtggagacggtgaataatctgatttcatgcaccgtccagaagattaaagctgcccttcaatgtgaaagctgagggaaaaggctcacgtgatcctgaggccagtttctttattagtttattttttttgttctagtccttcttaaaaaaaactcaaaaggaagtgtgcttttaccgttttactcttttgtgtgaggaagtgtttgcgtgtaactcagtgggtgttgagtcaagaacgaaccgcgcttggagactccttgcatggatcgtatatcaggctttgtgactcaagtgcaaaatgtnnnggtnnntnnntcnnnnnnnngactcaggncancnnnngannnnnnncnnnnnnnaannnnaaaaaaaagttnaaaaaaaatc

SEQ ID NO: 2172 - DNA, 659 bp, Gossypium hirsutum
tcacaaaaaaatcatgatgaatgttccgcatctaatctttataaatgacgagcactgttctaattatccatttaaatttcctcgataccataaatgattggtgtttgtttctgtcaggccattttccttgcagaaatttcataaactaagctgatatatcttagctccaactctacattttgttcggacacgaatatgggatctgacccttcaaatcccacaggaaaactttttttaaaaatgaatatatccctactaaatatatattcatatcctacactcaaacccaaatctaggttatatccttaaggagatctctatgttcatatgtaaatggagctttatttctttttgctcgaacaataaaaggaaaagacgtaagactcccaggcttttcaagggcagtgctacttatggaatcaacaaaagctataaaaattaaaaataaataaataaataagcaaaacattttggtgcaatggaccctttagttcataccgtgataatcggaagcaatgggccaaatatctcttctttcatgatgagagaatttactgggacatcaagcaagatcgtgggagcaatctgcctgccattggaagaaagaagcacgtatcaacaactattgacagcatatgatgccaagtgtgctagagaag

SEQ ID NO: 2173 - DNA, 456 bp, Gossypium hirsutum
ggaatttctacgcaaaaaccagttttcttagtttattctcccttatcactctgcatctagtgtaaggctgagtaattttttcttttccgttgttagaaccttatgaaaaagaaatgtaatttaaactggggcagattttctggcaacggttaaatgattacagacagatttaagactaacataaaaacaagttagggtttgatgggatgtaaatctgctttaaagctcatgtcataaagtttgaactcaaaattaagtatggaaattttcttattcctaaaatgttcgtagagtgtagagacacaaacatgcagatgtagatacttggagaagatgatagtagtccgttgttctcaaataacttttgcaatttgtatggtaagaagatagaatgggttctgtggctcatattatgattggaggaaaattactttataataaatctactgttttttt

SEQ ID NO: 2174 - DNA, 790 bp, Gossypium hirsutum
  misc_feature (88)..(88): n is a, c, g, or t
atgctgctgggccttcaaaggttgtgtgtgtgttttccttcctgcattttgtacctattcaaggcttaggaatttctacgcaaaaacnagttttcttagtttattctcccttatcactctgcatctagtgtaaggctgagtaattttttcttttccgttgttagaaccttatgaaaaagaaatgtaatttaaactggggcagattttctggcaacggttaaatgattacagacagatttaagactaacataaaaacaagttagggtttgatgggatgtaaatctgctttaaagctcatgtcataaagtttgaactcaaaattaagtatggaaattttcttattcctaaaatgttcgtagagtgtagagacacaaacatgcagatgtagatacttggagaagatgatagtagtccgttgttctcaaataacttttgcaatttgtatggtaagaagatagaatgggttctgtggctcatattatgattggaggaaaattactttataataaatctactgtttttttttttgtggtctcttgcagtccagttgttcttttgaagtcataagaaaacctagcaatatctttctgtacatatagaattatatggttcattccacagtttagctcctgtctttagaacttagttctcatatatccttcacaccattttctgtgaattttgatcgtctcaggttgtgattactagcatcaatatagatggtaatcttcttctcattggcagtcatcagaaagataaggtagtcttttgctgaatgtgatctgcttga

SEQ ID NO: 2175 - DNA, 686 bp, Gossypium hirsutum
atcagcttcaacaaaactaattctgtgtccgcatgaggaaagctcttaaggagttgaacctttgaagcatcgcctgtaatggaaatattgcattagaaacacaatcaaacacgatgacagaaatggaagagaaatactaagcgtacccaaatttctgagggtagcgtggacggtatatcctttctccagtagcttcttgaccagtgaagaggcaatgaaaccagcggctcctgtaacgcataccctgcacttacccttctccattgcagctaaattctctctcttatccatgtatatatagagcgtaaaatagaattaatcatagaaatacttatttatttaattttaatctcaaatattataatttattaattacggaaattaaatttatgtcaaagtatacttttagttattttatgcaagattgaggatcaacttattgaaatataaataaagatgaaagtataataaaatatatttgttatataaaattgataaactccctccttccctttcttccctgccaaatgaaaacaatataataataaataaaagtggcatttctgctaggataactattttatagagaatataatcaaaagacgggatttacacggcattgcgaggagaaaaacaagcctatggaggtcaataattatttcactaagctttgtttcatgcagctt

SEQ ID NO: 2176 - DNA, 624 bp, Gossypium hirsutum
ctgcatgacctgaaattaatggctttatatgttcactattattctcaccttttcctacactagtggtttcttcaccaggtgctactgcactttttccattctttaagtcggcctccgcaccaccatcctcaaccccatcagcagatgaagcctcaaagccaggtgttgacttatcagtttcatctctcaaatcactggacttctctttatgtaactcatcgaatgccacacaaatttccttaaccgcttggacaaagtacctagttttaacaacttgactcttggcagacaatttactctttgtctcactagtaaaagcttgaatatcaacaggagcaacaaaagctctgcaaaagaagaaacacaccagggggcgggggcgtgtaagcaactggaacaagagtcaaccttcaaaaagcactcgagaaaataatgatgcatgcatatctttaccgggaaggaaaagtattgctcctcattatacaaaaggcatcatcaaaaacttcaacaatgaagtatgaaaatcccaattacacaaatactggctttaagaggaaaaaaaacaaaggagatattcaacctacaactcgctcagatgtgcaagaaactgacttactgaaggaa

SEQ ID NO: 2177 - DNA, 673 bp, Gossypium hirsutum
aaacaaaatggagtagtcgagtgcaagaatcgcacagtgatgaatttggtgagggccatgctatcaaagaagaaagtacctaaaattttttgggcaggagctggtaggtgggcggttcatgtcttaaatcgatcacctactttagctgtgaaggatgtgaccccagaagaagcatggagcggaaaaaaacctttagtggagcattttcgagtgtttggttgtgtgggacatgtccaaatactagatgctaagagaacaaaacttgaagataaaagtgtgaattgtgtactactcggggtcagtgacgaatctaaagggtacataatgtatgatccagttgcaaagaaaattattgtgagccgtgatgtggttttttataaaagtgtgaatggtgtactactcccaatagcatggaatagattatacaaagtatatgcacctgtggctaggatggatacagtgagaatgatcattgcttttgctacacaaagagggtggaatctctaccagttagatgtcaaatctgaattcttgcatggggaattgaaggaaaatgtgttcgtggagcagcaaaaaggatatgaaaagaaagggagtgaacatatggtctataaataacaaaaggctctttacggactaaaacaagcactgagagcttggtttagtcgaattg

SEQ ID NO: 2178 - DNA, 647 bp, Gossypium hirsutum
atttgattgtctacttcaatcatctcccacagatctgtaataaagaatattaaaacatgtggttctcaaacaatgaattttctttacttataatattgtggttcattacaaatgcaataccatatacagcacctttaacaaattcaaacattggaaaataaaataaagttgaataaccacagataatggagatacatggcaatcaaatgaaagaatgttggcatgccatgccaagctgtccttaactacaatatgtgatcattacagtgtccagtgacactatgagaagatagggggggaaaccaaccaaaaaggaaaggggaaaaatcactcttttgaaatcatcatatgatcaaccttgaatactaaccgcaactacattcatcaagaaggcaaaaggcaaaaagctagacatggcaatccagaaatcatattccaacgaaacaataattttttggcagaatcaaagatcaaaatgaatgacggattgctagttgaatggagatgaagcacataataacttgtttaaatcccctaacacttagaatagaccaactttcttcttcttcaggtcttgcttccactttggtaatttatagaatgcttctttttccataccgaatactgtctggaactcattatccgac

SEQ ID NO: 2179 - DNA, 644 bp, Gossypium hirsutum
atttaccactgatctgaaagaatatcaggaatgcagcaaacatgcatacaacccatttttgctagcaaagttctgtatcaaaacaaaaactaggcaaagatggtaaaaaggaaacttgtcatagtggtaacaatctacatgtatctaaaaaatccagcctcttgtttaggaaggagaagaatcagacttggcaaaatgcataggatatattagtttcaaattttaaaaaaccacaacatagttcatgccacaatctaaagcatcaaatatgatacaaaacaactaaatgcatatgctgcatccagattgtgttccaccttactttaaccacttaaaaccttagacgtatcaaattcatcagatggtgggtaaaaggaaaaatattgatactaaatcagtcataccttaattgagttatcagctgatgagctcattagcacaggctcattagcaaaaaagtgaagcgaaataattgaactctcatgagcctctcgtatgactgattggagccttttcttctcaagattccatatgcttatgaccccagaagaacctccagatgctagaaggggctgtccatctgcagaatatagaacacagatcagcataaacatgctaggtggtggcttgagtgaacagatatt

SEQ ID NO: 2180 - DNA, 520 bp, Gossypium hirsutum
  misc_feature (60)..(60): n is a, c, g, or t
atcagaaaccataactaactccccattttctcttctattttgccacatctccggtttcanccctggtatccaacggtcattccagatagatattgagtcccctcttccaactctccaggtgagaccattcagaaggagtctttttgctgcccaaatgcttctccaggtaagcgatggtaggtttcctaactgtgaattaaaaaagctagaccttgggtaatatttagctttaagcactctagctaaaagtgaatttggattattaaacaaacgccagccctgttttgctaacaacgcaatgttaaattgattaaaatttcgaaaccccaacccactatttttctttaaaaagcaaaggtttttccaagaacaccaatggattcccttttttcctcgattcttttgccatcaaaatctcgcaacaataccctccaagtccttgcataatgattttgggagtaaaaaacaagccattgagtatgtcggtatggcttgcaacactgctttaataaatatctct

SEQ ID NO: 2181 - DNA, 564 bp, Gossypium hirsutum
ataggagggtttgtgtggttttattggagcagttaatggaaactggtttaagtttcagtgaagaagtgagggagagagcaaagaagttagctttagagtggaaaggcaaggttaggttgcgcaaagataactctttggagacatcggcgtttttgcatttagtggcaacttatagtttgggagctatgtttgataaagaggagcttgttggttacttctttaccattgctaaatttcgtcaagctaccatgttgtgcaggtcaattggtttaggggagaaagttcatggtaagatcattagtttcttgattgaatgcaatgcttatcttgtgcatttgattttagggttgagtattttgcttgtttcccatgttttatgtgcatataaatttcgttaattggtccgcggctgagtgttttatcatgaatgcttgatatagattatcaggtgtgatagagcttttatgatttggagttttcatgtatgggttgatatgtcaagcctggatatgtctatctgtttaaggtatattattcgcggtgtcactattggtttcttggttg

SEQ ID NO: 2182 - DNA, 406 bp, Gossypium hirsutum
ggaacaaagcttccactatggcatttgcgacgacgacaaggtgtgagttccacggttttcttaaagatgggaatcagaagcctagaagcagatgatggtactgtttcccatgaattaaagccccaaatcaaacggaaagatccgacgctgaaaattcttcttttaactttcagtcttgtcgcatgttcatgtgctttgcttgcaatctctggtgtattcatttttaaatttcgagttctaagatacaaaaggctgttggaaattggaaatttgggcctaaccggagagcttacgttgacgtcgttttcatacaatgaactcaagagagcaacgaatgggtttaaagaagagttgggtaagggatcctttggagcagtctacaaacggtccgtaaacagaggaagaa

SEQ ID NO: 2183 - DNA, 637 bp, Gossypium hirsutum
catgcaacctaaagaagatgccattgaagcattgcagcagtcaattttagagaaagatcaggtactatattgttatgtacatacaatttaatgtgtttggttttgaacaatattttgtgtgttccaatatcaatatgtttcatgcatatttgtgctttttggaagaccatcaaatctctagctccttttttctgtcttctcattactgttcaaagcatatattaggtctgtaaaagcttaaacaattccttattacaactcaaaacttattgcatcatcaatttgatcaagtacttctacttggtaaattcaattgtgaacctctgaaaatggaacagagttaacattaacatcagttcctatgaatgaattaatgttttgttgctttgtctttttagtgaattttactgctgaaaatcttgatggaatctatcttatgcatgctcacatttagatgttggaagacttgcaaggactactacaacttgcagatgaaaaaaggcaagcttcactggcagaggcagctgctaaacatcagaaggtaagttggacaggcgtataatgtgtcaatcatggttaagatgctgactaagagctttctcttctttctggtataccatgtgagcatgggtgcttt

SEQ ID NO: 2184 - DNA, 619 bp, Gossypium hirsutum
taatgatttggggagattgaaaggcacggaccaatggttgaataggttctgaaaggaatctatttttgtttacaaaatcaaggctaaaatcatttagatagcacgcgccagtgacttcaatttggatttaacattttactttctctttcaattattcaatcattcaattatttaaattttaataaatttaatatttatgtacccttactacttaatttaactaaaatattaatttaaaatgtttagacttttcaacaaaaaatccaaaattattagaaaattcaaaaaaaaaatatgaaattcataatttatttttctagaattataaaattttaaaagtaagttgagaatggtgaatatgataaaagcacaatttatgtcttttactttataaatcacataacatcatattattattattactattatgctaaaaacaattaagacattgaaaagaatgttttaatgttaaaatgtaccatttcaccaattgactcaaaggttgactatcatcacaagtattatgagaatgaaaaagaaattcagtttatttatactatatatgccagctttaaagtttatacttgcttattaatgaagtgatttcatgacccattga

SEQ ID NO: 2185 - DNA, 564 bp, Gossypium hirsutum
  misc_feature (549)..(549): n is a, c, g, or t
tatttgctgcttttcagtactattttgacagtaaagtcacctatgttcacttttcccttttatccttttattacttgcagcaaatgctagctttacagcaatcgcttctgtctctcaatcggcagcaatcaaccccgtaagtgatgtaacctctgtctattaaattggtaacaaaaatcagaattgtttctaaagtgacttgatagttgtaccttcttaactttattagataattattggttcagattgggactattcgagggattttaaaagaaaaaaaaaagaattaaattctctgatcatctatggtaatttgactggaacatgattacaaaacaaaatcaaacctgcctttaggactcatgcttggatgattatcgttgcattttttaaccacatttggctttcttacagggactcagcacagactggcggtactacaggtatcgaaaaaaatttctggattttctttataaagggcatgaagattacttcctgaaatcgtcaagggctctccctattttgttttgctacccttcctttaccggnaattctttaaaaaaa

SEQ ID NO: 2186 - DNA, 655 bp, Gossypium hirsutum
ggccttccccacccaaagttcgtttcatacacttgtaattttggcgaccctgcaactgctgtaaaactccgtgtcatagtttcaatccttttatcacttctctccatttctttaattccttttcctatagccttggcagccaaaataattccactttctcctaatacctctcttttctttatctcaatagcgcatggttttaaacaactcccaaggtatgttgttggtacccagaattccaggcggttccggcaatcatacggacataagaagtaatacaactcatcgtcaccgttgtcacgtgataaactattggcaacactctcttttgattcaatcaaacaaactcatatgtaggcacatgtcactacgaaagttgagatgtgatattgctctgtatcaacgctgctcctgcactgtgctgtgaccaaatgctttagtttttcggcatgggctcgacctaacacaaatgtggcgcgaaccttgtctgctgctatatcttgggtcgatgctgaattctcaccgctggttgatatccaatcccaataatccttcaatagaaccaactctatgccaccaggatccttgataatgtcccttttaataaaaggaagtgaattttcgagacaagtcaagtctccacccgacctataaa

SEQ ID NO: 2187 - DNA, 563 bp, Gossypium hirsutum
tttgtaactggatcttatgatagaacagtgagtctttcttttctcatttctaattcaattgcagcattgtttttgttcatcagggccattgttagtgtctaaacgaacttttttctacaggtcagaattttccagtataatggtggtcacagtcgagaaatctaccatacgaagagaatgcaaaggtttagtttctaatcatttagataataataatctgtctgttttttgaatctgtcattgtttgatgatcaattttcctctccttttagggtattctgtgtgaagtgtagctgtgatgccagttatgtcatttcgggaagtgatgatactaaccttaggctctggaaagctaaagcatcagaacaattgggagtggtaagaatctattcatttcacatgattcattggggtttctacatttaggtcatatttcctagcgtctgagaaatttgttgaggttgtcttatcaatggaatcaacatttataacagaaaatatttggtctatttagactctgagactttgagatgtagctttaggctttgcttcccagagtgcaa

SEQ ID NO: 2188 - DNA, 393 bp, Gossypium hirsutum
  misc_feature (361)..(365): n is a, c, g, or t
  misc_feature (368)..(377): n is a, c, g, or t
  misc_feature (380)..(385): n is a, c, g, or t
tctattcagtttagatagttatacacacatatactacaataagttccctcacaaatttgtttcattgaatcttggcttccggaaatgttgatgtattaatttaactgtactacgtattaattggtattggtgactttggggtttgagtacactcagattctttctctatttgaaaaatggagaatatatgattatttccagttatcagttgagattatgaattgatcagttgaaactaaaatataaataagctatttatcaattttaaatatttgttggtttaggaattcaaatgtaagtctatggtgagacactcacagcagcacattctcttccatatgaaggattatttttgttgatnnnnnctnnnnnnnnnntgnnnnnntggttatg

SEQ ID NO: 2189 - DNA, 641 bp, Gossypium hirsutum
ctcaatccggcaactaatgctcgaggtaaagcttgaaaccactcctcccgcccaaggccacgaggaacagcactcaatatatgactcaaaaggtgctccctagtaaaaattgctgcagcattaccgttgtgcccatcaaagatctgaaggcagaagaaaatagtcaccatcacagacgaagtgaaggaagtaatgaagaaatcatccaagcgcaaagattactacaattcatcagaaaatgtaaaatgctgctcttgtttataatctccatatgtatcatcctcaagagaaagaaaacaattgctcagagcatgaatactcctaccaattcctaaggaagtcaaccttgcatattaagtaagaaccatgggaccatatgataccggcttttgaaccagtacagtaatatcattacatcgtttcaggttttgtatctctatcaaccgataccatatcctgcaccttatttgatcttttaaccaatttctaataatcaacttaggggttttctcataacaatattatttaaaagtggactaaaatatatcacccaaagcaccaagcatgtgaaatttgtttgcgaaaagaataaaataaagattcattaccgcgaaaacagagaaggtagatgaacgattgcc

SEQ ID NO: 2190 - DNA, 596 bp, Gossypium hirsutum
ttctttttaccaacaaaaccaaacctaaaactaaaatgattatataccaaaattccgaccctaatctaaatccatcccctaataatgaaccaaaaaagagaatctacaccctaataaaacctccatactagagagcacagacaagcagaatagaaacatcaaagttccagcatgagttacatttcatgaatcgtaatatcatgtaattcaaatctatcagttacatctgagaattaaacccaaaatttaacatagtaagatttaagatacaaaattaacaaaccggagaaaagatgttgcttgcttgcaggcaacgtccgccccagcgcaactcccccacccctgatgctaccaaaatgcaattcctgaggtcatctggctaaaactttaatgatacacttctgcttctttttgttttttaaactttttccttcccctaactttctgttttttgatttccttttccagacttcaactacatccccctttccatttcctcccatgtatagatacaagaatgactatggtgactatgacttgatggttttttttttttttggaggggcaaaaaattccttatgccccaccgttgcaaa

SEQ ID NO: 2191 - DNA, 596 bp, Gossypium hirsutum
aaggtgtgggtgaaactgctaagttgagaagattaaaacgtagagctgaggatactgaattctatgatgtggatatggctaagaaactaaaatccatcacgcaaaggtgaatttatttcacgacgagaaaaggattttcttagtatcatggtgtccgtatatagcacaagatttcccacatccaatgctttagaattgttcaaagatgaggagacatacaatcttgagcttttgaatgatgaaagtgtaactagtttggatcagatgaaggaaacgcttgagtttagaaagaatgtcagcatagcatcgaagtttggcaagtcaccttgggaagctatggctagttacactgagcatctgttgtcaaaactttctgatgaaggacaaggcagccactttcatcctgagttggacaaggctgtttgcaccgaaattcggaaggttggtgatcaaggtttgagcatagaagatgtttatagtcttgtcagaatgccaggagaaaaggcacctgaaattatcattcttgcacttcaagaatttgtaagagatcagatagtttactattctgtaatggttaaagctgccaataaccttga

SEQ ID NO: 2192 - DNA, 638 bp, Gossypium hirsutum
atgaaatccatcactcaattatgaatttttttttaattgatcatttaactaattgaatttttttagtccattttcattaattatattaacaagagaatgatgtggtagttgaaaattcgttataataataaatttagttctcaacttttaaatattatattaatttaattgtaattttaaaaaataactctcacaatttaaaaatttctctattttatcttaatcctaaaatttttaagaaatatataaaaatacgtaaatattttcaaaaaatatataataataaaattttaaaatatataaaaaatacttaaatatttttaaaatataataataaatttaaattttatattaatatttaataaaaataatgatattaatattaaataataataaaaaccctctcctccctgcgtctctctccctcttgttgttctgttgttgttgttgctgctgctgcaatagaaaaccaaatcgggaacctccttgcttaatcaaagaagctatgcaagaacctgtggccataagcccttctttgccaacaacaaatccagcagccacacaaaaatttgaaccaaaaatctttacaaagagagtacttggagccaatatggagtaagcatccacaccattgaggt

SEQ ID NO: 2193 - DNA, 626 bp, Gossypium hirsutum
taggagaggctactaatttactgtaggaagtattgaattgatataaatttctagttgagatcccacgatttatatgtatgctaatgagtctctttttcttgcctaatgtttctcttatagggccttcgtgtcggtcttaatttggctttggccattgctttgcacaacatcccagaggtacatactctctaatccagtaagcggaccttgaaagcgaccacttaagtggtcggttcctggtttaactagttcaaaataatcaaaataaattacgttttcatatatgtatattgaatttagtgattatgataacggtgtgcatttggttgattattttacaactgctttattaattaccacggcgaggtatatatccaatactttgtaaaaagaaagaattagaatccagtttcaatgaacaagaaccagtctaatctgtgatacatgtgtatgcatgcatgctgaactattttgttaattgattaaaaatcggtcatgcttacaaaatgcaatagtctaatatcttacaatataattaatgcatacatacatttatgtataatagagtgcaagttttttttttcccttaacttctttatgttcattttaaagggggtggcggtggc

SEQ ID NO: 2194 - DNA, 90 bp, Gossypium hirsutum
acttacctatcgagtccattgatatatgagagtgttcacccatgaagcagacctaggcagaagtaatgagaaaaagagaaagtggtaagt

SEQ ID NO: 2195 - DNA, 662 bp, Gossypium hirsutum
tctattgtactccaagaaatctctaccattttcctttgcagtaggcgtttgtttagggggattaattaataaaccagaaaatccatctgcgttacgagagttcaacatctgactcctgctcttcaaattaggatgaggttgtcttctctgtaattagagggcggaaattgaatacggttagctatagagaagcaagaggtgaaggcaattagtgaacaaaataaaaaagattgctaatctattgtgctacagcgtaaagtagcacagtttgaagaccaagaaatatgttggtgcatatatcaagtcaataaatgtatgttaaaagaacggcaattgctattacctgcgatgatgcggtctgttcagcattagaaattggttccttctgccccctcctttccatgtcaacccttgaacccctgctcccaactgctctttgcctaagggaacaaaaggagaggttaatcttatgaagacaactttttaaacttaagaaaattaaaattgtccaaggaaaaaaagaagaagacatttaaataggaagtaagattctcattggcctagatgacccccaaaacaaaatatacaccatgtttgaagattcaatttttaacatataccttctagcttcttcgtcccgcatttagcatcaatctccttac

SEQ ID NO: 2196 - DNA, 575 bp, Gossypium hirsutum
tttatgatgggttgcaactaaactgggatcgtggttttcatgaagtaatagtggaaagtgacagtaaggaggccgtggaacagattaacaacggttgggacagcttctactcaaattggttggttaaggaaatacgtacattgtgcaggcagcagtggttggttacagtgctccatatttctcggcaagcaaataaggtggtagatattgatgctaaattggctttgggtggtcaactggggcttcaggtttttccagatctggtatcggaagctttgcatcagcttgaaaacgatgcacttgggactcagtttgtctcagtttctgtctaattaagtaccttttaacaaggtgcctttcctttgttaccaaaaaaaaaaaagtccattttgtgaagttaaaaaatttatactggtaagggagtggaagaaaatggcaattgaggttgttgatgattaacatggatcctttgattccttgaagtacaatgcaacaattattagtttgtaaaatattaagattcctttgtttttccttttttggtacctatctcatgaaatgaaagacaaagcata

SEQ ID NO: 2197 - DNA, 361 bp, Gossypium hirsutum
ctttgtacatctatattcctctccgtaactatcttagcaaattgatcaacgacttaatttatctcccttgaaatatgttttatttgtcattgttctatagtttgtaaaatcacgtgaatctttcttatcaaaagttgagtcaaccaagtggatattttgaagaactttgataacatctagactgtctgtatagatcaaaacattatcatatccccttttttgaataaggtcagggcatctaaaatttctcaaagctcaacattgaaaactaaaccgagccccaaataataattgtatttaaggattcattccccattttacttgtacatcaccctagcaacaacaaaccttacatctgtca

SEQ ID NO: 2198 - DNA, 631 bp, Gossypium hirsutum
ttttacatcaaaaggcaagatacatgaatgacgggcttttccttgtattacaactttacgcaaaagaattacaaaaagcaaaccctccaaggccgaggagcttacactagtttacagttcttttgtgacataaaacacactatccctacatataaaatgtacaagtcatgatgcattcagctggggatgaagacgagatacatgaatggcggctttttcctttgtaaaatgtttcaaatgcaactaccatccatatcgaagacaaaaacaactttgtgcaaaagaattacaaaaaacaaaccctgcgaggccaaggagcttacactaatttgcaggtctattgtgacataaaacatactatccctacatataaaatgtacaaatcatgatgcattcaacaagggatgaagacgagatacatgaatgatggcctttctccttataaagtgtttcgaatgcaactaccatccacatcgaaaacaaaaacaactttacacaaaaaaaatacaaaaagcaaaccctccagggccaaggagcttaaactagtttgcacgtctttttatgacataaaacacactatccctacatataaaatgtacaaatcatgatccaccatgctcattgctaatat

SEQ ID NO: 2199 - DNA, 644 bp, Gossypium hirsutum
tatctctaacagatcaaataccattattttcttttatcaattataaaaatatgaagttcagagaagtaatgtcaaaatcctaaacataaatatgaaacctataatatatttgtattaactgtgctttaatatatcatgtttaatacactattttcgtatgtattacacccgttgattttagtgttgtttccgaaaccatcgggcctaatctatagacagaaatgtgaagcaggatttctgtgatagatggcctggaccagcatgagctaaatcatattcaacctatcccgcttgatgcagcacaatcaagttattatatatataatgcacataaaatatcccctttattaagaaaaaagatatataaaagaattaggtaaaatagatttgtcatgttctttacaacaaactacaatacattgtagtgtttgacaaaggcacctcctccctcaatctctcaggagccaaccgtttggataaagcacatagtcttgaatgaaagataatataaaaacaataattttttgaatgaccactgcattaaccatatctacttcagctgtactatgcacattgcgtcttggaataccaccaaaaataataagaaaaatgcttacgaggtgttacccgctgaagaattcatt

SEQ ID NO: 2200 - DNA, 610 bp, Gossypium hirsutum
ttctatatcaaattatacgcttttcttaactgcaaaactaggatagttagttaaactagacctactgagatttacatcataattatctgatctgctaaactggttctttaagcagaagcaagaagagggaaggcaactgtatcaattgtggtgaaaaaacattattgttgatggaaggaagaattcaccagctgtttacatattgcgaggcccagtcctgtcccaccatactttcgggcatgatcggcactgacttgcatgtacttcttaaaaagtgtgggcaaagcattttctgtcacagagacaggagaatgtatcaagttctaacaaaacctctgattttttgcgataatgtaaatgattaaagatgagcaaactcatgtaccaggtattccaatcccagtatcatatacatcacagcgaatccaaactgttgtttcaggtaactctggttgctcctcagttacatctatttttccattcattactggagtaccgggttcactttgagaacgtttttggcaagaaccttcgtgtttcttaccatgaaatcctctctgatcaccgctagtttgagacgttgatgtacatgtctcttcttttggtacat

SEQ ID NO: 2201 - DNA, 638 bp, Gossypium hirsutum
ctgaatgtgagtccctaggctaggccattgtggttggtccctagtcctaacatattcttgggcagcgtcatatcaactctctctctttctatcactttttttatttgaagcccaacaactggggaaattctaggggaacctcactaaccttctttgtaattgcaaataggttacttgataaacagttaaaatttttgaaaattattttctttcatatttttttgttattctctcgtaattttgaataccttcataatcccacatgattcttagtatttttttttataatttttagtataccatcaaaatttttaatatttttaacttgagaaatcaatttttgatataaaagaaatatttttgcatataaatttctagtttcgtttacatgtaataaagaggtgcaataaaaatattacttagtggtgtctcataacatatttttggttatggaaatgaaaatatagtagctagtggagttgtcaaattaactttatgatattaaaaaaagttgactagcagcctatgagataaatatttttttaatgtaaacatatccctactatatttatacatataccatttaagatcaagacaaccgaagacgatccaactatgcaatgacttcacccttccta

SEQ ID NO: 2202 - DNA, 625 bp, Gossypium hirsutum
tctctatgtccaacacttatctaccctataacctaccatagcttatgtcatctcagcacaggtgcaattcgcactacttcaatccatctcccttaaattgccaaatcaaactaatagaaacagcaattgacctactaaatgacgacatatttagaaagctatttattcaacttttacatgtacaactttgaacatgataacattgtatgttggtgaaaactcaggaaaaagatttacagctaataagcttttctgcccacgcaattgtttagatgacacaggttcattaagcttaataagatctgtaataatattaactcggtgataggacaaggtaaaatctggggtcctatctcttgtgagcatctcaatactaaagaacacttcaatgagcttacagcattggctcacacaatgaattgacacaggcaatgaagaaccataagacccaaaatgaatgagacatctaaggtatcaaccatggctgcatgcaaaatagacaaataaaaaccctcaccttatctggatcttgtaactccttaaaagctttgttgagtatgataaatgcttggtgcgcctgtggatgaggacacttgtctggatgcaccataagagacagtttcca

SEQ ID NO: 2203 - DNA, 642 bp, Gossypium hirsutum
tttttagttaattgtcgataggctcacagtctgctttgcatggtgggtttcccataacattgcactgagttatgaattttttttggctaattgcatgttaaggattgatgaaattttgtacaaaatattaaatcaaaacagatgtaatgcatgttttcatctgcacagcaggcacgtgcacagatcacaaaacatcagaacataaacctttggtttgctattatctatgcatttcctgactgttcatttttcttgaagtatttgtcttgcggttatgaagatatgatccttcaatacatggaaaaacttagaaaacaattaaacataccggtatctgaaactcacccaaatctgagtaacatggactcaagtatctcttattatagtgattacttcccattggtcttcttaactctttcaagatatgcttttacttatgagattatgttgttttaattgcttgtcttagattttgatcctacattaaatggattttgtatgtgtttcaagggtgctttttgagaaactgaacttaaattacgaggagggtgagaggtggattgtgaatctcatccgaaactcaaaacttgatgcaaagattgattcagagactggaactgttattatggagcctaatcaacc

SEQ ID NO: 2204 - DNA, 609 bp, Gossypium hirsutum
tattcatacctcccacctagcccagcgctccattaactgagtttttttcaggagttgttcaggtctctacagcataaaaatatatatatatattagttcaggaataggaataaaaatgagtccttgttaaaagcagttaacatttacaccgttagataccttcaaatgaacccaattttataaacataagatatcctcaaattccctcaaaaaaagagagatatccataaattttccactctttttgttttaaatacaagttatattctccatatgtatatatgagcacattctaggtctcaaaataaaaaaatctccaagcaaagtgcaaacctgagttgcaagataaatgttgttcaaatgagggggtcgtgcttgaacaatagctcggtaggcatttcttcggtcctcagaactctggatcaagtattatcttttaaataaaagaacgaagaagaataacaaagccaaggattcaaaaaagaggtgcatacaatagatcaacaaccgtaaaaagcatacatcttttctataggaacataccccaaaagcaaagaagaaattagaacggtcaatcagaaacagcaccagagcacttcttcttaggag

SEQ ID NO: 2205 - DNA, 627 bp, Gossypium hirsutum
  misc_feature (612)..(614): n is a, c, g, or t
atctgtgaaaatgatggaaaatgagaagaactcttgaataaaactgagcagcagatgaaatgggttgggcacaccaacttttaagggtttgtttgtttcaaataaaaagtaatttttttccataaaacaatttacccctaaaaatcaagtaaaccattttactctcaggtaaatccattacaaatccaatcagtatgattgtacacaatttataagcacaaataaattacgatgattagtgtactgaaaagccacgaaagctcaaaatgaaattacaaaattatttttttctttttattttattgcttgaacttacaaacaaagcctaagtgcagcctttcaaaggcattattaacgccttcaatagggttatagctaagcagcaggaccaaaaacaagaagatgaacatatacttcagccaggccaccaaaggccttcaaaaagcaatcaatacaaaacttgacttcgtgcgaacaactgcacaatgtagatgttaacgctttgaactaataaaaaataaaataataaaagaggaaggaataacacatcttcccatagatgataataataaaaataaatgaattggcaaattacagatgctcttcacactnnnaatactgatgctc

SEQ ID NO: 2206 - DNA, 508 bp, Gossypium hirsutum
tagatcagatgcccatggtatgttctttgtgtcctatacggtagagttgcgtttgcatctaaagccttacccatcccaaatctgatacgaattttgattagaaggccttatgaggataggggagggttgggttttgcccctaaacatccctatagtcagccttatatgtgtaagacattcccttgcatttattgggttttcacctgcatttgtcttttcaggtacctgtcaacagacatgttgaggcatctaaaccttctcttacaccggaagagatgaaactcaaagcacaagagctacggtatggcttataaagttgcattcttcaatattataaaatagaatgcctaattcagtcattggtgattgaagcatttgtcattgctttttcacctatattactcggactcgggtgtgagtgtttgacacgggttttttcaaaaaaaatttctaagtttttccaagtattttgaggattcttggccatatccatggtagagataataca

SEQ ID NO: 2207 - DNA, 654 bp, Gossypium hirsutum
agaggaatctctctagaaaaaaaaacagggaaaatttattgaaagagaagaaactggatcagatgatgcagatgaaaattttacccatcagcagcattggaggaatctcagaggcaagcaaggcaaatatattgaagaagatgacatagtttcgggtgattcacttgacgaatgttctcttaaccagtataggaaaattcatagacctggcagtccaaattttgggagagacaagatgctgtatcagatgatgaacacgatgaaatttctcatcagctgtgtagaaggatttgtgggggcaggcaaattaagccacttgagagaaacatgcaatctccgatgattcaggagctgataattgccttaaacagtagaaagaatacctaaaggcaatcaaggaaactttttgagagagatattggagtatctgatgatgcatcagagaatgattctcgacatcagcttactaggtttcctagacgcgagcaaattcagtgcatggaaagaagtgattcgttttcagatgattcacttgaagataatcatcaacaacagtgttggaggattcccagaagcaaaattgccaaatttactgatagagaagattcttcatttgattcattgaatggtaattctcatcaaaccacagtgagg

SEQ ID NO: 2208 - DNA, 638 bp, Gossypium hirsutum
tatgctcataaaataaaccagcagtaagttcaggttggactgattactgtttacttggtggcttttttgcctctcttaaatttcttttttagaaaatatccaaattgatttccttatatttttcactttttcttacattctttttgtagctatccatcaagctctaccttgcatgaattatatgtgttccgttttatctttttatgtgtttagttttgttattttccagtttatgaagaagtattgagtgaaattgcaagagaaaaatttgggttaattttaactgagagttgaatgtttgctgagcctatgaagcctaactcaaagtagtgccaattataatcactcaatttaggttacatgaattgtgtggttttgcatagaacagttttgaggagaattaagtagccagacccatttaattggcacaggacttaaatgagtcctcttcctaggtcacactctccaactagttcaaatagaaaaagagaggttgtctctctttctccttttttttttggtttggtttcccttttggattttgaaattaatttttattgggaaaaatgaaggccttttgaattttgaaaaatggtaatttttcttctttttgtttaactcttccccccgtttggcaa

SEQ ID NO: 2209 - DNA, 610 bp, Gossypium hirsutum
atgcttctgtacttgaagtagaggataacactcaccggtatccacttctgtacttgcattattttttattttttcaacatgttctttcttgatgcgcatagctcacttttctttacaataaaatttgttcctttttcagtgtacattcaactgaaccaaatgtagtgctggatcagcctgaattaatgtcatacgatcaaagtgaaggaggggctgatgagaccaatgagttgattgttgatagagtaattaatatttctgaagcaatccatgtaaaagagactgtagatgatttatccaatgtagaaaatatagaccagttgcaggatacgggagcgaaggataaatctggggaactattagcggtacctatggggaatgtttctcaacttactatcccttgtcaggtaatttctggtcgtacctattggcaagtttcttgcatgctgatgacattatgaacattttactagactcttatttacaattgaattctttgctcttctccccttaccgatatatcaacattttttaacagtagcacttgtaatatgcatacaagttgatcaggtattgatacaatttccatcttgtaggaaatgttccttgg

SEQ ID NO: 2210 - DNA, 652 bp, Gossypium hirsutum
  misc_feature (558)..(558): n is a, c, g, or t
  misc_feature (642)..(642): n is a, c, g, or t
  misc_feature (644)..(644): n is a, c, g, or t
tcttggagggacgtctccaggtaataagagaaagtctccatcgatgcggaacgagaattgactagaacgtattccttctcaataccttccaacgagtcagctactggccatagaagggaaaaatgaggaattagaaggatagaaagaaaagaaaagacaatgattaaaagaaaagaaaagagcatagtgggaacattgtctagcagaagaatgcacctctgagctcagctggtgaacactggttatcaacagattttcctttgctatcacatccagtaagagccactgccccaagagcacctttgacactggatggaccctctgactccgatgcctgagctcccccacctgatctaactgatttctgagatttgcgatatatgccaaagatgtccctaacatcccgaggagatttcgtctcttaggtctcagaggcagactactcaacctgcgcttccgatgcttcagatggagaacccgatgcgtcgccctccttgtcgctctttatgctactgataatgactcaatccacttagtcctggctgctttgcctgctanactactttacttagaggaatttgacaccagtagcatcaaaagcaccaaaagccccctctcacgattttaccttcgcacaccgangnacttgtga

SEQ ID NO: 2211 - DNA, 642 bp, Gossypium hirsutum
atcccgtgtgcatctctctgaactcatggggcatctaggataaaattatcatttactctattctttatccattctatagtataattctaaccaaccaaacaatgcagtaaatttaaatatatatattccattcatgatatctctctactccaatcctgatgaataaaaaaacccaatgtttcaaatggccaaacatttacaacttataatctcatggttggtattgatatttggtagagaatagtttaccataatccctcccatacttcctacagtgctaacatcaacaactaccacgctacgcccctttcctatcagataaatgctgtttccaatagcaacaagctcacagggtggtcttgtaagtgcctaagtgggtgggaaagactccatatggccacccactccctcgtatccttcagccacatcattggccttgtttcaggactctcatctacatcataaaggttttactctgtaagaaggaaagaaaactgaaaaaatggaaaattgaatggtgaaaaattgaatggaaaattgcatttgatcaaaacgtaaattaattatttatgttaaaatttttatcaatttgtactgtttaaaattgacgtgcctgattgaataatcagaccgtgacacgtt

SEQ ID NO: 2212 - DNA, 651 bp, Gossypium hirsutum
tgtccttccatttttattgatgatcatataggaacgttcttatgatatattacaatcaattggtggaaaattagtgcacctccaaatttggggctaaatttgttttaatttagttactgccctagtttattacatggcgaggatgaattagtagtttggtgctgatttttccataggctttggggggttatacctgtagtgtgcactttttgatgaaatatctcgcgcttcttttttccagtaaataattactatgattcgttatcaagctctttattctaaggttaccgatatcttccggtgtctatatgttatcacaacacagcagtagtaagtgtctttgtgtcttatttactcattggtaatgctaaatgtatcgattcccatgttctagaatggaatctcggagcctgtaaagttcagtatatcagcattactacccattcatatctgtgatgttgtggacagtaaataacttgaagcattatgagctctgggggggaccatacttctgcactttaatttggttatgtgtttccttattgcagattccagggctagtcaatgtggattttgcagacgtgcgaactataatggcaaacgctggttcttcattaatggggatcggaactgcaactggtaatcgaagag

SEQ ID NO: 2213 - DNA, 684 bp, Gossypium hirsutum
aacatgcttattcatggacaaaatgtaagtaccgccatgcatgacgggcataaacgtcaaagccaacgtggcaacatgtctgaaccaaaaagcaactatgaatttgctggcccaccgtattccgcaaaaggtgggacaagtgcgcacgaagctgaaaatgcctttgtctggagctctgagaatatagtcaatggggaaaatgctttcagtggtaaatcggtagaattagaatgttctgggatggcaacagcaaaagaatgcacgaaaagtagaagttcatcgcagtctgtagggcccaaaatctctaaatcacctaaatcaacagtgaaagtgtctggggaacgattgcatcctgaaatggagagaaaaggacaaattcctgttgaattaagtaagttctcaatttctttcacgatatttaagccatggtttttgtagttaatatattctacaattttcatgctgaaatttctggaatgacagatgacataccggcaccaggaatcaatggagctgctaacactggcattatggagatgatgggtttaaggaagtcatcaaagcttgctaggcaggattttcctgcactctatggcaatagacataagaagataaaggtgagtcccattgcaccctgtctgttttgagttaaattatttcatggggctcttgatttgtgaatga

SEQ ID NO: 2214 - DNA, 1339 bp, Gossypium hirsutum
  misc_feature (557)..(557): n is a, c, g, or t
  misc_feature (559)..(559): n is a, c, g, or t
  misc_feature (562)..(563): n is a, c, g, or t
  misc_feature (566)..(567): n is a, c, g, or t
  misc_feature (577)..(582): n is a, c, g, or t
  misc_feature (584)..(590): n is a, c, g, or t
  misc_feature (593)..(601): n is a, c, g, or t
  misc_feature (605)..(609): n is a, c, g, or t
  misc_feature (614)..(615): n is a, c, g, or t
  misc_feature (618)..(621): n is a, c, g, or t
  misc_feature (629)..(633): n is a, c, g, or t
  misc_feature (637)..(648): n is a, c, g, or t
  misc_feature (650)..(653): n is a, c, g, or t
  misc_feature (657)..(657): n is a, c, g, or t
  misc_feature (661)..(668): n is a, c, g, or t
  misc_feature (670)..(683): n is a, c, g, or t
  misc_feature (695)..(700): n is a, c, g, or t
  misc_feature (704)..(709): n is a, c, g, or t
  misc_feature (711)..(711): n is a, c, g, or t
  misc_feature (713)..(713): n is a, c, g, or t
  misc_feature (715)..(717): n is a, c, g, or t
  misc_feature (720)..(727): n is a, c, g, or t
  misc_feature (729)..(729): n is a, c, g, or t
  misc_feature (739)..(751): n is a, c, g, or t
  misc_feature (754)..(757): n is a, c, g, or t
  misc_feature (760)..(771): n is a, c, g, or t
  misc_feature (777)..(785): n is a, c, g, or t
  misc_feature (787)..(794): n is a, c, g, or t
  misc_feature (806)..(817): n is a, c, g, or t
  misc_feature (819)..(825): n is a, c, g, or t
  misc_feature (829)..(830): n is a, c, g, or t
  misc_feature (833)..(843): n is a, c, g, or t
  misc_feature (845)..(852): n is a, c, g, or t
  misc_feature (854)..(859): n is a, c, g, or t
  misc_feature (861)..(865): n is a, c, g, or t
  misc_feature (868)..(876): n is a, c, g, or t
  misc_feature (878)..(879): n is a, c, g, or t
  misc_feature (888)..(890): n is a, c, g, or t
  misc_feature (894)..(898): n is a, c, g, or t
  misc_feature (901)..(911): n is a, c, g, or t
  misc_feature (915)..(915): n is a, c, g, or t
  misc_feature (917)..(923): n is a, c, g, or t
  misc_feature (926)..(940): n is a, c, g, or t
  misc_feature (942)..(942): n is a, c, g, or t
  misc_feature (949)..(964): n is a, c, g, or t
  misc_feature (968)..(968): n is a, c, g, or t
  misc_feature (974)..(977): n is a, c, g, or t
  misc_feature (980)..(982): n is a, c, g, or t
  misc_feature (984)..(1011): n is a, c, g, or t
  misc_feature (1013)..(1013): n is a, c, g, or t
  misc_feature (1016)..(1039): n is a, c, g, or t
  misc_feature (1044)..(1059): n is a, c, g, or t
  misc_feature (1061)..(1065): n is a, c, g, or t
  misc_feature (1068)..(1070): n is a, c, g, or t
  misc_feature (1073)..(1073): n is a, c, g, or t
  misc_feature (1080)..(1107): n is a, c, g, or t
  misc_feature (1109)..(1118): n is a, c, g, or t
  misc_feature (1122)..(1125): n is a, c, g, or t
  misc_feature (1127)..(1130): n is a, c, g, or t
  misc_feature (1133)..(1135): n is a, c, g, or t
  misc_feature (1139)..(1142): n is a, c, g, or t
  misc_feature (1146)..(1162): n is a, c, g, or t
  misc_feature (1164)..(1167): n is a, c, g, or t
  misc_feature (1171)..(1175): n is a, c, g, or t
  misc_feature (1182)..(1182): n is a, c, g, or t
  misc_feature (1185)..(1187): n is a, c, g, or t
  misc_feature (1191)..(1193): n is a, c, g, or t
  misc_feature (1195)..(1196): n is a, c, g, or t
  misc_feature (1199)..(1204): n is a, c, g, or t
  misc_feature (1208)..(1214): n is a, c, g, or t
  misc_feature (1216)..(1231): n is a, c, g, or t
  misc_feature (1234)..(1235): n is a, c, g, or t
  misc_feature (1239)..(1247): n is a, c, g, or t
  misc_feature (1252)..(1252): n is a, c, g, or t
  misc_feature (1255)..(1273): n is a, c, g, or t
  misc_feature (1275)..(1278): n is a, c, g, or t
  misc_feature (1282)..(1288): n is a, c, g, or t
  misc_feature (1293)..(1295): n is a, c, g, or t
  misc_feature (1297)..(1300): n is a, c, g, or t
  misc_feature (1302)..(1311): n is a, c, g, or t
  misc_feature (1314)..(1314): n is a, c, g, or t
  misc_feature (1320)..(1326): n is a, c, g, or t
aagtcttgctttaaatcaatcatcagaattcaaagcagtataaaaaccgatttctctgaatttttaactagctggaaaacctgaggtgaaagaactcccaaagttcattaaagtacaattatttggttttatgaaattggatttaagatagagctccagtattacaagaaatgtttaaaaacaaaaaactctaggaaccacgcaaaagctggcacccgacttaatatttaaaacagatcttacccccaggagagtggcgatgagaagaacaactccagttatccatgcaagcgttcttcgaaccaaaacttgtgcagcaagggtggtattagttggaatttttgtttctgccaaccaacgtggagatggacgagaggtaaacatcacatttatcaatggttttgatcctggctgagatgccccattaaagacaaaaactccaacaatttgacctgcccaataagcggttagagttttaaaaaaaatcaacagccagggattgagagaggggggggggggaaaaataaaaccggcctccaccccaaaaaaaaaaaagngnacnnctnnaaggagagannnnnntnnnnnnnagnnnnnnnnnctcnnnnnatagnnaannnntttgaaannnnntctnnnnnnnnnnnncnnnnatanagannnnnnnntnnnnnnnnnnnnnncattttttttannnnnnattnnnnnntntnannnctnnnnnnnntngttataatannnnnnnnnnnnnatnnnngtnnnnnnnnnnnncctatnnnnnnnnncnnnnnnnnctattttctctnnnnnnnnnnnntnnnnnnncagnnttnnnnnnnnnnncnnnnnnnncnnnnnntnnnnnttnnnnnnnnntnncccttatcnnntttnnnnntcnnnnnnnnnnntttnannnnnnntcnnnnnnnnnnnnnnntnactactnnnnnnnnnnnnnnnnatcnaaaacnnnnttnnngnnnnnnnnnnnnnnnnnnnnnnnnnnnntnacnnnnnnnnnnnnnnnnnnnnnnnnccatnnnnnnnnnnnnnnnncnnnnngcnnnacntaccatnnnnnnnnnnnnnnnnnnnnnnnnnnnnannnnnnnnnncttnnnnannnntcnnntaannnntctnnnnnnnnnnnnnnnnncnnnnttcnnnnntctatcnttnnntccnnnanntannnnnntatnnnnnnntnnnnnnnnnnnnnnnnttnnttcnnnnnnnnnactcntcnnnnnnnnnnnnnnnnnnntnnnncttnnnnnnncttcnnnannnncnnnnnnnnnntcncctctnnnnnnnttcacgccatcat

SEQ ID NO: 2215 - DNA, 590 bp, Gossypium hirsutum
  misc_feature (26)..(27): n is a, c, g, or t
  misc_feature (574)..(577): n is a, c, g, or t
ttgaactttttaggtattgacattcnngtgaaaaaaaattagatttctgatgtttgaatatcttttatagggcccaccactagctgcaagatatgatatgggtgccatatgcttgcaagagcattctgacaagcttcaacaccttgtagatgatgctgtagacaaaggagctgaaattgtagctcgtggaagtttcggccatttaagtgaaggcgcagttgatcaatttttcccccctacagtgctcaaaaatgtaaaccatacaatgaagttgatgcaagaagaggtaacacaagtcataatattctgctacaaactatagcatttggcatttgtttcattttgagtgtccattgcagaacagatagcatgctgttcgttatggaagatataattttggcttattagacttttggtgccaaactttatttgcacttattcctccaaaaaaaaaaaaaaaaaaagggcccaaaaaattttttttgggggggatttttttttttttttttaaaaaattgggggggggggaaatttttccaccccccccccccaaaaaaaaatttcaaaaaaaaannnnggggggtaaaaaa

SEQ ID NO: 2216 - DNA, 626 bp, Gossypium hirsutum
ttaagataaagttatgattggttaactgttataatatggatggaagacatctaatttcccagtgcatgttccctgcaaatttcttttgatatgtcactgtagtttgggctgcatactggatatattaaattttatgcactgctcaaacctattcaagagtatctggtgtagcatgtcagataacaaagttttgggggccgttcagcgcatctttataagattgttttcttatttttgaacttctaaatattcatttaattgctgaaatatataaaacaatttgaaaatggaagaaagcaagagctgcttttcttatcctcttcatatacttctgggatatcactagatttagaaagatatgtttccctctcttttgactttgttgttcatttggaatatttgtgcattatactcatgcactttatcttgccagtacttcagatgggtcacctcaagatggaaataatttggacggcatcattgcaacagtaaaagatcttgaaatcaccccagagaggattagggaatttcttcctaaagtggactggaaccagttagcttccttttatgttaagggtcgttctggggcagaatgtgaaactcggtaaacatcttcctgctgggta

SEQ ID NO: 2217 - DNA, 634 bp, Gossypium hirsutum
  misc_feature (586)..(586): n is a, c, g, or t
  misc_feature (613)..(615): n is a, c, g, or t
actcacataccccacgtccaattgccattctgtgttttactttatcacctacttcctgcctgctgaaatatgcattacttactttcacagcaaactttcacttttttgttccgtggtttcaatacctttttttgcgaatatattcattcatatgttaaaaccattttggctgtgaaggaaggagaaagacaggagggcagccaaagggactgttagaactgctactcaggctcagcctgtgttagggggctttatgattttgtcctttcttgcttctctaaaccaacaaaaagaggcatttaaaaaacaaaggccatcacatcatctgttttgtttttgttttcggttagatccaatagtcaaggaccaatgacaaagacattgcatttgggtcagtaaagatgtctgtgggagggggggggttcctatcttttcaactgtgtgtaacaataaagaaagtctgttctgtttttctggtttacagaccagttaaaagggttttccttttttctttttcagatgattgaaaacaacctattttgtttggttaggcaaaattctcaactttggtgctgtcaaccccagnaagaaaagaaaaatatcggtgctattnnnaaagcccttaatatgcaat

SEQ ID NO: 2218 - DNA, 591 bp, Gossypium hirsutum
  misc_feature (412)..(412): n is a, c, g, or t
gtagaaactaattgagatcagaactttttgttcaaatgagacaaatgtagagtccaaattttccatatataaactaataaagtgagcacaggagaggaaattaaatatagaaaatgtagaaccttgagaaactctgctggtagtccggctagctcattctcatggaacaaaacagaagtgctatcatcattcaaattctgaacatattgaaagctgagctcatcaatttgagctgtcaagcgttgcacttcttctctttttgttgctgtaagattcaatccattccgttcaaattctttcatctgtcactggtcagaaaggagtcaacactatgactgaacaactaaacttgtattcaaaacaatgaaacatttgtgctcttgagcatggtacattacaatatataacctcntctggccgttctttcagtataaaacttactttaccattttactttgtagccaacagtatttgaaaatcccatgtcataagatgggtaacaaacatgagaaagcggaaatatttcccttaccaagcaatgaacatagtgtcttgcttctgggcccatccactcccctttgcagcaaaagc

SEQ ID NO: 2219 - DNA, 624 bp, Gossypium hirsutum
cattgaggtggacacccgaatcactgttaaatctacggtaagagaatctttgggctcttctccaagtatctgttttcaatgagtagacatagacaatggattcatacatgattttgacaacattgtaatcatcaaaagagtgatcataaccgaaaccatatatcgggggtcgagagacacgatcgtctaaggaccggttgatgtcgatgtataagttgggtattcttttcactttctgctcccttgtagcagggttgaacagaacaagtttttccggttcgagagatatgcataagaggccattaaaggagccaatgaacttgactttgtcaaatgaacttatcaatggaaaatggagcttcaccgccatgacatcgttagatgtcatagcatcacactgcacatgatacagagacggtgttgagctcgagcggagaatgagcttctgcctctggtgctcaatgtctttatctatgattgctaaattgagatgccttttgatgaatgtgggatcagagataagcaaacaccagagcttgcaaacacatttgaaccgacaaatagacttaactggcaatctcatgagtatttcaacgatgatatccgaagaaagtttgctctgca

SEQ ID NO: 2220 - DNA, 703 bp, Gossypium hirsutum
  misc_feature (653)..(654): n is a, c, g, or t
  misc_feature (656)..(659): n is a, c, g, or t
  misc_feature (666)..(669): n is a, c, g, or t
  misc_feature (671)..(673): n is a, c, g, or t
  misc_feature (675)..(679): n is a, c, g, or t
  misc_feature (681)..(681): n is a, c, g, or t
  misc_feature (686)..(686): n is a, c, g, or t
  misc_feature (688)..(689): n is a, c, g, or t
  misc_feature (692)..(696): n is a, c, g, or t
  misc_feature (698)..(698): n is a, c, g, or t
gtgattattgttgcatgactggtatgctactattaagaactgaatctctcagcaatctctttcgatatggaaaaatacggttggatgagttgctttgcttgctagttgtgtaagtaggatctaaatacttgatgaactcatcttgggggtctctctatgtccatcccaccatttcttaggcttaggtggtaatcatagggagccttaagaagcttgctctttgatgtgcttaattgaaatagtatggttaagaagaacatggagagatgatttagttttgtgttgtattgatatgtaaaaataagtggcattaaagaacatagaaagttgataataacatccttatgaacaggtgaatgttgaagatgtgtcggtataggaatatggttgtgatgtagcggagaaattggtggagtttgtttgtgttgcagcttgcaagatggaaaatggtaatatgcttatggtgtatgtctgttagatagagatgttttgagatagagatatatgtttatggaaagaaaaaaaaagagtaataaaagttccataattaatgtatcaaggaccaaaaaagaaagaaggaaaatttagagatagatacagttactgctagatagatggtccctccacaattgtaagtaaagcaactcatccanncnnnnttttccnnnncnnnannnnntnctggngnnttnnnnntnttata

SEQ ID NO: 2221 - DNA, 615 bp, Gossypium hirsutum
gaggaggatctaaacccattttgactttacgcactgtccaaaacagaaagaagatatatttgtaggcttaaacacgaaatattattacaatttgatgaactttttttccggaaacaggacagtaccttgaactttcattttgccaatgaacctctttgatttaggagcagctgcttcactaactaactcagaagattgttttgccaatagctcttcttctggctgcaataggacctgccgtagactagaaaattaaatgtggtagtcagagataggtaactcaaaacataaagggaagaactaacaagcccggaatatattaacaataagaaagtatcatgtaaacggaccgcatatccaaatataaacaagaaagcttgaatcttacatgcacgatgcacaaaggcaggcaggcatgaacaatgcaaccattgcaagcaaaagccaggaacactgggtgtttattctaagtgagctggttaaaatgcaataaatctcattgcaagtatttatgttctaaaatggttctttattaaatgaaattaagaattcaacgcaggccatagcatcaactactatatatttcataaccaaccgtgacttataatctgttcg

SEQ ID NO: 2222 - DNA, 640 bp, Gossypium hirsutum
actggagggtgaacttccctccatatctatgtactcttcatctgcatcatggttgaatgtagcttggcttgtggccatgtttttattttttctcttgaagatgtctagcttattggaatggtgagcttggtgaggaaagaaaggaccaaggagcatcctttaaagtaaggatggagccaagttaaaacaaataaaatcacaaggatttgtcaggtcttttccatttttccccccacactttttctcccttgtatactagtatcttgaatggttccaaacaaataaaatggctgaaaaaacaatctttttcaatttatcccttccaattctacatcaaaaattttttatgtggctcacatacagtatagccttacattactacttgagtattattatatatatgtatttatatgtatattactatatcatcatttacctcatgcccttctcaaaaggtgaattatagccatttgtcttcttatcttctcaatgatatttattatcattcctttttttgtttctcttttgaatgtgtcctgtatccatagccaatgaacttctgagacactgacacattcaactaataagcttaaggtttagcttagaacaatctgattaaatccctacaatgcccaaggac

SEQ ID NO: 2223 - DNA, 605 bp, Gossypium hirsutum
tcagtgctgattctggtgttagttcctctggattatctaatagagtgacccctaatcagttggaccatcttccttcgactgccattagaacttctgtcaataaagggagtcgtggtgccaatgtagttgatagcctgagaatgaacattaatgtagtgccatatgggcagagtagtcaagaggacccaaaagatccttttgcagatcttaatccattccagagaaaagggactagcaaaacttcccagcaaatcaaacctacagagaccaaagttgacgagtttcagaggctgagaaataatgtagctgtggcgcgacccccagtaccattgatgtggaagaaccgacccgtatataatgaggttcctcagaaaaaggagtacaattatatggagggcctctttccaaaaatcagtcgcaaacctaatgattttagtcagtcatcatcagcttccactagctctactaaaccggaaaaggtctactctcacggttttaactcccctgggcgctttgatatgttgaatagagagaataaaatccagaattctttgtctggtactagctcatctgtggcatccactaccagtcagtttaatagttca

SEQ ID NO: 2224 - DNA, 646 bp, Gossypium hirsutum
  misc_feature (640)..(641): n is a, c, g, or t
tctcacagggacaatcccaaaagacataggaaacctagttaatcttcaaatgttggtagcatatagaaacaatttgaaaggtccaatacctgtatccattggcatgttgggagcgttgcaatctttagacctaagtgaaaaccgtctgtctggagtaatacctcctgaaatagggaacttgtcaagtttagaatatcttcagctgtttaataattcactcacgggagaaattccatctcaactaggtcgttgtaggtcacttcttgcccttgaactctacaccaacaagttcataggagccattcctcacgagcttggaaatctggttcagttacagactttaagattgtatggaaacaagttgaattccacaattcctccttccttattccaattgaaatcattaacccatttaggactctcagagaatgagttgattggaactgtatcggatgaggttggatctttgacctcgttacaagtactgaccctgcattccaataagctcaagggggagattccttcatcaataaccaacttgacaaatttgacatatttgtcaatgagctacaattccctgacaggaagacttccacaaaatcttggattgctttacaatctaaagaacttgagcctgganntcaat

SEQ ID NO: 2225 - DNA, 517 bp, Gossypium hirsutum
aggttgttctgttggattggtgggacaaatgcctgctattgatgttctaagtcagtcattacttttgtttagatgatattaaatgaaaagtctaaatatgtagatccaattatgctgcattgttgccaatgcccgaaggttttgaggccctgaagaagccaaaaccaaggatatggctaaccctattttagaagctggcaggtctggcaaaatgctggcctgttatggcaaatcgaattattatggttactaccatttattagtatgaaattataaatgggtagatggtaggaaaccacctcgattttgagaagttttgttttcttagttacgtctaatttggaatatcgcatcacctcctcgacaatgcttgctccaatacatacccctacattagttcatctataaaaaggccagtaggccacaaccaaataaccacacggtttaggtgtttcagaaatgggtgtcaaaccagtagccagtgcagtgggccaaatggtcagcaagctaggaactg

SEQ ID NO: 2226 - DNA, 639 bp, Gossypium hirsutum
tataaatatcaagcaagcattggaggtaaaccttgccatcatttctgtttcaaatacaaataactagcaaagtttagtccataggtccttatattaatggccagttcaaataaactcatgctcaaatgtcaacaataactgcactcataagtcactgtataccatttggacaactcactttaaatgaacattaagcaaagtagccaatttaaattcacttaacaacattgagaaaaataagtctggttaaaagtaatggagccaggagagaagagaaaaacctgttcagcaacactagctgcctcagcataagcatcttggatgttctcagcaagcctatgaagaaatatattggatattcctccagcagcaacaatgaatggaccagtagctagtgttatgagaacaatctcccaacagttgataaaaccaataattagaccactgaaaaatgtagccatgttatgaatgtaattcccaacctgtatcatcataggaatattaggattggagcagacatctatgaggaaatcccaccaaagaataagtcactaattaaaaaaagtagggaaacccacatgtgactgaacatactttttcactaagagcagactggatgagcagacatccatcaatact

SEQ ID NO: 2227 - DNA, 581 bp, Gossypium hirsutum
ttctcttttctcttttcttgtcccccattaattccttgcaacttaagaaaagaaaattacttttggaagtcactgtcattttcaatcacccaccacccataaatggaaaaacgaaaaccaaaagagcaaagtcccggagagagggggatagaaataacagggagacaaactgacagaaagggtgtttgaaagacaagattcatcgaatctcaaaagaaagccatggatcaaaggtggcccagctccactaccgactcactgtttcttcctctctgcttacatctcttcttattaaattttttttggttttaggaatcgtttttacctctgtttcttgcctttggaaaatacacccttttttttttctcctctaaacttgatttagactatatttcagctgaaccctgtattatagattatggcatttgatcaaaattcaatacaagaagatcttagaccattgaatgtagctagaattgtaactgaagagccccaaattgcggatgcggtggctgccactaataatacccgcggtacaaccattgacgggttcttcccaactcgcctcgggagctgagact

SEQ ID NO: 2228 - DNA, 642 bp, Gossypium hirsutum
  misc_feature (636)..(636): n is a, c, g, or t
cacccctccctcggcctcacttgtagtcctagcactgtcatctagcccacgcccagctccttttggttgccttccaccaggaccatcttctcgagccctgcctctcccacggcctacaccaggaggcttcctatctgaaaaggtaaaaaaataatcaaaaaacccgggtaaaaaaagtacccctgtcagatgcataccaatatccagcactcccacgagttcaaataacatacgaatataatacggttgctatgcaaaatactctgtaccccaaaaaattgaataccaagataattatccatcccatccagtagttagcaagagaattataaatcatacctgcacgactctttgtttcttcctgaactttatcaattacctgaaattcaaatgggaaagttactaaaatcaatggaatggctaaaggataataaaatggttagaggagggcacaacaaaactacaacaaaaccaagcagcaatttacatgaaacctttaaaacccaaagctgatccaagaaacaaaaactaaattttggattttacaaatccaatttagccacttgttggaatagaaaatcaaattaccaatttacttccaaataaagaaaaacaattttttaaccccacaaaaanaaaaaa

SEQ ID NO: 2229 - DNA, 593 bp, Gossypium hirsutum
gtaggagtaaactttatgtagtccccgagccgccttttgcaaaagaaggatctcagaacgggtctgatggatcaactgctaatcaatccacaactaatgtaccgaaagaagagatatgtacatcaacgtctcaaactagcagtgatcagagaggatttcatggtaagaaacacgaagattcttgtcaaaaccgttctcaaagtgaacgcggtactccagtaacgaatggaacaatagatgtaaccgaggagcaagcagaattacctgaaacaacagtttggattcgctgtgatgtatatgatactggaattggaatacctggtacatgaatatgctcgtctttaatcatttgcattatcacaaaaaaccagaggttttgttagaacttgatacattctcctgtgtctgtgacagaaaatgctttgcccacactctttaagaagtacatgcaagtcagtgccgatcatgcccgaaagtatggtgggacaggactgggcctcgcaatatgtaaacagctggtgaattcttccttccatcaacaataatgtttttcctccgccactgatgatactgtttgccttctttctgcttgc

SEQ ID NO: 2230 - DNA, 601 bp, Gossypium hirsutum
gagatacaaagctccatcatatcatgcattgtgaaccaatctactagaatactcaaaaagggatttacagtatttgagtggaatgtggaagcaccataatgggaggtgggtagaaagatacaagacaaaagtcatcaaccaattttctattgtattttcctaaaagattatgctttagcaaacccgttaacgcatcaaacatgattttagatgtcgatactctttgcaatttatttgcgaagattgtaaaaattgttggtttgagcaatgtggtctagttaattacatataatgctgcaacttataaagctgttaggaaattttttttaatgaaaagtatcctaacatcttttggtcaccatgtacaacatcttgtgtcaatttaattttgaatgatgttggtaaaacatctcatgttaagagtttagtttagcatgcttcttctattacaatttttgtgtataatcacaaatgaactttgggttgattgtcgtcctagtgagaaacgttttgctattatacttttattactttgaagaatttgcatgattataagggtcatttgcaagccatgatcactttcaagaagttgattgcttaa

SEQ ID NO: 2231 - DNA, 667 bp, Gossypium hirsutum
ttttaaatgaacgtttactgcaagttggatatggcgaattttatttatatatatgaaatgaaaatcagtcaagccaacagatttgggtggctagattagacccaaacttccatttattatctatccaccattccacttgccaaatattcttcctgattatgtcagtccaatacatacatatatttatataccaattttagcatgtaatttcacatgtcaaaataccaagtattttaatgaacaaaacatttgctacctttctcaaaaaatttaattgctatggacattagagcacatttcagcacctaaagttcaattatagttttagaactattgaaaaaggaaatcaggtcggctggcctacctatcatataccagatttacacactgaacaatattattctgttgcaacgatgtctcacgactgttattccgggggttaatctttggactgcataatttgctatttttcattgaacaaaattattgtattcgaacaactagtctttgtttgtctgaatttcataatattgcgatacatatattacaagacaattcaatctatacagaaatgataatttctagaacaacaaagtaggcagagttgaagaaactacattatcatatgctattatagcaggcatggaacaaacaactctcaccttcc

SEQ ID NO: 2232 - DNA, 578 bp, Gossypium hirsutum
tggagagaggaatttgttattacttactggttggcttgattggtttctgttcttgttaatgtttcagataataagatcaataaaagatcatggagggagaaacttgggaaatgtgatttcacattagcctctttacttctactaaataatcaaagttcctctggatatgagagacatctttctttgggatgcctccttaatccacatgaaattattacctcagtgcagaagtttgctagctggatagtatggggaaatactggggacgtttcttcttccttcttgaggcgctcaactgaattagcaattgtccttcttaggaatggccaatatgatgccgttgaggtttgtcattcatttctcacgattgtgactttttacattaaaatatatagtatctgagagtttatctaaaattcatatcctgccttgttttttgggggccaaaatttttaccctgtcaaagtacctacttgctatttttgaggccaatgcaagaagggagaggatattcagaagtattcaagatactagtggtgattggtgcttacttcaacatctccttggatgctgtcttg

SEQ ID NO: 2233 - DNA, 632 bp, Gossypium hirsutum
caatttgttgcaaatttagtgtgacatgccacatcatgtacagttgttaagcttatgatctaccacccggaatttgtctagaacgagaagttgtcaaatttcaaatgatgcaaaagatagataagggcaacaatatctagaacagtactatataacaaatttatgataataataaaaacaactaatgatgataataaggtggttactcacttcatccctaaataatgaggttaggatttcaattttcgttcataaaaataagacattttataattagttgtttaccttttcaaaaagcacctgcaacaagagaatattgattgatataatatatgtaacagaaactaattgagaaagtggtgatataattgtttatttatgattaagttgttgctaaaatatcacaggaaggtcggtttatttagacctcattgaatattgttgagagagaaaggaggtaggagaaaaaagccgaggttcatggtggaatatgctaagagttgctaaaggtggaacttataacaccttatacttgatccaaaagttggtaggatgcacaaggctgcattggttactagagtaaccttatacaaaactgaaataattgaatccacatgcataccacatatcta

SEQ ID NO: 2234 - DNA, 640 bp, Gossypium hirsutum
acttgctgtgcatttttcttagtcatttaaatgaataaactcatttaacaatcttgtgcttttccatgacagaaataagaatattatttatcttttgtaattaaattatctttgaaaggctgtatgagaatatgtatgtaagcaaactctaattgcactggtattccattttcatttttgtgaaaacatgtttatttttctagtcaaatgcctagatgatggttcttgtctttagatttcaaggttggaacttatttcttttcttcttccaaatatttttaggaagatctatactatccacatcctctggttcaggatattctttgggcatctctccactatttatatgagcctatgcttaaatactggccttgtaaaagcttgagggagaaagctttacagattgtcatgcagcatatacactatgaagatgagaatacccggtatatatgcatagggcctgtgaataaggtaagcctggagaatgattggacatgatcttagattttgatatagaagagagcatgtagttgttatttcgcttaagcaatcaatgaaggggagggaatctgtaaacgttcatatcactttactaagattaggttgcttcttcagtatggcaaagctctggagtgatgct

SEQ ID NO: 2235 - DNA, 626 bp, Gossypium hirsutum
aatttgcaggtagagtgagaatatatattaagattgtaggcaagaaagtgaaaggatttaagaattgcattgtgaggaatcccgaatcccttttgctgcttgctgtttcttgtttcctagggtttctagtatacatttgcttcgaagcgatttgttccttgttttggttcgctacctgttttagaaatccaaagaaactctacatttctttcatttatgaactccttcttataagcccttcaattgattatatccctaatctctaaacaagtggaattcatatgggaataaacataggataaagaacctttcaagcatctaaaaaaacctgcattttcctgcaatgcccttgatcctatatctatttgaaaataaataaataaatggagggaaaaagaaaaaactgatcttgttagacataccgagtaatctgcaggttgattgtgtgaagtttgttaggaattaaaatcaaacccttcattgtccatttcaattatgctatatccagcttccttaagcatcttatcctcctttccaactgacctacccccagccctttagagcatccctttttcttttgcctgcttcttggtttgacccggcaccctgccagaaacagcatatat

SEQ ID NO: 2236 - DNA, 241 bp, Gossypium hirsutum
gttgggctttatgttcctccaacatgagcttcatcatctccataatttgattcatccagatgcttggatctcccatagaacttggctctgaggccaaattgttatgatcacaggtttgagatcaagttactgggcgataaacaagaaaatcagattcaacgaaagtgtctttgcccttgtttcgattccaagttttgcctatggcgatggaactccaagggagttgcctaccttggaactc

SEQ ID NO: 2237 - DNA, 623 bp, Gossypium hirsutum
gctgcaaagaaacttgctgaaaagaaagaaaatgatcgcaagatgaaaaaggaggcactgaaacttgaacgagtgaggttggagcaagaaaacttgaggcagttggagcttgagaagaaaaagaaagaagaacgaaagaaaaaagaggctgatatggctgctaagaaacgactgagggaagaagaagaaagattggagaaagagagaaaaagaaagcgtattgaagaagcacggaggcagcgatgtgctcctgaagacaatttatgttcaaagaaagatggcaaagaaaagaagtgccaagccccggtaaacttccttatgctgtatagaagggtttttttaaggaccttctttctgcaaaatggcattaattgcgaacttctgctgtaggatgagagagcacaaacaataaaggttcctaatggtgaagcattgaagcttgagaaaatgcaaagagtaggcacaaatgaaggaaaaatgtcagccacggaaattagcactgctgtttcttcaactactgatgctgtaaaaacaagcacggccagtgaagattttcatgcaaaggtaaaattcatttagcagattcagatatttaattttggaaatcgtctacccttagcata

SEQ ID NO: 2238 - DNA, 647 bp, Gossypium hirsutum
gtcttaatagaatcagataaaaaaagaggataaaattattccatctttcactattttttctacatctttagcagacataagaatgaaaaaatggacatttacaagcatcaaatcaaagggacaataacatactggaacacctgctgcctctcccattgttcgcatgtgatttctgatctcaagcataacctcccttgcctttagcaatactttgacaacttctgctttgatcggctcagtcactccctccatccactgtccaagcaattggttttggagacatcataaaaatcagcaatttggaaggaaagatagcacaaaataaaccgacaagactcgggaaattaaccaaacaacctcaccaactttcttaacaattatgataaagagagccttctttgattattgatccaaccatctaccaaatatacaagccaagaaattgaaaccaaaatttgagccgtgcgataaaacaagtaagctattcttttacagcttaatagatctttgcagaccatagtgttgtgtagtattgccaacattgactatagcttgacatgcttggaaggaaaatatcactaatttgaaaagaagctggcctggaactcaggatattgcatacaagggtaggaaggagaaatatccgg

SEQ ID NO: 2239 - DNA, 574 bp, Gossypium hirsutum
  misc_feature (528)..(530): n is a, c, g, or t
  misc_feature (532)..(532): n is a, c, g, or t
  misc_feature (534)..(539): n is a, c, g, or t
  misc_feature (550)..(551): n is a, c, g, or t
aaataatctgggcagaacctcaacagttgtctctgaaagcgcaaatagagagtgtgttagaaaatcaagaatttgacatttactctctcttcatgtgtaaatttgtgcaacctgggacatgttatattaaaaccttttccccacatagtcacaagttgtattcttcatcaaagaagacaaatgaaattctacttagatttcagctgcttagaaattaaagatagatatttgattgcttcagtatgaaccacttatttcattgaaagccaaactcctcattaaaaagagataaacttttgcaccatggatgaaaataacatattctacaagctttataacattcagtttcctgttggaagcaacttcaaggagtcaaagaaaatagacttctaacttaccatccctgaacattttactttgaataatactaccggaccactccttccttttatattcctaaaaattttaccttagggggaaaaaaaaattaaagaaacaaaacaacattggcttacctaccactgaatnnnantnnnnnnacctttcctgnnaattccagtggcatccaaataaa

SEQ ID NO: 2240 - DNA, 579 bp, Gossypium hirsutum
cttcttcgagactagtgtttcccttctctgcaatctaaatcacatttctttttataatttcaccataatggttacccaataatcccatattcacatatgaatacacactagtcaagcccatcaagtcagaaactaacccatgatcttcctgttgccaccagagtttccagcaactttgtgtcttcaaatccaaatttttttttgttaaacctcaatcaaatcaaatctaattcaaccattatggcattatccctaaataaaccccaataatgcccaatttctactcataactgaccataaaatccaagtagtttaacatttccccaaatccctcctgcataagttggaatcatatcttctcatcgctctttataacaacgaacattcatcaatatctaaatgttaataaaaaacatggggcctattctcgagatcttgaagcaagaaggatgtcaaaaggctataagaagaagaaacctaaccagtagtacgctttttaatggtcaaatacggcaattagaccctgcactttgcgtaagttgtagatttagtacctatactttagtttggtcactttca

SEQ ID NO: 2241 - DNA, 610 bp, Gossypium hirsutum
  misc_feature (437)..(437): n is a, c, g, or t
  misc_feature (573)..(573): n is a, c, g, or t
  misc_feature (595)..(595): n is a, c, g, or t
  misc_feature (598)..(599): n is a, c, g, or t
  misc_feature (601)..(601): n is a, c, g, or t
ctgcagctgttgagctaatgaaaggccatttgcttcttgttgtggtgccgccatgccagtggcagaaagccgttcagcaacgggaattggggtgacaactccaacagaagcttgagcaactctgtttcccatttgactatgctgtgaaaaagggttcctgactgcctccggtctccatccactctgcaaattaaacatatacattaagatcaaatttaaaaaacaatgataatttgcctacttatatcatgctcatgtaaaaaaaagaaggcctaaaaaccccaaatccccggaaggaaaatccggaatggaacaatgaaaaagaaggggaaaaaaaatattggttaaggccaggccaacaaaatgaaaggcccccgaatttttcccaaacaacccataaaaattaaaccccctgggccggaaaaaaccggtccatnacatccggccccgcctcctaatcggaaggccggtgaaaaaaatccttcaagaattaaaataaaccattccctcctccccctggggaaaaccttaaaataaaatgggtcccttttttcaatttaaattcccccaaanttataactttacaacaaatttnctnnanattattttt

SEQ ID NO: 2242 - DNA, 581 bp, Gossypium hirsutum
tttattctgttcataaattggggttaggcttgtaaaaagccattgtcatatgataagtacttacgtgtactgatctgtttatgtggcttctgtggctagttttaagaaaataagtgaattacaaatagaaaagagtgtattggggaagagggacaagaagagggagtaggcatccatgaactggtaaatcaataggtaatagttttcattagttgattatctatatttaatcaggtttataaattaaaggtttgatatggaataaaatgaagcttatcgaaggattaaactattttttttctttttttgttaaattgttatatttctatcatcaaaattttagtatttatttagtgcttcagatttatattaagatatacggtgtaacctaaaagtatgtattttgttccaagttttaatagttttgaattttgtgtattgagattttgagtaaagagtttggagatttccttctcccttggttctaccagttcctttgccgaatttttaggtctgtctcctaaattcctctttgtcttccctatctcttttatttccccggtatttattgtttcattctc

SEQ ID NO: 2243 - DNA, 625 bp, Gossypium hirsutum
ttaaaagcacgtcgggcatgtaagcctttattctgttcataaattggggttaggcttgtaaaaagccattgtcatatgataagtacttacgtgtactgatctgtttatgtggcttctgtggctagttttaagaaaataagtgaattacaaatagaaaagagtgtattggggaagagggacaagaagagggagtaggcatccatgaactggtaaatcaataggtaatagttttcattagttgattatctatatttaatcaggtttataaattaaaggtttgatatggaataaaatgaagcttatcgaaggattaaactattttttttctttttttgttaaattgttatatttctatcatcaaaattttagtatttatttagtgcttcagatttatattaagatatacggtgtaacctaaaagtatgtattttgttccaagttttaatagttttgaattttgtgtattgagattttgagtaaagagtttggagatttccttctcccttggttctaccagttcctttgccgaatttttaggtctgtctcctaaattcctctttgtcttccctatctcttttatttccccggtatttattgtttcattctccctacccttgttttaaat

SEQ ID NO: 2244 - DNA, 591 bp, Gossypium hirsutum
  misc_feature (579)..(582): n is a, c, g, or t
gctcttaaagtcatcacaggcttgcaaaaaaaggaaaatcgacctgtccgacatgggaccagcgatcacaaaaggacagattttagcaagatcaatgaagctgtgcacatcaacttgcaaaacatgtttcattttaccttcaggatgtttactgggtggaagaatatccaccatctctccccaaagttgtaattacgttataatattaatatcatactaaaatttggttcataggttttaatatcaaactacaatgcatgatttccactcactcaatccgacgttacatcattcaaacaaaggacaattatttacctaaaaaatcctctcagctagaattttcaacaatgaatcgtttgattattaccatcaatgctttggccggttcagagttaggatcaatagtgaagaacccatgttgttgtccttcaaattcaacgtactcgatcttcttcccccaattcttcaatctctcagcatattcctttcctcggtctttcaacagatcgcttccaccaaccaccaccagaatagggtctagattcacctgttccagacggcggctgacgggcccgaaannnntatcagcga

SEQ ID NO: 2245 - DNA, 639 bp, Gossypium hirsutum
ctatcgagtgtctccaaactaatgtttgtctgatatttttcctcactatgtgaacatttttgcctcactctttcactcatatcctacaagttttggaccactgcaagcaaagaaataatatgacaaaatcacaggttcactcaataagaactccaaattctcaagggaaaaaaattcataagcttgaacacaagtaatctttcaattgaaaaaacaatgaaagaatttcaataaacaggcttcattcttttcccaaatattacagacccagcaaaggaaaacctcaaatttcaagtactcattttcccaggaactataaaataaacactgaaacatgacgatcaatcttgaatttcagtaaacagataaaatatctgatcaaacaagcttcatttttcccacctcaaaactacagaaccccattaaaaagaagtcctcaaatttaatcaacatttagtaaaacaagcatcattccgtcaattcccacagacccggaaagtcgattctccaaaaattcaaccccagcgcagaaaagagaaagaaagaaaaattcaaagtttagcataaagaatcaatgaatatacctttgagatagcagaaattggtgaaaaggaaaattctgtgaaactgaggaggagc

SEQ ID NO: 2246 - DNA, 632 bp, Gossypium hirsutum
catcagctgctgcccttgccccaagctactgcatctcaaaaccaccacccaagctaccgttgttcaccctacagccctaacccaatgccacaaaaatttgttgcaccttgtttctttgcatttttgtcaattaattacaaaggtggtaagagcttgtttttcccaaaaaatcttaattaaattttatttgtttaacttttcaattgtgcatgaattgtgaatatcaaattatttcaaactaaatttttgggaaattattactttgagttgtcatcttatgtcaagtttcaagttgttaatatgacgtggaaaagaacaagttccacagtccaaattgcaaaattgctccaaataagaaaaggcaagatacgagaacatcttcaagaaacaacaaatgctttcggaaaaaggatttaatttgggagaaagtaatcacacgaacttcatggcgagcattcaaaaaattgctgaagcattaaattgggaagtgttttgtgatgagaaaccgaccctagatcctgatttagtttgagaattctatgcaaatttgacctcatctactgcaacagaagtaattgtccgagaagttaaggtacattttaattcaaaagttattaatgatttctgtgact

SEQ ID NO: 2247 - DNA, 621 bp, Gossypium hirsutum
ggaaaaaagggtgaactacaaaaaatgccacccaattatgccttttgttatattttgtttatctaactattaattttttcaatttagtcactaaatttttcaaaatattttagttactctctcgtagacctatccattggccaagtcatcgaaaagtgagagagtttatgcaaaaacatgggtccaaaaaatggacttggacaaaaaaataaggttcatttagaaaaagagattgagcctcgggtaaggcttttttggcccaagctcggcccggatttgcaaaaaaaattgatgttttcccactattttgttgttgttttctcactgttttactgtcatttcactattatgtttctattattttattattattgtttggatattgtataactcttaattatttaaatataaagattttttttaagtatgtttcaatttattgggaaatatttatgttaatgtttttagtgtattatttgcattttttttaaaaaatgtatataaaaaataatataaaaaatttaatacgggctaggctagacccaaattttaacatttttattccggctgggcttgggcaaaaatttaagcccatttttcaactcttgcttatcaaacggg

SEQ ID NO: 2248 - DNA, 620 bp, Gossypium hirsutum
cgtatcacattggtaacgatgatagcagatggttcatttgcagtagtagtcggttgaactacacacatgcaacgagagagaagtgtcgctagaagttttatcccaccatctctaacaagttcttcaccattcaatgaggaagatgcacacctaacattaaaataaaaaacatgcaaagggatgaaatctctaagtcaaatttaactactaaaaccaaagttacataagtatgtatttgtaagaagaggatctacgtaagccaaacaagctctgatgccgtgacaagaagaggtgctctctcagaggaaagaaaattgttatcttctttgtcaacagttactgcactgagcaacatgggataaccagcatatttaaatggtaccagtacatctccatatcgtctgtacaagatgcattgtcctttcaacaaaagcaacaacctccaaggctggggaccttgcaaaccttgcatagtggcctatataaagagaaaagatatggtaactcattttggaaatcaaagagtgtttgaggataaattattcaaatttatttcatgcaagttagtacgcactgatctcaagaccaaacatctacctgaattcgttcataagccctct

SEQ ID NO: 2249 - DNA, 678 bp, Gossypium hirsutum
  misc_feature (546)..(563): n is a, c, g, or t
  misc_feature (565)..(570): n is a, c, g, or t
  misc_feature (572)..(579): n is a, c, g, or t
  misc_feature (582)..(586): n is a, c, g, or t
  misc_feature (589)..(592): n is a, c, g, or t
  misc_feature (596)..(601): n is a, c, g, or t
  misc_feature (603)..(604): n is a, c, g, or t
  misc_feature (607)..(613): n is a, c, g, or t
  misc_feature (615)..(617): n is a, c, g, or t
  misc_feature (620)..(626): n is a, c, g, or t
  misc_feature (629)..(640): n is a, c, g, or t
  misc_feature (642)..(642): n is a, c, g, or t
  misc_feature (645)..(648): n is a, c, g, or t
  misc_feature (650)..(650): n is a, c, g, or t
  misc_feature (655)..(674): n is a, c, g, or t
tcaaaggaagattaagcataccaccatatttctggttcattaagaaaacaataatttacatgaaccacttcacagcaagtccaaaaaaatgcaaatttaataagaaaataaagaagaaattgaaaaaagaatgcctgtcagaccagcatcatccaagaaaaacaaacactatggttagtgcagtgataagccatcaaagacaaaacacacaagcacttacatctgaaaatgactttaaaaagttagaacggttgcttttcggggatggggtcaatgctttttgtcgtagaacatgattttcatcttctaaatgtgagagcttctcctccaaacttaaaaaaaaccaccaaacaaaatgaatcaggaagtaaaattaattaagtgtgcaaaccaaattaatatattcacttcagatggcaagacaaccaaataaacagtactcatagcagacatgcatgcattaagtctaaaagtaatataatagtttcagttatgaaagatacctctgcatgttattctggagctcagaattcttctgttctattnnnnnnnnnnnnnnnnnnannnnnntnnnnnnnntgnnnnnacnnnngccnnnnnntnnccnnnnnnnannncannnnnnntannnnnnnnnnnngnaannnntnaaatnnnnnnnnnnnnnnnnnnnngaaa

SEQ ID NO: 2250 - DNA, 601 bp, Gossypium hirsutum
tcatttgactcttaccttttcgtattcaagtggtgataacaggagagaaacatagaggtaagttcatgaataagttccactttctcctatatttcctcttgtaagcaaacatggtaatctctttgtttcagaagaaaactacagtttcttaattagtagtttttattcgatttttttactatttggaatcaaggttttcaaatccattgataattcctactatcactagctaggcaaacatccacaattactttcatttgtttttctgttgatcttattaccaattataaaattctttcttcaacctcatcagatcttcaagaaaaatggctgaacttgttgtctctgtttcttccaacaccgtgggaaacttggcaacggaatacgcctcaccttatcttagctactttttccgttttggaaaaattgttgaagaattcaaaaatcaacgtaaggcacttgaattgaagaaagatagggtgaaaaatgatgttgacgcagctataaggcgaactgaggcaatcgagaaggatgttgaggactggttaacaagggctgaaaatgagttgggagtaacccagatcctggaagatgaaatacg

SEQ ID NO: 2251 - DNA, 556 bp, Gossypium hirsutum
  misc_feature (549)..(553): n is a, c, g, or t
tcacatccctaattgtcttcatacttaaaacgatgttgcagacctctagccagacatttctagcctttgatatgcaaactagaaaatttctgaggagaaagaccattaagtttcttgcacagtgattcccgacagtcggcgtacaaaatcagcattaagtgaatgaccaccctgtatcacgttcaaaattgccacgtcaattgaatctctctataatacaactatattattagttcagacgtaaagtgatttgagctgaatgtttccagtaatgacaacaaaatgccagcatcaattcatgaccatatccacctcaccacagtggctgtccagctggttagaagaagttttttaagcatctcaacctcggtcttgctcttcagatgttgaagaggagaggtctctgtggcatgaatactttgagaccccagctcttactgccaatatttcacggaaaatttaccaccaccaggcagaagtacaactacatttatctcgagcattctaatcaaaaaccctgaaattttcataacccataagaactagttnnnnnata

SEQ ID NO: 2252 - DNA, 598 bp, Gossypium hirsutum
ctccagcatcagcaaaaatctttcttgcagctgcttcagtgatgcactcatgaacagaaaatctgctgaaacttgatttagcaacgctaccttgccagactaatacacacttgttagggggtttctcttcatctttatctccatcatcatcattgtcgtttacagcttcagcccagtttattcgcctaagcatgagcttcccgtacctcttgatggacttgcttccaccttccacaactacaacgctaataccctcggagatcacagcacaaccggttaatcggttttcttgggcattaacatcaactttaaagctggtcttgggatgtgagaggtcattgatcctgtaaaccgaaacaatggtctccaccgtatttgggtcatcgaaaagcttcctctctttcttctcacggcgctcagcaggggtaagcttgcgagcgatgtttctatccacatgagcctgttcccgctcagcagcagcactacggatttccatttcaagcttagtaggatcttgggtagcttcagatcctagaactttcattaaattgctcaacttaacttttggcttgggaggttctattaggccctgtctaat

SEQ ID NO: 2253 - DNA, 597 bp, Gossypium hirsutum
  misc_feature (359)..(359): n is a, c, g, or t
  misc_feature (475)..(475): n is a, c, g, or t
  misc_feature (500)..(505): n is a, c, g, or t
  misc_feature (511)..(511): n is a, c, g, or t
  misc_feature (513)..(513): n is a, c, g, or t
  misc_feature (527)..(532): n is a, c, g, or t
  misc_feature (540)..(547): n is a, c, g, or t
atccttgtttcttaattgcggcttttatttgttgtgaagtccaagctggatctgcatgggcaccacccagtggctcctgtcaaaagtaaattattgtcagatgccatagagattaacatgaacttccaaaaggaaacaacaaatctggagcaatattcaaccattaaagctgttgaaaggcaaatactttgaaaaccaaatacagcattttcatcaaacatcagagataatatgctaaggatggtaataaaatggtttcagtaatcatctctgcaacagagataatatatggtttcattatcatatattttatctagaactaggaatggagaaaccaaaaaaaaggaaaaaaagaaaanaacttatttgatggagggatgataacaatgttgtttattacaggaatgattctttcatcacttttttgcctgctgcactcttctggagtaatccttattttcttctctgcttgctncttattgaaaaccttctttactctnnnnnntatagnangatcatcactaatnnnnnntcctcctnnnnnnnnttgctttcttaccttatgctattgttttcttctcttctactgcattgcag

SEQ ID NO: 2254 - DNA, 621 bp, Gossypium hirsutum
tgggatctaattctactacactaccgaagtttgatgcttctacaacaactatgatgtattaattgctactccttcagttgtgagagatggtgcctggaaccccaattctggtgcatctaaccatctgaccaatgatttgacaaagttccaacattccactccatattgtacaaacaaagtagtggttggtgatgactctggtttaaatatatatctcaaaatgggcataacttttttatgtctaagaacaaacagctgcaactaaataatatattgtacacacttgcaatcacaaagaatttgcaatctttttcccaatttgcaaaagataacagtgtgttttttgaatttcattctactcactgctatgtgaaggactcaatcactaaggaggtagtgatgcaaggagtccaacgagatggtctttaccagctgaaaggagattatgtgagctattttctgtcaagttcttccactgagaataagtcacaatcagttgaagggtcctatgagatgtagcactttcagcttgggcatccatctcatgatgttatgatgaaaacttttcaatcttgaaatctagtcctacctagatctaagaatacatcagtcatcgtgcat

SEQ ID NO: 2255 - DNA, 624 bp, Gossypium hirsutum
gggtggaatttggaggctgaaaattcttccagtacatctctctccctctctctttatatgtttgtgacatgaattgcctatgcatggacaatgagacttcattctttttaggtatcacaaatatgctaaaagtagcttttgacttcatacgtttgtaggtgaagaggaggatgaatccccttttagtagcagtccgacgaggattcataaaaccggtagtgcgggtgtaaaatcagatattgacaatgatgttcttgatacggggttcaatgatatctttggcgatctacaatctctggccgcagagtttgaaatacctgaccaaaggaaaaagcggaaaactgatgcttcatcaatggcagcatcaaggaaagccgtgagaaccaatcaaggaagattacatccttctgacaaaaggccggttaaggtcagaactagttttaacaacgaagatcaatattatagctcaattgaaagcatagtagatgcgcttcaagccataccaggcatggacgatgtgctcttcttagatgctagcaagcttctcgaagacgagaaaaaggcccggatgtttgtggcaatggatgtccatcaacgaaggaaatgggttattaagaaagcttc

SEQ ID NO: 2256 - DNA, 596 bp, Gossypium hirsutum
tattaattctcccttttcctatcctgtctggtgttagtttgtaatgacacttcaatatctgccacacattttacttaatgcagtgctttttctaaacaccttctccctgtccccatttttcttcatgtctctttttcccatgtctaattgagaaccttttgatttaataccttcattcaatctattaaaagttgattaattctatgcttcaggttggaagagaagctttccaattcgcaatctgagattcaagtactgcgtcagcagtcactggcaatatcaccgacaggaaaatctttgactacaagacaaagaacaatgattgttccggtataaattagatattattagttcatttcacatcctcattttgtaagtacaagcttagagacatatatcctgagtatttgttaattaatttgcagaggacacccgagaatggaaatgttacaaatggagaaacaaaggttttatcggtagggaatttcattagtgactatagaaactgaaaatataacatgttctgttatttatatattatattgcttactgctccatatcttctcaggacatgactcttgccatatcaaatgtac

SEQ ID NO: 2257 - DNA, 615 bp, Gossypium hirsutum
  misc_feature (608)..(612): n is a, c, g, or t
cttttggctcagagcaaataatgaactctcctttctgggctggaaagacttatgctgatgttactttgcttggatctggccactgctccagtcctgggtcaggtcagaattctgggcataattcaatgggtggagatatgtcaggacagctattttggcaaccaagtaggggcagccctgagtattctccaatacctagtcctaggatgaccagtgctggtcccagttcgagaattcatagtggtgctgttacccctattcatcctagatcagcaggaacagctactgaaacacatactagttggcatgatgatggaaaacaacaaagccacagattgccccttcctcgtgtaacaacttccatttcttctcctttctcccattcaaattcagcagcaacatctccctctgtgccacgaagtcctggaggggcagagaaccctgtaaaccctgggtcacggtggaaaaaagggaagcttctgggtagaggcacatttggtcatgtttatgttggttttaacaggtataatcgtccaaaggaatagttgtttaatttcccatcttaaaaatgacatctattgcccaatggtttatgtcgtatcatcctnnnnnctg

SEQ ID NO: 2258 - DNA, 563 bp, Gossypium hirsutum
tgtgagtgtgtgtatgtatataacttatattatgcaaacaatatagttgaaagatgtgtgatcaactacagttaaatctcatactgtaaaacccaagatttccaatgaccacatagggaaatctcatatcatgcatagggcagcagatctcggatttgaatcccaatatctataattgcatataaaattattgtattccaatgaccacatttcctatccattccattatcagcaacataacaagaaaaagatgcaaatgcttgcatgaaatgtgaattaagcatcttatagagcctcaagtgctgaacccctaaagcaatgccactatggttttaaatcttctaacttagaactactacaaaaatttataacataaggcaaagcaacataaacaacacaaacaggaaactaaaacatatcttaaggatttcattcaaaagagaaggctttacttaactagaaactaatgaccaaagattcaaaatttcgaaaattgagattaattaaaacaaagaacttgggtttaacaggaatataaaaattacctagttaaacaccgctcg

SEQ ID NO: 2259 - DNA, 613 bp, Gossypium hirsutum
acctcaagcagttccagaaatcaaactcccaaacaattagcaggtcatgaagagtactttgtccgcgtttttcaatgccaaagttctgaattagaaactgttttagaacagtttctttgtacatgtgatgatctgttgaatcaaagggctgatcttgaaaattttgctgaagaactctcatttgctttagactggattgtgaacaattgtgttactcctaaggaagcttcaagtgcaaggaatgagatcaaaaggcattttggttgcaatatttggtgtagcctggaagaagaaaacaagagattaaaatctgatttgaagaatatggaagccaggctcgagtcagaaactcgcaagagtgagaccttgacgttacaacttcgtgaatcagacgaaagcattggaagcttacaagcagaacttaagaagctaaaagaatcaaacgatatgatggaggatcaggttgaaaatcagaaatcaataaatgaagatctcgaaacccaaatcacagtttccaaagctaaactgaacgaaaccttccagaaatgttcttctttggaagtcgagttggagtacaaaaataactgttgtgaggagctagaagaggcatgtt

SEQ ID NO: 2260 - DNA, 553 bp, Gossypium hirsutum
  misc_feature (31)..(33): n is a, c, g, or t
tattttagtgaatttaactgtctcaattccnnnggcgatcgcaccaaaaattcgagttccttttggatttccttcttgatcaatgacaacggcagcattgtcatcatatcgtattatcatcccgttgtcgcgtttgagttctttacgagtacgtacaattacagctctgatcacttctgatctttctagaggtgtatttggtactgcttccttgatcacagcaacaataacgtcaccaatatgagcatatcggcgattactagctcctatgactcgaatacacatcaattctcgggccccgctgttatctgctacattcaaatgggtctgaggttgaatcatttttgaaatctcttttttcaatgtaacaaaggacgaagaaaaaaagaaatattgtttgtcaaaaaaaaaaagaaaactcgaatttgtttttttttccccaaaaaaaaatttctttctttgggttctatttccctatcctgaaaaaaggaatggattttttatgggcttttttaacccccttttggaaataccttttcgggttattttttcg

SEQ ID NO: 2261 - DNA, 610 bp, Gossypium hirsutum
gactggcaggtatactggcctgggttaagaggtcgaatttattggactgcaaacagttttgaaccagttgtgccgacggttaaaccaggtttataactttttaattgaaactagactgacggtcagaccaagaaccggtgacctgaccagttcaatcaccgtccggttccaaaaaccatactcaaaagtttctaagaaagttgtaaaatcagcatccatgtgataaagcctacctctttctggcgatttgctgctaaggattctaattcttcaatgcgcagccttgcagcagtaagatcctcatctttctctaatttcatttgttgtgccaaacccaaaccaatgcatttgaatggggaaccagagcctcgaggctttgccacatttttctctaacttgtttgatgaatgactttgggcattgctggcataaccttcaggtttaacttgttctgccatggcttccaatgccttgaactgtttccaattttaataattcttgaaatggttagaaaatcaaggaaaaatggctagaaaaaaaatgcagcagaacagcctaatcctatcaagaacctttagcataccttctgcttatactcctttgcctgggc

SEQ ID NO: 2262 - DNA, 606 bp, Gossypium hirsutum
cattcaatatatgggtttgtatgcatgaagcagaaaggttatttaagttgaacatagagtacttactgtgggcaaatactagagttgagaaagagtaccaaaagatcattcctatttgctcacatggtgagccttggaactcctcattgatgggacgttcaataaaccaaaccacaagtccagttagaataaagaaagcagcggttgttatccacagatctccggaaagaggcatcaggaatatccagatgcttttcttgttgattttgggcactacggttccaatgcctatgtcagtgaatggcatcgtgaaatcgacatattggaatcttctggcaaggattgtcgtatcccccacaacagcatcgtaattctagtccattgatcacaagaaagaatatgtaaataccacatttaagtacaattataatctgaattctcagaagatgaggaagccatgcataaatccattaattcagatttcttaccttataataaacctgaaggataagatcatcgtaagttcctgcaatttttccgctggcatcttcaaacgggataaaatcataatgtacttcataacctaaactttgaacggcttcctta

SEQ ID NO: 2263 - DNA, 911 bp, Gossypium hirsutum
  misc_feature (652)..(657): n is a, c, g, or t
  misc_feature (659)..(663): n is a, c, g, or t
  misc_feature (665)..(677): n is a, c, g, or t
  misc_feature (680)..(697): n is a, c, g, or t
  misc_feature (701)..(701): n is a, c, g, or t
  misc_feature (703)..(704): n is a, c, g, or t
  misc_feature (709)..(719): n is a, c, g, or t
  misc_feature (723)..(726): n is a, c, g, or t
  misc_feature (728)..(731): n is a, c, g, or t
  misc_feature (733)..(733): n is a, c, g, or t
  misc_feature (735)..(736): n is a, c, g, or t
  misc_feature (738)..(749): n is a, c, g, or t
  misc_feature (751)..(759): n is a, c, g, or t
  misc_feature (765)..(769): n is a, c, g, or t
  misc_feature (771)..(793): n is a, c, g, or t
  misc_feature (798)..(798): n is a, c, g, or t
  misc_feature (800)..(806): n is a, c, g, or t
  misc_feature (810)..(832): n is a, c, g, or t
  misc_feature (835)..(851): n is a, c, g, or t
  misc_feature (854)..(860): n is a, c, g, or t
  misc_feature (864)..(875): n is a, c, g, or t
  misc_feature (877)..(879): n is a, c, g, or t
  misc_feature (882)..(888): n is a, c, g, or t
  misc_feature (894)..(900): n is a, c, g, or t
  misc_feature (902)..(907): n is a, c, g, or t
cagataaagactttagagtacttgacacaatcgtcaagctgtcaaggtgcttctgattttgcaatagtccatccggtaaatccgttaactcatcaacttcattaatccagagagatgaaagaatagtggcattcatcatcaaagatttaagtaaagtaacattaattcctccaatttctagcttttttagagattgaagcattggcatcttaaccaacttgggacaacatttgatagttaacgaacttaagagaggaaactgttctctaccattcacagttgtccattcctccaaacatggtgccatagctatttcgagaaccttcagtgatggaaaagaactttccatatccccatggaagttgctgtcaatatacttcagagcacccatttccttaatagtaaggaccttaaggaagcgcaatttccctaggggtggaagttgatcgcatatttcacaatcttcgagtgagatttcaacaaggtttggtataagcagttccatcatccaatatggaaacctatcaccttggtaaccaaatatgcatagcttcttcaagctagaatgtggttggagaacattaagaatctcttcatcatttctatgttgatgatgacaggattccaagctgtctactcgccaagataaagnnnnnntnnnnntnnnnnnnnnnnnnatnnnnnnnnnnnnnnnnnntttntnnctccnnnnnnnnnnncaannnnannnntntnnannnnnnnnnnnncnnnnnnnnngctctnnnnnannnnnnnnnnnnnnnnnnnnnnncgtcntnnnnnnntctnnnnnnnnnnnnnnnnnnnnnnntannnnnnnnnnnnnnnnngannnnnnnctannnnnnnnnnnnannnacnnnnnnnactttnnnnnnntnnnnnntttt

SEQ ID NO: 2264 - DNA, 642 bp, Gossypium hirsutum
gtctcctcaattatatagatgaatcccatactttaaaaaacctattttttcttttctcctttggtattagtctcaagttctccttttgccatctttgtgcagtacaagaaagagatggagacaatgttaaatgttgcccgttcatatatcaagtcacgtacttccggaggtgagaccaataacatgaacaagtcacgtacttccagaggtgagaccaataacgtgtcgtcaccactcataacagacgatttcggctaactcgtgtaattaatctcctccaattttattgtataatgtccttttgtgtgtgttttcaatatggaaatgttagtcatatgcataggtatgagggttttttgggaaaaggcatagatttataacgcaactcaaaacggtttactgggaaggaaagtaacagagaattttattgtaataggcattttttccgtttaataggctaatggcatgtaaatgaaaatacagaacttgcataaattttttcgtcaattgttaattagtagtatcgtttgctgttcactgttatgatctttaacaaaaagaaaaatctttaaaccatcttcaagtgtgaatgtgaggagcaatgaccaaaatgttcaaaggtgaaactttgacctatgagca

SEQ ID NO: 2265 - DNA, 627 bp, Gossypium hirsutum
ctgttcctgattttaaacccatgaagttctggttcgagcccgagctgtttctatcaacccccttgataccagagtgagtccctttttttggttgaacttttcttgtttaattgaatcgtaaaagtttgttttatttgtttttttattggattgttcggttcctgggaaagtgcgagaaaatgaaatgagatggaaatgagttcctgttttggttttttttcccgtcgattattggctatatgaatcaatctccttatgcatgtgaaggtttttaaaaaaagaaaattagttccttgtttaatttgtttgaatctatttaatttgcttaattcatttaaatgttgtttaatttgccataaaaatgtgaaaaaaaaaactaatgtaaaatgttggatggtgctagattttcttttatataatttcttaatgcaaatttgagttgtgggatttttgaaactgtgtaaattttatggactgatttcaaaagttgcaaaaggattgaaattaaattaggaagaaaaaaagaacctttcagtttacatagcaaatcaggcagctaaaatcattttgctttaattttccaaatatctctttccccaaatgcaatctggctatggtcgttccata

SEQ ID NO: 2266 - DNA, 429 bp, Gossypium hirsutum
ggccccatgtattatattcctcctttggtcatgtctctctatatcacaggacatctcaatactatattctctagagagcatcgcaaagaaattctccgttatatttactgccatcaggtaataaatttatatatgtatgtgtataagtttagctatatatgtattaaacggtggattgataatacttaataaagaaagttggttttggcgtggcagaacgaggatggaggatggggattatccataggggttcacagtacaatgttttgcacaactctcaattacatttgtatgcgtttattgggagtaggacctgatggtggccttaacaatgcttgcgagagagctcgaaagtggattctcgatcgtgggggtgtcactaccatttcctcttggggcaagacttggctttcagtatgtcgtctttca

SEQ ID NO: 2267 - DNA, 600 bp, Gossypium hirsutum
  misc_feature (474)..(474): n is a, c, g, or t
  misc_feature (502)..(502): n is a, c, g, or t
  misc_feature (566)..(566): n is a, c, g, or t
taatcttcaatcagcaaaaactgtcacagtatccaacatttgcaaccttgagcttcctggggaccttcaaaccattgatcccacatgggatttataggaccatttgtgctgtcaaaaattgataaaaacaatttttaggaattgtaagaaaaattctgatagaaagaatgtgtgcatgtacacatgtgcgtgcgtattcatgaatgtgtgtactgacgtacatgggaagtagtggatcgggtctactttcgacattactaaacatcctgccatgcataagaaaagtaaaatctaaatcatcagctttgcccttaatgttcatgctaaaatagcaaatgaataccatgtatttttcgtacttactctttgcatgcagctgatgccttctccatcctttctatcagctccagttcttcctgcataaaaggaacattatgagaggtccatataattactcaaaattctggtataaanattcatttaatggataaatggttcttgnccaaaattaacattttgtgttagaatcttaagcatctatcgtacattatctgacataccttgtnggattgtcgcctgcttctgcatttctcacctttt

SEQ ID NO: 2268 - DNA, 638 bp, Gossypium hirsutum
tgcttaggccatagtttcagaaaagaatatgatgagttcatttagagaaatgctgatccataaataggcatgtttgtacatagtgaatgatatgaaggctaaagtagaaaattttgaacaatttttattgttgtaaatggtcaactaagatcactctctggcctttatattcacttctaatttccattttctccaaggaatgtggactctggaggatgaaaatgggaagaattgtagcatgcgaagaattttaattgaattcttttttcggttgccactagtttgattttggtctttcaaagaggatattatatgctttgctgtctctctttcaggtccctgcaaaaccaaactatagtttggtcctttactatgctgctgaaaggcctgtgaataaaaattctttattgggaagatttgtggatggaacagatatgtttcgtgatgccagatttaaactgataccaagcattgttgaggtataaaatgctatattgtagacatctctagtgcacttatttattttattgtaatgctattgaaaggcttatttatttgctctcatatgcacagggctattggatggtcaagcgtgcggttggaacaaaagcttgcctacttgggaaagctgttacctg

SEQ ID NO: 2269 - DNA, 621 bp, Gossypium hirsutum
gaacaatattccatctgagatggaaaacacattgtttgtgggcaagaagaagtcaaaaggtagcaataatgctggaaaaattgctgattcaatgaaggaaagtttgagacttgatgtgagcggaacacctaaagatacaactagttctagtcagagtttttcttcaggtaaaagtaagatgaataagttgaagttgcagaaggatattaataaggtccgagataatcatagagatgcattggacaccaatttcaaacaaaaacgtgacaaaatggatccatcaatgaggccttttcacaatagaccaaaagatgctggttctactacagattttgagagggggcactatggttatttggacaagtcaaaagaaatatttagtggcggaacagttgataaccagctgttgggagtggatgctccaggtgtggttcctgacctttctgaccagacacttgcctctcagacaacagcattggcaacaactgcttctgtattcatagaagaaaactgggttcagtgtgatcgttgtcacaattggcgacttttgccttttgatactagaccggaacaactccctgagaagtggctgtgtagcatgcttaacctggctgtaagttc

SEQ ID NO: 2270 - DNA, 610 bp, Gossypium hirsutum
gattctctttccgttgaacaatcaatccaccaaaactcttttaattctctcaaataacattcagggtgcctacttgagaagggtaacttcttgcatatcgatgtctaaacaaatcacaacaatatcaaagattgagttatgaagttggttgacttttcaatttgcttaaaggactatatttttaaatatgagtatacacaagatgttggttgactttgcaatttgcttaaaggactatatttttaaatatgagtatacacaaggacatgatattttaaggatccttcaaaacacatactaaaaaaaaacaccaaaagagtgaacacctacctaaaacgcatatcccatacaaatacacaagttcaaacattatatgaactaatgaacatacctcgtaaaaccatccgcatattattagagatttgacattcttaatgcttctcaaaattgagttgaagcatgtatacttgctggcgcagccccagtgatttcttttacagagaacaagacctaaatgataacggaaataggaaatctcagtctcaaagtcccatgtccactgcgttagagaaccttgtctgatatcaaccatgacgtcttccaaaaaaaa

SEQ ID NO: 2271 - DNA, 573 bp, Gossypium hirsutum
  misc_feature (12)..(12): n is a, c, g, or t
tttgttggggantcagtcctgaggttactgatgcaatgctgtttgcatgcttttcagtctatcccagttgttcgtaagcatcttctctttttgatcttgatttcagtaaaggcttgtgttgacaatgttggacattcttaaactaaatttttaaactatcagtgttgcaaatttattagttagtaaaccttgatttgtgtttcatgttcaaataatacactattgatccattagtgtcaccgtaaataacaaattgacgtctttactatttcagggatgcaagggttatgtgggatcagaaaactgggcgttcaagaggatttgggtttgtttcattccgtaaccagcaggtactctttgtttaagtatctggtggctctttgtgtttctcttctattgtaaggttgtttcatctattgatgttgacttttttcctcctctgttcaggaagcacaaagtgcaattaatgacttaagtggtaagattgatgtttttcactcttcatgttattttcattagttgcattttttaactcatcaaataaagctgtgatttatagctcataatttttat

SEQ ID NO: 2272 - DNA, 629 bp, Gossypium hirsutum
tagtttgttgggtgaatgcgttttgtacatatcatatatggatatgcacacagagattacttctgaggtttttgttagttatcaattctgcaagtttggtagtgttaatcatgcttaagcaccttatgtttgttatcattattgtataaagttcatctttgctattgaagtgattggcccagtataggatgtagagtcacgttatatgggttcattataccttgtcttggaagtctggaattaaatggcagctatctatgcttgctagtacatgcagttgatgttcctgttaagggttccatgcaatcaggaaaaaaaactgaattgcagtttctcctcctacgctttgaaacacaattcacatcatggagatattccttgaaaaaggaacaacaaaaacaaaatcctggacagttttaccttccaagcgaactttgctttactggtatttaagcacaatgagcacctacatgagagagatgacttggtctatgaaaatattcctagaacttaaattgcttaaacattggtatgaatggcagacaagagtacatggtcaacatgcttatatagaaaatttgcctagttttcccttatatgggttatgtctcgtagccacttttcacttg

SEQ ID NO: 2273 - DNA, 642 bp, Gossypium hirsutum
tgatgaaactaatagacattattcattaaattaatatgaataggggcagaaaatttatcaataaacaaaacctctggtaagattaatccaaccttattggccgtttagctagagttggtataattcttgaattatgataacaaataaaagctcaaaaacagaatccaatttataaaccctttcttgtaaataaagtcaaatgcaggtatacaaaaggtaaaaaccccacctgttcaacattgacagtaaatggcccctttgattggcattcagggcaggaaccaaccttgacctctgaatatgaattttggaagaacggtcccaaaattgatccacacttgttgcaatcgtattttacctgttgcaactggggaaaaaccccagagcgtctagtgacaacacccccaatacgaaccatggtgttcaaatggatttgcctagaaataaccaagtgaaaaggtaagactaaaactatgaaaaaaaataccatttttgtgataaaagtgaatattccaagttacctaatatcccgaatttgatcataaattggaaggtttgtaatacggacatatatcttttggtggatgttcttgtagtttggatgtaaatcaaagaccaccctttgggcaacatcttccataa

SEQ ID NO: 2274 - DNA, 643 bp, Gossypium hirsutum
atttctatacaatattgcagctgcggtaggggacgggttcttggccagggatataacatttcagaacacggctggaccatcgaagcaccaagcagtggcactgcgtgtgggctctgatttatcagcattctacaggtgtggcattttagcataccaggacactctctatgtccacagccttcgccaattctattcacaatgccttgtagcaggcagcgtggacttcatattcggaaatgcagcagcagtgttgcaagactgcgacattcatgctcgtcgacccaatccaaaccaaaggaacatggtcaccgcacaaggccgtagtgacccaaacgagaacactgggattgtgattcagaaatgcaggatcggtgcaacctcggatttagaagccgttaaatccgattttgaaacttatttagggagaccatggaagacacattcgaggactgttatcatgcaatctgttataagtgatattattcatcctgctggttggttcccatgggacaaagatttcgcactcgacactttgacgtatcgggaatatcagaatactggccctggagctaacacgtcaagcagggttacatggaagggttatagcgtgatcaccaacatatcggaggcacaaacctacact

SEQ ID NO: 2275 - DNA, 537 bp, Gossypium hirsutum
tagagaaaaaagttgcaatgagaaatttttattacttaagtttgtcaaggatgaaaagtctcaaatgaaacatttaaaattttatttataatccttaaaagaaagttgttaaaaatgattataatgaaaaagccaaaataaatatattatcaatacatgtttcgactcgcaactcccatggcctaatgagttgatgggtaaagcccaacatatccagttggctcaaaaagattagcccaaagctcaaatcaaaatccaaatcgtctatcctttgaactcaaacaacaacactaaccacgtcccttctctctctctctctcgcgcggagaagctaagctgagaaaagatgcaggcgattacgaggcgattagggcaccaatctctgaggccaactgcttcaatctcttctatcaagtctatttgcgctctctccgatcactgtaacatttccattccctctttttattttctccaatttatcttttcttcttctttttaatggtgtttaatatttgcaacaaattgatggtttttttt

SEQ ID NO: 2276 - DNA, 653 bp, Gossypium hirsutum
tgactttgagggaaggacaggaagagtaatccaaaggtcgcggagaggatcatacatctgccataaattctctggatcgtttgcacacacacaaagaagttcctctgctgagccaacctcctgtcgagctttgaacagctcagagccacgaatggcagctctccatgaacgggaaacaagctccaacttaggatataggtagaagggaactcgtgctaggcatctaagggcaacagcatctggaagaccttcaattaatccagacatactaaccaaggtttcatcgaatccaacaattcttcactgacaaatttttactatgtcaacctcagcagtggaatatgcaatctgaaagagcaaatttataacttgtgtgtaagaaccaaatcaatagttttggacttcagaagtaatgcattaatcaatgtccagttagatcataatttaaatagaatcactatatttgtgttcagtagcatttgcagcacaattagcatcaatgactcattgaaaatcatgctgctagtcaatgtcaccaataccaaagaaaaaagaagtagcaatcatacgtaagatgaaggtgaaacaaaaccatacatcaaatttaaaaattttcctataaagaagaaaaattgctcccatagacactgaaa

SEQ ID NO: 2277 - DNA, 644 bp, Gossypium hirsutum
tgactccttggtgtaggacctgtgccctttcaatatgcttcaaagccaggtttgtgagggactgcaatatttaacttcttaccaccaattggtgttgtccaacctctgggtttgtctttcgtgtttcctggccatataggtggtttaagttcatatttggacattgattttccattttagctttgtctggtttcctagtcaacccattctcaagggtccaatacccaataactttttcctcgttatctatcacgttgatgatttcaaaagttaaagactgcaattgtcctccaaccaaactaaaatctccactaaggcctttaaatttggtttttaataacccatttaagatcattttacctctttttgagacttttataacaggaaattgacttgtatttctgtgatgattttctccattaacactagagctctcttgtggaatcatttcaacagccttagctagtgcccaaatagtatcatatgcccaatacccaaaaatgtttagtttcgtagaactagaatgaatcctactttgccatttccttttaaaatttttaaggcccttagattgcggtatgtatggccttatacccaaaacaccttgcattgaaccaaaggccttaactcccataggatccaac

SEQ ID NO: 2278 - DNA, 629 bp, Gossypium hirsutum
ggagtaagcggcagttggggagatgggagtaatgatggtgagaccctgcacagtaggtcatccaccaaaacattcttgactagtccccgtccaggcctttgcaactcataattaacattgacattgcggattttatttttaaaagaaaatagatatgtgcttgacgaagcgggtaattatgatcaatattttcctatctcatctcactttaaaatttatatattactcatttactttatatatatactatgttgggggaggctgatgtggtggtaaactcagatgttgagagccctaagtaaggaggttttgtattgagcttcgaaaaaggtaagtataatgaaagtgttaatatttagagttaagttgtattttattcttcaattaaaaatgagtatattaagagttaaattaatcattttactttttaatcttaagttcagatttttaaataaatagaataaaatataatttaactcttaatataaaattaatattatttttgttgtgttacggggtttagagagctatttataaacacttaagttatatatcccctcttaattaataggttatctttgaatgtaaacctttttttcaagtcgactacacgacttgatgtgatggat

SEQ ID NO: 2279 - DNA, 614 bp, Gossypium hirsutum
tgtgttatttcaggttctgtgctacatggattcatgcaagaagcgcttctagcattcttcaggatgcaagaagacggtgttatgccgaatgaggtgacaattttgagcattatacatgcatgttccttcattggacgactgcagataatacaatgtgttcatggattggtttcaaaactggggtggtgtcgacaggaacttgtattgaattctatggctgagatgtacttaactaacgggtacttcagagaaggaatacaacttttttcaggatattgtttttatggtgaagaacaatatcttaacccggcgacaatggctactctcctgcagttttgtggtcattccaataatttgaagctggggaaagaactccatggttacctaatcaagcatagattttcttcttgtgttgtagaaaattccctgatcgacatgtatgcagaaaatgagcaaaacgattcagccattcgagtctttgcaaggatgaatgagagagacattgtttcctggaattcattgatcacgtgtctcatcaaaaatggtgaattccatgaagccttagagctacttaaacatattcactgcaacggtagaggagagatgcgtccaga

SEQ ID NO: 2280 - DNA, 737 bp, Gossypium hirsutum
  misc_feature (716)..(721): n is a, c, g, or t
gggtcatctttgtgctaagttcatgaactgaacattttattctttgaaatccaagttatcgtgaggtttgctagctagcatcagttgcctcatgacacctctcttattaaggatctctgtttttggccttatcttttgtggttttgatcagaattcactcagctctatatttttacactgtgtaatggatagcctatcacttctgattgtactgttttgcattgtacgcatgtgtttgccaataataatggttgtttgttccaggtctattaatggaagtagttcggaagtatattataagattgaagtttgaagattggagagttaaataattttcttacctcttcaattgtaatctgattattgttggtgtcttcctcctttagaatttgttttccatcattctcaactgtgttgtccggttctagcttttcagcgacctgaatgaaaatatattcatagattggttaaacatggacgtttcagattttagcaaatagattgaaattgagttagtattcatgataggaactcttttgattacctcagcttcatccttgtccacagtttccatatttaggttctgcttttgcacttcatcattttcattagttcggatatcaggatccgaactaatgaaaatgatgaagtgcaaaagcagaacctaaatatggaaactgtggacaaggatgaagctgaggtaatcaaaagagttnnnnnnatgaatactaactcaa

SEQ ID NO: 2281 - DNA, 602 bp, Gossypium hirsutum
ttctaattaaaccaattacccctaagatgttttctctgtttcgatatgcccttagggtcttgtcgcttgatgagcttaaagctcagaaatcaactagctaggggaatgttaagagtgatttgagttctttcccactcagtgtcagatgcgtgatttgcagactagagaggtgctcctgacgggttctgtgcatcatggcttatatcggcttcatctcaacaagcttcctgaaggtggactgtcttctaagcatgctcaatgtctcacagttagtaaaatgcttcttttaaatgtttggcattctcggctagggcactcctgtcgagctatacttacaaaagctctttcacgatgtaatattcagtttactgatagtaataaagttgttgagtgtgttgcttgccatttgggtaaagagcataaacttcctttttccaagtcaaccactacatacagctcacctctacaattgatagttgctgatgtttgggggccggccccgattgtttccaacgagtttcgttactatgttgctttcactgatgcatactctcgctacacatggctttacttcttgaagagtaagtcagaggtcgctactg

SEQ ID NO: 2282 - DNA, 821 bp, Gossypium hirsutum
  misc_feature (438)..(438): n is a, c, g, or t
aatcctacacatcatgccaggatgaaacatgttgaaatagatcatcattttgttagggaaaaaattcttgcaggactgttacaagtcaactttgtgccttctgatcaacaggttgcagatgttctaattaaaccaattacccctaagatgttttctctgtttcgatatgcccttagggtcttgtcgcttgatgagcttaaagctcagaaatcaactagctaggggaatgttaagagtgatttgagttctttcccactcagtgtcagatgcgtgatttgcagactagagaggtgctcctgacgggttctgtgcatcatggcttatatcggcttcatctcaacaagcttcctgaaggtggactgtcttctaagcatgctcaatgtctcacagttagtaaaatgcttcttttaaatgtttggcattctcggccagggcacncctgtcgagctatacttacaaaagctctttcacgatgtaatattcagtttactgatagtaataaagttgttgagtgtgttgcttgccatttgggtaaagagcataaacttcctttttccaagtcaaccactacatacagctcacctctacaattgatagttgctgatgtttgggggccggccccgattgtttccaacgagtttcgttactatgttgctttcactgatgcatactctcgctacacatggctttacttcttgaagagtaagtcagaggtcgctactgtgtttcctcagttccatcgtcaagctgagcgagtacttggtgcaaaattcaagtgctcaacagaagggggggtggggaatttcaagcattaaagcact

SEQ ID NO: 2283 - DNA, 618 bp, Gossypium hirsutum
cgtggagtaccgatccgcatcaaggatcgggaactttgattttgatatcaatagaaaaagaattaaggtaaacatgatacaaatatacacacgaatatataaaacttaaaccctgatattaactttcttttgcttacaggcattgcgagtggagttggaaaagaaaggatgggcttccgtagaaacgttttaaaaggacaaaaacatcattttgtactgtactccttgattgttgtttcacaccactgttcacagattttgttataaatcatcaatgcaagatttgtgtcacttgcgtttccataattgaaaaagattattatcacacactgaaccatcattgtaccaaatgcacttcaaccccaaatttatcttaaaagatgacagctaaatttatagtattccaatcctcgcatttacaatttaatatctaatctaacaaaaatagtcaaaagagagtaatcatgagttaatgccatttccatccatgaaagattattccagtctattttagcctaatgtcgaaggtaaatcaactaagatttaagtatcactactgtcagaatgcaaaaaaaacagttcaatacaaccagcagatgtcatgagcttggacttcac

SEQ ID NO: 2284 - DNA, 703 bp, Gossypium hirsutum
ccgttcgcaaccattgcgattaactaagcacaagagaagaatgaggctaattcgagctttactgacgaatgccattgctgtcacctttcaatttgagctacaattttttcaagtttgaaggattgaaatgaagaaacttaacaatgagattaatttgtggaaagccatagtttttcttttttttataatgttttagccctttaagaaaaattcttaggactaaattgtcggaagaatttaagtttcgtcacctttttgttctaaatatagcttctgtaagtatccttttgtgtttttgtgcgttcaccgtgaatggtgtagagaaaaactggcgtgattgatatatatatcgaaagttagattattggttactttttaattgtaatttgaattcgaaaattaaaaacttcattgataagagtgaaatggcttagagtctattaaatattaattctcaaatttatttagaggtcgatgaagatatattcatggtaaaaatattatggatgtattttgtcccaattactcaaaatatagataaattaattatgagtaaactgatttcatctatttttattattaaaaactaagagaataataaaaaaatgatatatggtatgcaacgcatatattacatgttgaccatgaatatatcttcatcgacctctaaataaatttgagaattaatatttaatagactcta

SEQ ID NO: 2285 - DNA, 615 bp, Gossypium hirsutum
  misc_feature (523)..(523): n is a, c, g, or t
tctttcttttcagctttgctttgtctttaaacatttagttgcagttttcggttttatctacctttgctctaccttttgtttgagagtaatgtacttactaagtcttatggtcacagtgcatcattgagaaggagaacaacttcaaacagcccggagagagataccggtcctgggcagcagacaggtataattgggttctctgcttaggtaaattaaaataaatgcatgtattggacttctgatcgctaacttcttattttctgctctgccttgctgtaaccaggcaagaacgattcatctgccgctgggttgaggccttgtctgatccacgtgtgactcatgaaattcgcagcatatggatctcatactggtctcaggtaaaaacactctttcctgtgcttccccaaagaaatatcccgttgaacttcctaaggcccatccttaaaaataactttactggatatttcctggaagaatgggatggggttccgggtgaaaaatccctggggccaaaattaacatnccccccccatgggaaaacccacctttaaaactggaattgccgaagaagaataaaggaatggaatggaaaaagggcctcctccaattggttcg

SEQ ID NO: 2286 - DNA, 608 bp, Gossypium hirsutum
caatatctttggttgctttggtgggcccttacatgcaatgcaacctaaagaaacataaccgggaggagcttgaggcaaccaaaaagaaatattctccattcctctctgtttcttaatctgtccaactggctgaaagcctgaaggtgctttgaaaagctcttcatcttcagcatcatgcaaaacaatacatgcatttggaggctcatacctggccctcagaaaattaaagatcatcaatgtctatgaataaaacaagatatgtccaaaaaaatccatttattaaatatcccgtacccttgaacagcaatatcaccaaaatacaccattcctagggggatctctggacgccatatggacagttgcttccttgagcttgaacctctattccaccaaaccaacctaaaactagcaacagcttcaaaacgccggccagaatttgcaactgttgaacgatttgactgttgattgctgacacgaccagatactgaagcttggatatctgaacttctagatgctttcggatgaaattcaggagacctaagaattccataacgtaattcatatgctctagctagtaacctcaaagtagtgggttctgctggcaggaa

SEQ ID NO: 2287 - DNA, 521 bp, Gossypium hirsutum
gttgtggttgtattgttgttgaggttgttgttgcagctgctgctgtagttgttgctgtggctgctgcatttgaggatgccccatttgtgattgttgttgtacaagctgggacaattgttgagaattcaagcccatagaattttgcaactgaggagaagaaaaaggcagttgctgttgcaagagaacttgtgactgcctctgaaggcggaagggagctgaccctggaccagatattgatggtatttgcttcaacaactgttgctgcaagagagagttctgcatcataccctgttgtccattctgagccagccctgataactgggggtttataaatgcctgagatgatgttctttgtaagctttgaacctgtagttacagaggggatattatataatgagatcatgcacacaaattaatttgaaaacaagcaaccaaaccacatgacaaaaatctcttattattgcctacccccgtaaaatttacattaaaggtgcaatggcataagaagacacgttgagaaa

SEQ ID NO: 2288 - DNA, 608 bp, Gossypium hirsutum
ttttggagcatgctgtggacttgggaattcttgttctgcaaggcaaaaaggtcgttgaattgggctctggctgtggattagttgggtacgtccaatatctttcgtggcctaaacttgaattattctgaaattgcggcggctcttggaaaaaggagaaaattgaaactcacggactgtttcaaactcttttgacaatcatattatttgtcttgacacaaattttagctgtcatgttgtttagcaacagaattttggtcttcttgaatttgcgtatcttacgcatagaattcatgattttagtttatatgtacaagtaattataaaggttttgatgaagactattgcttatctcacttgggagtatattatttgcatgttcaggtgtatagcagctcttttaggtgcacaagttatcctcactgatctgcctgatagattgaggctacttaaaaagaatgttgaaagcaacttgagacatggagtgaggggttctgctgctgtgaaggaactcacttggggagatgaccctgacaatgacttgattgaacttccacctgattatggtactaagattcccctatttcttcctaatttgaagctttggcagt

SEQ ID NO: 2289 - DNA, 646 bp, Gossypium hirsutum
ttgggttgggttgggcacatcaaattaacttgcagtataccatttacttattttcgatttattaaataataatattgcattcatggaattctaatttgctatgaatgaactttaggtttgtagcatcggctcggcaattggctaaagccttggaagtgccattggtaaatgatttgggttatacaaagagatatgtgaggtgtcttcaggtaatttcctgcatctgctctacctattttccaaaattctcttttgtttctagggcaaatttgtatccttttaacacttactagcttgcaagtttccactacaaattactctgttctatgatcttctcaagtttgtttggatccaatgttgtatgtacttgcatcatcggaatgctctagcagttgcttcttttgaagtctaagagcaaataaaaaatattattgaaatatagttaaaatgttttattatcatgttatgacaacgggaaaagctaaaatgtaaagatgagttctacagttgtaccttcttttcgaaaatttttgcattgacttgtattcaaactactcatgtttccttattttattggggttttaacagatatctgaagtggttaatagtatgaaagacttgattgattacagtagagaaacaagga

SEQ ID NO: 2290 - DNA, 602 bp, Gossypium hirsutum
acagattaaagcacgagtctaatttacttactcctggcagtacgacaatttggtctccaacagagagactgctacaaggaacttcaacaattgaatcatcaaccatcagacgagcttgtgagggcaaactactaagaagtccagtcatatcactggttgctttgatttttgctctctgttcaagattccttcctaacaagacaaaggctattaacatgactggttcctcaaagaatgccctccaaccctgcaaacacgatatcaattaaaaaggactgatgtctaacctgaatgtccccttcacatgctctctacaggctacacccccactttaatcatgcaacagaatctgaaaaccagaccaatcattgcaaatacactagcaaatcaaattgcaactcaaaccatatgatagaaacttctactttcgaattatttgaagaattttacaagttagtaagaacaaccggagatggaactccatgcaagaaccaataaaatattataaaactggaataaaccagaatctaactaaagaaaaagctgtcttacccatataaagaaacaaaatatttgtgaggactcccactattcaatcctaa

SEQ ID NO: 2291 - DNA, 563 bp, Gossypium hirsutum
  misc_feature (51)..(52): n is a, c, g, or t
  misc_feature (494)..(499): n is a, c, g, or t
  misc_feature (517)..(520): n is a, c, g, or t
  misc_feature (533)..(534): n is a, c, g, or t
  misc_feature (539)..(541): n is a, c, g, or t
  misc_feature (554)..(556): n is a, c, g, or t
tttggctaaatcataatattacatactcacattaaaaccctatacatgccnnagactcgaatcacttgagtttacttactccgataacgttaactcgatagggtgataatatctctgacggcctccaacccgagctaacctggaaactctaaaaaacatgggaaagaaggggggtaagctttcgcttagtaagttcatatgaaaacaataagcaactcattaacttgttttatcaatgtttacaacatattctcaagttcactacaagctgtcttcctgagcaacagtcactaaattatttatatctggagctaccaaactccaaattaagttccgttaattttccctgaaactaaacttattttcctttctttcataaaatttccaaaatttttggttaagccaaatagtacagtttattacttaaagtctcccctgtttcaggggatgaccactctaacccaactggactaaagttcaattatcccataatnnnnnnatccaaaaatgttccccnnnntttttcttggaannaaacnnnaaagtttacttannnatttttt

SEQ ID NO: 2292 - DNA, 600 bp, Gossypium hirsutum
  misc_feature (337)..(337): n is a, c, g, or t
ttaggttcttaatggtgcaagctaattgaatttcttgttgtttagaacaaaagcattagtttcttcttgaaaccattgaagggtttttctaaacagcactggattattagtagataaatgaattttagttatatgtgtatatatgtgatagatgtttgctttgattacaggctctatcagggggtcctttggtacaagctcgcaactttgcagcgatgaccggtgttaatgccggcatatcttgtgttatgaaaagactgagagggaaagaggatgtgcaatctaggtaggtccttttataatcacggtttatttatcttttctcatttactttctnttggtttatagctagaggaaatcactactagtccaaatcgcaaatcaatgtgatccctgttgagaagcagagaaatacttgatgtcagtctttgaggtcaaaacaatcttagctttcctaattttacaatctaacaagttgttcatggtagggtatctttgcttgcttgtttctgaatttggtcagttggaaagagttttctctgttgctttggtctaaaagtagcacggttagattcatcaacagagaattgagaagggatg

SEQ ID NO: 2293 - DNA, 619 bp, Gossypium hirsutum
tgagcataagataaaggactttgtatggcataacaatcattcacaaagaagtggattcagaaaaagaccttgaaaaagctactgcaatggagcagaaaaagcaaaatgcagcattttgtggttctgtccttcatttatgaccaagcatggaaaatatgaatgtaaatccaaggacgcttggcaccaatttcattaaaatatatatataaacagacacataaatagaatcaaaagactaacatctttgggggttaagaaatcagtacaaagtgtttaagtaggaccacatcaagtcatgtcctcaatcttttccaatcagcttatttagcacattgaaataaagccatgtacatgccttctgatttgaatcaaacttgataaagccattaaaaattattcaaacacaaatacatgattccctgatatgcaactcaccaatgccatgacggggtttcccacatcagcaaatgagagtgtactctcagatgttaaattataaccaacagcttcgaatgcctcccttagagccataattgcacaattttctttggtgtcttgtccatcttttgcttcatccatttcttctggctttgatgtttctggagcacattttatgtcg

SEQ ID NO: 2294 - DNA, 645 bp, Gossypium hirsutum
cccaccgtcttggctgtttatttgttatacggcttcctccagttgttcgtgtcattgctcagacttttattcaggttaactttcctcctttgactaaaacatgaatgtgttatatctcattgcatttcttttcttcttcttcttttttttggcctcaaatatgatgagggtccggttctcttctttttctcttgtgtaccaatttgtggcttttttcaggttttgaaaccaactacaaggaaaaagttaaaaattggaggagaaatgtaccgcaaaattctcttggagaatattcagacactcccatcatatctaggtggagactgtagatgcacaaaatgtttaaatattggtatggatgtgaagcgtccacccacggaccagttgaacaagttacagacaaatgaaggtgttagtgacagtgaggatacatctgaacttgatctgatttgtcaggatgatattgacccgagttggagctacgaccaggtattgagaactgccataataggtctgctcatgttttgggttcttatagctgtcatggcaggattatctgatcctgaatttcaatctcaataagatgaaagtggtgctctttctattacagtccatccagttcttttctttttcaagcctctgagt

SEQ ID NO: 2295 - DNA, 588 bp, Gossypium hirsutum
  misc_feature (40)..(43): n is a, c, g, or t
  misc_feature (556)..(558): n is a, c, g, or t
  misc_feature (563)..(565): n is a, c, g, or t
tttgtggttaaagaagatgaagaaacatatcttatgcacnnnnagtagtaatgtgccttaatttattattattttttgtttggggcggggggcataaattgattctaaattatgacatcttcaaaatttggtgaattcagagtatttaatgataccatgagtcatgagtgcagttaaatgctgtgtatggtttgtttgctttgtgtggctttttgctgattgatatgagttgaaatactttggcaccatgccttagtggcatcaactagtacgaccacgtttggagagatcttgagtcttagatatgtggaacctcttcaagagagatttgggttaatccactttgactctggaattccattaggttggttaagtagctgctaggttatcgatcatagttcataacttcctttctgatccaatcatagtacagaagggtctacagattgataagataaacagaaaaatgaaggccttgctagttagaatcagtctttttttttggggtatagtaaaaaaagaacaaaaaaaaaaaaagagaaggtgttttccttgnnnaagannntcttggtacaacggtgactcgaa

SEQ ID NO: 2296 - DNA, 610 bp, Gossypium hirsutum
tttcatacaatctgctaaaaccgcattcaatctaatctgctttatcattgtctccttttccatctgccccttgtagtaaccaaatcttctaaaactagatataattttatccgtgggaatcactacactctcccccatgtgaaaattctcacttctgttgtaaatcctgcaagagtgtgttattgatcaagcatgaaaagaggcaattatccgttggctacatttaccttttcttgcattgttaagcaaatttgaactttgtgcaatgatgtggtatggcatatagttctcttctagatgatgttgctaaacttttgatcctgggatcaatgtacaggcaggagcagatgcttgctttgtggaggcaccgaggaacgatgacgagcttaaggagattggacgccatacaaaaggttacagagtttgtaatatgattgaaggtggggtcacacccttgcacacgcctgaggagcttagagcaatggggtttcatttgattgtgcatccactcaccgccctctatgcttcagctcgtgcattggtggacgtcctcaggaccctgaaagaaaacggaactaccagagatcaccttcacaagatggctacatta

SEQ ID NO: 2297 - DNA, 522 bp, Gossypium hirsutum
ggaaatgtgtaacttagagaaaaaaaagaggtgaaaatttgagaggaaaaaacaaaagaacttacgtgaagaggggagagagaaggaggaattgagagacgttggcccaagaaggagtttgaggatagagaaagagcagtcattgagctttgcaacgcagccatggctgccattatttttgccttattcaactgttacagtaatttgagatgccgagagctactattttgatgatgacgataaatattgtatgtggaaattgtggataacgaagccatagataatgttggaaacgacagagttttggacatgggtcaaatatgatgggctttgtgggcttaaaactggaaataaaaaaaaatctcaaaggttaaaatatgctctaaatccctatacttttcatacatttaaatttaatccctctattttttggatttaaaaatacaatctaattgctaacaccgttaaacttatttttttaaattcaggttcattataacatgatttttcattacacggcta

SEQ ID NO: 2298 - DNA, 612 bp, Gossypium hirsutum
  misc_feature (607)..(608): n is a, c, g, or t
ccccgccagatccctttccatcatgaaatctcaataccaagaaaacagaacttgaaacacaacagagtagatgctaaacccaagtaaacaaaaaccacaacaacaaagaaaattcaaagcgaatataaaatataacaaacgctgacacaaagccacaacccaccaaaacattaaaacctaataacatgctagaaataacatatcagaaacatgctagaaagcagatcagaaaccaatttttttttaaatttctcaaactttattattaagtagttttaaaccctatttaaatgaaatttgagtttattagcttaaatttttttttctactttttcacttttatatataaaaaaaatcatcctattatatcaaataaatatttaaaattgatcacttaaggacttctgggcttggctaggcaagctgcattttttaaggtcgctatcagattaatcatcataatttgtccttttcaattaacccaaaaacaaagatttaaataaaatatattctgcagtcattttgatagatttaaaagaaaaaaagaaaagaatcaagatgacagcacaatattcgatatttcaatatgggcacggctcctttgatnncata

SEQ ID NO: 2299 - DNA, 979 bp, Gossypium hirsutum
  misc_feature (109)..(109): n is a, c, g, or t
  misc_feature (118)..(118): n is a, c, g, or t
  misc_feature (148)..(148): n is a, c, g, or t
  misc_feature (166)..(166): n is a, c, g, or t
  misc_feature (172)..(172): n is a, c, g, or t
  misc_feature (180)..(180): n is a, c, g, or t
  misc_feature (184)..(184): n is a, c, g, or t
  misc_feature (193)..(193): n is a, c, g, or t
  misc_feature (209)..(209): n is a, c, g, or t
  misc_feature (211)..(211): n is a, c, g, or t
  misc_feature (235)..(282): n is a, c, g, or t
  misc_feature (287)..(287): n is a, c, g, or t
  misc_feature (314)..(318): n is a, c, g, or t
  misc_feature (335)..(335): n is a, c, g, or t
  misc_feature (354)..(357): n is a, c, g, or t
  misc_feature (363)..(363): n is a, c, g, or t
  misc_feature (381)..(381): n is a, c, g, or t
  misc_feature (395)..(397): n is a, c, g, or t
  misc_feature (445)..(445): n is a, c, g, or t
  misc_feature (459)..(467): n is a, c, g, or t
  misc_feature (474)..(475): n is a, c, g, or t
  misc_feature (500)..(500): n is a, c, g, or t
  misc_feature (503)..(503): n is a, c, g, or t
  misc_feature (507)..(507): n is a, c, g, or t
  misc_feature (526)..(526): n is a, c, g, or t
  misc_feature (579)..(579): n is a, c, g, or t
  misc_feature (628)..(628): n is a, c, g, or t
tagacctccagaatctcgtcctcatcatcatctagagacagccccgccagatccctttccatcatgaaatctcaataccaagaaaacagaacttgaaacacaacagagnagatgctanacccaagtaaacaaaaaccacaacaacaangaaaattcaaagcgaatntaaaanataacaancgcngacacaaanccacaacccaccaaancnttaaaacctaataacatgctagannnnnnnnnnnnnnnnnnnnnnnnnnnnnnnnnnnnnnnnnnnnnnnnttttnaatttctcaaactttattattaagtannnnnaaaccctatttaaatgnaatttgagtttattagctnnnntttttntttctactttttcacttntatatataaaaaannncatcctattatatcaaataaatatttaaaattgatcacttaaggactnctgggcttggctannnnnnnnncattttnnaaggtcgctatcagattaatcatcntantttntccttttcaattaacccanaaacaaagatttaaataaaatatattctgcagtcattttgatagatttaaaanaaaaaaagaaaagaatcaagatgacagcacaatattcgatatttcaatntgggcacggctcctttgattacatattttattaaaaattttagtttaatatttaaatattttattaaattaatattatgaattaattggatcctaatttaattaaaaaagtattaaaaagctatcatattttataaagtaaattttattattatgatgatattttaataaatcaataaaaaagtatatataataataaaattcaacatttttattctaccttataaaaactttcttcacatctactaacaattatcccattatgatgctgaaaatcataagtaaaaactagtcagatacttgggcaaaagaaaatagtcatatatacatgtgagtgatatctaatattttt

SEQ ID NO: 2300 - DNA, 650 bp, Gossypium hirsutum
gcagcattgaagctggaccgaatgaagcaatctgttttgttcattttgttcctatgtaatcttgtttagttcatttataatttgcttacaaagttagtaggattagtttttgatgtgaatttgatgtaaaagctgatatgtttgcttccttttgtgtataagttaagttaacattagtatagcttaagtgggagcagttaaagtcattaggtaactgtccaattcattttgtaactccaatatatttcaaatttgaatgaaaaatcagcagcattatttcagttacaatttgaccattgtttttagctctgtttttcgatttactttgctgttttcatctttgttttgctgccaatgttccaacactatcaagccactctaaacccacctggtggagtttgacaaggtgaaaatacctcaaagtccaaaggatcatatgatgcaatggtacaagggaaatcagtcatggatccattgaattttcttctcttctatattccaacctatcttgtgttcctcgtaacattattcctaacactagctctattcaaaacttttccccgtgattttaggagtgcacttcaagtattattagcgtttcttgcagtttccttcgatcaatcaatatctgacttagcacccaccacttt

SEQ ID NO: 2301 - DNA, 1192 bp, Gossypium hirsutum
  misc_feature (563)..(565): n is a, c, g, or t
  misc_feature (567)..(573): n is a, c, g, or t
  misc_feature (575)..(576): n is a, c, g, or t
  misc_feature (583)..(585): n is a, c, g, or t
  misc_feature (591)..(592): n is a, c, g, or t
  misc_feature (611)..(612): n is a, c, g, or t
  misc_feature (614)..(618): n is a, c, g, or t
  misc_feature (621)..(631): n is a, c, g, or t
  misc_feature (633)..(646): n is a, c, g, or t
  misc_feature (654)..(658): n is a, c, g, or t
  misc_feature (661)..(663): n is a, c, g, or t
  misc_feature (667)..(674): n is a, c, g, or t
  misc_feature (689)..(689): n is a, c, g, or t
  misc_feature (697)..(700): n is a, c, g, or t
  misc_feature (705)..(706): n is a, c, g, or t
  misc_feature (712)..(712): n is a, c, g, or t
  misc_feature (727)..(727): n is a, c, g, or t
  misc_feature (729)..(731): n is a, c, g, or t
  misc_feature (734)..(747): n is a, c, g, or t
  misc_feature (759)..(761): n is a, c, g, or t
  misc_feature (766)..(766): n is a, c, g, or t
  misc_feature (771)..(777): n is a, c, g, or t
  misc_feature (779)..(784): n is a, c, g, or t
  misc_feature (789)..(791): n is a, c, g, or t
  misc_feature (795)..(800): n is a, c, g, or t
  misc_feature (807)..(813): n is a, c, g, or t
  misc_feature (818)..(824): n is a, c, g, or t
  misc_feature (830)..(832): n is a, c, g, or t
  misc_feature (837)..(839): n is a, c, g, or t
  misc_feature (841)..(847): n is a, c, g, or t
  misc_feature (849)..(862): n is a, c, g, or t
  misc_feature (868)..(872): n is a, c, g, or t
  misc_feature (874)..(876): n is a, c, g, or t
  misc_feature (878)..(894): n is a, c, g, or t
  misc_feature (896)..(930): n is a, c, g, or t
  misc_feature (937)..(938): n is a, c, g, or t
  misc_feature (943)..(949): n is a, c, g, or t
  misc_feature (960)..(966): n is a, c, g, or t
  misc_feature (968)..(975): n is a, c, g, or t
  misc_feature (977)..(977): n is a, c, g, or t
  misc_feature (980)..(982): n is a, c, g, or t
  misc_feature (984)..(987): n is a, c, g, or t
  misc_feature (989)..(990): n is a, c, g, or t
  misc_feature (996)..(998): n is a, c, g, or t
  misc_feature (1012)..(1023): n is a, c, g, or t
  misc_feature (1025)..(1036): n is a, c, g, or t
  misc_feature (1045)..(1046): n is a, c, g, or t
  misc_feature (1048)..(1058): n is a, c, g, or t
  misc_feature (1060)..(1064): n is a, c, g, or t
  misc_feature (1066)..(1070): n is a, c, g, or t
  misc_feature (1072)..(1074): n is a, c, g, or t
  misc_feature (1082)..(1084): n is a, c, g, or t
  misc_feature (1086)..(1088): n is a, c, g, or t
  misc_feature (1094)..(1116): n is a, c, g, or t
  misc_feature (1118)..(1140): n is a, c, g, or t
  misc_feature (1143)..(1144): n is a, c, g, or t
  misc_feature (1146)..(1147): n is a, c, g, or t
  misc_feature (1149)..(1151): n is a, c, g, or t
  misc_feature (1160)..(1161): n is a, c, g, or t
  misc_feature (1168)..(1171): n is a, c, g, or t
  misc_feature (1178)..(1182): n is a, c, g, or t
  misc_feature (1186)..(1186): n is a, c, g, or t
ttgaaaatgatattattaaaagttataaatataaattaaaataaaaggatgatggaagaataataaaatttttgaaacctccagaatttctccttcattcaacggtgactaggttttctttaaagcaaagacatttttcttaaatcttgaaagcttcaattcttgtatttttaaaagttttatttatatatttaatattattagaataaccttttactttttaatagatttttaatattttcaaagcttgaattttctaatattaaattagagtgtgtaaatattaaaaattaaattattataaataattatcaaattaatataataaataaacgttgagtctgaaattttttattatgtaaaatttaaaattattaaatcatctcttgatggtaaagttaactacatataataagattcaataataattacgattagttaaatgattgttttgtaattctttatagttgattaagatgtttttttttttttaaaaaaaaccgaagggttaattaaaaaaaaaaaaaggggaaccaaaaccggggggccttaaaaaaaaaaannngnnnnnnntnnccctttnnnaaaaanngaaaaaagaaaaaaccccnncnnnnnaannnnnnnnnnntnnnnnnnnnnnnnncttctttnnnnnttnnntttnnnnnnnncccccttcctttttnctttttcnnnnccttnncccccntttccttcctctctntnnnttnnnnnnnnnnnnnntttttcctctcnnnctttnttttnnnnnnntnnnnnntcctnnntttnnnnnnctttctnnnnnnntcccnnnnnnntttttnnnctctnnncnnnnnnntnnnnnnnnnnnnnntcctcnnnnncnnntnnnnnnnnnnnnnnnnncnnnnnnnnnnnnnnnnnnnnnnnnnnnnnnnnnnnctttttnnctttnnnnnnntttcttctctnnnnnnntnnnnnnnncntcnnncnnnntnncctttnnnttttttcctttttnnnnnnnnnnnncnnnnnnnnnnnnctgtcgctnntnnnnnnnnnnntnnnnntnnnnncnnntgctcttnnncnnnttttcnnnnnnnnnnnnnnnnnnnnnnncnnnnnnnnnnnnnnnnnnnnnnnctnntnntnnntccgttctnnattgctnnnntccaatnnnnnaaancccaaa

SEQ ID NO: 2302 - DNA, 570 bp, Gossypium hirsutum
tcataggttgggtgggtcgactcgacgggtccttttcctttttagttttcttcatgtaggatccgaatatattatttttaataattattattgataaaggaggaattaattgattacaataaacaaaaatgcttaaaagttaattaaaatacttttactgaattaagatgatcatatatttttatgtaatcaaatgatttatttatcaccaagtaagcatttctcagaaaaaaatctgagagctttattataatgaggtgaatttatttattcaaaacaaacagttaaattttagggaattttgttattctaaatctcaaatatctttctaaaattctctcaataaatggactaaaaataaaatttaacattttataaaaatagtaaatacatacttttggtacatgaacttcattttaatatttaaattggtatttaaagttttttagtctagttaagtatttaaatttggtcttaatgttcaatttgatccttaaatattttttggtctaaacttgaacttggttttatagtttaaattggtttaaataaatcattcatccgaagtcc

SEQ ID NO: 2303 - DNA, 615 bp, Gossypium hirsutum
  misc_feature (583)..(584): n is a, c, g, or t
agaaagcgtgaaataaacaaaacaggcattgatcagtataataaaccaccatcacggctttcaacataagtacataaataaataaaagccagaacacaacaactgaatgacaagcccaccaatcactcatgttgaattttgtgcacaaattcacatgaaaccaagacaatcaaatttaatgttgtattagaatcctggacctaccaatggtgtgcgaacacattgaggaaaaaactaacattagaattgattcattattagtgaatgtaagaaatagatatcaattaaacagatcatataaaggcaacagtcaagaaaaaaaaaatctgacaataagaggacaccttccaaaaacattcaggtcagtatggcacttcaaatgggcattcaaagtggaaaaatatcgagatacatgcaggataaccaattacccttaggaaaccttgctccaagatgaagcccaaaaccattggcacagctgaaaagataccaatttgaaacaaaaactgagtatttagagcagcttcaagagcagcgttatccattatccgagctcgctcttgcattgtttcaccaactccannaagtgcctggaacaaaaatttgggtcaatat

SEQ ID NO: 2304 - DNA, 620 bp, Gossypium hirsutum
cgatgcaaaatttgtatgtactagatatggaaatgacccagagtctcctctacctgcatttgccacaaccattcctgtcaagaagaaaagaggcagacttaaccgatcatggtctaaaacagactgcaaagctggtatgcatgttaagagaaggcaagatggaaggtggattgtttgtagtttcataaaggagcataaccatgatacattcccggaccaaggatattactccagaggtcatacacctttagctctaggtaacagtgatgtcagtgctaccgctggaagagctaaaaaaatgcatcttgccacctccacacaatctggtgggcgcaagaaacttgatcatcatacagctggtgactcaaatcgatttcgtagctgtcagctattgggtttagaggagggggatcttcaagttttacttgattgttttaaccatatgcaagatgaaaatcccaacttcttttacgcaatggacctcaatgaagaacagcgcttgagaaatgtgttttggattgatgccaaagggaggcttgattatagctattttgatgatgtggtttttcttgacaccacatatatcaagaatgattataaactaccagttgtgcccttca

SEQ ID NO: 2305 - DNA, 624 bp, Gossypium hirsutum
cattcgtaatttatacaaaagtggcttgcatcttgcttttgtaaggaagcgtagattttatttttaaatacctgatctaaaaggttaaacagtttctgggccttctcaggaacatcaacaagccgcacagctgcgacatctaaggcagctcttccacctaatggtggctccccatttccatcgtcatttgcaacatgtagctggttattatccaaacttgaaccaaataccgaaagtgacaaagttgcgcccaatctagccagagtagctctcaaggatgcttcaaagaccgaagacctgcttgttagacagtctgcaacagtgagtatctgcaaggctccttgaacaattgaccactcctcttcattagagatcaaatcagtttttcttgaattttgagccccttccttcctgtccaagccaatatccttgttgtccactccacagacagctctaagtgatttgagggtgtcttggagggtagaaatgtactgtaacattgtgtcatcaagtgcaagaatcaactcatctgcctctgaaccaccagtaaagttgatgcacctctctacagctgcttcaagaagtaagataacttgaggaatagattcttccatccttcgaaca

SEQ ID NO: 2306 - DNA, 617 bp, Gossypium hirsutum
attatacttaaagcagcagaaagagatcctggttctgaagaccaagcctggaaaatttctggatccctaaaagattattttaaggagaatcttaacaaatctcaacaggaagctatacatgtaagtctttggttaatttattatgctcggtatttacatggtagttctatcctttatttttctaattagtccatgcagttttagcttaaacaactacttgtttggttctaccttattatttttcttctcataaccaaagatatttcattctctctgttgcaggctggtctgtctcgtaaaccctttgtcctgatacaggtttagcatctcacttagtttcttctttttgtctgttggctattttttcaaaagaaagaacaaaaaatgaaggaggagaactctttcgttctcttttggcactattctgtaccattccaattttttaaaatcaaaatgatgcggtcattcttataagcactgaattgaataagtggatgtgaaaataacagatacgtccatgccatattacagacctgcacagaattggtgagtcgatgaaagaaaataggaggtgaagttttaatgtattatctttctaatgtaagtgctgcacattg

SEQ ID NO: 2307 - DNA, 612 bp, Gossypium hirsutum
tattgttgttatgatagcttgggaaaattttgttcttgtaggtgtacatttcggatttgacggaactttttacttggacttgtgaaagatgtaatggtttgaccaaggtacttgattttctagtggtttcttctttgatcttcaatgtttaactaggtttctagtcgaatgtattgtactaatgctcccttctattgaaacagggatttgaagttattgagcttgttgttgatattgagaactgtttacaggtgcatctctttgtgtgcttcgatatttattgaaatcacaacccatgtaggtgttaaaattaatggttataattgacatgaaattgactataaattgataggcatttgtcggagtggcgaagaatcttaatgccgttgttattgcctttagaggaacgcaggaacacaggttctaacgtcatttgcttctctagtttctgttcaattaatgttttcaaaagaaggttattcatggcatcaaaacataaatgataaacaagatttgaagtatggagaaactgatagtctttgttctttctaaaaatgaatatgttttactgttttctgtttgattgatttgtctgtctgtttgcagcataca

SEQ ID NO: 2308 - DNA, 654 bp, Gossypium hirsutum
acctttctgaggttgtcagctcgttgatcttccgtcatatggagagagattaaatatctttcttcaatatgttacgacgagctcgagtacttgttcttttatattttccctatgttgtcatggctttatcatttgttactttgcttcctggtttttttattgtttctgttttaactctatagcttaataccctcgtgttgattttccatccatgttagtttcttaatatttttagacctgctgaattgagtatgcagcaagatttcttccagaagctgatggagctattcagaatctgtgaagacttggaaaatatagatggtcttcacatgatattcaaaataattaagggaataagttagtactctttctaacttggatgctcttatttctttgttataaaagcttatattttacaagtgattcatggatatgtgatttatgttgttggctgttttacagttttgcttaatagtcctcaagttttcgagaaaatatttggggatgaattaatcatggatattatcggttctcttgaatgtaagtcctatactgtttgttcgtggatttattattggtgactattgttgattgaattcaatgtctaatttgaaaatttacttatattattggcacgatacttctttatgcaaa

SEQ ID NO: 2309 - DNA, 609 bp, Gossypium hirsutum
tcactagtgtttctaggccagcaactctttttagcttattacatcttgatgtttgggggccttatagggtgtctacccgttgtggccatagtttctttttaaccattgtcgatgatcatactcgcatgacttggatgtacttactaaagcttaaatctgatgttgtgatagcactcaaacaattttttctcatggtcaaaactcaattttctactgtcattcaaactgtcaggagtgataatggttctaaattttttaattccttctgttctcctttctttgagtctttaggcattattcatcaaagttcttgtattgctacacctcataaaaatggtattgctgaacgaaagcataggcatctgctcgaaattgctcgtgctttacgttttcaatccaatgttcctcttaaattttggggtgactgcattttagctacttgttacatcattaatcggctctcttcttctattttagcttggcgaacgccatttgaattgctttatgaaaagccccctaatttttctcactttcgtgtttttgggtgcctttgttttgcagttaacccccataattctgataaattttcttccagatccctttcctcag

SEQ ID NO: 2310 - DNA, 620 bp, Gossypium hirsutum
  misc_feature (606)..(606): n is a, c, g, or t
  misc_feature (616)..(616): n is a, c, g, or t
gacacgaggaataaaagttgagcccaaaccagaagcttagttgatacaaaatatgactcaaccactaataaatagaaatctagaatacttaagtctcaaatctaatatgcagaaggaaaagtgaagacacagggtgactgggggaaccgatctatgcaagatctccttgtgataacaagcactcgtgtagttatcggttcccagtttatgaacactaaaagaaaaggttctttcaccattacagaattcacttttctatggcactcagaaaacccagcatgtccaataaaaatagctgccatcagaaattctccagagtatgaacaaacaaggtgggagcacaggaaacttttcaagctgatgtaccttatgagtgagacctccctctagcttctgcctcttggcagcttgacttccaacgccagaagagtgaactaagcttctgtcactgtttggcacctgtaacttcttaaatctacaaaaaagaaatatataagggtcgtatctgaaatattttaatataggggctccaaaagatatattattcctcttattgaaaccagaatgcttttgcatcgcatggaataagaacttaggaccgttgancgaacgatgnatga

SEQ ID NO: 2311 - DNA, 606 bp, Gossypium hirsutum
  misc_feature (538)..(539): n is a, c, g, or t
  misc_feature (561)..(563): n is a, c, g, or t
  misc_feature (578)..(578): n is a, c, g, or t
ttcctatagcatttgcgttgtttatttataactagtgatagttgtgaagaaccggaaatcattttaataatataatacaatgccaaagctcacggctgtcctttgaccttaaattcctcagcagacttgcaagtagcgaaagggacaactgaactgaaaatatcttcaattgtctctttatacgtgttacactacacggtttcttgaagagcatgtaactctttatcttgtttatgaatgatgtgccttgcaattctggttcgcagatgtaaaaatatgctgaatctatcattcattcaaaatacaattggaactaccttgttccttttacttatgtgcatcttgtttgaagttggtaatcaataatggtggataccggaaaggcgtggtagaggaaaagctaagggtcgctattaatgggtttggtagaattggaaggaactttttaaggtgctggcacgggcgtaaggactccccacttgatgtcattgcgatcaatgacactggaggcgttaagcaggcttctcaccttctcagnnatgactctacccttgggatatnnnaagcctatgtaaagngactctacccttgggatatttgaagccg

SEQ ID NO: 2312 - DNA, 516 bp, Gossypium hirsutum
gatttgtctttttatttttactttggaaatgacaattcatcctttagagcgaattctgattccattcaggtttctcttttctttactgagtctccaacaaatcctttcctgagatgtgttgacatagaaagagtttcaaagctgtgtcacagcaaaggagcacttgtctgcattgatggtaccttcgctacacctcttaaccagaaggccctggcccttggtgctgatcttgttttgcactctgcaacaaaattcattggggggcacaatgatgtgcgcacttgctcttgttaatttagccagtctgaaatccattcttgctgttggttattttcaattctatcaataaactagtttaattcttcatgtcacaggttcttgctggttgcataagtggtccagagaagttgattactgaaattcgtactttgcatcatattttgggtggtactctcaacccggtgagttgtcctgaccttaatcttagttaaatatttctcgtggtgcccttcgtat

SEQ ID NO: 2313 - DNA, 991 bp, Gossypium hirsutum
  misc_feature (631)..(641): n is a, c, g, or t
  misc_feature (643)..(697): n is a, c, g, or t
  misc_feature (699)..(700): n is a, c, g, or t
  misc_feature (703)..(703): n is a, c, g, or t
  misc_feature (705)..(721): n is a, c, g, or t
  misc_feature (726)..(740): n is a, c, g, or t
  misc_feature (742)..(750): n is a, c, g, or t
  misc_feature (758)..(758): n is a, c, g, or t
  misc_feature (761)..(761): n is a, c, g, or t
  misc_feature (769)..(771): n is a, c, g, or t
  misc_feature (775)..(777): n is a, c, g, or t
  misc_feature (779)..(780): n is a, c, g, or t
  misc_feature (782)..(804): n is a, c, g, or t
  misc_feature (807)..(822): n is a, c, g, or t
  misc_feature (825)..(828): n is a, c, g, or t
  misc_feature (831)..(831): n is a, c, g, or t
  misc_feature (835)..(837): n is a, c, g, or t
  misc_feature (839)..(843): n is a, c, g, or t
  misc_feature (847)..(849): n is a, c, g, or t
  misc_feature (859)..(859): n is a, c, g, or t
  misc_feature (861)..(863): n is a, c, g, or t
  misc_feature (866)..(870): n is a, c, g, or t
  misc_feature (872)..(891): n is a, c, g, or t
  misc_feature (893)..(912): n is a, c, g, or t
  misc_feature (915)..(922): n is a, c, g, or t
  misc_feature (925)..(936): n is a, c, g, or t
  misc_feature (938)..(943): n is a, c, g, or t
  misc_feature (945)..(945): n is a, c, g, or t
  misc_feature (948)..(950): n is a, c, g, or t
  misc_feature (952)..(960): n is a, c, g, or t
  misc_feature (963)..(967): n is a, c, g, or t
  misc_feature (969)..(979): n is a, c, g, or t
  misc_feature (982)..(983): n is a, c, g, or t
aggtacatatgctaaacttcaaccagatggaattggcttttctgacttaccaaatcacaaggccattcttgagacaagccttcgtcagcatgctaccctttctcaagatgatgttcttacagttaaatatggggagttgacatataagttacgtgttcttgagctaaaaccctcttcaagcatttctgtcttggaaacagatattgaggtggatattgtcaaccctggtgttgaatcagagaggactgatcaatatgtcctaaaaccactagcatttggtgcatcagaatctggattggttgaggagggaaattacatgtactataagttctcaattgatgatgatacatgggaaaaacttgtttctgatgatgtcaaaatagaggtgaagatagatgcagaggcaaatggtggagatactgacctttatgtatccaagcatcccctcatattcccaaaccgacaccaacatgaatggtcttcccatgatgttggttcgaagactttgatcctcagttccaaagataggaaccttggtaccggtacttacagcctggctgtctatggcttcaaaggaacaaccaagtaccaggtatcggtgcatgttcaagagaacagcaagcataaggannnnnnnnnnntnnnnnnnnnnnnnnnnnnnnnnnnnnnnnnnnnnnnnnnnnnnnnnnnnnnnnnnannaanannnnnnnnnnnnnnnnnaaaannnnnnnnnnnnnnntnnnnnnnnnaaaaaaantanaaaaaatnnnatannnannannnnnnnnnnnnnnnnnnnnnnnatnnnnnnnnnnnnnnnnaannnntanaatnnnannnnnattnnntttatatatntnnnatnnnnntnnnnnnnnnnnnnnnnnnnntnnnnnnnnnnnnnnnnnnnnatnnnnnnnnttnnnnnnnnnnnnannnnnnanatnnnannnnnnnnnttnnnnnannnnnnnnnnnaannataaaaaa

SEQ ID NO: 2314 - DNA, 591 bp, Gossypium hirsutum
atcgctttgcaacttataaaaatagagatctatatgtgcaaattcatacacagcttattataacagtttttgaaacgaaaatcccctcattttcactttcggtatgtgaagatttttactagatttttagtctgtagcagtctgttatcctgactcttttgggacaataaaattgcacactccaacctcacccactctcagtaggattgcaatctagcaaaagaaaattgaagaaatgtatttcaaattgagaatcatacttctctggagcagttgaaaaaacatcctcaacttcaatgggccggagattattgtcctggaaaaaacaatattacaattcttataatttcaaaaactataagaacaagttaagaatattaacattttagactggaatagaaaatagcaagagaaatataatgtaaataaatatgagaaagactaagacatactaagtcactgtcaaacaattcatagactcccttcaggaattcgatagcttcatttgtcagctccacactctacataaaaggcaacacagaagagcaaaattatatggagaagttcaaataacgccataggagagcatat

SEQ ID NO: 2315 - DNA, 622 bp, Gossypium hirsutum
ttgggttgggattggccagttttattgggtttgattgtatttaatttgggctgtgtaaatgattttgggccccgggcaataattttgtattacaattaaaaatgaatttttattttttatttgtattttcaaaaactaaattaagattaagttttgtcaaagaattacgtaggtttttataggaaactatttgagtttttgtagaaaaaaactttgagttttaaaataaaacttgcatttcttatttatagttaagtaacgcaatttttagtaatttttttaaaataataaaagaaattaaaaaaaatatctagttgatttggatattgttatccagaggacatgtatttgaatgtgttgaaatttattattctcttatttatgagttaagaagagaatataaacaattataagtattgtgtcaacaaaatagatataatcaaaatttatattgagattatcaaataattattatttttttaaaaaaaataaagaatgattaaaatgaatttcagttaattaaattaacaacaagcgattaaagcaagaaaacaatttaataatattatttaaaatttttactaaattttagtgattaattatatagtttattcgagaataa

SEQ ID NO: 2316 - DNA, 577 bp, Gossypium hirsutum
  misc_feature (433)..(433): n is a, c, g, or t
  misc_feature (460)..(460): n is a, c, g, or t
gctgcatgtgataataagaaggttaaatattttaaaacaatagaaaagattaaaggaacaacagattcaaaaattaaaggaacaaaaaatcagaaaaaaaaagatccctatgtacaacagatttcattaaccttacaagaaacaagtatataagttccctgccacatcttaaaagatatcttcattaatccaataggaaacatgacacaaggataagcagagaaccaaagctatatgaaaatggaagattgaggtgatatcaaggctgaaaattctctttgctgtatgaaatttagctctttcttgcatattaagagtaaaaaacttggagaaaaggacaaatttcctaactagatttaggtttatatgaaccccataaataaaaacctagcagctaacaatttaaagactgagactgacatgatatgcaagnaagcctatagcttattcagatatggcnttcttcatgtgttttatattttaagcatgcatatgttttggactttaggaacctttcttctactgatactaaccttttttcttttgaagttcttataatgcatacttttggcatttt

SEQ ID NO: 2317 - DNA, 654 bp, Gossypium hirsutum
  misc_feature (16)..(16): n is a, c, g, or t
  misc_feature (249)..(249): n is a, c, g, or t
aaaagttgcttttgcntgatgacatcccttattgttgacttgacaatttcagataaggtggtcagagctgagtggaggaggtaattcttgcacggggaattgtttcgatgaagtttccatggagcttgtgcacggatgctacttaacaaaacttcccttatgtgttggaaacttccgaaggttgggtggaaaaacaagaaaagggaacctccaaacctttggtgactgggggaactttttaagtttccntggccccttccaggatggaaaaggggaaaaaattggaaaaggttacagtgggtaattgggttaattgggtccgttggggttggacctaaaaatccttggaatcccccaccccctcttttctctctttaaatatcataggaatagaatagggagatctaaatctggctaaccctagttgtattctctcacctaggtggagagactaaatcccacccccaaacctcaattttgattgaaacatcatttttgaagccaatcctttcgccaccaacaaaccagatttgcgccccctcccccctcacactaaaagaaaaaaatctcaaatttctcctcacaccaacttatgggtgtggcccctactaaaatagccttttgtttatatcgcacaagaagaatagatgatgg

SEQ ID NO: 2318 - DNA, 620 bp, Gossypium hirsutum
  misc_feature (64)..(64): n is a, c, g, or t
gtgaagaagggtacaaaaaatgagcaggtagattttaatgcaggatttgatatatatatatatnttttagatgatattaattgcttggatggctgggagtaggattaaatgctgtttgccattgttgtaggttgatgctgttcttctggctaaccagcttagaaagaggtttatcaatcaggtagagctacatgcggtttgcctgttgtaaaatgcttgctttaattttatggttgcgtagttggctaattcttgattcagctaaatttagattttttttccttaattctctgtttcataacgaaggccatgttggagaaagtttgtttcaaatgtacatgtcagtgtttttgttgttcttatgttatatcaattcacacttggaaataatttgcttgatgacattacctgttttcatgctcatatctcatgcaaattgcttgttttgtacttcctctctttcctcaggcattaacacatgtaaaatagatttcttctatctattttttcactcatatctcatgtaaaatgttggtttggtactttcctctctttccttaggcatgcacatctgcaatagattgaatgatttttgttgaagtcattgagtactggtttcc

SEQ ID NO: 2319 - DNA, 482 bp, Gossypium hirsutum
tggaaccataaacaattgtattggaccagatatgttcaaagatggtacatttcaactagaaaagaaaaatgtaatcaatgtatagacaaaaatcagttagttacttttagcgacaacaaatccaccaaggacaaaaaccaccagcagggaaaaggtaccaagtgtgtttgctacaacttgtgttcttccaactgcagcgatgaagcggaagagagacagtgccatctggtgaatgccaaagaacgctaggaattgacggaaaaacctaaaacattatacaataaggacatgttattgcatacagttatagattaaggaaactcagaggaggaaaaaatggctaaatgcaatcaagtgtagaagtatatgttctttctcatacctactggcacctggagcaaaaccaatagtgtaataagttaggatgatccatatccctgactctagtaaagaaaggggaattctaaggacccaaattggca

SEQ ID NO: 2320 - DNA, 608 bp, Gossypium hirsutum
tgtttttttggacatttcacaattgtcttacatgtaaactttaaacccaaacctaaaaaaacattgttaatggtaatgggaaatagagattagcttatcaatagtttcaaccacgccatctttgttgacaatgatttgttatcaaccactgcttgaaacctcaatcatttttttatggtgtttaaattcactggcctaacttgattatcataatcattcgttttgaatatcatttccgttcacttgttttaaaatttggtgcagtcaaaaatttttgaagaacaaaggcatgtgatatcatcaagtttatatgatcattgcccttggcattacccttataagctgacgttcttactagctaattttgtatatttttgaagctatcattgcatattaatcaacagaaatcacatgctattccattaatgatacaacctggggaaaatatactttttttagtgagtcatataaaactgttaagtattttcagggaaataactgtttctaaaatttaaccaagaaaaaaataagtgagattaatgacagaaagagaaacacgatgaaaagaagttgtttcagtattggagtttcgatcactttgggagtct

SEQ ID NO: 2321 - DNA, 629 bp, Gossypium hirsutum
ggaagctttagattatgtagatatccctcattctcagataagaaaggttagttaaaaattgtcattatttttataattttaatgaaagtccaaagttgttaagcatttatggtacatgggctttattctatgcatctacttcttagtagatggtcccctttgtagaatttatgcatttgattttgtttttgtgataatctgcattaaatttgaaaggtaaccgtgctacacggcgggatttagaagatgtaattaatttttttctcaattactgttctgttatgatggtatttatttgatttatgtgacgcgtttgataaatgtgtattttctgaacttcaattagtaaggaaaagaaataggtataccaataacattttttttatctcagcaatgtttgaggaacaattttcctatttttaatttttaaaatacaaattagttgagtttttgcttcaacaagaagcatatgactttccaataagtttgttattattatttttttgtaagctttagtagagtgttgtaatttttttttttaatttgaagaatgatttgaatttttttctaaatacaatcctccccccccaacccccaagtacaccaaggccaaataggaatcatctaaa

SEQ ID NO: 2322 - DNA, 467 bp, Gossypium hirsutum
aagaggctgcatcctcggggacttaggttggagtaggtggagtgagggtggagtcgggagtgtctgacataacattatttctgacattggacagcctcctatgtgaagttgtgtgttggttggtgattggtgtggatttgcttacgacctcagctcccagtattttctcccttttgcctgtgttgatttcagtcacactgtaaattatggtcactttgtagctctcgtagtggagcatctgcctgctggtagttgtctgattttgtcgctatatgctctgtagatgcaaagcactttaggtcatatttgaaggatctgaattggggtcatgaaaatttggtttcaacttttgattcactttcaatcttgattctgtttttgcttgttattcaaatgatgtcaccatttggtatcatactatactatacttgccctagtatagcatcaaagggttggagtaagttgtt

SEQ ID NO: 2323 - DNA, 660 bp, Gossypium hirsutum
ctgacgagattacatgctcctcactctaagtacagtctcaaggatgatatggatgtgttttcccctgttgtggatgttcaactgattacatcctcactcgataagttgtgggatattcatgagggtgcaaaaaaagagcatctactcgctgataagaggccctcctcccttctgtttccctctagcaggaggtttgcttttgctgatgatggagctggtgatcacccaatatttgattggaagtccagttcaatatctcaacaggtttttggctttttcatcttctgccatgcattacattgctgcatggcttatttattttggttttggtgtacaggatattagtctaaaatcttcatgctaatgttctaagttagtgtgcttatactatttagtcctcatttttgcatagaatgtgaattgtccatttgtgcattgttttgtatgtttggagcattttgagtgtgcatttcattgagtaaaatagctcacacgttttctaaatacttgctaacaaattgggttggcatgttttaagtatttctaagatttaaaatatgagaccttttttcttttgaatagagttagtttatgatccaagaaacagaatttctgctactgaacaaaatgtcaaactagttattcaccgcaaaaaagctc

SEQ ID NO: 2324 - DNA, 647 bp, Gossypium hirsutum
  misc_feature (68)..(71): n is a, c, g, or t
atttagattcagttttaacttataaccatcgttatttttattttttttctattttcataaatttccannnnaaacacctccataaagacgcctttgaaaaggacaaagaatcctcataacgaattcatcaattaaatatcataataaactcaagcgatatacagaaaaagagaccaagctatgtcaggaagcacatgattacatgtacaaaatcatctacatgcaaagtgcaaatatatatgatatatatttatgtaatagtcatacgagttatcttgacaagcattgcctgtctagtcatggaaatgtagtgacttttggcagattattacaattgtgaactaatgaagggactcttacccgtaaggcagtattttctgccatttctatagcagcatcaccagtgttggcaaaacgattgacccaacctgttcaaaaattgtaagaacaagcaagccacctaaattggaagtgcactgataaaaagcgtgccctattcactcttagtggtcacatcttatctctcaaataaagccagcgattgacctgcctgccaagtgaaatgaaagtatatgattgcccctagcttcacaccctaatacaaacagttttcctcagatattcaggctcatcactgaaatacatgg

SEQ ID NO: 2325 - DNA, 658 bp, Gossypium hirsutum
tatttagtgcattataattaactgtattttctgaaattttgattgattttgcaagtattgtttgtttaattgacataagaagggtgccttaatagtgatagaagaagaggttacaaatgctaggattcaaatgccatatttgcttaatgctgcctcacaagatggctgtatgaaccgagttaatctccgtggtctttattcctttattgttatttttgtggtagaaaggagaggtagcagaggttgggattgaaatcccagatgtactcaataccacttcttaacatagctgcatcaggggcgaagccagaaaattactttaggagggcccaaagatgagtcataaatttttgggagtcaaagtgcaattttaccattatacgaacatgtaatttcatacaatttttaaagggctaaagggcaaatctaccattttggggtattttaaagccagaaaattactgcctccccccccccttttgccttcaccactgtctgaatacacaaaccgagttaaatacagagcttcttgtttcattattgttattgatacacatgcttttttctctttagattaagctagcagacaagcaggcggccttagaaaagacacaatgggaagcaatgacatctaaaccaaagttggaaaaaacctgca

SEQ ID NO: 2326 - DNA, 563 bp, Gossypium hirsutum
  misc_feature (495)..(495): n is a, c, g, or t
  misc_feature (511)..(511): n is a, c, g, or t
  misc_feature (516)..(516): n is a, c, g, or t
attatagcacacactttctatcatggactaatattttcccttttttcccccttagtatcttccttaaaatttagtttggatattgtttgtttattatttgcctcctatctgtcatctagtaaaccctttctctttccagatttctctgaagtgggaatctgacccgcagactgtgcttattttgacaaaaccaaattcagtttctgttcgaattctttgtgcacaaatggtcaggtgcggatattgagaatgataattacctttacattgtgaaattctgagtgcaagtttcatgcaaatcgctttaagtctttttgcctttgccgatctctgcaaaactcttcgagacatacaaaataatgcatattttaatgtgtttcacttgctttaaggctaattatcccagggaaaaaaaaacaaaggacttgctcctgctttttggtcataatataagcgccttttaatgcactacttcattcctcttctccatgcctnatctgtatgattcatncatgncctatggtttatcgctgggacctttctttcttatttatgtgatgctg

SEQ ID NO: 2327 - DNA, 656 bp, Gossypium hirsutum
ttggtaggctgaggttccatggtcggctaaaaggggaaatctttcggagaaagatcgtgtactaaagagtgttaaagggtaaatatgttagaattatgtttatgttacttgcatcgtatatggtaaaattaggtttttctctgatatttaggttttctcatcatatatgtatttctaatatctgttgaaaacacataagaaagaccttgcacttgtttatgtcatccaggatctggttttagggtgccataataatctatgtagcaaaatcatgtagtagaaacataattttcttccttaataagttaatagaagctaggcatttctgtgagcttacaacaatagcatttctcaaggtctacccgagttcttcagagtttaatgtcttttttatatggttggtaatagaacttttagttctggaagcagctgaatatgagatgctttcaggatgaaaaaatttcatggtggtaaaagatgcgaatgtagcatttgattcccttgttagccttgactttattgccaacttgcaaaagtggtttcattttttttgaatatgcgtgataagaagaggcaagccttcttgtgttgcattattaaattaaccttgaacttaatgggtgtgttttctgtgtaggatattgaacaagctgact

SEQ ID NO: 2328 - DNA, 627 bp, Gossypium hirsutum
gaggaactagttgagaaagaaagggaacttttgacactcaaagagttgcatgatatgcatgggagtcaatcatctgctcagataaaagaattagaggcacatgtaacaagcttggaacttgagttggaatcattgcaagcaactaacagagatatggcggagcagctagagaacaaagcaagtgaagcagaacagctgggagaacaaaatataggactccaatcccgcatttcagaactcgagatgatgttagaaaagagagaagaagaaatttttattctcacgaagaaacttgaggatgataacagagaatcattgtctggaatggagaacttgactgctcaggtaaataatctgctatcggagatggagtcgttgcaagctgagaaggctctgttggaagaaaatttagcgtttaaaggtgatgaagcatcaaatcaagtacagagcttaatggatgaggtaaacacattgcagcagcagctggaatcccttcatagccagaaggcagaactggaattgcagcttgagagagagaaacaagagtcatccgaaagattgaatgaaatggagaaccagaaatcagagctgaagcaaatggtcgaggaccttcaaagagatttggaa

SEQ ID NO: 2329 - DNA, 622 bp, Gossypium hirsutum
aaaccgtgcagcttcaaatgaacggatttgtaaaatcaggccaccacaggcagcgtgtgaggtgtgagaactgaaccgtttgatggtccatctccgtataagaagctgtgtaaaacaaaaggattttggagctcgaagcttccttcgatcataaacacaccatctttatcggtttggctcacctcagtggtgtaaaacgaaaatgaatttgtataccttgttatatttgtacttacaactctcaaatttccataatagtaaaaaccagaatgggatggaccaaatggaccgaattcgtaatcaagaggttcagagttggggactggttcagggacagtcgttaaacaatgatcagagtaagagtctataacagatgagacaggtttcactgacaaactaatgaacagaagggaaattttgagtgtacatagccatagaaagattgaaggtttcattgccttcgtaatttcaaagaaggaacaaacagtttttgatgtctaaatgattttttgttgaatttgtcattttcaagtctacatgttatatggttcaagcatccaaaatcgaaatatttttttattacagaatagacaaagactgcatcgaaggtccagaaagtcat

SEQ ID NO: 2330 - DNA, 465 bp, Gossypium hirsutum
  misc_feature (459)..(460): n is a, c, g, or t
tgcaggaaacaatgtggaatatgtgtcggaaccaatggttgttggtctttggtatttgcagacgaatctcaacgttgaatgtttgtaatttttagttatttttatatatcccattttccccaatttgtttgtatttgtaagctgttgtggcagccatggcagatgtgaccttaaatgactccctagcttgtatatagcatatatgtatcctgaggttggaaaaactcattcaaaaatgtaaattaagtatggattttcgtctcttctctctctctcaagaagtaaagggatgaaattttagcctttgaagtaatgaatcacataaatgataatgaagtaataaaagaaaagaaccattacagtcttagccagcttgtgctggaaggggggaagagaatgcaggcgggggctaggaattggtggttttttcttttattgttagcagcacatacaagtatnntctat

SEQ ID NO: 2331 - DNA, 622 bp, Gossypium hirsutum
atctgcattttgcagtcatgaccaaacccagaccagaggatcatcagatgttgaaattataccaaaatcaaagcccattcactgccaaacttccaaagttggtaggactttgacctgcgtagcaatactgggtattccacaatgaattgcttgtacaaagcagatagaaatgaaggtaaagtccattgcctgttcaggtgaaagaaacaaacaaatgcaatatatatatacatattatgttcagaacttcagtataatcttttgaaagggtgacataaattatagtctcattaaaagttttacccttaaatttggtacttagcctctttctccatcacaagccacctgaactgagcttttcattcacacgaaacaaactagtgcaatatatataaaaattaattaggtttatcagaattttaaaattattaattattactcaattaaaataaaatatgcctcctctacgtttcaaattatcataaaaatcctaaatcagagtaaaaaataaatagtaagtagatttattaaaattagtgtagagacaaaaatctgaggaagtgatagtaaagccaaaagttacttgtttaagtgcaaaagttgagtcccaaagcaacgtaac

SEQ ID NO: 2332 - DNA, 633 bp, Gossypium hirsutum
aaggggcagagaaattggaccccgatagcttcgaatggcctttccaatacgacgacacccgccccatccttgactggatctgctcctccctccgcccttccaatgtcctctccctctcccaactctccctgtcagttccctttctatttctcctttttctttaggaataagcatcgatagattaaacctccttttaggttatcgttgacgggatcaatttcaatttgtgcaggtatgagcaaatcgtacaagaagggaagctgttggaggtaaattttgcttcatttcctcttctttttctgcaaatttcgggcttagccattaatatcggtttattataatgaaatagggggaagacttggactttgcttatgatagcatttcggccttctcgtcgaggagggacaaccaggaggcggtttttggagctgaagaaggattaaaagatattaggtattctttcactttctctctctgcactgcacacatgcttcacattgcctcattattgttgtttccttagcatccttttttttccctgttatttaaagaggttaagcataatacaactcaagcttaagctgacaaccctgaatgcatcattcttgatatagcttttttagagaggatcta

SEQ ID NO: 2333 - DNA, 345 bp, Gossypium hirsutum
ggcgttaagagggctacttcagtttcagttggtgagactcatcttttgactattggttctgtctatcaccctgtctatcctcctagcatgcccaaaagtgacaaggcaccaaagtttaaagtcaatgatgaagtagaagaatttgatgaggaatgcatgtttgatgatttagagtcaagtagcataacatctgcacataaaaatgattctgagcaaaagcccataccaagcttaaagagtctttgtgagaaagtggcagcagagtgtctagtggagccacgaaatgcaattcaactacttgaaattgcagattcccttggagctgatgatttgaagaagcattgt

SEQ ID NO: 2334 - DNA, 632 bp, Gossypium hirsutum
aaaaaagctgaaaaagcccaatcatgataaataaaatcttatctttcttcctaaaatatatgctatcttgtcagagttttcatgccttcaacaggtaatcatatttgaagtctagaactatgttatcaactgttgtggaattattttgacatagagtataagacttctcttagtctactatacatgctcaaatggtaataaagagaaccataaacctgttgtagctttctgataatatactagttattaatagttttctgatcatcattacaatttctgaaagatatggttcagcatcatttaaaatcaatattttgccatactacctatattttcacaactgcatgctattatccacacacaggcacctacagaaagttgtgaaagagaaattgaccaaccatgcatgatgagtcttgctgaaaacttgcatttttgtaggattagttaaattacactcaacacaaaaaactgaaggcttctaatgcaattttccagccacatggcataacatcaatagttcaatacataaaatgtaaattagtcaaggagagaacgtataaaattcaggttacagatatcttagcaagaacatagaaaagaatttgattaatcagttaagactcgaaggg

SEQ ID NO: 2335 - DNA, 628 bp, Gossypium hirsutum
  misc_feature (410)..(410): n is a, c, g, or t
  misc_feature (412)..(412): n is a, c, g, or t
  misc_feature (570)..(571): n is a, c, g, or t
  misc_feature (595)..(597): n is a, c, g, or t
cgaggcttgttgagaaaaaagcataatacctgaatatcaatatcagtttgacctccttgagctccaccaagaggctgatgtatcattatccgtgaattaggtaaactataccgttttcctgaagttttgaagagaacaaaggaatatgcaagtttagcagacagaacgagaaactacaccaatcaacggagctatgaacggcagaaatctatttatatacctttagttcccgcactaagaagaaaagctcccatgctgttcatggaaaaacaagacatatccgttaacaataataaacaattgcattcggatttaaactgaaatcttattgtatgaatgcacttcacaccaaagggttgggaatccaaaaaagcaataaataagctcttgtgccatatgcattattttgncntataatttataaaagacaagctataatccaatactcggcttccaaacattggaacccgaaaaataaaatcaatcttttcaactaatttgactatacaaaatacatattacgcatagtaagaaatattctcatcaaggatcaaatatttattggaatgnntggagtacaataatttaaggaccnnnagttaagatcaatatccttaataagagacaa

SEQ ID NO: 2336 - DNA, 635 bp, Gossypium hirsutum
tttcattagatgccattccactaatcattggagcagttcttacgttcgtgtcatttcattaactattagcttcttaactctcacaactttgctgcaaactaatatttcaaaatgacgtgaatgttcagtgctatagcacagaatgtccagactatgataattggccgcttactggctggtataggtattggtataacatctgctattgtgccactttacatatctgaggtaacattttctgatctttattgtttgcttaattgctttgattttctagctttctggaaacagctgcttacattctttctatttgtcagatctcaccaactgatatccgtggtgcacttggatctgtaaaccaactttttatatgtattgggattcttgcagcattggtggctggattacctttatcacggagcccagtatggtatattatcctagcacttctataacatgtttgctatgaacatatcatgtcatttggcatttgctatgttaaattgtttctttcactatatgtctaaaaactgctgagcatgcaatatcatgtgcatcctgagagattgcctcttctaacttttattaagaattttagtgaagtgtctaaaatccgtgcttcaatttggtacaaa

SEQ ID NO: 2337 - DNA, 608 bp, Gossypium hirsutum
agcctttacagaaaatttagcagaagaaacagtttaaaaaattcttgaaatacagcccctacatcatctagcaggaccagacaaagttagatggataccgacctctaatggaatttttcaatcaaaactacttaccaaatgataatggaaaatacatggaataatcgggacaacgtggaaaggaatctagaaatactcaagaccccaacgcattcgattcttcctctggttagcctgtaaacaacgactacttacaaaccttgaaaggtcacgacgagcgctcagttttgatacctcctgcccggtctgctagcaaaacactgaagaagccattcatgtcctcagagattgttcaatcacaaaagaagtttggttgaaaattgtccctgcaagctggcaaacaaaaatttttttctagcaatatttttgaatgggtggaagaaaacttaaagcacaatgaatggctgatatgggctaaaacttcctggccaaccctcttcagacttgttgcatggcgcatatggaagaataaaaacctatttgttttctaggatataacatggagcttaacagagacaatcaagatctctgtctgttgggcaagacag

SEQ ID NO: 2338 - DNA, 565 bp, Gossypium hirsutum
ttcctgcatgcatcatgtaatagcagtttatgcttctgttataaggaaaatgaatatgaaaattaaatgtctatgcacatctccgtggaatcttatatctgatgtggttttgaaagcacttactgtaatgctttgcctgtgggatcaccatgccagtaccctttttttttaaaactatggtacttagattcggggtgagtatcaaattcaggcatgtttcctacatggctatatgttcatttttaaaagattttttcatgtatttgaaagatcataccttcatagtccattctcatgttcgaatgtgtaggacataggtatagagcaagagtacttcaagaaaattttttacaaattgataactgatagtgttctaacgttggttagcatttttacaaaggagcaaatctccaattaaggctaacgttgattggtcggattgaaaattttcatttcgttcttattgattcggatacacgtttcttcagggggcaacaattgttgatcagtctgttaccatagagctggctcctgattacaagctgccagaccatgtctttacaac

SEQ ID NO: 2339 - DNA, 551 bp, Gossypium hirsutum
  misc_feature (61)..(62): n is a, c, g, or t
gttatccaaatcccgtacttgctcctctcagcttggctaagatccctgtttcatatttttnnacaaacaaccacatatttatcacgtaacattgtaacataactccacaaaggttcccatccatgttgggatacccatgtctctatcaaatgttttcttttctttacaactataaatgtagttgcgtatgcgatgaacaaaagcaagatataaatggatacattgtcataccagtaggacattatagctggctgatcaacaatgctttcacagccaccaaatgatggagcaatgtatggtatcttcaatgcatcaacaaacttgatggtggtcatgagatctccatccacctgaatgattttgacggcatgaaaagttagagaagtttttaacatgaataaaacatcaaatgaaagcaacagaggttagagatcaattcccaattaaaatgctaaaaagcagttgaagaaaccaacctcaaaactgaccacaccaccaaagccagtcatttgccgcttggcaatttcatgttcaggatgactaggcaagcc

SEQ ID NO: 2340 - DNA, 529 bp, Gossypium hirsutum
tgtaattccgtgagaatgagatgttccaggcattgagggatagagtgaggtagtgctgtagctattacgaagtattgaagttatttgcatagatgttgatttcataggtaataggtacttattgacaagataacatggagaactgaggttttgtttgtatattcattacactgtaaaatgatgctcttgtgtagatgttcttatatttgtagaggaattgtgaacaattcttacaatcctactcgcatttatgaaaaatcagtgtctttttaacttcgattgttaatcaacatgcagattcctttcccatttttttctttttcattacgctcttataggttaagcatgtcatattatgctgtgttgtttttgtttactctttgcaaaagttcatagtcttcatgtttgtggatcactgttcatccttgcatggtaatggaatttgcttctgttaggaacgcgaagagagacggaagagattgagaagtgaccgaccagatgaccggccagtacatatctctcagcctgt

SEQ ID NO: 2341 - DNA, 613 bp, Gossypium hirsutum
agtaacagaaccaaaacaatctggttttcgcaatttcaaaaatggccctgtcaaaacaaataataggttgccaaggatcagaaactataagcaagcaaatttaactaacttcaaatgaatcatttactaaaatggatggttggcatgctaatttatggcaactcattagccttataatgtagaatcaattgcagacagttcttataccattaattattgccaatttcataaggcctagaacataataacctatatttactcgaactcaggtatgtggtggatacgagtatgtatctgacatgagtatgttcaacattttcaaagtttttccatgtatttggtaggtccttggaggcctcataccaatgtctgaaaatatgttcgacatgggtacttaaaaaaaaaaaagttggaacactgtaaataataacctcatggctacagctaaaagcacggaaactctgaaacttggggacaacaatatttatatgcaaaaaaacaccccaaagcacatctatatgttacttggaggtaacaaagtaaacttgaacctgaaaacctgtccaaaagcccaaacgtaatctaattcgagatgaataaaacaaaaaactca

SEQ ID NO: 2342 - DNA, 613 bp, Gossypium hirsutum
cttttccagctcccaagtcagccaaatctttgcttccacctcttaaatgtccaatggctggtacattctacacaagtccgggtcctggtgaaccaccatttgtgaaggtgatccgtacatgttggttttattggattttcattgctctttcattatgtttattctacagttgcttttctttggctctttggacttatgcaaaaggctttccctgtaggttggagacaaagtgcaaaagggtcaggtgttatgcatcattgaagcaatgaagttgatgaatgaaatagaagtaagttcttattctgtctgtttggaaaaatatataaaggttttgtcatacaaatgttaacatttcttgacattttttttcttgttattatattagaacttctatatcctaaatatagaataaaatagacttatttaagtctgaacactgaatcatgaatctaaagtttgagataaagcccgaagctcttggagacttgaagtgtcttttaatttatgtcttgagtgctccaaataaaatatgcataggagttagactacaaatatctttattgggcatataagttgttaggacagctaatgtaagatgcctggacaaatgtgt

SEQ ID NO: 2343 - DNA, 663 bp, Gossypium hirsutum
ctgatgaatgaatttgtacagatctgcattggttgaaaggatgccagttttggacgaggcaactttcagtggaaggagggctggctccttgccaacagctatttcaacctcttctggagcaccctctaaccttccaaatggaattgctaaacccgctacagctcctattccagatttacttgacctgagttcagacgatgtccctgcacctagctcttctggtggtgattttccacaggatcttctcggtgttgatctgtcaccaactcttgcaccatcaggttagttggtgttgatttgaggagtgaaattagtttttcaagcatgcacttttgaaataccttgatattccaccttagtttttttggcagtgtgatgctaacagtagcattttcacagtaataagtcagttgaatccaaatgtttattttatctctttaatttatctttacttgttcagagttaattatttctatttgacaataaccatagtggacaatagttcaggcaaacacctgttgattgaaattagtggtttctaaacatttggattcaaaccaacttcttgagttgttcgatagaagtacatgatagtcgcttttaaatttgatttctttaatcataagtataaatctagattggtttgcaagtataatggggtgt

SEQ ID NO: 2344 - DNA, 572 bp, Gossypium hirsutum
  misc_feature (58)..(58): n is a, c, g, or t
  misc_feature (510)..(510): n is a, c, g, or t
  misc_feature (512)..(512): n is a, c, g, or t
cttgataatttactcatgttgaatcagtcataagtaaatttaacaaattatatatttngatcacataactttttttaatattttttaaatatatcttaaatgttaattgtgtaaacataaatataacataaatgattaaatgcatcaaaattttaaatatatatgtgtttattaatagtttgtatatttaatagagggtaaaagtattatggaggttcctatattaagagtcggattgcatctatttgttaaaaatttcatctatttgtactattagtatgattcacggaataattagacaatgacatgtgacatgtcacgtgtaccttatgttacaattaatctcgaattctatgtatctaataattatgctactattaattgcaattaagcaattaagttggttgtgacttggttattatattatcatattttgatttaattaggggaaatttagctaaggaatgataatctgaagttatctaatatgactttgtttttttattcggncnggaaatcaagaagttcaaaaaaaaaactctacttttatcttattattatttaataagaaa

SEQ ID NO: 2345 - DNA, 645 bp, Gossypium hirsutum
tcagagattgtagaattggttggcaatgcatcggcaaagcaagtccttgatattagcaagcaagatggggcagagaaagtaaaatatgctctgcggttggtttttactcaactcatgtcagctagcaaggagatggcaaccaaatcaatagcaaaagtgaaaagtcggctgcacgtagaaagtcaggtttatagaatttttttctttactgtgtagaggcattaaatggagaaagggtcgagggtcatcaccttgttatgttccttagaaacatgactatacaggaaaactgatgtggtccttccctgtagagttcataaaatggctgctctgaagatacggaaatatgctatgtattagtctggttagacttctgtcagcatatgaaaaaatggctcctacccaagtttttatttatttagagcaaaacctttaatcttatgctgacagtaacataccaattttccttctaggcataaaatgtaacttcaatacctcactgcattgacatgaaaaagttcatctaattatgttgtcatgtggcaaatatctattctgattcttcaggcagctattttatgggcctaaatgtagttcattttgcatattccgctataaatttggcttctaagggtgcatcataga

SEQ ID NO: 2346 - DNA, 607 bp, Gossypium hirsutum
gcaataagagaaaccaatttgaattcgggttaaagccgataccgatcagaatctgcaacgtagtgtatatcatcaatggtataacgccctccttggagaaagaaagggcaaagaatccaagcatccacctgacctagtattgagacagctgcatctggttcctacaatacatggatagaaatgttagacagctaaagtcattaccaagggtttcaattgcggttgtgttcgcatttttttcgtgttgcatttatcatggttgcaaacaaaacatatgctattacgcagttgtgaattttttttccaaatttgccaaagatttttcaagtcatgtacgaggttgtatgagcttttattaaaaaatttcactttttttttccattatagtaatatttccatactaaaaatgctttcatccttatctataaatttctaggaaaataaataattaacaaattaagaacatgttaaattcaaacatacatgtttagtacattacaaacttaaaaataaaataatttaaaatttcatccactataaatattgatgcatactccaatttttgccacatggtagataaatgaggagaaacaaatccatccaattc

SEQ ID NO: 2347 - DNA, 507 bp, Gossypium hirsutum
  misc_feature (411)..(412): n is a, c, g, or t
  misc_feature (439)..(439): n is a, c, g, or t
  misc_feature (469)..(474): n is a, c, g, or t
  misc_feature (486)..(488): n is a, c, g, or t
tggagatttcattgaaggtcatctcttatctcaaaagaggtacatttttcttagtactctttcttttgggatagttttctgtaatttgacatatgcatgtttcgcttattgatgtattaaaaaaacagatactcataattttaggttggcttatatattggattttggtgtctactcctggccctatggcttgtttgtgctaattggtgttactgttatctcatatatttcaagttcaaaattagatgtttcgttatatctaagtccggctttttaaccttgctagtaggctttgattttggttggatgtttaatggttgttacctcgtttttgttttcttggcctttatttgttccccattcattggaattgcttgttccttagcattatgtctaagcggggaatggtanncgggggtggttcctggtggttaccatnaatgatagggatgtaaattcatgctagatnnnnnncatcgatagtcnnnattaagtaggatacatact

SEQ ID NO: 2348 - DNA, 622 bp, Gossypium hirsutum
tgtatattgttgaatttctgatggaaaattgcaatttacttgctttgcttctcggccaactgtaatttacttgtttgtaatataattttgaggatgattttgaaaattactcaattaaaaatgaagctttcttttttggacttaatgatatcataagccctgaactattccaaataaatcaattgagtccttgcaaacttattgcccaaaattggacccttcaactaacaaaactgattatttggtttagatagtaaatgcaacctttttcttcttcttcttctttcacttctatatttagctttatctagaaaagtaacaaattattaacctccaaacattaacaaaattataaacagatttttataatttttaacaatttttcctgacgtgttcctaccacgttagcatctattagctgattcaatgaccgttaaagttcgtgctagtggttttgttagaacgtaacaatcaatgtcagtcaaaaggttaattttatagtattaaagactaatatttattgaagaacacgactcaaggtggagaaaaacaaaagtcacaacaaaagtaaattgaaaagacagaaacaacaacagaccaaacggccaaacaatgaaaccgc

SEQ ID NO: 2349 - DNA, 663 bp, Gossypium hirsutum
tataaactcactcaagtagtaaccatttaacaagtaggtcttttgttgttgtagtattatttatttatttattcacttttaactgtgagatttgaggttatgattttattctctttactactgcaataataatatgtattttgtaggcttcatatgacttcaagtcgctagtttaatatacacaaagcttggatggtatctgtgcatatgaagagaaatcattacatttattatgttatggaatttgctaaaaattttaagccttaatttggtcacatcactcaaaacatcccccaacctcttcttccaattcttatagtaaataggcggtggcgatggcaatggcaatggcaggttaaaatcaggtctggtctggatggttggttttattattaaaagataataaaatgtttttttaaaatatttttataactaaatttaaataaaaagtatttttattgattaataattcaactcagatcggtttgaatttgaaaaaaattaaaaaaagaagaagaaaaactcgctatttatttaacccgtaatagttcttaaaagggattttacacttctctgtaaatcaaagtaattttatatatttttgtaattttttctaaaagttaaaatttaacaatccgaagcaactgtaagagggtgggttaa

SEQ ID NO: 2350 - DNA, 616 bp, Gossypium hirsutum
aatggggcataacatggcgcagagtaatatgtcaacgtgataacttgacgaaaggaaagcaaggtacaccttaattgctgtcactgcaacacttgttggatggttgtggtcatttcgactaaaactgacctgcatattgattagtatagtagtatgcatgtatatataacattaatttttggtgggagggagaattgttctaggtgcagcggttgattacattagaaaatatgggaaaatatatgcgggataatcatatattgtagatgttataaccagcctgggtgcagtaaacgttgttggtttaccaataacagacccatatatttattgaccactctagattgggcccgtaaaagccaacgtatttagtttcctcttgctttcctaattctctgctgaaacaggacggatgcttctgcttcgtgtctttggatcctttaatgacagttctcccaatagtatgctgtttaactttgatctttggttatagatttcttctgtttctttgatcaagtttaatgaggtagcaaacaacaatgaaaacaattcaacgtggttattgcaatgtgttgaattctggttttccattgtcctggatgctataaaaggagta

SEQ ID NO: 2351 - DNA, 901 bp, Gossypium hirsutum
  misc_feature (207)..(207): n is a, c, g, or t
  misc_feature (831)..(831): n is a, c, g, or t
  misc_feature (841)..(841): n is a, c, g, or t
  misc_feature (895)..(895): n is a, c, g, or t
tctggccaggtacctggaaatgagtttggtcctggtggttttgggactgaaatggggcataacatggcgcagagtaatatgtcaacgtgataacttgacgaaaggaaagcaaggtacaccttaattgctgtcactgcaacacttgttggatggttgtggtcatttcgactaaaactgacctgcatattgattagtatagtagtatgnatgtatatataacattaatttttggtgggagggagaattgttctaggtgcagcggttgattacattagaaaatatgggaaaatatatgcgggataatcatatattgtagatgttataaccagcctgggtgcagtaaacgttgttggtttaccaataacagacccatatatttattgaccactctagattgggcccgtaaaagccaacgtatttagtttcctcttgctttcctaattctctgctgaaacaggacggatgcttctgcttcgtgtctttggatcctttaatgacagttctcccaatagtatgctgtttaactttgatctttggttatagatttcttctgtttctttgatcaagtttaatgaggtagcaaacaacaatgaaaacaattcaacgtggttattgcaatgtgttgaattctggttttccattgtcctggatgctataaaaggagtaggtgaagcatttgtcaaaagagagtagtgtactgatgttgaagaattcgtacagagatcgatagaaaatgttttcttccaactaaaacaaacaagtcaaaaaagttaaaactaagaaattagaataagcaaagaaagcaataatcccaatgagacattgatgcanagctaaattnataaggtttttaaatagttggttatggtatctaatatttatttttctgcttttntatatt

SEQ ID NO: 2352 - DNA, 521 bp, Gossypium hirsutum
aatttgtggcagaattagcaggataccagtgataatatgtgttataaacagaagcagtaaaatgtttcaaagtcaaagaaatcaaaatctgaaccaataattttcgtaagttatacaaaaatcgccaaactgttttacagactgaattagcagactatcaattaacttgtatttgaaggctactactcccaaggcaaaatttgattgaaaaagcatccatccataaatattaatcttgctgaaggcatatgactgacagatgaggaacaaggtggaattcacaggtttttattctacagacaatacctaggcataccatatcttgtcacggcatccacacaccaaaacccaattatatatgagaaattgtacatctgcaaaaactgcaagaaatatgaaactattaccttcctctcaagatccactatatagttttcaaagagatcttcccgatctctggctcgttcaacagccttaaaccgttcatcattttcaaacaaactttgagctttgctgaacag

SEQ ID NO: 2353 - DNA, 519 bp, Gossypium hirsutum
ctccttctcctcgtcctccacaaaacatactgctgaaaaatcacttaaagatcaacaagaaaacaaatatatacgaaattacacctaaaagagtaacaaatatgtttcttttaccgtctcgcttcctcttgccaaaccatatcttctgaggaacaccgaatagaatcgggtgcgacgcgaaaaaattggcaacagtgataatcggggctatgtaagcggccaaaaaggaaaggcctattgaagaaatagcgacgaaatgcttgttgcttaagagagagatgggagagtgcgggatggaacagagggaggcgatgatagccgggcttgccggaaagagagtacattgagaagcgagatccgggagagaggcgggcttgccgatgaagactaggagagaaaaaatgtgccaggccttgtgaaactcggtagcggagagactcggcgaatcagcgagttgctccgagttacttttcatgacgataatgaatgtaaagagagaagcagaaggatctgccgaag

SEQ ID NO: 2354 - DNA, 513 bp, Gossypium hirsutum
ctacctgtccatggcaagtggactgtttgcagtcgaaatttttaattactattttgattttatttgatcttcatccactactaactggccacaacgaagtgataataataaaaatagtccatgcacagttcacgttttaaattaatttaacatttcaaggaatataacaatattaaatctcatacattatcaataaggattatataatacatacatgattgcgctttaaatagctttgatccgattaccagtatacgtgcacaaaaagaaaaaaaagcttcatccaccactctaaacaatggaaaagattcagcacaaccatgtacaagctaaaggactaaagcttcatgttgcccagattggaactggttagacaattctcttctttacatttgcttattttatatatatagtgtacgtaatttgactaattaataatacttgtggctagctagcttctaatgatgatgggggtgtgggcatgcaggtcccaaagtggtggcattcttgcat

SEQ ID NO: 2355 - DNA, 611 bp, Gossypium hirsutum
ctgtacttctcctatggctaaagttacatcctcagagaggagcattaccattccagtagatatgaactttgaccatgtaaaagattcccatgccaaaagagagggtgataggaaagcattgaggcatgaccaaagtcatgtagacagatctttaagtagcatttcacatgttggtcagcggaaggaaaatgaggaaaagacactgtgggaagttgagctggatggccagattttaaatgccaaggaatactctccgcaggacatgttaggttttataccgactcaagattctacagaaaataaaatcagttggaggagtaacacttttgcgtccagctgtgaaacaactgaagtcaaaggtggcttcattgcaaacgatggacagaagcatgcggcacctgttcaattgcattttgacaacaatggcctgtcaaagaagatccagtttatggagaaggcaaaggaacatgatatttccgaggagatttctaatggtaactcaagtgatatgcatagtgaaagggaagaaacagtgaacaacttttctaacagtaaatttaactcaggtaacagttatgggccactaaagaatactaagttcatgagaagca

SEQ ID NO: 2356 - DNA, 603 bp, Gossypium hirsutum
taattgtttcttcatttgggatgggaaggggataataggatttcaacaaatgagtgtttgataagaattttaaccattaatttaagtgaattttaatcattattgtttgatttggttgatatgaaaaattaaacccgatcaattcaagtacggtaatttttgggataagataagatatcattgatctagggttagatttatccccagttgtttgaatcggactgatcaatcaaatcagttaaagtaaaaatcaatcaagatatcaattcgaaaagaggtattaaattgattaatttaataattgacacagagaggttgaactgaactaaaaaattgactgaatcgatctctcttttttttaatttttaatgatttatttaattaaacatgtcgaactgatagtttgaccaattcggccatcgattcaattttaaaaaacttgatttatttcgttactttggccaaaggtcactaaacaattacgtacacattttaattattaaacttcaaaaaattacaaaatgatcatcgaactattcaaaaaaaaattctttcaaaatctaactagattcgataaccaatatagttgaacagtaacccatc

SEQ ID NO: 2357 - DNA, 604 bp, Gossypium hirsutum
tgtctgctggaagataccagctagcagattgtggctaagatcaattatttgcagtgaagacaaattaaaaatggtagaagcaatggaacctgagagcttattgtagctcaaatcgatcttcttcaacgaagttatgctgcctaaagctgatggagttgtacctacaaaatagttttccatgtttaaaaccatgaaccatgttggcaggctggctcctcacagttcaaggaattggatccagggtctactcttttcaaggtacaaaactaactggtttggaaaagaaacataaaagtgtgtaataggttaccaattggaggaagggtgccatctagacccatggaagaaaggctcaaggctacgaccctctggggttggccaccacaaatgacaccaatccaattacaaaccgaagtagctgttgtccagttgtttgccaagacattttgagattcaggactgatataggctttcaaggcaagaagagcagatgattcatcataatttaatgaataaacatgtgctataaacaacatcaagaagtgggctgataccagccttggaaaggaaaagattcccatgactaacacccgaacagattgat

SEQ ID NO: 2358 - DNA, 629 bp, Gossypium hirsutum
gctcataacctgtactgttctgatccttctctccagtcgtgttcactgtcagctatgcagaagtgaaataggccataatctgtagagtacctgcattttcagagtatagccgaaaagtattcattggacctgggtttaggtttttatcaggaagaaaaaaggaccaaaacacagagatagtgggcagagttttgcaaacgccaatcttattatgcctacggaacaaactgtttagctaagtgaaggtattcacagttaatcaattgaaataacagctggtagatataatgaacaccagttctccagaatcctcaatcactgtctaaatactttatttgtgtttgacaagtttcaaagatgtacactcaacattctatgcatgtatcgaattgcacttatttattactttaggaaactgcatcttactattctttttaattagctaataccgaatatttcatcagctaagatgctcaaatcttactcttgtttcggccaaaaagagaaaagtggtaagatttatcctagaggaattttactaaaattaccaaaactttgccttgttctcagcaggataataaaacatggtttctgctggtacaccacattcaccacagaatcggagtatc

SEQ ID NO: 2359 - DNA, 618 bp, Gossypium hirsutum
  misc_feature (538)..(538): n is a, c, g, or t
  misc_feature (588)..(589): n is a, c, g, or t
  misc_feature (593)..(599): n is a, c, g, or t
tcagcattctattatgttactataatcaacacaatgtaattataatcaatcatctaatataaaaaataaaataatatacataagtaatatatctatcatagatatttggtgaaaacaaagtcggcatttttgttcaatctcaggcttgaatagtcacaacaatttacttgtccaacagaaaaatatcaggattccatgttcaacaatcccatgacttttcagcataaatatccaatacttctacacctgctaaggtaacaagagtggcagatagataatggaacattacaactcaaatgagaacaggagcatcccaacatcattaattaaggaaatcttttcattgacttgtcaatggtaggcatttggttttgtagaataacttgtatgtgttcttttatccccattcaaagcttatccatatagctcgcaaaaattttgctaaggttaattttaacaatatacaattgatttagttgtgtgtgtgttttttttttttggggggggggggggggggggggttttttttttttatgtncccggggttcccccccaagggcccttaaaaaaaaaaaaaaattttttaanngtgnnnnnnnaaaattaaaaaaaaacccc

SEQ ID NO: 2360 - DNA, 684 bp, Gossypium hirsutum
ttaataattatcaatagtcaatgccttttctaactgttacagcacacgttaattaatagttatccatgttattcatccctatttctttaagtagcaatgtgatccatgtgcacatacatgtgaggccatgactctatgatccattccatgtgagaatggatggatggatggttgtacgctgcgctagagtctaggcgttgtattagttgatttctgccaactcatgtctctttcatgaacttggaccgcaacagcctcctcataagatgtgctggcctgtttttcatgctgttgagcctctttctaaccttttgaactcatcacacttgggatttggagtagttgaagtttaagtatttagatttcagggttagttgtgtccaaagattaaagaatagaatgtggaagcatttacttgtaagatttcaacccccaatggtatccataaacatgacccctttagacagtggtgtcaactccacatatgcgccaaccggctggtgtgaaaaactccaattcctaacacacgcacacacatatatattgttcatttataatatggtaatgggtctccatctttcttatgtcaagttgcaaaggtttaaatcatgcatgtgaatcaatatggtagcaaactcctttgttttcagctataataaagtccaatttggcttccatcaggga

SEQ ID NO: 2361 - DNA, 591 bp, Gossypium hirsutum
cttatttggatcttcgccttgtgccattcctagatgaagatggaccggcagagttgttgaccgagaaggagcttgcctcttctaattcttgtatcacttgcttcaagctctctaccacttgactcatcgccggtctttcttttgcgtttttggttaggcagctattagctaacttccccactttttgagccgcattgagagaataattgttcctaagtcgagggtctattatcatgctgaatcgtctactgtcaggagggaactgtttcacccagtctagaagcttctgttccgatgtcgggcggtttctttccactgttcgcctccctgtgaggatctcataaagtaccactccgaatgtccatatatcgctttggattgtgaggtggccggtttcaacgtactctggggcagcatagccataagttccatacacctttcatgaaaaagcaaacgagacttaaacaccttaattcaacaaatgtatgaaatgcaacatgcttctcaaatcaaaactattgaaaatgcaactccgaccaaatgaggaaacaaatgcagctggaatataagtggatatagtgcaacagttaa

SEQ ID NO: 2362 - DNA, 612 bp, Gossypium hirsutum
  misc_feature (586)..(587): n is a, c, g, or t
tgatgcttgaagcatcattgaataacatagagatagaaatgcgcatccgaagaaaagtgatgatgaaatagatgatcaagttagtgctcttttgaatcttcaggatcatggaggccttgaatttcccttaacaactgacaacgtcaaagctgttatcctgtttagtaatttgatgtcccatatcttgcatgtttttatgtgtttatatggtcctataaatttaacatgctcaaagatcagataacttcaagcttcagattgatatctttggaaaggaacatttatttagtgttcaaatatatgagaccttgctttctttagttgcttgaaaactgtaaaaaaatgttttgtactgcaagtagaacttttcaggacattctcattggtggaactgagacatctccaactatagctgaatgggtgatgtaggaaatgatgaaaaatcctagaatccttgaaaaagaacaagccgaggtgaggcaagcctatgatagaacaggggatgtcagcgagtcagaccttcatgaattgacgtacttgaagttagttataaaggaaactctaagattacaccctcctccacctnnctactccaagagaaagtatgagaga

SEQ ID NO: 2363 - DNA, 597 bp, Gossypium hirsutum
tgtgacatgcgtcatgggttttgtcactagtctgtaacacctgccaagtttttaagaaatgtcactgttaaatgttgattcagacgaagaaggatgagatacaaactttctgtactaatctgtagtaccttggcacgcagcagcttcttctgtacatcagttcctttagaatcttgatcgggactaatgtaatcgagcaggtcggacacactgcaacaaacggccacaggttttagtgctgcaagaaataatgatataattgaattagtaattcagggacaccgtattagtacctaagatgacccttgcttgcaatggaagcatctggctttggagttccatttcgtgcagcttcttgctgttctaaagcttttgattcaaagtattcgatccaagcagcggagtcctgcaaggcagaacacagttctttaaccccatatcaaacagaatggacaaaggtgcatgaaggtatggacggtcgtggctgaggtatttacctgtgtacgaaggtcatcttgtccgagttttgcttgaagtattttgaatgtagtttgttcatgttgcacgcttaaagaataagcctccatcaatgaaaga

SEQ ID NO: 2364 - DNA, 629 bp, Gossypium hirsutum
ctgattgcacagaattctcatgcttcaaggcacctggattcatcgctggagcagatcatccaagcgaagattaaccagggtgcactccaagggcagcatgctgagtttttggatttcatgtcacaggcaaagtatggcaatatgcttccttcagagcatcagcttcgtcttaaacaagaacacttgcaagcgcagcaattatctatggcacttaggcaacaattaggaatggaggggaatagaagacttgccggttcattgtctgtagatgacgttggtcagtttgttgggaatcctggcagtcatcatcaggctcaatctgtagggttgaatacttcaggtctttaccggcagaggctatcatctcttgaagagcatatctgcaatcttaagcagaatcatgctttggaggacctaccagagcgagggatttttgaccccaactctacagcatttggcaggttgactcttcctgtagctgctcctggaatgaaagtagacaatgcaaattctctagatctagcagaacatctttatatgcactccaacaaccaactggatccattttcttcaggtaaccactctcttaaccagcaagttttaagcaatgtatacgcttctcatcctgg

SEQ ID NO: 2365 - DNA, 584 bp, Gossypium hirsutum
  misc_feature (4)..(6): n is a, c, g, or t
  misc_feature (63)..(65): n is a, c, g, or t
agcnnntgacaacaaatacataatcgacattcaccctggcggcttctatacaactcgaacccnnngtccgccgcacatcggacatccataggcccaacgactgatccaccaactcacccgttcattttgactaggttggtgggtcgaatcagccgaagcaaaagctgaagtttgtcgcaaacatctcatgcactgcacgatataaaaccaatagatatgttatcaataggaagttcatcagagagagttccaaacaaacaaggaaaatcatatatcaaaatgacatatttcagcccgacactagtgtcatggtcgacaaaaagaccatagcgttcaattaaaatctctggatgcgtgcattttacataaaatacattgtccttccatgcaccattctaagcactgttacatcctaattctatttgacaccaacaatatttggagtcataacatttcaaatcttatgagtgaaagaaactctccaacaagaagatctacagttaaagtcaaagccagaagcatttatttcacacgataaaatggcaggacgaccagcagaccatatgagcacaagaaataaacaa

SEQ ID NO: 2366 - DNA, 623 bp, Gossypium hirsutum
atacaaatgatgttaaaatcccatattggctttttattttttttggtaggatctttagttatgtcaaattaatgaaatgttccctttgttttctgtattgggaacaaagtccttatggttaaattcttatgctagcaagaatgatgtactagttttctttcttatttattggatcctcagttatatctagctaacaatttattttaaaccttaaaaggttcagtatgatttatctttccaagttccctgaatttgattctttggctgaaatttgaagtttgggaagcctccaatttaccttggatacatggataaaagtatgtctcctattcttttgggtagatatctaatatctgctatttgtgagaatgtgaagttcttaagaataattatactatgacttgttgaaactgactcctgcataaattacatcatgctctctttacttgaatggcttcttacaatcatgaaattacttcaagtgggtgtcgatatctcctccaaacatggctttgtccccaacctagggaggttacattgttgttgcttaggaagtaaacaaaaaatgatgtgaccatctgcatctaagcatatttctatgggttgactctgttattggagta

SEQ ID NO: 2367 - DNA, 596 bp, Gossypium hirsutum
  misc_feature (590)..(590): n is a, c, g, or t
ttttgatgctaatccatggttgcaggaagattaaagcatgagtgcatcacctttgcctatatccttgaatgactttagtactttctttggaaccaagaaggtgccagtttctacaactggaaatgacaaattcaacagcccataagtcctaatactaggtatcaattatcaattactttgttttgccaataaaaaaggtaaagtactaaagtcattctcttaaagatctaaagaatctaccagtgaaagaaaaaagacatttcaagaatctggcctgcgctaaacacaaatttcaaataaaagtactatgaattgtgctcagttgaattgttcatagataaaaattctattttcttttagaacagaaattcaacatcagtattttatcttgttctcaataccaattcaaaaaggaaattgaatttccaatccttgatgaatgcagacaacggaataaataacaaactttgaatgtgatcatatccggaaatgacacagatgatattaatgctcgttatcattatcagggtaggtaagggaaaagaaaacggtacctgcaaagccaacacagcccaccagcttaaatgtcnatgaag

SEQ ID NO: 2368 - DNA, 635 bp, Gossypium hirsutum
agcagagatggagaaaacttttattctgggatacaaactaatgttaacgtcaatcatgagctatactatcatttccttggtacaaatcagtctgaagacattttatgctggagagatcctgaaaatccaaagcacatgtttagtggaaaagtgacggatgatgggaaggtaagttgatgtttaagcatgcatctacagtttcatttcattttggtgtctaaggggaaattctttgtatttgttatcgtgcagtatattgttctgtatattgatgagggatgtggccctgtcaataaactctatctctgtgacatgtctacacttcctggaggtcttcaaggtttccgggaaagaaatggcccactcccgtttgttaagttgatagataagttcgacgcacaatatattaatgttgctaatgatgattcgtggtttactttcatgacaaacaaagatgctccaaaatataaattagttcgagtcgatctgaaggaaccgggtaaatggattgatgttattccagagaatgaaaaagatgtgcttgaatcagcatgtgttgtgaatggcaatcagataattacgagttatttgagtgatgtcaagtatgtgatccaagtaagggatttggaaaacag

SEQ ID NO: 2369 - DNA, 603 bp, Gossypium hirsutum
tcatattagtgcgtttatccagcgcatgatcaaagctgagaaaccaaatttaatcgttttcacaggtaatccaataccaatacaaacattttacgtgcactcgtcgcagaaaaaaaacttatgtgatgaaactgtgaaaaatttaatctttcatttgccagagtagtacagtgttgattttatctatctggtaaccttattggccaaaaccctgagctctattaatagggtgatcttttattttgttaggggataacatctttggattcgaagccaaagattcagccaaatcattaaatgcaacatttgcccctgcaattgctgctgggattccctgggctgctgtattggggaaccatgaccagtaaggcaccttatctagggaagggattatgaaacacatagtgggattgaagcatacactatctcaattcaatccatctgaagcacatatcatagatggttttggcaactataacctggaggtgggtggggttgaagcctctggttttgcaaacaaatcagtcctcaacctctacttccttgacattggcgattactccacggttccttctatccctggctatggctggattaaaccct

SEQ ID NO: 2370 - DNA, 637 bp, Gossypium hirsutum
ctctgttatcttgtatagcttcccatgcatgacatactcgtacttatcagcaagagacttccttccctgtaaaagaagtccaatttgttaggtaaatgacaacaaaaaattgcatatctgaatgatagaggttcctttacatatatacatgtaatatatagcaacatagagctaataagccatggcaaactcaatttatgctaattttctattttacttccaacggtgataatgttttcatatatgaagggcaactagaaacaagatacaagatgacatacaaaaatataggattttggtgtcctagaaacatactttcggaatagctttaacgacaggcaagatggtttcacctaggaatcatattaggcatacaaaacacccactagaaccaaatggaaactgaagcatagttcaagtttgcactcccataagaagtggatgtgataaatgctacaatcaaactcaagccctggaaataatagtcatggttatctgaatacttctaaaaagaaagtattctgttgcagcaaagagattagaaaagagtgttaaacgttaaatttcatctgtaagaagactaccggagtgtaatagccagtgtcaggagttccatccaaattcaaggtgtgagcta

SEQ ID NO: 2371 - DNA, 606 bp, Gossypium hirsutum
  misc_feature (39)..(41): n is a, c, g, or t
gcactgagaaattataaccatttttcctgataagattcnnngaaaaaaatatttatacggcttctaatttccttttccttaactaagtcaacagttttaaaaacttggatcattttcattggggcacctaaggaaaaagaacatgagaaaccatagcttagttttgagttaagattaaagaatagcattacctaagaagtgttgcacaatttgatcacaatttcgaaccattgcatacaacataacatactaaaagaacttcaacaacattacaacataagcctaagacaaattataatttaagtgtcagctaaccttgaggtaggcacaaatatggtactaaagacaaaaataacaacataaatatatcagaaaaaggcatagaacataaataaaagttcaaacaaacaaagcaagaaacagaactgtctaagttagaactcagaaggaccaatcggaataaatgaaacgactaaaataggcaaaataaagaatacacagaaagggaaatatataaaaatgtttagagaaaaataatttattcgaaaataatagcaatgagaactgattctagaccccccaaacaaaaaaaaaaaaatttccccc

SEQ ID NO: 2372 - DNA, 641 bp, Gossypium hirsutum
ttcggcttgaagcttacggaatccatctcggcaccagcccagagaaactgttcagcttccttcaacagagtagtatatgcatcacctgaaaaaggactctgaaaaatcttacatgcccgtgaaagccattgctctgcaagttgagcatgagtaacatgggcacctttcacctacatgcatttaattattcaattagttcagttatcttcaaaaagatatacatcccatcataaatagaaaatcactagattgcaaagtgttaacatccagagatcattcgcttgttggtgaaatacactaaagaagaacaatttcagtaagaatttgtgtctctatatagaagatttcagggcaaagtgcatcagaaagaaatcacccaatgggcaatacatctaaaacttcaaccaccagaaaaagtgaggagtatcattagataggacattatagtattagagggaatagagtaaaatatcgcagaaggccttactaatgagttttcacaaatcagaaggctaggtagatccatttctgaaccattttgaagagccttcactcaggtcatagtattagtggtaactcaggaacatgagccataggaatcataaaaaaaccacaagctaaattcactgatcaaaccagag

SEQ ID NO: 2373 - DNA, 504 bp, Gossypium hirsutum
cctatcggggcctgaccacctagctgctttggctccactatctattggccgcactcgaatggaaagtgctgttgttggagctctatggggttgtggtcatgatgctggtcaggttatctttggattactatttttacttctaaaggatcgccttcacattgaaatcatccggacttggggcacaagagtggtgggcttaacgttgcttgttattggggcaatgggtataagagaagcttcagaggttcctaccccatgtgttgccttagaaaatggtgagtgtgatgttagtgtttacgagacacttgaaaacccagcagtcggaaaaaagaagattggttttgctacttttgccactgggatcgttcatgggttgcagccagatgctctaatgatggttttgccagcacttgctttaccatctcgtgtggccggtgctgcattccttatcatgttcttgctcggaactgtggtggcaatgggaagctatacggtgtttatagg

SEQ ID NO: 2374 - DNA, 616 bp, Gossypium hirsutum
acttgaaaaatgctttgtataaaatttttttaaatgctagtgaatgataatattctgaccttgtaaaagtttttttaattttcattgtgttgctttatcctctttgtctctatcttcttcatttggttgtggtcatgttcagtggggggcccatattttcactttcatcaaaaacatcattgattggaattttggaaccaaaaaaggtctaacttcctgcaagctgcaatatatatatacacaaaaaaatcaataaatgcaaaagcaatgcaaaattcatcaagcaactagtacaagaactggttacttgtcctacaaagaggcaataaattcaaggatacatttcaccatctcagaatcaaaagcagggccttccatttcgaagtggccagctccttcgattaaacgtgtttcattgtgacctgctgctgatttcaacttgttattaagctgtttcacgctcgtaaacccatcctcagttcccatgacgaagagtttcggttttggggactgaagaatggctttatggtgacgtccgaaaaggattgaggccatcatgccaaaagggtaacccagacttacgtagccaatgatttgctccatttgatctactgca

SEQ ID NO: 2375 - DNA, 551 bp, Gossypium hirsutum
  misc_feature (449)..(451): n is a, c, g, or t
  misc_feature (470)..(474): n is a, c, g, or t
  misc_feature (488)..(488): n is a, c, g, or t
  misc_feature (492)..(493): n is a, c, g, or t
  misc_feature (496)..(497): n is a, c, g, or t
  misc_feature (500)..(500): n is a, c, g, or t
  misc_feature (503)..(504): n is a, c, g, or t
  misc_feature (506)..(508): n is a, c, g, or t
  misc_feature (511)..(514): n is a, c, g, or t
  misc_feature (521)..(522): n is a, c, g, or t
  misc_feature (528)..(528): n is a, c, g, or t
  misc_feature (531)..(533): n is a, c, g, or t
  misc_feature (542)..(543): n is a, c, g, or t
  misc_feature (546)..(548): n is a, c, g, or t
agatcatcacaatgcttctagaccccaattaccagtcactcgagataggacttctccgacctccatggttaccggcttcgaagacttggacggaggggaagacaagtcaactcaagaatacactgctttgacatcctcaagtgacaaataaaggggaggaactgaactaccttacacttattggaatccctagactactgatagaaagaatttccaactcgacggaataaatctagcaagagaaagaaaggatgaaagaaagacatacgaattcccttctaaaggggcctaggtaatagcctaaaaaaaaaaaaaaatcaggaattgccccgaaaatgctttcttcaaactcttcttgggcaaccaaaaaaaaaggaagcaaaacaaggggtttttctttgctctggaggggggggagttcgccaatttcagtcggcccggcctcgggnnnaaggattttttccttctcnnnnncccggggggccccncagnnacnnatngannannnaannnnaaacccnnaccacntannntttttttcnntcnnnggt

SEQ ID NO: 2376 - DNA, 613 bp, Gossypium hirsutum
aggcctggttggctttgggaacaaagacaaagaagaaaggtggtgggaagaagaagaaaggtatgatgtatatgttgatattatattggaggtttaaaaaattttgcagaacagtgttgaccgttggacatgaattttgatatttgaaaaattgaggactgaattttaaaaaataaaagtatagggattaaatttcaagtttacaatgagtgcagggacttatggcatatttaaacctatttcggaagcaaatgttgagggttttgtagtaaaaacttaagaacatgtacttggtttgtgcaggtaagaagggtgataaagctgagggtggagccgagggtgaggccatggatgcatcgacaaattgtggtgcatcataaggaaacaataataaaaatgtttttgcgcatattttctaatctgcccttttatatattatgatgattgccaaaatttttgatactgtgttcacttgtagcttgttggttatgagttaaaattttaatagagtagttttttattttatggcatgacatccacttggagtcttgtgtttgtgtgtgatgtgcaacttaataggaaattcaatttgcttcatttctctatcgtctgc

SEQ ID NO: 2377 - DNA, 615 bp, Gossypium hirsutum
ggcaccatttcaggatctattgaagttgcgagtgaagaaacgagttccttgtgtgcatcaattgtaaatgttttatttctctcatatggattccatacttcaaatgactgaaaggaatatcacaccattactcacttgcattcttgtgcatcatcaacaatggcttgcatatgtgattgcaagattacaagaaataaaactgaatttgacaataaatattctgagagacattacccggtagccaccaatgatccagattttccagttccatggatggaatgtgcaacactggaaattgtttcctgttgaactcaattcatgcaagcttttccgttcagacactgaccataatcgtgcactgtcttcactgatggagataaatcgcgtgccatctggatcccagcaaattgactgaacttctttgtcatgttcctgaaacaaaatagaacatttcttcatacattctaggaggcaaatatatcaagttacttggaactttcgggttacttcagggtatggatgcaaagcttgtagatctgaacacaaaatactggcttagatgcatgaaaaagctataatagcatccaaatatattcgaccttgaaaacggcataa

SEQ ID NO: 2378 - DNA, 610 bp, Gossypium hirsutum
atttccttctattgttggaaaattgaatgaatcaagaaattgaagatccgaacttttaatcttgagacatgttggatacggttcttaaagataagtcaccctacatcgtaggataggagcagaaacaacccaaagcaacaagaaaagaatactcggcgaggaagactgatcaggaaatcaaatggagtaaatcatgatcagagaccatgtcaaatatgatttttaatataagattaaagaatttttttacaaaaattactccaaaaacataaaaaggctaaatttttatctaactaattatgatttatatacagaaagttggaaatttatttaaatgatccgagatagattcttttgaaatatccttttatttaaaaaacacgtcacaatacttaaaaattaatgtctcatcatttaattaattactcgttttctatcatacagggatctttgtcagtgtccaacatgcactcttcagacttgtataagactttcacctttcatatattgtcgtataaaattacaaagagatgcaggtgaagaccattgggtccttgatgctgtacaaaagatgcaggtgaagaccattgggtccttgatgctgtacaaa

SEQ ID NO: 2379 - DNA, 597 bp, Gossypium hirsutum
ttcccgagaggtcttttcatctaccatttctaataaacaattttatgatgcatctatatccttcatgaactattcctgcaagtcatttgaatagctggctgtacttgttcttttttcaattatgattgcttacttgcagttttatttataagagcattaattagcaacactaagattcaatctttcatggactatccatcatgattaaccatttttctctttttctttggggttaaggttcaagtttgtcattatagttgggtctataaatcaagcgtactagttatcttttaatgtgagcaattttaacattgtacttttaggtttgtttaaaattggtcaaaagttaattcataaaggatatattccatgaagctgtggaatatcggaatacataatttttgtagttcttttgtcattttcaataaaactaaagtagtggtaaatttgcatttgttctgagatggtggaaaattttatccatcacttttagatctgtaaatttggaccttatctttttccttttgcactttcaagccatctctgttttgctgtttcacatcaaactcaacaatgatgataaacatataggaactg

SEQ ID NO: 2380 - DNA, 567 bp, Gossypium hirsutum
  misc_feature (280)..(280): n is a, c, g, or t
  misc_feature (292)..(292): n is a, c, g, or t
tacgaaagaatgcattactttaagccttcaactgcatagactaaactcgggcttctactaattgaagtaggataatttaggaacaaatatgagggaagccaattctaggttaaaagtcaagacaagcttgaagacaaaaggctcaaattcaaccctgtagaaaagcaccatattagctgggtttttttttttaaacccccttgacccccgaaaggacaatataaacccaaaaccccggcttttttgttggggggcccggtcgggcactcttactttaccnggacatgaatanagccttcaaaatacttgaaacattttaaaaaaaaattaaacttccctggtccaaaaagtccaagaaaccaagtggctcggttccctcccaaaccttttttgtatttatgaaagcaacaaagcaaccgggtggagttttttttttttttttaaaaaaaaccgttggcaaaaaaatcggggaaaaaaaaaaaaatttttttttttttttaaaaaaaaaagggttttttttaaaaaaaaaaaccggttttttccccggggggccttaaaaaaaaaaaa

SEQ ID NO: 2381 - DNA, 626 bp, Gossypium hirsutum
  misc_feature (612)..(613): n is a, c, g, or t
tgttataattgataatatttttctgcatttccctcgtgtggtctgccagttttccatgttatactatgctagcaatgttattgaaaggactagaaactgtaggttcggaattatgaatatctttgatgattaagtatctataaatattgagtgcaataataagatatataatttttacaataaaaaaattatgctcaagttttgaatatatattattaaaagggataattacaaattattagtactcttattttcgatatttttattttaaaaccattactttttagaattgtatcgaacaaatagtagatgaaattatttatgataataataaattattgtcatgaatggatacattggttaaggagaggctcaaatccaacatttcgaactccatgaatccattctcaaggttcccgaatggattatgaaacaaaataagtaaaaataagtagagttttatgataataacatccttcccaagttgtccaaacattgatgatttgccctttcccactcatgttttgccaactccattctccctaactatttaaaaccaaaccaaaagcgatggaatcagattgacaaaattggcatcatttcacactgacnnggaactttatgca

SEQ ID NO: 2382 - DNA, 657 bp, Gossypium hirsutum
aagagagagagagagagactgaatcaataaagaaaaagaagtaaactagtatggaagtgaagggatcaagatgatgacatacaaaagcaccaccaagcttgtcaagcatccaatgcctgggggcattgagcctcttcaaatgtttcttcaaccctctagcctgtaacacaccgcaaagaacaacatatcgtaaatgaaactgaaatacataaggtgtcaatttgtctacccattacaaataacagaacaatgaatgaagagcaggtaaagaatctaaggttccattcaagtcccccattcccaatcaatcaaaacaacatttatactaaataggcaaggaattagatagatcccggctacaatgaacagtgcgaatcacagaaaacccagatataataaacattcaaaatcaattaagattaggccaattttcatttgcttagaaagctagcccaaaactttaaataacagtgattaaacaaactaaaatggaatagcctaagcagcaaaccatgaaacttacataactatcaaagaatgaaatagttaagaaaaggtaagaggatcgaagttaggaaaagtagaagaaactaaccatcttggagaaatgaggctgctttgctcaaagtctgtgtcttgctagggtcttcaaaaaaa

SEQ ID NO: 2383 - DNA, 667 bp, Gossypium hirsutum
attcaaatatttatcttgcattcacgccgatatctgaataattggcttgatattttctttaagggttgccttacccttcgggttcatctggttctcaagtttctctagggacaaatcataactcttctgtcgctggtaatcaaattattttaaaaggcttgccttttctttttaagaccagatgggtgaataaattttctattaaatggatcatcatcatattataagttaaagttttgcttgtttccccagcttcttctcccatggggaacccaaatgttccaatggcaccaagaccaagcatcatggggttggggtttggccggagcaaggctggaagattgaaggcagaaggcctcttagcaatggtggctgctgctgttattctgttttcaagactcgcgcttccatagttttgactttggttaacaaagtgttgtttcttaggtgtatttatagttttgagcaagttatttattggaacaaagtttatctatttgggaatgaaacatatgcttgcaatggttaatgtttgtttcatccaagcacaaccaaaccattgtggcaatctctataaattcatataataataacataattaaaccaaaaattaagcctattaagctttaaaaaaacagatggaagcaccgtcaactttaacgtatga

SEQ ID NO: 2384 - DNA, 621 bp, Gossypium hirsutum
tttggataaatatatatataaagttttattttcatccaattaagtctttgaatttagttttaagatttaatttagtatttgaatttgatttattgatttaaaattgatacttgaactagattttttagtccaatttaatatttaggtaacttatttaaattataaagttaagttcaagtactaatttaaattaaaaaaattaagtttaaatattaaattagacaaaaaaatcttaaatattaatttagaccttgaagacaaattcaggtacaaaaatatatatttacccaaactattattcaggtacaaaaacttttattttagtcgccgaattattcaaaaatttttatttaagtaactgagttgctttcttttttataaaaaaatagtccgagaattccaatacgacgatttaacgattaatacaataaattaatattcattgataagtaaattgatcatgtgaaggagagtgaaataattcaaatttggtgtgcaaaattgcaaagacgattagtaaaaaaattaaaaattaaaaatatctagatattaattacagtaactacaaataataaaacatacacataaaaaatgtgagtttgctcgtacgagcaagaagac

SEQ ID NO: 2385 - DNA, 462 bp, Gossypium hirsutum
cagcaattggatcttccataacaaaaattagaaagttcaataagtaaagaataataaatcaaaagcaaaaacttttggaggtaagaacaataaactcacctcaaaacatcttctcagctgatccagctttcctcttactataccctaacaaaaagaaaggaaaaaaagaatgaaaatcagcacagcttcagtttaactgcacccccagtataactcgctgcccttaaaattcaagacaccccacaggtaaggcaggtcccttcctttcccctacttccccaaacccttgtgaaagcagaatatggatgcaacaaccaaagggaaacttcagatagcagtagggggaggatggggacccctcccctttttccccttctttcctagacccttgtgagagtggagtttgagctaagggattgggcgcaaccaccaaagggaagttcagatagctgtaatagctgt

SEQ ID NO: 2386 - DNA, 645 bp, Gossypium hirsutum
aatttttttgttcttgttatgcaaaatgctttgcaaaatttttaggaaaccctcctaccttccgttcaatgatgcaagatacagaacgtctatcacatattttatacatctgattagataattcgtaaacaacagcctcacgtccaacatcatcaattgcacgtaaatccacagtgaaagttacctgcattagagttcatattttactgcttatcagcattttctgtttacgctgacactgagattcgttcacggaagaatttcttgcctgccctggaatgacattacttgcacttggccaggttgagatctctccaactgtacagacaagagaagtggacaacgattctaatgtttgctcattgcagttaccgccactggataagaaatctcgaggatgtttacatagactttctagcaaaacaatcaattcagcagcagcagccatagggtccctacacattgacattggtactgttccggcatgtccttgtgaacctctcaccgtaaccttcaaaagtggaacagctcaatgaagaaaaaaaactaaattcttgttaggaaatattggattcaaaaattattctacttccacatgcatccaagttgatgaagcttttggttgcaaaataaaatacaagcagc

SEQ ID NO: 2387 - DNA, 596 bp, Gossypium hirsutum
  misc_feature (9)..(9): n is a, c, g, or t
tggaggtcnagtccttaggcgaattgcagaaaccctttctgccagtgattgtttggatatatgtattgatatcttcgttaaggtaagctaaatatcttcctttcaaggtttcctcaattggccatatttcgaggcctttagattgatatatgtgcattatatatgtatataaacatatatacatatggatgtagtattatacacaaatagcaacccaaatgtcgcattagaccttcggattttgagtgaattgattagaagctatagaatcaatgataagtactatcttaataatacatgccttactgagttgcgtcaatataaatgaaaatgcttctaacagagaggtacaagcactagtgcgactggattaccatacattatattaaacaggttgctagtatcaagaaccttgattaggtcaatttatactttttaacaataaggaactggaagtctagacaaacagttcaatttgatatttgaagacacatggttttgttttttacttctcaaatcctataaatttgttacacttttggttgattaacaggtgagatacagaagagcagctaaagcactaatgcgactaaacc

SEQ ID NO: 2388 - DNA, 610 bp, Gossypium hirsutum
ctgaaaatgctctgtgtttgcagttttcaaatcatggtcctcttgagccgcatgggtttgccagaaataaactttggagcattgacactgaccctcctgcttttccgacaaactcatccagcaaagcttacattgatttgatccttaagccttctgaagaagatatgaagatttggcctcacaggtaatgtcagttcacaaaaagactttcatatctgaatcttcaccacattgttttattgaccaattaacttgaattcgtggctttgtcttctatctcagttatgagttccgcctgagggtagctttgggacctggaggggatctaatgttaacatctcgcatcaggaatacaaatactgatggaaagccatttacattcacattcgcatatcacacatatttttccgtttccgatatcaggtaactcaaaaggacttgttttatatttaattcttcggtcatgtgatgttctgtagtactgctacttctgggtttatagttggatacatttgagttaatcttttgacatgcacggatcacgctatcttcttccattgttggatacatttgcatatcccagtttattaacattaaatgtcgacagcta

SEQ ID NO: 2389 - DNA, 660 bp, Gossypium hirsutum
  misc_feature (620)..(622): n is a, c, g, or t
  misc_feature (627)..(629): n is a, c, g, or t
  misc_feature (634)..(635): n is a, c, g, or t
  misc_feature (646)..(655): n is a, c, g, or t
atctctccttgaatcaaaattctgtctgtgattgtgatcatttatcagtgttggtgttattgaacaggatgacagagccacagccgaactactcggcgtatcgtgaagctagtttcggtcatggaatactggaaattaagaacaggactcatgcttactttggctggcatcgaaatcaagacggttatgctgtggaagccgattccctatggttgcacaatagatattggagcgtttcagattcagaagaattatctgtagccactgccaccatatgattttaccttgtgtcgctttagctagcaagctcaattatatctgtcaaggtgtttttattcattgcaaaacttacaagttttacttccagtaaaagtaaggtattggaaataaatggctaaaactggaataaccattaaccaagcaggtggtggttgccttgcgacatggaaaatggcaccccaggaattctatattagactcgatctttgtaaaaactctggaaacagccaaaacattgtagaatctctatactatttgggggggaggggtaaagtagtagtactaagcatctttttttcataaagataatgcatgtgggtttggaaattgtgagaagatcnnnatcgnnngcagnnttttggtttgnnnnnnnnnnggtca

SEQ ID NO: 2390 - DNA, 603 bp, Gossypium hirsutum
  misc_feature (559)..(561): n is a, c, g, or t
tcccgggatcttcttcttgataggttcctctcctatcatttttttcccatatgaactcacagatccagtatcggtaggaacaacatcgaactagcaccaattacacaaacatctctcagcttcagtgattcagctaaaagtaaactatttatacaatatacaattcaacatctgtactaattctcctgacaaggaataatttgtcaaaattacctgatcttcgaggaacagccgtggaggtgtacaccatgcacccctatgaaaagtagaaaaggaactagcactacttaatccagtaagtgagctagccggggacatttgtggactctggtgaccaccaataccttgttgctcttgctcctgctcccgtaaagctattatataatcatatgtgctgattccctgaggcacattcaggaattaccaaattagctaattagctttcttttctttcccctttcttcacattttagtacttgttaggattcaacttaaggaagcaaagaaataaaatagaaacatccttcacatgttagcgggaaaaaaaagttgaaaaggnnntgtctttttcgtgaataaagcgagaaaaaataaaatgtgtgc

SEQ ID NO: 2391 - DNA, 607 bp, Gossypium hirsutum
acaatcttttcttttttgttgattttattcctttaaaaataatatctaacaagatttaaattgcatgcataaaagggaaatagacccttctagaagacttacgtatgtcattaatatatgacaaatttaatttttataataacctaggtttaaaattatgaaataaaactagattattcaaaaactttgaatgaaaaatctagaatattcaaaatcatcttatattacttatttatttgaccttaatattttggaggggttggaatgaaagttcgtattgttaatggtttatttgcaagggaagtttccttattagaacaggaaatccatgctagtcaaaaaatttgaagcaggtgacattgaaatctttgggggaaattaaataatctcaaaatttgaagattatttcacatattgtgtgctcagatgggttggattaaattgatttcagatcaagtttatactaaaaatgtgaattatttttactataaggattagtcctttttttatatacagatataactaataataacaaactagcagtagcaccagttgcactgacttgtaataaacttatctaagggccttacgactggattagtatgaa

SEQ ID NO: 2392 - DNA, 632 bp, Gossypium hirsutum
aaatctgtatttagtatttttttaaaataaaaaataatattaatatgtagtttagcttttaaattaatatttaaacttatattcggtcatttaaattgtttcttctgcgttcacatcgttatataaaattaaaaaaactttaaaaatatataaattaatttaaaaaatataatttttttcacataaaaaatcaacctcagaaaaaaaattatatatttattattaatttatttaaaaaaataaatgttgcaaagatgaacaagatagggtcactgcagaaacaaaaaagttatggaacaaacatgaatcattagaaaaatttgtacctgcaaacgtatggaaggaggccttgtcaagtcatgtctaatcataaaggacgacgagataacatgccaatgaaatatcccatcaactttcgttttcttattcattttaaaaacacaattttattttaggattattatacaattcttttaattctataagccaataaatcaatacatatctttacttagcttttttcatttagaaaacacacaaatatggttcaaatatagacatatttttttaattgagcttgtgtgccatgagaattcactgattgaggcttataattcagaatccaatgcggc

SEQ ID NO: 2393 - DNA, 635 bp, Gossypium hirsutum
tctcctattttaaacttaggaaatgttttggttatttatcttattagtttgttacatcaccaggctggtaagcggaagcatctgttcgtggggttggacagcaccatgtctgttgggttacgaggtccaactaatctttttgggcatccaactgaccaactcttggctgaagtagatttggagctatcgcaatgggactctcaaccacttaaaccagtaagcaagatatcttttggacatttccctctttcattttcagcatcctctcaatctgggaagaccctgaaagatattttcctaaagcattccctttctgcttacgtatgtgggcatcttcattcaagatttggaaagaacttaaagaggtaccacttgtcaagtcatagatttttatcttctcagaagtttttccagtttaatttaaatcaaaatccttcagaaggcagtaagaattgttcatttggagctcctccggttcaagaattttgggaatgggaaatgggtgactggaggaagactagagccatgcgaatcttggccattgatagaggtcatgtttcgtttgctgatattgactttaagtcagggtccaaaaagactattatattacccacatttccacttgactcacgttt

SEQ ID NO: 2394 - DNA, 635 bp, Gossypium hirsutum
gcaatgtctaaaatggcaacttaagtgcctgatgattttcacacattatattgcctaatgttagcaagatccatttatagctcatttgtatttatcattccccccaaaaattaacctaataggtctaagggcgcatatttctggaggctactaaacaaaaataaaagagacttaatacccttataaaaataaccttttttaaaaaaggatctaagaggactgaaatttcaacaaaacttcgcaaagtgagagttaaaatatagaaataaccgaaacaagtgaagcttactgccagcagtttagtcccactaataagatcacccgattgagttgcctcagggatagaactgctagatggtgagagctcattattcctcctgctggaggatcttcggtgtttaaactcataagatggatcagaagcaagtgcctcaagagaagataaagagccttttttattctcactatctatgagtatggcaccatcatcctgtacatccagtttctggtcaaggaaaagtgccaaaagtgagcatcacaatcacgttacaagagggaaacacgacctacaaaaagttctcatggctagataatccagttactactgaaaatcagacagggatagctgtaaactc

SEQ ID NO: 2395 - DNA, 623 bp, Gossypium hirsutum
  misc_feature (35)..(37): n is a, c, g, or t
aaaagaaagaaagaagttggaactctaaaaagctnnngggtttaaaaagaacctcttgtttctttatactatttcatagaaaaataataagaataatgatgatggctgtaaaagctacaacttatttatataggcattctttcttgcaagtgaagttactaggcttttttgcaaataaagttttattcctagccttaggtttaaaccctaaagataactaataaccctatccatatataatatatctaatatataaaataaaggttataacataaaactgaaataataaaatattataatataaataaatgctcctatgtcattttcattctccattaagatactggaaagaagaaaattaacatgcagaagctatggaaacattcttcatgagtttcctagttctttgtggcatattgtcctctatggtttgtagggtggaattagtggtcttggtcacaagagctaatgatgggttgagatcatgcattatttaaataatttgggcattaatatgttcagattagactccactgtccaaggacttggtccatttttgatacgtaaattgtctaggttgaatattagaagtgttattccttccttgatgtctaccaattgcc

SEQ ID NO: 2396 - DNA, 631 bp, Gossypium hirsutum
gcatgcatgcatacatacatacgtgatatacaatagatatatgcaaaacatctgattaagggtcagaacaatgtagatgattaccttgtagcagcaccatgcatgtaacgaggatgcataaatagttgagccgtaccccacagtggacggatattgtttccctgcatagcatataaaagagatgcttaggaaacaaataccttgacgtttttcatacaagaaaaaacttaaacagataaatcttgaagctcaacatgcaagaataattgttgataccagaaagatagcacgaaatgctaaattattttgagcaatgtgaaatttgtagcacggaatttttcatgccataatcatatatatatgtatgttgttacaagagcactgatagataaaatgaatatcatagaccccccactatatggttgctctgactcttcattttcttaaagcattcatgtctaataccaaagttcgacatattcggacataaacatggagaaaaacttaaaaagaaaaaagaacaaatccacatagtttggcttctataacaacatgcacaaaacctatctctgtgctattaaatgtgtgagtttctcacctactacaaatcccatactacctcgtaaaccga

SEQ ID NO: 2397 - DNA, 564 bp, Gossypium hirsutum
gcaggggtggcactcactgaggcagaattagacgagctcaaagttgtgccgccagcaccaggagatttcacagacccaggtcgaacagtcgcagcagcagcctgttgctggctcaatgggaaaataaaagcagggccatgctgaaatagaaataaaccaaaaagaaaaatatcaaaatttttgtccagatataattttggaattaagacaacactggacttcattaaaaacaaatgaacagaaaagtgaaatgaggttttctcgggcaagagcataccaggatattactgggtgccccaggaggtagagcttgctggagcagcatttgctttctctgtgcagcatccaccatgttggtagcagcctgtgaacttttatctttgccaccatgaccaggaaaaattgcaagtgtctgccccttgtcttgtgcagaactcaccgctctcccaggaatgttcccattcaattccgaagcaggcacaacatttagatttgccttcagaccatagagtgaagctgaaccaggtgccgtgggccagaaaggattcatcttcatgaattgct

SEQ ID NO: 2398 - DNA, 612 bp, Gossypium hirsutum
tctcctgctgtgtatacgtcatggggttcgggcctattcccagcattctctgtgcggagatcttcccaacacgagttcgtggcacctgcattgccatagtttcccttgtttactggatttctaacatcattgtcgcatattcactaccggtgttgctcaaaaccgtaggtcttgccggtgtctttgggatgtttggaaccgtgtgccttgcatcatttgtgtttgtgtttttaaaagttccagaaaccaaaggcatgcctcttgaagtcatcacggaattcttttccgttggatcaaagcaggctataactgctaaaaacacgggttattctaactgctaaaaacaaccgagtttgttgaattatctgttggaaagtttattgtgttttttctcttcttttttaagcattgtgtatacatttaagacataatgtgaagaccataatgatctctgagtttattttgttattcatcaaagctcatcgtacaggctaccattttttaaatcaaaggcaaaaatattaagatcccataatcattattcatagctttcctcacaacaaaaataaaaatatgaaaagaaagaccccatattctgctattgatcatctg

SEQ ID NO: 2399 - DNA, 584 bp, Gossypium hirsutum
  misc_feature (528)..(528): n is a, c, g, or t
atactttggcaagatatctgacaatagatgcattggatggagatttacctatttcatgccgtaaaagtttgtaatatttcatgtgttatatagtggataatagctgtgcagttgccatatgtgatcaccttgaacttgcataactgggatttgtcgtgtttaagttattggctcttaatttgatcttgactttcttttatcttgactaatgcaggagaaacagcttgaccttctagagaggtcaaaggagaaagtaagaacccctgagggagttccacgtctctatgacttgattaaagttcaggatgaaagaataaaacttgctttctatgctgccttgggtaacaccattgtagcaaaggatcttgatcaggtggatacccgtttctccattattaagcagactgccaaataatttatttcatgtgttacatgataacagtcaaatatctgcaaaaaattcagagtttagatgagaatttagaggggcatatgagattttagataatggcagcagacatgtggttnttatataaggaaactctatgtactatttcagtcaaattccatttctacattagtag

SEQ ID NO: 2400 - DNA, 629 bp, Gossypium hirsutum
  misc_feature (621)..(623): n is a, c, g, or t
gaggccctactgtaaaggatgaagagatagctgataaaaccagtattcatgaaactgtctttgatatatctggaggtcgcagggcatttatagatgcagaggaggctgaggagattctgaagccacttagagagccaggaaattcatatactaagatatgttttagcaacagaagttttggcttggatgcagcaaatgttgctgcacccctcttgtcatccgttaagcaacaattaactgaggtagacctttcagattttattgctggaaggccagagtctgaagcacttgaagtcatgaatcttttttcttctgtcctggaaggttgtcagttaaggtacctgaacctttcaaacaatgccttgggtgaaaagggtgttcgggcatttggggctctcctgaagtcacagaataatttggaggagctttatttgattaatgatggtatttcagaagaagctgcacaagcagtttctgagctaattccttctaccaaaaagctgaaagttcttcattttcacaataacatgacaggggatgaaggtgcaattgctatctctgatattgtgaaacgttctcctgcattggaggatttccggtgttcatctacaagagttggcnnntgatgg

SEQ ID NO: 2401 - DNA, 631 bp, Gossypium hirsutum
ttttagagccgcatgatcggatcatggggctggatttaccctccggtggtcatttaactcatgggtattatacctctggtgggaagaagatctctgctacttcaatttactttgagagtttgccttataaggtgaaccccagcaatgggtacctcgactacgataagttggaagaaaaggcattggattttaggcctaagcttatcatttgcggtggcagtgcttatcctagggactgggattacgctaaattcagggctgttgcggataaatgtggggctcttttgatgtgcgatatggctcacattagcggcctcattgctgctcaggtattttgttttttctttgatcttgcttgttgttaattggtggtgttcgatctgggtttttagttagtatttcaatgctttctttgatattaaaatttcatgaatttgatctcgggtttatgatatttagactggttttctataattcaagatctaaaagcttgttttaatttttatgagacggtttttgcactgtaatcatagcttataagcattttctggtttggagatccaatattggaatggattttatgaatttaaagtgttttgattaaacatgaatcacctctgagaatccttat

SEQ ID NO: 2402 - DNA, 644 bp, Gossypium hirsutum
aagttccttcagacttctcacagatggaatttttaaatgctggttgtgtgactatgattgtagtggtttctcctacaaaaccgctaacggccttgtcgtctgccttcgatgtgcaacaactcctcacaattttacgtatcaagcaaaggaaccacattacctcttttatgatgcggaaaatgtgagcaattgcagtgcttgtggtagacgtagagaccgaaaaggttcctacatatgcaaggactgcaactttgttttgaattcagggtgtgttacactgccaaaaacagctcggcacaactttgacgaacatcctttgaagcttgtttatgaagataacaatgattatccactccatcattggtgtgacatatgcgaaaaagaaagagactcgaagttttggttttatcattgtaaagtttgtgacaatgctatgcatcccaaatgcgttctcggagaatatccatttatcaaattaggtagtaaatataaatataagggtcatccgcatcctctcagtttcatccaaaaaattgactaccaccctttatgtgagaagtgtagagagccttgtcaagatctaagtctcgagtgtgaagagcatggttgcaactttgttggtcattggaaatgcttaacgtgtg

SEQ ID NO: 2403 - DNA, 614 bp, Gossypium hirsutum
aagatttgagtgttttctttcttcagtaagtagcagtatttttttttcctttttagttgatttgattgctcaaagtagaaatggacaacatttatggaacattcttagttaacaatttggcaggaatccatgacagaatccacagtttctctgagagcttaaaccaaaactatatacaaacctcaatgcacaccaataattatgttacaaatgatgcctcgttgtcatatctaaatgtttccttttccatttctacttttatacaagttaaaatgtgaaaccttcaaaatagaaatgcttgtaaaatgcatcattatccccaagcatcatgcatgatgcatacaggcaatcatcgtactaattctttagatatcagatacctgaaggtaaaattatgaggaatccattcaatgcccttgtgggatttcccttgttcacattttctgatactgcgatgaagtgattcaggcaatgattgtcggaccatttcgatgacaccagtcgtacacaaatttgaatcctttgcaaatgactccacaatctttggtaatagaattttcttgtctttgtggacactaaatgtagcccgaatgtactcttcttttgccgtttcc

SEQ ID NO: 2404 - DNA, 631 bp, Gossypium hirsutum
ttctaaggtaagaacctaattcctcagcggaaggtaaatattacctgaatgaaccattgattgctcggtgcaaattgctccgcaagttcaacgcatcgagatgctatttcagttttataatgattgtcattgatgctattcatgtaatcaatcatgcgatcaacaataacctccacatttgtagacttggtcattttgtacagtagttcaaaggtttttctcttcagagtatcatctgggtcctgtttggtgccctcatgttaactaattgcaataaaaagaatgacagttgcatggaagatagcataattaagaaggataactattcactaagaaatttgaagccaaaccaaaattgtaagcacggataaacacaaaaggcatttacagtagtgttagattaaactctgctataacgtgcataagtgcatcattcgcatttaagtatgtattgaaacgaaattttgaactaatcactcttgagtcttaaaccacaaataaggaccaagtgcttagtagtgttagattagaccactggagtcttgtaaatccactctcaaattatcaaatcattaaagggtattcaagaaaaacttttgattataatgaaattaacagcttgttcctcgct

SEQ ID NO: 2405 - DNA, 581 bp, Gossypium hirsutum
  misc_feature (573)..(573): n is a, c, g, or t
acctatggccgcccgagcagttccagcttctccatatgtcatccacttgtaccttcatgaatagaaataaaaaaatcaaagttaacaaatgaactttaacaaccgtcactgtgaacctcatctgacaataggaaacttactctccaactgtaccatccgcttgaattcttgtaccaagatatttgtaatctcggaaggtatcaaccgcatgtctataaaagaattaaaaagagaaaagaaagaagaaacaaatagaagtgaagaaaatatccaaagtacttgaatatgaaatgaatgataaagcatctatgcatggcaacacaaccacagactatcaaattcaaacttggttctgccaggaaaatgaggatgcttacacaaaattatcatgcaatgtaccaatatcaggatgatcaggaaatctagtcacaagcttaaacggagagcgagcagatctgcagtaaggcacaaaagtaaaataaatcttgacaacaactgaatagagaaggagcaatgcagagcaaaaaaagagtatagtggtagagtttttacctgtatacattccattttccngtcttcag

SEQ ID NO: 2406 - DNA, 622 bp, Gossypium hirsutum
tgctagacaaacgatccgccgaaggcaggtaattgatttattgcatgttcagttctgtttgcttttagattatatgttaccttgttgtcagtctccatttgttaagttaactgtatcttttacttgctttgactgtaatttttttttagtctaatgagaatgtctctgaaatttattttcagaaagccttatccatttccgtttcccttttttccttcatctaatttaaaaccacgactcttatggcacaattatactgccttccccttgtcacatttcttgaaatgacgtactgtgaatgattgctcagctcgtcaaagggagattgaaaccttaggacttgttagagagacatagatctttttagggttttcttttctgataaaaaatttgcttagtgttttattgttttgtatgtccttttaaataaggatcagtcttattacatagagagaaacctattcttaaaaggaagttacgtgatggataagtagtttgtcctaaaatgagtatgcaaaagtttgttttagtttgaaaattatatataagcataagtatctgtattttcttttgtggtttaattgtgaatttaagtaacttactggctgagctggtgcctggt

SEQ ID NO: 2407 - DNA, 698 bp, Gossypium hirsutum
  misc_feature (603)..(641): n is a, c, g, or t
  misc_feature (645)..(651): n is a, c, g, or t
  misc_feature (655)..(660): n is a, c, g, or t
  misc_feature (662)..(667): n is a, c, g, or t
  misc_feature (669)..(671): n is a, c, g, or t
  misc_feature (673)..(674): n is a, c, g, or t
  misc_feature (676)..(686): n is a, c, g, or t
gcatcttgatggcacttcatggtactgacgatcatattcgttagtcgaacgatgataagttgctaaccaaacatcgccaaaaggccccctcccaattctatgcctaagtttcaatactgaagggtcaatccttggaattctcagattcgaagctgaaaccacggttctaagttgctcatcatcaccttcaatgaagtcatactcagagaaactggcggacagagcgtcaacgactttcccagccattccttcaatcccccccccaaagaaaaacctttaaaaaatacccatcaaaggaaaaacataaaacatggtaactgatactaaaaccatgaattcacaaagcatcaaatacgaacttaaaaaataatgatatgttaaggggggacttggttacgggaatctacaataaaaaaaaaatttagctttttttcctctccaattattaataaaactttgtcaacccaagtagaaaaaagaatcataataagttaccaaaaaaaataaaattaaacaaatattccaatcgaactttttttttaaaatttggtcctcctttaaaatccatccatccgttcctttttttttttctttggcacaagnnnnnnnnnnnnnnnnnnnnnnnnnnnnnnnnnnnnnnngggnnnnnnntttnnnnnnannnnnngnnngnngnnnnnnnnnnntttttttttttt

SEQ ID NO: 2408 - DNA, 647 bp, Gossypium hirsutum
  misc_feature (641)..(644): n is a, c, g, or t
tgactgcttcttcagtgctcacataactgtttcttccagatgagtagccttcttctttagcttctgctcctagaaccttctccaactcatcattaataagcttcagctcattctctgttacttcagtttctttttcagttatattttctacagagatagcaaatgtaggtgttgatggatcaggaatgttagggtctgaaccaagggtgccgatggcaagaaagccatggaatagctcagacattgccgatgatgaatcctcttcatagtcttcttcatctactcgtgctgcttctacaccagcaaatgactttcgaagatggtctctctgggatggactgaatggcttggtaccatagtttggctttgaatagatttgttggtcatccagtaatgactgcccggtaagacaattacaagaatgccctgacacgaaaaagttaaaagaaaaacttggatgacagtgagatagatgaaagaataagttcttgcgtagcattttagcagagacagtgattacttttccctaaccatgacaacatttagttaagattgtagttattcaatctctatgtatgtaccattatgtaattcgtttttggttcatcttaaatctatattccagccatcatagcgagagnnnnaaa

SEQ ID NO: 2409 - DNA, 622 bp, Gossypium hirsutum
gcttttttttggtgatactcaccctataattttcattaacatttaagaactaatgatttgtttcatttaccaaaaagaggaaaagaaaaactataaatgatttaggtataatcttcatttacaaaatgtagatggattgatatcaactaaatggagcttacatgtattttttactgcattactacttaaataaaaaaacagagttgaaagtgaaagggctttacaaggtggtattgttagagatgatcaaggaatcatcagtcttacattgtttagttgtttgccaaactttggtttgattttggatacgctatcatctttcaatctttgggttacttctcttccgacttcccgtcttgaatgtgctcctttcttttttattgcgtggtcaagttttgagttctttcgttttctgctcgcaatatgttcgtcatttatcctcttagaaattttcttttttagttctggtatcttagttcttgttttggaaccctgaattcattgaaacattatcaatttttgtttcagttatagttagaacagtgaaatattcatttgtacacatctcccacttcgagcctcgtatgatattttatactcgtttaaattacagaagggttgg

SEQ ID NO: 2410 - DNA, 514 bp, Gossypium hirsutum
tcttcccgtccaaacataataaaagagtccttttagtgacaaaacatcaaagccaattacaaatatgtccaaagcagaacaagtgatcacaccttcaaattgccacatattgtctgtgtcaaagctgaattgagtgttgtattcaagaatacataataatttattaggaaagccatgatacaagagagaagcatcacaacctgcacaaggttaaaatgattaacatgtaaaagagtttaaatgctataaagtttttctaatctcatgtcacgatatcattagggtcggtataatcttggcttaactttagagaagctaagaaattttgcccaaatgagttaacaaaagaaaggaacttgaaggataacaattaagaaaaactttgttgccagggaaagcaataaaagaaagactgcatgacaggcaagattggtaatcgccatcaacaaaaagaaattgactgcattagcaaaaccaaaaaatattatagctgcaaactgagcagaagtattaa

SEQ ID NO: 2411 - DNA, 599 bp, Gossypium hirsutum
  misc_feature (591)..(591): n is a, c, g, or t
gggatcctcagttctttaaccaaatgtcggaaaagctgcaccagcgtcttcagcataggagtgcactagccagggagatattgactcaaaaccagcatgacacccacatgcaagatatattccatctttgaaacaaactgttgttgtgtgtgtttattattccaaatataaatgactttgtttggaaatgcaaacaaaattttagttgaaggatttatttcataaaaaagtggcatctcttttcttttccctaaattattcgtatgatactgacttaaggctggggtggtttcagagagtagtgggcagctttggaattgtttatttataggaacagatatgtgggaagaggctgggactgatggattggttggttggtgcagatggtgagttttgagaatccatttctttttcatttacttaaattattcataactcaatttattaacattgaaacagggatgatttaatttaataacggatatattaaattaagtaatatttttgtaaaaaattccatttatttcactatatattctttcatccattttgtttggttgatatattttcattttgggttgtagttctagnccaagtgg

SEQ ID NO: 2412 - DNA, 622 bp, Gossypium hirsutum
  misc_feature (64)..(67): n is a, c, g, or t
tcaaactaagctgaaaacgtagctagaccatgaagtaactttcttatctagtatcttgacttgnnnncatgcattatgacgagaactatacaatcttgagatcttcaagtttctgtattaacaagtcaacaaaaagataatcacctgtatgggatgtgcttatgagtttgaagatccctatacttcttcgcaagaccatagtcaatgatatatacctgtaataacaataatgaaaaaccgatatcagaatatttcatacttttcaagtgtaacaaactcctatacgtagaaatgaaataatatttttattgtgaccagcaattcaaatttgaaagtggctgtgcaagcagtgtaatgagtactgtatgtgcatgttatgtttgccaaaaaaatataatacaagataactttaaatacctgatttgccttgcgtcctaggcccatcaagaagttgtcaggctttatgtcacggtgaagaaaacctcttgaatgcatatattctactctattaatctgaaaaaaaagaaaaaaaaaagttgaaaagggaaaatattataaaaaaactgaactatttcttcttcatgaaaaaaaggttatatttactaactgatcaccaagcatc

SEQ ID NO: 2413 - DNA, 204 bp, Gossypium hirsutum
gcaaacaaattatacagaaggaggccccagaaaattgttggactagaattgggctagggtttgggttaggataattgttggaaatggattgggtttagttttgagtaattgttggttaatgttggtttgcccatcccaacttgggctgccgggcagattgtacgtgcagattaaggattgcaaaaagaaaaagtgaaaaaaaaa

SEQ ID NO: 2414 - DNA, 678 bp, Gossypium hirsutum
  misc_feature (650)..(670): n is a, c, g, or t
  misc_feature (672)..(675): n is a, c, g, or t
agaaaatccagatatacactacaattgttcttttatgttcaagaagtaaaactgacttgtttcaagacacccaatgccacacataatgctaggaagtgtagcacaaccataagaagcatgtataagtaaacccagcaagaacattaccaaggctttggcgaactgccttcttaaggtcagcttggaacctttcttcatcatcttcctgagcttgcagttgtcctaaagtctttgtattgccttctccagagatggaaacaactggtttcacaaagtaccaatgtcaatttagttcctataatatgacaaaatctgaaaaacaacctaccatagcaaggacataatgctattgaaagacccgatagtgatatccaataaaattttcatgagcattaatttagacaagactcaaagtgtcatgttattgaaagatagaattgcattgcacacataaacacattaaataacatgagcagatcaacatcgagacaaatatcatgaaaatccagttctgcttcaattttgaagacacccatgtggcagtaaaataggaggaagtcaattaatctctccttttcctgtcactataaatgatgtgagaaaggaagcacaactgaccaccgccacagtttaaatctaaaaaaaaccgnnnnnnnnnnnnnnnnnnnnnannnnggg

SEQ ID NO: 2415 - DNA, 636 bp, Gossypium hirsutum
  misc_feature (614)..(616): n is a, c, g, or t
tttgtctcgttcttcagtagtgagtgattggcaagcaatatttcatcaacgacagccgggctctgacccttcaccgccatatggagcacggcttgtcctttcttatctttgatgctcacaatgccttgatcacaatctgtaagagcttatactacattaataaggccataccttgcagccgtatgcaatgccgtctttccatttttacgaactatcctaatgcagcttggatcggtactcaatattgcatttacgacatctaaattacttttaacagctgcaaaataaagggggctggcattcgtcgagtcacatagctcacaaagctccggccaaattcccaaaagttccttcaccatacctacaatgcacaaaacactatatttggtcaatcacatttcagacacacaccgcgacaaaaagcaattaaaatcaagatttccctatttctcttaaaccttccaccaaatgcatgttttcatgaaaatggaccctctcccaattaaaatcaagctaaaatataaaacccagattggaaaacccaatcctggatgaaaaatcaaaaaccttccccaattttctaaccctagtttcctcatgtaaaaagaacatannnaatgtggatatcatatttgg

SEQ ID NO: 2416 - DNA, 622 bp, Gossypium hirsutum
gggttttttgctttaatttaattatttcaggttctttttttgtgattcaattgataattttagaattattatgttagaaaattttggaaattgatgtatattttttttataataatgatattgaaatgatagttaataggaggcttgatgaatgggtgaagcttgaacaacttgatcttgattctgtcgaaacggttgttgatgaaaaggtcgaagataaggtaaacattcttttacaatgtagaaccttgcacttatgtttactctttgtttatcatttgagggtgttctgatttgaacaaatttgctcatggggttctcaggtagcaagcttaaaaatgacacgccaccagaaacgtaagattgatgagacacacgttgaggttgtaagtaaacgtagaccttttgctcggtgatgtgtaaatatcagaggatcatttgaaatttctgcatgttgcttttgtgaaattatattatttgtaatcgtctatcattttattttcttcagggtcatgaggagctggatgctgccagcttgcgtgaacatgaggaattcacgaaggtgaaaaatattgcgactatagaacttggaagatatgaaattgagacatggtacttctcc

SEQ ID NO: 2417 - DNA, 641 bp, Gossypium hirsutum
tacataggggtgggtgtagctgctgctccttcctgcctgttttacggaggatttcttgaatgtacttcttctgtgtaagaaacggcccttgaggaacagactgaacttcagtaccaagaaaaaaattgagaggccccaagtcttttagagcaaaccgaccatgaagctgaagcactatgctgtcaatgtcttgactggagttgccggtgatgactatgtcatcaacataggccataagcagcaaccgactttctccaatacatcgaatgaatagggagggatcagcatttgactcacaaaatccaagcgtgcttaccaaaaattacttgagtgtgtgaaaccaggcacgtggtgcttggcgtaagccgtacaaggctttacgtaacttgcataccattaactgaccgttgggaccgggtacctcaaagccaagtggctagtccatgaaaatttcttcagtcagctccccagtcaagaatgcattgttcatgtcgacttgtcgtaatggccagcctagcatcgtagcaacagcaaggacaattcgaatggtgacagctcgtaccacgggactgaatgtctcgcgaaagttaatgccagcatgctgagagaaccccttcgcgactagccgagccttgtaccgt

SEQ ID NO: 2418 - DNA, 657 bp, Gossypium hirsutum
aatccccacaattggcagacttgatatcatcctggttcatctgtttcgagaattcttcatggttgtactccaatacagcctttcctccaaattcggtcggtagattttcctcgtcaaaatacgatctcatcagctccacgctctctgtattcttagggtacacaaacttcaccttttggaaggtttttgcatccatgaagtacttaacaatctgcaaaaaacgaaagcaaagcaagttgattactatttgtgaatagatcaatcagtatgagctgcaatttatagtgcaatgcatcaatatcatctcatttagcttcacaaaccttggtttaagcaattattaaacatgactaagcataaatagtaatgtccaaagacattaaagggagaacgctggagttttagttttcaaaaaacagggttcaaccttggcatcctctaacatacacaaaaatacgaaaaggaaagttgttaagtggacagaactcaaaccttccagaatgcttcaaaaattcttgggggattgtagagaaatgctatagccaacctctcggggtagtggttttgtaatagattaatcgtgtcgcgagccgacttgatgggcacgctcgtgctcaatgtccacccagtaaagtctatcaaccatgccatctgttc

SEQ ID NO: 2419 - DNA, 653 bp, Gossypium hirsutum
agtgctggattgcaagtaactcagtaggaaccatgaaagcggcctaaagtaagtaatgtcagctcaaaacataatcatgtaccattaaaaccagtacggaatagaataccaataacacaagcaagattacctaaaatattaccataatgagtaaggtgataagcagcatatagtatgtttagctgtatgcaaagataaatctttaaaaggcttacagaagaggtgaaacgtgtagcttgaatttaccaacctgataaccagaggcaataacctccacgcatgccagaaaagcaacaatagttttcccacatccaacgtctccctacaaagagatccataaattatcaagcaagcttatcagttttcaagaataacaaaataaacatatgacaaatatcagataaaatcaaatctcaactctctatacattttttcctcttcccttcatataaaacttgatctttgcctattcaagatgaagttattccaaataaagtcatcattacatagaatcttgctcttaaatatataaacaataagatatgcaagagttaaggatttacacaaaatttagatgttgccattgcaatttggattttttttatttttcgtgtcaaggattattaaaaatacaaatattccaggcacaagct

SEQ ID NO: 2420 - DNA, 663 bp, Gossypium hirsutum
cccactttattcaaagatggggaacctttatggtcatattcaagacctaatttgccttggggatgagattttatatactggggctatattattttatgaatgtgatgtccagcttattaaaaaaatgatatttgataacttttgcaaattgattcatgcaatgcaaagcaaatatacatataaattgtaatagcacataatatcactgtgatgatttcacaaataaataaaaatgaagatatcgaaatactttaactaaaagattggtgctgtttcctaattttcttatctggaaaagacaagattagagaggattccattcagagatccactaaagagtacaactaaaaaaatgccaaatttatagaattttctttgacctaaatcttggttggctgacgttttgcttttctatttaggacacattatttcaaacacctcccccaacataaacttacttttaaatcaaatattttttttatccggtcacacaaatcatcatctcctttttagtaagtctctcttaataatattattttcagaatttaaactcgaattttctctctataaatataataaactttaccattgcactcaactcttgttaagaattgtaaactagagattactttttccccgcacttcatacttgcatccacatca

SEQ ID NO: 2421 - DNA, 617 bp, Gossypium hirsutum
cagctcctacagaatcttcatttccctggaaagaagagttgaaagttcttgtccgtggtggagtgccaatggctcttaggggagaggtatgtatttgatatgtctctctctgtttgccacactctttctttgtctctcttgtgaatttggtcattacagatttggcaagcctttgttggtgtaaggagacgccgagtagaaaattattaccagaatctgcttgccaatgaaactaactctggcgataacaccaatcaaaagagcaaccagtcagatggtaagggttcagccaccaggtctgcatgtgggcctgagaaatggaaggggcagattgagaaggttgttccatttgcagtttgaaatatgtagtagtttttatacccctgcaatgggtgctgccttctttaccggtgttattagtttgatatccctaactactggttctggaaacaggatttgccacgaacgttccctggtcaccctgctctggatgatgatggtagaaatgctttgcgacgtttacttacagcctatgctcgacataacccctctgttggatactgtcaggtattaggttcagaaatatattagctatggtcatggttgcagggttatgg

SEQ ID NO: 2422 - DNA, 564 bp, Gossypium hirsutum
ttgggctctttcagcatgtcacagcttggtcaatcgaagagtccattttttcagctattcaaaagaaagaagcaaggagcaggttttgctgatagtatgttaaagctagtaaggacattgcctaaggttttgaaatacttgcccagtggcaaggcacaagatgctaggctttacatattgagcctccagttttggcttggtggttcacccgacaatctacagaatttcttgaaaatgatatctagctcttatgtgcctgcactcaaagggacaaaagttgattactcggatcccgttttgttcttagatagtgggatttggcacccactggctccttgcatgtatgatgacgtgaaggagtatttgaattggtatggtaccaggagggatgttaatgagaagcttagggggcctgatgcacctgtaattggattggttttgcaaaggagtcacattgttaccggtgatgagagccactacgtagcagtcatcatggaattagaggcaaaaggggccaaagtaataccaatttttgccggtggacttgatttttctggaccagtt

SEQ ID NO: 2423 - DNA, 503 bp, Gossypium hirsutum
  misc_feature (426)..(430): n is a, c, g, or t
  misc_feature (435)..(443): n is a, c, g, or t
  misc_feature (475)..(482): n is a, c, g, or t
tgaaggcagaaccttgcttattttctctagatccgcggggctcgttggtctagtgctagttgaagtcactgcgatcaaacaaactatttgtgtttttgctgtgtcctaatggtcggggaagaacaagctgattgtgaaaagcgactgccgcaatgtttcttggttcaacaaccttatcactgctcttgttccggtaaaagtatcgtacctttgtgcttgacttttcctggcgctcgtgagacggaaattaagctggttccgggagacgctaacggtactacaaataggcttgccaaagttgggaccaagaggccctctgatctactctttatgttaataattggttatggcttggatgggcgatacacatcgtgaccatagaggcatctgcctggcttcgatagtgttggataacaaaatcaatgnnnnncaggnnnnnnnnnctatgtgcacgatgtgtatcgccaacctgacnnnnnnnntatgaaaattatcagtatatc

SEQ ID NO: 2424 - DNA, 649 bp, Gossypium hirsutum
tgatacaaaaacatagttaagatgttaagtccttaaaattcagacctagcttcctcttccaccacagacgctaagagggagttgttattggcattccttacggagcaattggcacgaatttcaccggccttgcctgtcaagacactcaactgactcatctttaccatggccgccacaaacttctcaaagaagagagtctggttaacagcaaagctagtaacaatgcccctggtcctactatttgtgtacaagtcttggtcggaggtgaaaagaccctggcggttcatgagatcaacgtaatacttgttatcgaatttgttaggggtccttatatctaacaccgtggtgtttgaagaatttgcagtaggacaaacttgcttgaggtttttggcaaaggtttgatccatggtggggtcttgagtagggtaaaggcggccggtgaaagagctgcaatggctgatgccgatggtgtggccaccagagagagccacaacatctgtggggtcaaagtttttggtagcgagactggagaggatggcagtagcattggcgaagggtgcgggcaagttctgcaatgttgcatttcttgtggcgaagctcagtccatctcgccttcccaatggcacgtcatagtccggacctccagact

SEQ ID NO: 2425 - DNA, 781 bp, Gossypium hirsutum
  misc_feature (607)..(608): n is a, c, g, or t
  misc_feature (610)..(618): n is a, c, g, or t
  misc_feature (620)..(652): n is a, c, g, or t
  misc_feature (654)..(657): n is a, c, g, or t
  misc_feature (664)..(664): n is a, c, g, or t
  misc_feature (666)..(671): n is a, c, g, or t
  misc_feature (677)..(679): n is a, c, g, or t
  misc_feature (685)..(689): n is a, c, g, or t
  misc_feature (692)..(692): n is a, c, g, or t
  misc_feature (695)..(707): n is a, c, g, or t
  misc_feature (711)..(714): n is a, c, g, or t
  misc_feature (718)..(727): n is a, c, g, or t
  misc_feature (729)..(735): n is a, c, g, or t
  misc_feature (740)..(763): n is a, c, g, or t
  misc_feature (768)..(768): n is a, c, g, or t
ggtcctatttcattctctccagcattgggatcattgcagtatttggatgggcttatattttggcccttactttcagcattaaggtatgtccaagaaaatggtaaaagtactataacaatttgtattaagagttagattgcattttactccttttatgttagataaaaaaataaactagtcattcttttaaaattttttatccatttgtatggttaaaaactaacataactaatggaataatgacgtgtatcgtgtcatgtatgccttatattgacacgtataaggatagatgaaatttgtaacagaaagatcaatttgctctttaatctaagatatagtgacttatttactcattttttagtaaagaggacaagatacaatatgagtcttaatataaagagtttcataatacttttactgtctagaaaagtatcaatagataatatatagatacatgtttacatatgaatatatagatagctcttcaatgtcattatatattgtttcattcaggattttagttacctctatgatccaagcaatgaaactgcgggtgcatttgtgccagcacaaatactgtatgatgcattccatgggaggtatcatnntnnnnnnnnnannnnnnnnnnnnnnnnnnnnnnnnnnnnnnnnnannnnatttaanannnnnnaagggnnngaaaannnnnccnccnnnnnnnnnnnnnggannnncaannnnnnnnnnannnnnnnaaaannnnnnnnnnnnnnnnnnnnnnnnaaaanttttttttatttt

SEQ ID NO: 2426 - DNA, 624 bp, Gossypium hirsutum
cactcaccttagttttagcctttaggaaaaggcagacacgtaaggcaggctccgttcgcctggtttcctgaattcgctccgcccgatttctcagggtccatttcaaagagaaacgaccaagtaaactacagattgagtgaataaattatataaacccttgccaaaatcttcctcccccaccaccaaaacgtggataagaaagttttatactgtcagtcatttacagaggctttgaacaatggatgaagatcacaacaacggcggctttttggatatgggaaaagctgatagatcggtttggttgatgaagtgccccgtggtggtcgccaagtcatggaagagccaactagcttcttcttcttcttcttctgattctcagcctctcgccaaggttgtcttctccctcgaccctctcaaacccgacgacccttctttacaccaggtaaattagttgagatcagataataattagttcaagttaacagattatttaatcgtgaatttttagatatagcaattctagtaaaaggttttttttattgattgtttaatctaacaaggcaaagattttatgacatgtttaaacgttgtagtagtaattttgtcgttgtcttgttccttacg

SEQ ID NO: 2427 - DNA, 616 bp, Gossypium hirsutum
agttaaaatattattaagcccttgggtatttctctctgtgaaatacgttaaggcccagtcaataatgggccaggatgcttatgtggatctccccaatgagccatagttatccaaaatgaagggtccaaatgatgtaggggaaagataagtgggaccacagggcgatggctcgtgacagccgaagcttcaaagaaaaaacaatggaaaagaaatgggtgagctggatgtaaagggtctggggaccagggaccaggacccttgccttagcccagcctacttgcactgaacgaggagatggaacaccgttagcctgacattacgtgtacggccatgattgagtttcgttatttcaaaacaaaaatcttctggattgtttttctttttttcttgaatgtctccaaagttgtggaattttgtgccctttcgctccctaacatgacctcttactgcttcaaagaccaatgcttcctttttaagagaccgcagtggtcaataaatatggaaccctttcttttcttgataaactagaaaagaaaagatttggagaaattttggttttcctttaatgatcattagcccccccgccccctccccggccctcaagtaaatcacatac

SEQ ID NO: 2428 - DNA, 1260 bp, Gossypium hirsutum
  misc_feature (382)..(382): n is a, c, g, or t
  misc_feature (616)..(617): n is a, c, g, or t
  misc_feature (623)..(660): n is a, c, g, or t
  misc_feature (662)..(713): n is a, c, g, or t
  misc_feature (715)..(758): n is a, c, g, or t
  misc_feature (760)..(763): n is a, c, g, or t
  misc_feature (766)..(772): n is a, c, g, or t
  misc_feature (776)..(778): n is a, c, g, or t
  misc_feature (780)..(782): n is a, c, g, or t
  misc_feature (786)..(817): n is a, c, g, or t
  misc_feature (821)..(821): n is a, c, g, or t
  misc_feature (823)..(836): n is a, c, g, or t
  misc_feature (838)..(842): n is a, c, g, or t
  misc_feature (844)..(855): n is a, c, g, or t
  misc_feature (858)..(862): n is a, c, g, or t
  misc_feature (873)..(878): n is a, c, g, or t
  misc_feature (885)..(891): n is a, c, g, or t
  misc_feature (897)..(900): n is a, c, g, or t
  misc_feature (902)..(902): n is a, c, g, or t
  misc_feature (906)..(911): n is a, c, g, or t
  misc_feature (914)..(915): n is a, c, g, or t
  misc_feature (926)..(934): n is a, c, g, or t
  misc_feature (936)..(946): n is a, c, g, or t
  misc_feature (951)..(965): n is a, c, g, or t
  misc_feature (968)..(970): n is a, c, g, or t
  misc_feature (972)..(972): n is a, c, g, or t
  misc_feature (978)..(978): n is a, c, g, or t
  misc_feature (980)..(996): n is a, c, g, or t
  misc_feature (998)..(1013): n is a, c, g, or t
  misc_feature (1016)..(1019): n is a, c, g, or t
  misc_feature (1021)..(1023): n is a, c, g, or t
  misc_feature (1025)..(1027): n is a, c, g, or t
  misc_feature (1029)..(1033): n is a, c, g, or t
  misc_feature (1035)..(1036): n is a, c, g, or t
  misc_feature (1038)..(1040): n is a, c, g, or t
  misc_feature (1042)..(1048): n is a, c, g, or t
  misc_feature (1050)..(1052): n is a, c, g, or t
  misc_feature (1054)..(1072): n is a, c, g, or t
  misc_feature (1074)..(1075): n is a, c, g, or t
  misc_feature (1077)..(1077): n is a, c, g, or t
  misc_feature (1079)..(1080): n is a, c, g, or t
  misc_feature (1083)..(1096): n is a, c, g, or t
  misc_feature (1098)..(1120): n is a, c, g, or t
  misc_feature (1124)..(1124): n is a, c, g, or t
  misc_feature (1130)..(1132): n is a, c, g, or t
  misc_feature (1138)..(1140): n is a, c, g, or t
  misc_feature (1142)..(1142): n is a, c, g, or t
  misc_feature (1144)..(1144): n is a, c, g, or t
  misc_feature (1156)..(1163): n is a, c, g, or t
  misc_feature (1165)..(1170): n is a, c, g, or t
  misc_feature (1173)..(1181): n is a, c, g, or t
  misc_feature (1185)..(1195): n is a, c, g, or t
  misc_feature (1199)..(1212): n is a, c, g, or t
  misc_feature (1214)..(1214): n is a, c, g, or t
  misc_feature (1216)..(1223): n is a, c, g, or t
  misc_feature (1226)..(1232): n is a, c, g, or t
  misc_feature (1234)..(1251): n is a, c, g, or t
  misc_feature (1253)..(1257): n is a, c, g, or t
aagcatttaataacacaagaaattagtattagaacaaacaactggtacaattgcaattgattttatagaaacaatattatagcaagcagcaaaatgaccaaaggagattcgccatctgatatttgacatatgttactttctactgcattctttctactacattttacatctaaaatcaagctaagctagacttatgcttgagtaataccaaaacaatatttaagcagcatttacaaaggagaaggagaggggatggaggcagatgcttacgacaaaccttgaaatacgagaaacttcactagcttgatattcagggttgtcgaggggtgctgaaataggccggacaagtcctatattgtagttaggacgcgtatggaccacngaccacggatggcctccggatggccctgcattgtcctgcttattttcgttatactcaggaatagatctccagatatcaccatctcctcacaaattttcgcgagaatgtgcgggtgattgtggatgatcccagcgatctccgtcctcagcacttgtcgatgcgttttgattgctagaatcagtaacataacaagaaaatagcatgagccaaccctccaaaaacccaccaaataannccacgnnnnnnnnnnnnnnnnnnnnnnnnnnnnnnnnnnnnnngnnnnnnnnnnnnnnnnnnnnnnnnnnnnnnnnnnnnnnnnnnnnnnnnnnnngnnnnnnnnnnnnnnnnnnnnnnnnnnnnnnnnnnnnnnnnnnnncnnnnccnnnnnnncgcnnncnnncccnnnnnnnnnnnnnnnnnnnnnnnnnnnnnnnncccncnnnnnnnnnnnnnntnnnnncnnnnnnnnnnnnttnnnnntcctcccctcnnnnnnctctccnnnnnnncccccnnnntngccnnnnnnccnnctctccccccnnnnnnnnncnnnnnnnnnnnccttnnnnnnnnnnnnnnnccnnntncgcttncnnnnnnnnnnnnnnnnncnnnnnnnnnnnnnnnnttnnnncnnntnnncnnnnntnntnnntnnnnnnncnnncnnnnnnnnnnnnnnnnnnntnncncnnctnnnnnnnnnnnnnncnnnnnnnnnnnnnnnnnnnnnnncttntttccnnntctttnnntncncctcttttcttnnnnnnnntnnnnnntcnnnnnnnnntccnnnnnnnnnnntttnnnnnnnnnnnnnncncnnnnnnnnttnnnnnnncnnnnnnnnnnnnnnnnnncnnnnntct

SEQ ID NO: 2429 - DNA, 638 bp, Gossypium hirsutum
tggatcttcttgctttcattattctagtaattactaaagattaccttaaatcactagaaagaggtttctaagacattgtcttttgtctacttccaggcatatgaattaggagtctcttttaccttgtaaagtattgcactgatcactgagttttctgcagatatggtcaagaataaaggattcttgccgtcaaatccttcagaaattcctgttcagaggcaacaaatgaaggatataatattctctcttcttgatgcatgcaaggaagacgatcctcacagtggtgttaaatttgaagtagatgccataattgccaatcctccagcatatggttagggcctattacctctttcatttttaagctgtatgtttttgtctgaagacaattgaacattgtgattggaaagggtcttttgttttatctcatttttaagctgtattttttttgtctgaagacaattgagcatttttaagctgtccatttttttgctctacatattcaatgttctctatttaaatggtattgtgatgcatcaaacttataagacttatgcccttttcctttctctgtctctctctctctttctctttcatttaatggaaaaaaaatgctttttcaggacatacacatgttgcag

SEQ ID NO: 2430 - DNA, 498 bp, Gossypium hirsutum
  misc_feature (339)..(340): n is a, c, g, or t
  misc_feature (468)..(468): n is a, c, g, or t
gttgctgggaattaaaagcaaatccatctcccttaaaatataagaaattaagggcaaccagtgagtaccaatctcaaaatgaacattagcatcatgaaagcagtaaagtctaactcaataatttacctgttgctgatatagtcttcttcacgcaaacttttaattatctcattccaaaatggagaaaatagagcagcatatgtcttgttattttcctgagaaacctgttcgtgaaaaataaacagacttttaattatttcattttgttttcattcttcgactctaacaaccacaggatggaaagacatgctttccacatttcgctttgcttttcttccnnattttccatctttccttctttctacccacacaacctagataagcttaaaagatttacttctttaatcaatcaagattctgccagcactaaagatttgcaaagatacaatcaccttaatgagtttttgnaaattagaattagaagtgaagaatataaag

SEQ ID NO: 2431 - DNA, 585 bp, Gossypium hirsutum
cttatgaaaatggactgattgattggatgaaataatcatgtaatcgaattacattttgactcacttgttttaaaaaaatttaagtaaattaacatttatataatagattaaaaaagtaaattaattatcttattaaaatttttatttatttatattattaaaaatttatccgtatacatcaatataaatatacgtgtcaatatttaattatttcatcattcaggtcaatttttaataatacaaatgaataaattttttaacaaaaaatattaatttactctacataaattaatttatctatattttaaataaaagttaaaaaataatctaacttccaacccatcaaacttcatattactttttcctaaatatcattgttgaaacatggggtgataaaagtttttgcttaaacaaatgaaagaagctaccataaaagcaaaggttcactacaacacgtttttttttttttcccattttctcacctaaccctcaataattagtaataggaataaagagaaacatgggcaccctaatgaaaaacgtacacttgtttttcggcttttcatacattgaagaagaataagt

SEQ ID NO: 2432 - DNA, 603 bp, Gossypium hirsutum
tccagacattatgcctgggcccccgaagttgaatcattactccccggttctggtcattatccattgggaattcttctatgaaacttctcaaaaatatttagctggcatgcttgcctctacaacatctaaacaatgcattaccaaccaacctcatgaaccatagctctttctctttcatgtttgatcttggttcaagcaccgagaactagtaggaactagtaacttgaaccaaagggcattgtattgcaccttctaggcatttggcaaaacaatgaaagaagatcacatctttggtttactcgaaatatttcatacaagtttgatgtcaatgatagctaggctagctaagaggtacatatatgtatgtacatgtatttgtataaattattaacttgattgttttgtttttatatatgtggcaggttttctttctatgcttgttagcaggatgtagcatatgctggttcaacacagtttgctttgttctttgcataaaaaacttcccggctaaccgagcacttgctctatccctcacagtgagctacaatggtgtaagtgcagccttgtacgcccttgctggtgatgccattagtgcatcaacca

SEQ ID NO: 2433 - DNA, 624 bp, Gossypium hirsutum
ttttaacggccaacaaccaaaatctttcttggtagacatggttttccatcgttaatgcggtggaggatatcacttaagatcgctaagaatggcgaaatcccaatgccacctgcaactaaaatcaggttctcatacctgcgaaaacaggatcaccacgtcaggttacatatgaaggtgacttaaaagtttaatccggacatgagaaagtgaaacattgaaaggtatgggagtacgtacatcaagtggtatggcatttcatgcccgtaaggtccctcaacggaagctgtgatcgtggtttttgatagttcaggctcagacatgctcaagatactgtccctcagcctcactgtccatcccccaaggacctttatgagaatagctagatgatgtttaccgtctagaggactggacgaaacactgaaaggatgccattgcaaccacgataattctcgaacttgaagaaaaataaaactgagcgcattgtactgcaaacctacgtatatcaatccaataaagtgtgagaaaacagcaatgtcataatagattacattccaaggaaaccataaattcgctgtgaacatatattcttacttcgaggtttcgagaggaccaattcaactgtaa

SEQ ID NO: 2434 - DNA, 262 bp, Gossypium hirsutum
  misc_feature (31)..(32): n is a, c, g, or t
caaaagaaaaaaacattttttatatttaatnnggaggtcaaaaacacataaaaagacaaccggatagttagcatttcacccaatcttcacaacatgtctgtgtgcatgcagatctttaactttccagaatcctttaacgcatattctattgtaaaatcacagattactatttaaatgataaataaattatttaaagtatgaaaatttacattttttattggcttaagggcgtaaaaaaccctcaatttttttcaaaaaaaaa

SEQ ID NO: 2435 - DNA, 400 bp, Gossypium hirsutum
atacactaaacattttggtcaaacttgtttaagatcgatattgtgtaatgtgtaggaggaagactacaaatgtttcatggagtcactaagtgatgaagattatgaaactaaacagaatatcacagccccaactaatcacagcaatgtcaatggaaagaacaatgaaattcgtgtgggaataaaggactggttagtatattttctcttcgaaactttggctactctgatcattgatgaggataaacatatatgggaaatcatactgaaatagtcttacccgaatcaatttagcaatgccaaagtgcaggttcaagcccaatattagcaccaaatctctatgtcatacagttttcttaagggcacatattaaattgcagaaaacagcaccaaatccagcaga

SEQ ID NO: 2436 - DNA, 606 bp, Gossypium hirsutum
gggatgatgtaaaggctttaaaagggcacccactgcgtataagagaactcccaagctttctcctaagagaactcaaaaatggcttaaaggtttcttgcttggctgtaacagaactcccaaagaaacccctactttttatttagtttattcctagctccttctggcttgaaaactgctttcaaacttccttgcttactgacttcattgccctagaagaatcctataaactgcttgcctatagtactttctggtcttgcttgataactagcctgcaccccattatctcctatcgactgcattcgattgatcgtatggatcaccgaaaaaggagatttccacttatacaactagaactcaaaacccagaaaaatagttgaagaaattcttcaactagatagcactaaaacaactggctatgtaaggaaggaaacctatgtcgtaaatagaataaaattcagcctatacaactgcatgggagcacttatgactaaaaagaaatgcatgactcggcctatagcttgactttaggctaagcctttctctagaatcctgggaaccttagaaccttgggagagattccctactgccttaggaaatcaaacagct

SEQ ID NO: 2437 - DNA, 586 bp, Gossypium hirsutum
  misc_feature (495)..(495): n is a, c, g, or t
  misc_feature (503)..(504): n is a, c, g, or t
  misc_feature (510)..(510): n is a, c, g, or t
  misc_feature (512)..(512): n is a, c, g, or t
cataaatatttacaatctattcagaaatttacaagtcagagtctattctattgactaatataaacaaataagaaaggtttaattatgctccccatccctatactctttgcacatttgagatctagtccctctacttttaatctcaggaatttaacccctctttactcttttggtttaataattgaagtccaactgataacactatccaagaaattaggttaaattggattctgtggcattttaaaaataaaataaatttagtcgcatagcgattatgaatctagagttgtaaggttcttcaacaccatttcagaaaagtaagacgaaagttgatacctttttttttttttttttttttaatttaaagggttttaaatgggccgggggcccttttttttttttttaaaaaggccaaaaaacccatttttaaaaaatttttttttttttggttttctttttttaaaccaaaggtggagggggctttttttccagggntaaaaaanngggggncnaatttttaaaggcccaaaagggaaaaaaacttggggccaatttaacccaaaaaaaaaaaaaaaaaaattttccc

SEQ ID NO: 2438 - DNA, 622 bp, Gossypium hirsutum
aagctatgccggcattgccgatatcgccttttttgaggttcaagttgtctcggatgatggggacaagaggagctgctgcaaaagtggagacgaagcaagtgaaaaaagagagccaagagagatgaaaggtgaccatgtggggtttggcaaatgacaaaaggttgaagactttggctttgtgttcagaatctacgggtagggcgaattttgcagtggggtctgttgggatttttggggaagcgactgagaaagcaaaggctcgttcttttgctgaaactccatgcatggagcttcctggttcgttctcagtttcacccataattaacttcaatattccttacggtaatgatttgatgattatgcaggattaactcgtagtgtttttggctagcattggagtttatataggaattgttggaggtttcaatgggtgatgtttgtgggtctctttgcatataccaaataaagctagtgtgacaaaggcattagtttagcttttttttattacaagaatatgatgaagtatcaaccattacataggaacaaaaacaataatctggcttaaaccaattacagactcgagggtgcttttcacaccacgcccttttctgtcttatttact

SEQ ID NO: 2439 - DNA, 496 bp, Gossypium hirsutum
taatacaattacaggaaagggtaaagatgggcgcatggaaggtttggggaacaaagcaatggatagcaaactaagaggtataatgtgccccattattcttcattattatcagtgtttagtatggtggctagtgatttgtttaggtgatttttaatctaattagttccccttctctttccttataagttttaaattatgttgtcagtgcattgacccgtcattgtttgtcattaatcaaacttcttgctagattagtcaattccattttgttttacacaagttttcaaggatagggcacaactatgctatctctattggcctgataaacttatgagtagagggtcatttttagtattctttccaactcatggagcgctctatccagcaaacagcaaatatactatatatatatatttttccccccataaatttttttgaaacttgagaaaactttggtgcattctgattccttaattttgcatttgcttattaagtg

SEQ ID NO: 2440 - DNA, 639 bp, Gossypium hirsutum
agtagctcacctccaacatcatatgatttggacctgttaacaacagaaccaatcattttaggacaaattcctaccatctatatctacatacatacatacatacatacatacatacatacatacatacatacatacatacatacatatattactgtactaaattgtaccacatcagtagcagttttatactatatttaatataaaatccaaactgatggcagtcattatagataagaaaacgccaaaagcagtaaacatgcaaatttcaacattccagcaaaagttaattcagcacaagtgcataaacagaattcaagcaatccagaaaccaaacacaagaggatgtataaagtaatgatgactaatggacttatgcacttacgttctgaaggtattacagacccattcaattgcctgcttaaacccacagcaaagtcacacatgtcaatgatttcctgcaagattagcattttacagttacataggtaaagaatatatatagttatatatagttatggttagcataattttcatgcatttttacagatttggacaatgaaccagtaaaacaacagaattgatccactcaataaaaaaaaagtacaggaaatcctatcatgaaagctaatgtgggcagaa

SEQ ID NO: 2441 - DNA, 620 bp, Gossypium hirsutum
ttctactgatgttgacactgatgataaaaaccaggttttgtctctctgtttcttcaatgttcaactgctaaagatcatgttttgttctaaaagttttgctaaaggtgtagtagtagaaactcatggtacttcttgataactaggaattaatggggataattattagttcataattggtaatggtcttgcagcttcaacatggagctattataaccgtggatcagtccaagtcaaaaactggtgatcaaaaggttgtaacattatttaagttgtggtggggtttagtttcaattttcgaaagctaactgagttgcctttttgcttacagacacttcggcggctggctcaaaatcgagaagctgcaaggaagagtagattgagaaagaaagtaacgtgtttattgctggttataatgttttttttttctttttagctctttatttctctgtggtggataaatgggattttaggggtctgagtgattaggccttaagttgtgaagtatggaatttaagtacatgttcactttatcgggaatcaaccttttgagtgttaaggattagtcattatagtggtcagtatggaaaaacaaattgaggttgtatccttgtaatggaaag

SEQ ID NO: 2442 - DNA, 612 bp, Gossypium hirsutum
tctgcttacaagtagatacaacaatgacccaattatttatgcattaaatcaaagttggatttcaaggaaaacgaacccgtaaatataaatgtcgattttctgtcgaagattcttcttacatgtgtgacaaaagctgaggaaattattactctctgatggtgcagacttgggctgagtattcgatatactacaacagcactccacgacgcagtcatggaaaatatgggtggtcttggggttaggaccgtgagatatcacgcatgtataatcctctgatagctccataatttctttaactggaaaacacccattgaagaccataggaggatccttcatatgaacactagttttgggagaggtaaatggtggagatagtgtatgaagattcttggttttggtcccaaaatctggtgggattagtggaatctgaaccctgagttctgtcccaaacaaaaccttacaactcttgtgtgtgtcgatgacggcaaggccgataccttttggttctatattttttacagctgaggaatgttttggggattttggttggtttatattgtagtgaaaggatgatttgttatcgagggtagaactggggctgttgagagcttc

SEQ ID NO: 2443 - DNA, 677 bp, Gossypium hirsutum
tatggtatgaactgaggataatttactagaaagtgaaattcaatgtgggtaatctattgtcctttggtgggctgtttttttgtcagtataacttcacaaatgtaggaagatactccacctacctgtactgtatcatcaaatctagaaaagaccaatttacatttacttaattctgtgatctggcatttatttcaaaaatgctctttggacattaaagagtgcactctgataaggcattttacagttgctgtaaatgctgcatgctctctgtttatgactatatctcttcttatctgctctttttgttacatcttttattcatggtttcgtattactgtctgggcatagattttgtttttgtgtacttgtcttctaagattctatatgcctgtttgtcttctaagataccatgtggattagttgttattcttttgcgcgcaacaaattttaagcagtatgaactttatatttataggtgcaaggactgaagagagaacttattaatgcaaaaaaatcgaggaaagctgcatctctatccttacgggttgctttgcagaaagcagctcagctacggctaatggagaaagaaaacaacaaaagtccatcctatgcaatgcgaatttctttgcaaattaacaaagttgtatggagtatgcttgtggatggtaaatcatttg

SEQ ID NO: 2444 - DNA, 595 bp, Gossypium hirsutum
gctggaccctcagttaatagtttccccgctttggtttttgcttccatccatcttttatcctttcaaaattatttttgcttaaacaaaatttaagcttgtggaactcctgtatatatattttaaaaaatgtggaaagttgtttaattttcactggggaaatgtaatttattccttagccaaatttatattcttagaagttggttaatgaagtaaagccagtggttaccgctagatgcatatatgcacaacacaataagtgtttaggatgaattgtgtagttgtaaatcaaaagatgttatgtaggctaaatctgcatctggtccaagacagtttcatagttgtctcttcttgttaagttggtggaactaagattttggctattatcatttgttttctacttttttttcagttgggaaagcataaagaagcattagactttgctgttgcagcacaatatttatctccatatgatatggcctctgagaaagtggagaacattaaaaaacatcttgctgctggttggtgtcttgtacaatcatatcattgtctcaattgaagcatcttatctcttgacttcaaagttgatagctgtaca

SEQ ID NO: 2445 - DNA, 695 bp, Gossypium hirsutum
  misc_feature (650)..(650): n is a, c, g, or t
  misc_feature (654)..(662): n is a, c, g, or t
  misc_feature (667)..(673): n is a, c, g, or t
  misc_feature (675)..(682): n is a, c, g, or t
  misc_feature (684)..(686): n is a, c, g, or t
ctgcctgcatggctcactgctttccacaccctttattattacaatttacaagcacttgtttcctcattatacttattaatgtttttgggggccttgattatgaaggtatctgcttttagttgctagctttaagcctttcttttctctctttgaatatgaaataaaattcttatgttaaaccatttggaaagggttgtgtcttcacatatgatgccattggttcctttgagagggtcagatacagctctcaaggttccagttcaacactcatcatgccttcttggataaccaactaaaatcacccaaccttctcctattgcctgcctaggtgtgctcttaattttgattactctttatgttttgatgcttttataaaaaaaatttatctctagtccttcacctggcagaatgcgttagtccacttatggaagctgaagctgttgatttggtaaaaactgtttttgcatcagcatctgaagagatatttacactgtttgttttatttgttatggttttggttattgggtatcttcggaaggctgttttttcaattctggagccacaatattgattacttccagtgctatgtctcaaccttagtcggcttttaatttcttttgttcccttgtatatatgttgtgagcttgagnaaannnnnnnnnaaaannnnnnnannnnnnnnannngaacaaaag

SEQ ID NO: 2446 - DNA, 545 bp, Gossypium hirsutum
agttagccaacaactaaaccacccaattcatctagaatcatggtttattagaaaagtaaaaggatttttccattttctgataagccggtactgattttagttaaatacagaagaaacaaaggtatcaataaatgatgattacttttaaatcaagcatgcgagacttttgtagtagtccttgggccttaggtttcttgcaaacacatcttaatggatctttcaaatgaaaccaaaaagttttataagctttatttctttcttctaacaacattcaagtactttaaccaaactaacaagtcaatcagaaaatatctgaatttcatttcccaaattactttttaagttctaattcttccgtttcatagttccggtaaagagacacatcacaacatattcagggttcaggggttttaccttcttaaaccaagttgtaagcataattattatctgtaggagaatgggccaagatagtttttaccttttgatagacctcttcttgccaatcacccccattagaatgtcctgtttgagctgtggaatcaaaa

SEQ ID NO: 2447 - DNA, 606 bp, Gossypium hirsutum
tgcgactttaattcaattgacaatttgaagcccagcagcatgccagacccaaagctgccctccaacttggatctgccggagaagtgcaaggtgagtcggaagactatcaagaaaaggaaggaaccagaaggctgatctttgtgaaataggagtttcaaatccgagaggatcttatttcaatcaaacttgatccctgtggcaagggaatctggtagcaggaatatttcaaaaaggatatcagagagtcctacaatcagaaccaaaatgttgggtttgttggttcggatttgccctgactgtttggacctagagttctggtgtcagtgccccatgtatatattgataaggctaacatgctaacttggatgctttgattagtaaccagaattcttagaagcgtctatggtgttggaagctccaggaccaattaactagcgagaatgcatccaattttggactgatttctgctgcatcttttcggttactttcttgggaagcagaagggcaatttgccacaaagagagattatatacatatacaacatgaattagtgtaaaaagaaaaaaatggttgaagttgagcaggtgtagacaatatttcattctt

SEQ ID NO: 2448 - DNA, 617 bp, Gossypium hirsutum
tcgttggggaatggagagagcataccaaaaagttctcaccatcttggtttgtggctgtccatgcggctgttccattcatagccatgctccggaaatctgttttgatgccaaagacagctatggctttcacaattgcagcatccatattaggacaggttatcggctctagggctgaacggtatcgattgagagcagtaccagcaaaacaattacatatcagggaatcctctgtttctgttggtgctgcaaatcatttggatgtcgtcggttttaaggatggttattgcaggaaagacgaatggaatccagtttctcttcaggtggcaacgccttcttcatcaacagacatgttctgctaatcattttctcccccaattgtatgttgatcttacatgttttgaagtgtttctttatttgtaccagacacttttaatgcatatttcgctcttgaaagattgacttgataaacatatacaattgcaacacttcatgggaataaattaataaaaggtggctactgccagccacattttattgacattttcaatgtcaattatttttgtcaatttgggtgttatttttacaaaggacgccagatatcccacataccgtctttg

SEQ ID NO: 2449 - DNA, 575 bp, Gossypium hirsutum
atgtatacagcaaagcatataagaaagtaatatctctccaagtactccataaaaaatgaaagtgatgcttccctcttcatctcatccggctgacgaagaatactattacgataagtggcaatcgcttctcttaagttctgtacttgcatttaaagcaacacatctgtgagtcatattgatctatgataaaacttaataagctttgcagataaagacaaaaaaatcttgtatcaaggaaggaaggaattgtttgtttgatataagctatatctcaaacaaagacttccattaattttagagcagtaacttggaagctaaacctgaatgaaatgggatacttcgaaagccatacctgcattgaagcacatttgtcaatgaccttgtccacttgtcttttcccttcgacaccaccctaaaggaatgtcactatttataagaaaaaagacccaatagaaggttaaagaatcaaccaagagcatgtagtagtattaaatacctctaggacccgaatcaggcttcttatgacagtatattctcctctccgaattgcttcctggaatgggcagatgtcagga

SEQ ID NO: 2450 - DNA, 627 bp, Gossypium hirsutum
ggggaaaaaagttgaaaaacacttgagactactaaaatgaagttccttcctacatttcctgaaaatcggaacaggaagatattccctatgatgtgatattgataaaaagtcaactagcaattaagaaaaaagtccaatcaaagtacgcattcaaggcttcatagcataaatacagctactgaaatacttctggttttgaaagctatcattgtagtgctttagcctttaggtttaaatgtcttggttcttaaactagaacccacgtcacacttttaggcacccacctacgatttcaggccaatcttcaaattcatagcaactggtatagaatacacttttcaacactaacctgtttttggatgtacacagaatggtgcctttagtaaatggttcatgtgcctcgacacctgatacacaaataagtagttgcctatgataggtcacttatagataattttatatataaaaacttcttggtttcaaaaatgtaatttatatatactaatgtatgaaatggaggtggatgtatttctgagatgaatacctatttttgttgaaagaaaacaaacccaaaaaaattaaaacaaaaccaaacagagtaatactgttgcagacctccatatcaag

SEQ ID NO: 2451 - DNA, 630 bp, Gossypium hirsutum
tcttttagcagcaggaagcgggaatctggagaaaaccagaacagcagtgctggaaaggcttcgcagttattcatggagcgccaaagtggtgatagctatcgcagcttttgcttccagtatcggggagttgtcgatgctggtgaagcatcgtgatgacgacctgatggctaagcttttagttaaaatcctgaaaggccactcgcccaaactcgatttgaacgctcttgcgggagcagggcttaccgacggtatgttggaagtggtacgcaccaatttgaaattctccgacagcctaaaagtacaggaatccatgaaggaggcgatgctggagttttacctcaacgctacaaaaaacatcttcgacattgttttacaaatttcagccgttttaagcaaaagggagtaagccccttccatcctcaactccaaacttaattaattattggtgcttctcaaattttatttttttttggtgataataaaaaacaaaaactaattacaaaatagtattattaagagaaaaaacatttgtaattttatccaaatccactaaagtgtgcgtcatcattcgaggatcatcgaacacttgtaaattatcagattcagacagggcttggttatcaagacagt

SEQ ID NO: 2452 - DNA, 600 bp, Gossypium hirsutum
tgggggagcactgctgccagggactgagggtagttactattaccggcaaatccctgctggaaagctgatggcatataagtgtaactttgtggcaagaaaggataactaatcatgttggcaaaatgtcccaatggaagcgtaggttgggaaaaagggtgcatggctagatgctgaggaagagcaggtcccgtggcaacactggcactaggaagggtctgtggagtcgcctgtggtgcagatatactagctgctctcagagcctgcaaatgtccaaatctatcaggaaaggaacaattaaatcttatcaactatagatattttcagttagacttagaaagtggccttttatttttccttttccccaaccccaaacttattattgtttacggtcacttggctttttgctcctttttcctgacactgacgcaagcaaataaagaaacatgcaacaaaagtaaatgcagatttggtagaaccagatgcataattgaggacaaagaagatggccaagaaatggacaaggtctgtgttccatattagggatcagtgatgcctaggaaactagaatttgaggatgtttctgtgtcagcatagagcatg

SEQ ID NO: 2453 - DNA, 569 bp, Gossypium hirsutum
tttgattggtctgaactgtaggtggaaacttttggtgccatggccaaaactgagaaaatcgccttcatccttgaacaagtatgggcatcttattttgatcatcacccctttttgttaatcttatcttatcttatagatgcaatgataattctgtcaaatggtttataattaaatttgcaggttcgcctctgcttagatcgtcaggattatgttcgtgctcaaattctttcaaggaagattagccctagagtttttgatattgacagctcaaaggaaaagaagaaaccgaaagaaggtgacaatgttgtagaggagcctccagctgatataccttcactattggaattgaagcgtatctactatgaactgatgatacggtatttccctctttgctcacaaacaatcaacttttcatggtcaattttcttgtaaacaatttggttgaattttgataatcattattgaaaggtttaaagtttcttgattactttttgtatcttgttagaatggtatagattttatgtaaatacctagtcacacaaatatttatgctttctgagcttaacctc

SEQ ID NO: 2454 - DNA, 623 bp, Gossypium hirsutum
aaactctaatatcagttatgtctcataaagtgggacatcatgcatttactaagaaattactttcttggatttagatttgattggttgataccttaatcccttgattcaacaagatgatgaagtgtattatcctgtgcctgcttaagatgccctccaagtaatttcaacctgtgtttcactggtacagagctctacggctttggtgtagatataatttgtcatttacactgttttctttctccccataacttgcaggtacatattcaaaaatttcatagataaatatcccactatatttaagtacttttatacgttgtagttgacctcattattttcagcacagattttatccataatcaataatataggagaatcaatttgtaggaagtccggctcacgattgaagccaactacgaaacaatggtgaatggtcttccataaatccacatattattatgcaaagaaggataggattttcccaagttgcccagtcttctgacttcatggcctaaaattcatttcatttgaacatattgtaaagaggagaaacgattagagagatttggctgaatttccgttttgttacttgttttattcatgggaagagaatgaagaaaggttac

SEQ ID NO: 2455 - DNA, 599 bp, Gossypium hirsutum
atgatacaagagatattaagagtatattaatacaagagtacaagagatattttaccaaaaaagcaataaatgctacgtagcaatttcttgggttttcttttacaagatattttactgaaaaagttgtaccagtttgcttgaaagcaggggaaaataaggaaaataagatctccgaaaacaaagatgatagccataaagtaccttgccattttcatcctgttcatatcttgtattcataatggtaaccattggaggccaaactatctcgtgatctgcaactctatcggtcagcccttcccacctgccaaatgcatcattcactggtttaataaaagctcctctcctgcgcatctcctcaaccaaaagtccagcaaatacacgatgcagcttagctctccgtgttgttttagtcatggaatgagtcaataaggattgcacacctcggtaccagttgatggctcctggcccaccttgacatgctggacagtgccaccgccgaaccggagaaagaatctcctcaaccgtcagtttctctaaacttttaaaaaacaaatagaaccacttgctctccttgcgtgcttcatggctcttctcatctt

SEQ ID NO: 2456 - DNA, 591 bp, Gossypium hirsutum
caaatagcatttgaatggatgaaataataatcaacaaaccttagctatgccctcaatctgatctaacaaggaaattatgtgacgcaatgtaactgatcgataccacaactgatgcaattgtttattccgtacacctagacattttttagcctcagacaagtcaacctttaagacaccaatgctttcagaagattcactgaataaccgcaagatctgaaaaggaatgaatagttagtgataaaacatgtaacagctaactttccacttctaatttcaacaaaagaaggaaaacagaatgataaattgacattgacatcagaaatggcacctataccagagataattagttttgattgtaaatttatttatgtatcttgtatgcccagtttgttcaaatattatagtatggatctttcaattccctcaaatcttacccattatttatcttaagtgggatttattaccatgagtgtttgatggacgtcagattgatagagggctctctaacacaggactgatgatcaacggcataactagggatttaaatacttgatcaatggacatagttctttcctatactagatgcccaaa

SEQ ID NO: 2457 - DNA, 407 bp, Gossypium hirsutum
tggaagagagaggtttaagccttgaaaagctaaaagctgatctcccacttattgctgatattgaccatgatgacccacttaaggcttttcagcagtagttaaaagacttcaagacctaaaaagttaataatatcactgaatatttcattatatatcagcaataattaaaagagtttgtttttcaattcatagctcctttattctgttttgcatatccatgtcagcttctggacttctctaaagaatggggaattttgctaagtatgggcacaacattgtatgtctttagtcctcgaaaaagaagtaattgtggtagaagaattagttttttcttctttttttgttgttgggggtatgcttccttgtttgaaggcagaaaaaaaaccccccacaacaaaaaaagaaga

SEQ ID NO: 2458 - DNA, 603 bp, Gossypium hirsutum
  misc_feature (63)..(65): n is a, c, g, or t
ggtattagcaggttaatgtttaatcttcccaagttaaagaaataaagaagaataaatttgatnnnagcatacctttgcattgatttttagaagcaggtttgtaaggtactgatcattgaccctagttggagccatgcactgagtgactatgccaaactcagaaagattcttcttcttccatggaccttcaaaaagtcaaatttagatgcaaggaaaagacttcaagagaaagaaaagcacagttaacgcacgaacaagtgagattttgcataccataaagatcaaaatttttcctatcaggtaaaagacaaaaaaaaaactgtggagctccaggcagtttaaattggatatcctcaaacattttctcgactctaaccaaaggagagcaacgtctgttctgattggattcttggaacacatcaaatggagggtctattcgctaaaatagagacaaggaaaacaactttagcccacaagttgaatttataacctcgtatatgcaaagtgacaaaactgacaacaaaattaaaaaaaaaaaattgggtaaaatttaaatttctttttttgtccccccttctaatcaaaccccgaaaaaggtttttc

SEQ ID NO: 2459 - DNA, 556 bp, Gossypium hirsutum
  misc_feature (375)..(375): n is a, c, g, or t
  misc_feature (378)..(378): n is a, c, g, or t
  misc_feature (380)..(380): n is a, c, g, or t
  misc_feature (382)..(382): n is a, c, g, or t
  misc_feature (395)..(396): n is a, c, g, or t
  misc_feature (401)..(401): n is a, c, g, or t
  misc_feature (403)..(403): n is a, c, g, or t
  misc_feature (418)..(419): n is a, c, g, or t
  misc_feature (421)..(421): n is a, c, g, or t
  misc_feature (429)..(433): n is a, c, g, or t
  misc_feature (436)..(436): n is a, c, g, or t
  misc_feature (443)..(443): n is a, c, g, or t
  misc_feature (483)..(484): n is a, c, g, or t
  misc_feature (487)..(490): n is a, c, g, or t
  misc_feature (492)..(493): n is a, c, g, or t
  misc_feature (496)..(497): n is a, c, g, or t
  misc_feature (499)..(499): n is a, c, g, or t
  misc_feature (518)..(519): n is a, c, g, or t
  misc_feature (521)..(521): n is a, c, g, or t
  misc_feature (523)..(534): n is a, c, g, or t
  misc_feature (536)..(541): n is a, c, g, or t
  misc_feature (543)..(543): n is a, c, g, or t
  misc_feature (547)..(547): n is a, c, g, or t
  misc_feature (551)..(552): n is a, c, g, or t
aataaaatcaaaaactcagaatgacacaaataacaaccacactcaaaaacgaaaaagagaaaagggcaaaccctctggggttaaagtccttaggttttgaagatgaagaagggtcttcttccttagcagtttcattgtcgtctagaaccatccaatcaggtgggtctgacttcgcctcactgaaacttcgttttagaggctcaccctgttcctcctttggagaatgcatgtagattgtgagattgtaataagagtaaaaagactaaacctttaccgaatgggactgataagtattaaaaaaaaagagtgggaaaacccaaaatatgggaacccttacggacgattattttggttaaaaaaaccggaaaaaattgnggngntnaaagggaatttcnncaaanantggagtatataaaanntntgttgtgnnnnnttncgaattntctaattttggctatttttgtggataaaagggaaaaaccnngcnnnncnnccnncnggtgtacaatgaaacctcnngncnnnnnnnnnnnncnnnnnncnccanctannagaa

SEQ ID NO: 2460 - DNA, 620 bp, Gossypium hirsutum
ttatttttaaattcattagtattaaattaaaaataaaccgtattttaattaatacataaaatcgacttgtgaatcgcaaagaatctagtatatatatatatgaaatctaattaaatttcagtaaaagaatacatgaaaaataaattcttaaatatgcagataattacataataaactacaaaaaggaaggggaaaaaaacaaagtcagatgggggagctgtaacattttttataagattatatgattaataccattcatttgcaatctcatatcagggtatgcatctcataaaacacagcctctgaattaccccaaccaattctaccacagaaatatgaaaaaagatcctctaggatcatcttcatcatttagaaaagtgagccacagattcaggttttgcacaccaaggcacacttacagcacaaaacaggccactgaatttatttcttgtaaaaagcagttaacaggaaaagaaaagaaaaaaggaccaggaagagaaggaaaaagctttttattgtaatatgtggtgcaacgaaaagagcatcagcacataagcttctcaacagatgaacttacctgaagttcagagatcaagtgtaaccatcatgtgccctaaaaa

SEQ ID NO: 2461 - DNA, 660 bp, Gossypium hirsutum
actgctgcctggaaaagaaaatcattgtaaacattagatgacaaatttgtaaaagtagcctggatcaacgttgtttgagggcttcctcgttgctttgaaaagttgaacatcactcttaaggagctgctctcgtatgcaactaaagatggataagcttgatcattttcctctgcccacagaaaagaagactataacacctttggcaactaaaaggataccaaatcagccgaacagatccccaaacctattaaaacttaccagacttttgaggaccagggccacgcccatccaataaatccatcattggagcagcgtttgcaggagaagtggcatttgcagaaagtgaggaaagtgatgcaagcccattaaaatttacaaatggggctttgtcatcttgactggaggataatatgtcagatgcagacaagccggtttgcacaggaagcggcattccgattgacaaaagatccaacagaacatctgtactagcttttggaggcatatcagcgcctaacaattcaaaaataaaatcaaacgttttcaactacaggaaagaagagattagaaattgaaaatagtacacttttaatcgcgaatgaaacattaaaacatttttatgcctatgcaatacagagttcactattggagaaggaaggcagt

SEQ ID NO: 2462 - DNA, 630 bp, Gossypium hirsutum
aggagaaaaattggctctacgataaacagcatggttaatgaaggttaagcacaatttgttagccttcatttcaccttgagacgacgctctgctcgaagaagttggtgcagcaggccgttccggctccttgtaatccaggggaggagcaaaatccacctcacagtctgtctcgatgatacttattgcattggatggcttcgtctcaatgatatctatgtaatactttttattattatatgccaccataatactatccccggtggttaaacaggaataattcctcagtgttgtctccaagctgcacaataaatgaaaagtgagacacttaaatcaacggaaacagattcaaggacccatgttcctaaatcatctataaggatgaaccggggaaaagattcaagaatctacatcactgaacacagaaatttgtttggctcacaagaagctgaatcacaaaacattgccaacatctatgaacggtatatgaatcgatgataacatatgtctcgagtttgaaaactgacttcttagctgaacatcaaacatcaaagaatcaagcatgaatgtttttcaaaaaataacccactcacatagcttttgggtttgagatatccaaaaagtccttcgtgt

SEQ ID NO: 2463 - DNA, 538 bp, Gossypium hirsutum
  misc_feature (530)..(533): n is a, c, g, or t
ccctttgtcacaaacgggtgtcgggtcacaggctgttacaatgaaaaggccaaggctcccatttggtatcggtgactcttttcccttgggtggcataaggccagaaatagagtgggtaatgcctaatattagttgagttgtaagacatttccatcttagaaatggtaccttctcttattatttttcctttttgttttactcttctttctagttaatctaaaatgtagttttttttttcaactgtattatcagtggcctatatatatatatatatatgctaagagctgatccatttgaatatggggttaccttaaaattcgaactgaatcgattgaattataattcgaccataaatgccatccaattcaattggtcaaaataaaaatagaaactttcagaaaagaagcccgctttctctcctattcttcctcaagctttatgttgattcaaggaccaaatttttgatgtgttttttagtctcaaatgactgagttaatcaaaaccaacacggggtgagttacccggatttnnnnctatc

SEQ ID NO: 2464 - DNA, 639 bp, Gossypium hirsutum
ttggaaattcaaaaccaggtaattcgggatcaatccatgcatttttcataatccttcatagacttcttcagttgtctaatagactcgttttcatgaacagatagagcttcataaagagaatgagcatcacatcaagcaaacactatcagaaagagggcgagaatataattatccatgggacttcattaaagcttcgtcatttagatcggaagttaaaaattttcaaatcaaaatctgagatttctatgtttcggtcgggcaacaaattttcgagttagtacgatgactagaagaagcacctattccaatctccaatcccattaatctcttttcaagcaaaagagaatagctctaattcctatgaatttgcctcttttaagtgcatgcacttcattcctctatttttcatattccgtcttctccaagttagcaaacagcatcaacaatggtactggctgatttgtaagattgtggctttctgattgaaaaaagtggtttttgactgtctgaattcttacatatttgcttatgaaatgacctttttcctttttattcccatggagtttgaatatagagtatatataatgaacaatgatgatagcaagcaatgcaatcatttcccatatccgtttgatagga

SEQ ID NO: 2465 - DNA, 602 bp, Gossypium hirsutum
ctgagagtgtgtttggagtgaaagaaagtggaggaatttgatgagaaaatgagcaagtctagggactagatttatacaggaaagtggaattgttggtggacggtgatttttgacacgtgggcttttagcttttgggtgtacccaatgacggtgcaaccatgaatagtcaaaagcagtcttcgatgtacagccgttatcccatgtgacggaagaacatggtgcgttagattttgtattattgtacaatacacgtgagtttattattttcaatcattaatacaattattgatatagcatcattttatttttacattttatgtttggagttcgtaattatttcaaaagtttgaaattatattttctgaaatgcaacgtgccttaccattgcacattatagattatattaaataattataaaatgatactatatcaataattgtattaataatttgtgagaataggatcaaatcaaaattacatgtatgaaattgcacaaaagtaaaatccatgtataaatttacacattaaaccaaaattcatgtatagttttgagatttttctcttattaaatttactttaaattgtcatagaattaattatta

SEQ ID NO: 2466 - DNA, 605 bp, Gossypium hirsutum
taagaaatttacatattttcccttcaattagttaaattcaggatttatacatgatataatctcccctctaacagaaatttccatatgggggtgcctttaacttaaatggacaaatgacatactggtggactctgattgttttattgctgaacaagaagattgttacattcaatcatcagaaaaacagtctcatctgtgttttgctttgttgcagcgttgcattgtccttgacattgaaggaactaccactcctatttcatatgtaactgatattctctttccttatgcccaaaacaatgtcgggaggcatttatctgcaacatatgctagtgctgaaacccaagatgatattaagctgttacgttctcaagtaagattttctttggacctttgaaccttttatctatgttgcatcatgattcaatcttttggctttgcttcttgaggcaattttttttacatcttagaggaaatcattaattttaagagttaagccacaattgaatgtcaatgaataagaaaccttactcctatgtttataatggaaatttgggaattgagacttgcatatatgagtctgggacaccacttctggtagatgcttc

SEQ ID NO: 2467 - DNA, 611 bp, Gossypium hirsutum
atcctcttacactaataacaataccaatgccaatcgagctaagactcaatcgacaactttcatatatttctttattagttgaatgaagttaatattttggaatgcagatcctgagagattcagatttgcaagggatacttcattcggacgaagacatttgaactgttggagtcgttcaaccttaaccctttggattgtaagtaatccttgcatcaatcccgtttaatttaatagcagagtttttcaagtttgatcatggtgtctgaattctaatttacttatttattcattctcagatgtgtttctttagacaattttttggatcagtaacaaaagttgattacttgacattgaggcatggatttatcatggtaagctcagccatggaatgttgatattatgcaaatggtttccaagtatatggtgctaattcaaacttcaatgtccaataatatgaatgcaggcacatttggcacctgcaaatgaaaccaaatttgattttcaaaagtacatcaagagatcattagaagatgattttaaagtagtggttgggataaggtttgtacagttttagtatgagaaattattttatggacccttcctatcacatc

SEQ ID NO: 2468 - DNA, 571 bp, Gossypium hirsutum
  misc_feature (565)..(566): n is a, c, g, or t
cattctccttatctgacaggtaactacttctcctcttcctgcattcaaatccccaagttagattccattggttccatattacttgagttcattattttattgaaaaccgcatgttccttctactgtttgatttaaattttgctggaacctgctctgacaggttccatatgtcatttcgcctaaaataaaatgaactaactaccttaccatgccttttccacaaaatgactaagctgttacttcagccaaccctgtaaaaaattctgtaggagttcaaaaaaagttatttccttaaacgtacctgtcacaacctctagttggtaaacgttattaatctggggtccatgccgaaatgcttgaccacttattccggcatttgataaagtacctcctacagttaggtgaaggtagtctgtccaagactttggtgaaagtccatatttaagagtctcatgcaggatgtttatccataactcaccgcccgaaacatccacataaggcacctcaccattttcaatatacatgcttggtcgatcaagtgattccatattgataaccacacctnntaggc

SEQ ID NO: 2469 - DNA, 645 bp, Gossypium hirsutum
acctagtagttcagacacgcaattggcaagactacggtattctgcttcagcagacgacctggacaccacagactgtttctttgagcaccaggtgactggagttgagcataggtatatcacataccccgacgtagaacgacgatcttcaatggacgaggcccagtcagtatcagaataacacaccagctctaatgaacctgctgcaatatacagaccatgatccatagtgccagccaagtaccttaagactcgtttgacagcttgccaatgagtgatactgggagagctcatgtactgactcagcttgtttacacagaatcacaaatctggtcgagtaatgcagacatattgcaacattcttactgtactgcgaaaaagatacacatctggaaatggagagcttccatctgaagcgactaacttaggtgcaactaccatgggtgttggggtggagactgcaccgagcatgccagtcttaataaggagctcagtaacgtacttcttttaactgagcagtagtccttgaggtgtacgttgaacatcaatccccaagaaaaaactcagaggtcccatatctttaagagcaaatttgctgtgcagatgatgaaccacagcatctatttcttgacactgctacagtgagca

SEQ ID NO: 2470 - DNA, 553 bp, Gossypium hirsutum
acctcaactatcctccctgtttttcgtttcttcaagttcctctttcaatctggacaattcaacctcgagtttctgattaccctgacgaatgctttcagtttccttacttcgatgatcatactctccagatagtttcagaatttgcttcttttgatcttcacctatcaacttgacctcctcatatttagtcttcagctcctctataacttcatgcaattgggctctctcctcttgacttgaactgagcattcgttcagcttccaaaagcacaatctctttctggcccaacaaatcctttccctttgaaacttcatcatttaaccgatcaccaacagatctaactgaaaccagttcattctccaagtttctcattgaatctttgagatgtgagttttccatttgcatatcttcaaacttcctctccattatcctcagttttccatgaagatcatcattggcacatttgagtttatctaaattgtcagtgagatgctttatttcctcaaaattatcaacaataatatcctttaaaataagagtgatgttactttga

SEQ ID NO: 2471 - DNA, 628 bp, Gossypium hirsutum
  misc_feature (48)..(51): n is a, c, g, or t
tcttcatataaattacttaaatctctgagatgtaaggtcaaacaatannnnagtttactaattttcttttctatattaactgaattgaaaaggaaaggatgtttgaacttccttgaaacttgtacaagtattacaagtgtttatttttccaaaaagttaaaacaaattttccttttctagaataagataaagcaccatgttatgcctagaaaaaaatttcatggacttagtgtcattactatgcaattctggcatatttatgcccattgaatataagattcatcttccaccttaaccctaaaataattccatgcgcaaagcttagtcgtagagaacatgaaatgattcatctcccaccttaaccctaaaataatcctaagcgctaagcttagcataaattgcaccatcagcagtttgtggttgtagagaacatgatatgattcatctcccaccttaaatctaaaataatcctatgcgctaagcttagcataaattgcaccttccttgttttcaaattctttaaacaatactaaacagaaaacttcttcaagccttaattgatataacaaatgcacatatattatcaacaagaaaaaaaaaaaaaaaaaaatttagggagtaaagccag

SEQ ID NO: 2472 - DNA, 694 bp, Gossypium hirsutum
  misc_feature (666)..(668): n is a, c, g, or t
  misc_feature (676)..(676): n is a, c, g, or t
  misc_feature (678)..(678): n is a, c, g, or t
  misc_feature (684)..(685): n is a, c, g, or t
gctctatggtgaagccgaactccagcaggtgcaacactatttgatccagtagaatctggcatcttaatcaaggtagacatatgttttccactaggtgtagcctcagcccctcgatccctatcaggaagttcaacttctccattaacttgtcgcgccttggccgcggcaagtgtggcacttatagcctcagcttcagcagctgatgcctcaaccaaatagtcaacacctttgttcattctcctgcaagatataccacattatatagctccttgaattaaacgaggaggcttaaccattcaagagccaagtaacaaaaataagcatacagtggtagattaccgggatccttgaagcatgacattctcagtgcttatgtcagcatacatatccccatttacagggggagcaacaggatttccaagcacaactgatccatcaggtactgcttcagccattgtttgccttgctctttcatcaacaaatccataccttccgggtaatcgtgcattagaagtagcagttgccgcagcagcatgtgaagctgctgtagttgtctcagcagattctgcagatgctgctgcggcaactgctacttctaatgcacgattacccggaaggtatggatttgttgatgaaagagcaaggcaaaacaatggctgaagcaannntgaaggantngattgnncttggaaaa

SEQ ID NO: 2473 - DNA, 646 bp, Gossypium hirsutum
agtatatctaaaatagccatccaagcaattagggagtgcttgggaatgtgtagggaagaccttatgagcctatgccaatgcaacttcccagttttcctcctaatttcttcccaaatctttgtaacaggtagttcggcattacctgttagtagacttattaaaggttcagcctcctcttaacttcagaatcttcctccaagttcagcttttgtctccttgcgctgaaacctgccacaaggtgttgcctttcaatgcataagcttgcaacccagaaatccacagaaagccctccccaaccaaaatggtctttatatgtttcctcatgctagctctattccagtcttccgaatctttcatgcccaacactcctacaggtttgggcagacaaatttgactcccaactgattctagctccatattcccaccattaagtccacagtgtcctcagtaggtcattagcaaaggatagatacggatagattaatcaagcttactttgtgacatttaggatagaacttgaaaatcccatgcttaactgctacatccaatagtttggataaaatgttcatagatatcaaaaggagggtagggagatagtgggtctctgtaaaaaccgtctgtttaagcttgatagttcagctcatca

SEQ ID NO: 2474 - DNA, 595 bp, Gossypium hirsutum
tagcatgaacagataaaggggaactctcttggcagtgtctaacaacaagttattactgtattctttaccatggcagcatcacaggagagtgcttttaatggaaacttaaatcatgcatgttaccagtttagttacccctgtgatttatttacatgttattcttagctaaagtggtagtgaggttaggtcttaactcaagatatcaggtccctctcaaccatcctaccaaaaagccatcaatgacatttttcatatgtgctatatgttggcaactttaggataaatttttagcccggaaatcatgcgtgcatgcttcctaccatatctacagtggtcaaaaggcattgcaacagcaaggcacaaaggaggccaccatctgaaaaagcatatcatatactctagtaattacagccttttgaatttaaaactcaatgttgcttttccaaaagctaatatttcacaagattttatgagatccgaccatgaaaacttaccgttgctactttttcataaagaaacaaaatgatactaaaagcatcatgtaaaacatgttcatccgatcaagcaatgtccaaagcttgattgatcaaaggac

SEQ ID NO: 2475 - DNA, 643 bp, Gossypium hirsutum
attttatgctttgttgtgccttatctttctctcctcctttacttgttgaagcttgtatgcctcaccttaacctttgcttggggacattcaggccttgggcttctaggacaacgacttttctttcttccaggcacgtctttttttcctttattttctttttaatggttttgggttctgagcattttctttgttttagccaaaaattgagcacttgaatttgtttgcttggtttatttaacttttagggtatcattttaaagctttttccttcggctgcgtcaaacaagggaaagaatcatatgggtccaatccaagattcttaggttaggttctttattggcttggctgagatatttgcagcagtgtaaaagggagttcatgataataataggttttgttggttctaataaatgaattagtggaacaataattaaggatgattctttatctcttctttctagtggaatagcagcaacaacaacatcagccagttccaaaatatagaaaatagaaaatcatcaacatccaacatcaaaacaacagaacttatccagtaagactctaagaacaacagagactattgctcctagtatagatagctagctgaggggagatgcaaatccttagttgaacagcctcctta

SEQ ID NO: 2476 - DNA, 607 bp, Gossypium hirsutum
cttgaaccaacaccatatatgcgattaagagactactatggcatttaccgtgaccccgttttcattacaaactcatctgttgggggaaaacgagaaaagaaacaaagaaaagcaatcacgaaacgaggtggttttagtaatgcttaccgcagaaggacggactcctccgagagctgtgtacagagaaagttttcctacaggtatacccatcccctgaaacaagcataatgttgaagtttgttaagttgatctactagacagacagggagatatggtcacagtttcaactcacagcgcccatacaaatgtcaaattacctggcaaccaagatctccaagtcccaaaattctctcgccatcggtgacaacgataacttggacgcttctctcgggccagtttttcaatacttcaagaatcttccccctgatagaatgtgatgcttagtcattgttatgcaagttcaacagcaaaacataaaaggaatacatacaaaggacataatcaaacacatacttctctttcaaactgatgtaaagaccctgagggcgcctgaaaatgctcccatacttttggcaagcctcaccaaccgttggagtgtaacaaccgg

SEQ ID NO: 2477 - DNA, 616 bp, Gossypium hirsutum
tatctggacttcccattgaatatgaatccatacgaatttttgcgtctgccacgtccatctctttagatttattgactaacatgcttctcgattgtgaggctagacatttggctctactttctgaagttcctgtgcaggcaaacttaaccaaatatcaagatgattcaacagcttcgaaacctcctcgttctcaagcctttaggcaaggggatcgtggttcaggccgtggctggtcgcgtgggagaaccagaggtggtggtcgtggttggtctcggtctagacctcaatgccaaatgtgtggcaaagttggtcatgttgtgcaaaactgttatcatcggtttgatgagaactttggtcaaaaccctttggttaattttcatcaagctcatgggttggctcctgcaactgcatgctctccttttcattgttctagctcgtgttcttgttcttcatctacaacttctagtcaaacttggtatctagactcgggtgcgacgaatcatgttacccctgacgattctaatctgatgtctgtctctccatatacaggtacaggtcaagtcgttatgggcaatggtaagtctgcttctatagctaacgtaggctcttctactat

SEQ ID NO: 2478 - DNA, 602 bp, Gossypium hirsutum
  misc_feature (395)..(397): n is a, c, g, or t
  misc_feature (422)..(424): n is a, c, g, or t
  misc_feature (471)..(474): n is a, c, g, or t
  misc_feature (486)..(487): n is a, c, g, or t
  misc_feature (489)..(489): n is a, c, g, or t
  misc_feature (495)..(500): n is a, c, g, or t
  misc_feature (539)..(542): n is a, c, g, or t
  misc_feature (561)..(563): n is a, c, g, or t
agctcttccccatttcatgctcggtttaaatgcgaagccctcaaggtatgtatggatttttttagatgacctaacaggtttgcttgactcgagatttgaagtcaaaataatccttgttttgcagcttgcaatggtgaaaaatcagaggttggctgaaaaactgattaaagggaagatctatgattgtgtttgcagatatgaacccgccacttgatctttctctactaacaacttaagagattttgcaacaaaatttttaaaaaaatataaaaactcctggaaaggaaatggagcaatgagagtcccatagcattgcctataccattcttcttttaagtttatgattttgttgcatacagtggtcgacaattaccagacaattgcaatataatcgnnnaaaatacatgcctagtacatatcannnttatatacttgaatttttgtgaatctaaattgggtctgaatttttannnntgctcgtataanncntgatgnnnnnngagtaagattttatttgaaaaaataaaaacataatctgnnnntttgatatatagcatttgnnnagtctttatttgatcacctttttgcagtctttatttgat

SEQ ID NO: 2479 - DNA, 494 bp, Gossypium hirsutum
  misc_feature (484)..(484): n is a, c, g, or t
gatctgatcatgtttatttagcatttaaagtgccaattctcaactctccctgggggtttagaactgagttttgcatgtcatattatagcctataggtaccgttgttgctggcctggcattataaaattggtcggttgatgaggatttgggaagtcctcctcattcttgctgatatattaagattttgcctgatttatgaatctcctcactctgggagatccatcatttctttttttttctagacactattgtcgtagggggctccataatcatgtcagtattttaagtttacatcacaaaaaaacacacacatgagagtgagagagaagaacaaaaggggaaggaggggtggtggggtggggtcactctattgttagctgcttcttgtgataaggagtgtgtcccattgttgacagggtttttgaggtttaaattttcaaatacccccccccaccttttttttttttcctttttttttttggantttagggaag

SEQ ID NO: 2480 - DNA, 570 bp, Gossypium hirsutum
gattcttcacttacctctttaaaacctgcaccttttcattcttcatttcttctgattctgagtagcaaggatggcgtgttcgataaatttaaacccaagattttgatgccaattcatgtctattatattgatccttagaatttcttgatggtcaaactactgttttttatttgaaattaggggaataatatgttacaatccttcgaatgctctgtatatatatacatatatattttaaggataagaagcgaattgccttataattgttagactaggaacacagcatggacatgacggctataaaaagattttatatgttgaatttgtacttttcaattaaaaaataacttgcaaatagtttttcaaaattcaaaaattgaaccttaaagacacctatgagaaccgaattgttgattccatatttggaagaaaaaaatcatcatttatccaaacatgttcaattgtgtccattcatgtccgactttatcttgatcatcttttgacagtgttcaattttacttttacttcttttaatgtttccaacatgtgggacatttatcgacatatgga

SEQ ID NO: 2481 - DNA, 655 bp, Gossypium hirsutum
atgtaaaagtgttatcaaaattcctatattaaaagtgagattgcattttgctctctctattcaaaaaaatgaacaaattaatccatgtacgttaaatcaaaagcaaattgattcttctgttaaaaattccatttagttctaatattaagtgatgacatattaatatctctgattgcttgaattagtccctctcgagtcgaaaatgccatccatttcactatttattaaaaaattcatatatttcttctattaaaaattccatcattttacttgaattatcgctccatgttaacatgaggtacacatggcataccaagcgtcattgtccggttggtttatcaacacttaacagtaaaattgatggaattttagtaaaaaaaataatttattatttaatctaattaaataaaagaaaaaaatataatctaactcttaatatacggcttcaataatacatttattccaactattcaataggatgataatggtttttaggtccataacacccttaataattgaccctcatgtttataaagatgcctcatggttcaaaaaccaaatatgtaacaacaataagagcaatctatcaaggatttttttgaaaaaaatccaaaatgatttgatattttagggttaaagagagcaaatgtattgc

SEQ ID NO: 2482 - DNA, 634 bp, Gossypium hirsutum
cacgagataataccatctgtgaaacacatctgatgattaattctcggatttcaacagcactgctcttgcgcataacaataacaaaaggcttcataaattcattctgaaaattgtaattagccaactcttctcgctccaaaaatttcattgatagttgccgtaaagaatccattgcaaaaattgcaattgacaggttttcataacatccaatggtcacaaagaaattggagagcacatgccagatgcttgaccatacaagcctgatccggttcatgttatagtgcctgtcagtagatcagaaagttttcagataaggaaaataaacaaattaagtaaaacccccgtaaagaaatattgttggggctaaggaaaaaattattttaatgaggttactttattatcaataaatgaataaattatttatttatcagtaaattaacatttattaaattataaaaaattatattttcaatctttatacatgtatattatcactttataggaatttaatattataatatacattaatgtacatacataataactaaggaaaacgaaaagaggcatttcaagcaatagtgacctctattaactgtttgctacaacaaaaaaaatgtattgaatgcggatgcac

SEQ ID NO: 2483 - DNA, 604 bp, Gossypium hirsutum
gcaatggagaacacaaatacctgccctaatgccagtgctttcagacattcagttcatcatttactatttaattgtgagcaagaaactacgtattcagtatctacattatgagcattaatttgaaaattcatgctgtaaccggagatcataaattttattatttacaagaactactacttcagtttcaatgtgttgcaacaaaattagccaatcagataaaagtaactcaattatcaaaatttgcatagacatgcagactattaataaaaaccatttccgaaattaggctaattagtcatggtgcatggaccacactaccacaatcaaagtcgcaatcaacccaaactgtacaacatgtgatctaatttaagcctcaaggcctcaaatattgataatctaaataggcataaatgagagagaaaagttttaccactaattgcacactcaatggtgtgccacctctttcaatttctaactctatcttctgctcaacactgtcatcaagtaaagtttccaacttcaaaaattgagtaattacctgcaatacattttcaataacacattaaagccaataatatgttagcaaattctattagggagctgc

SEQ ID NO: 2484 - DNA, 636 bp, Gossypium hirsutum
atccatgagaagcaggaacctgctatttttagtgaacaaattaaagggtaaacagctgaattattaactcaaggaagaaataaatggacattaatagattggaagaaatacaattcaaacttaaaaagggaggcctttctaggatgtatcaattgattctaacataaaggaagacaactcaagttttgaagagctttcaatatccaaccacatgtaatgtccacataatgcaaatattgttcttgttaagaggaggaaaaaggccagaccttggaagtaaggcaatcttttcataagacgtatgataccgatatttttcaaaattgatcagctgataaagaagctgacattatctttttcctctgatcgctagtatgtgtgtgtatccatgtaaatgtcaaataacttgcaaacaaatagcctgttagatgcttagtgagtcttctccactgaagttatgaaaatgtctcatgtcctttttgctgagttagtaaaaccttattttacactaaaaagaaaaaaaaatagcaccaaatgtattaccgattgcagccaggcgttcctttttttttgcaatcttttcctcctttgtcaagggtttctaaaatccaagttctgttgtacccttttctctct

SEQ ID NO: 2485 - DNA, 609 bp, Gossypium hirsutum
tcacattttcagagcccttcaatattagaagaatcatatccccatgcccatatctgaatatatgttggacataggcacttcaaagaaaataaagagttgtagtaacattggtagaaacatattttatttgtgcacgagaagaaaaaggtggagtgatttgacgttttgaacaaacttacagcaccagccgtccagtgaatagatttgagttcattgtgttcgattatgcttctatagacattattaagggttgtagattgacaatattattgcattgaagaaatcatatcattaatcagctatctctggaattctacagatctgttaactttaacaaaatcttgatggcatcaataacacaggatatttcaaattgtctaacattgtgtagatagggatatgcatgttgatgagaaatcataactttgaaaaccgtaaatgagtttcataaaatgaaatataaactgtaatgataggatgccatcgaattaagagcaatcaaacacagaaaccaaggatacatttgtattgcactgataatggcaccaaagaggcccaagaatgacatgagttcaactctattcgcattcttcacaagaaactcctgca

SEQ ID NO: 2486 - DNA, 623 bp, Gossypium hirsutum
tctctgtatttgtttgatttgagccatcgtcagcaaaaacggggtggacatttatccccaaaattatagctgcaaagaaaacagagccatcaacaagaattgtataagcagtaatcaattgtaagacgataaccgatcaaagaaaatatttgagatagatttaaaagtaacttttaaaaagctaaggcattttgtttggatgtttagctataccttaaaggattcaatgtgttttttcttgttttagttcagctcaaaagctctattacttaagaaaggataacggtacctttgatcaagaaggatgcaaggatcatggtttcagcaattaagatgaataccaaaaaaatgaatcatggatagcgtacagaaaaagcacagcagcatgcaaacttcattgccttttttcaagaataggaacatgcaattttaaaccgaaaatacatggaaaaaatgagacattagtatgaactaatatatcttaaatggtcaataattgaaactaaatactgatctaagaaaagtaattaaatcatttgatgggaaaaggaatttcagttaattttagcaacattttgctttacatttattgctttgatttgcacaatacatgtatctctaag

SEQ ID NO: 2487 - DNA, 456 bp, Gossypium hirsutum
  misc_feature (11)..(11): n is a, c, g, or t
  misc_feature (418)..(418): n is a, c, g, or t
aacatggatcnaggcctcctaaggagaaagaatctggtgcccaggataatttgaagtccttctgcattcgatttgtgcgtctaaatggtattctttttacacacacaaggtatattttctctgaaatgtttcacttttgttattgaccaagtatttttttgggggttttgtccttattgaagcttcctttgtgcagtccggagacttttgcagatgttcttaaattgggtagccatgatttatgcgaacttctgtcttcggggccccaaaaaaaattgagttttgggacacatgctactgagaaagcacttttccttgtgagggtgggttcacttctcatatttacagttcacaatctgaaaagggagagagaaactcaaacatatgctgaaattgtacagcgtgctgcgctgcttcncaaagcattgacagccatttctgagatgatgggataaa

SEQ ID NO: 2488 - DNA, 631 bp, Gossypium hirsutum
ttgccacgaaatggctttgaggatactcctagcctgcattgaggtaatttcatgtccttcagaaagcatgttctttaagcactcaaaacacattatttattatatatatatcttgttctgatgcaaaaagaacaaaggcatctagggctccttaaattcttttacttgcaaaacttttaattgattaaggacaaaatataactgtaatgcgttctcttaaaaatcttcttatttgacataattggtacttctttcttgaatacagagtcatgcaaaccgctacaaacgttatattgttcctgtgctatctgtccagatggacttttatgtccgtgtttttgttcgcatatacacgtaggttgcttcttgttttaatttagttcattaaagtagaagttattctcacataatgaatgatggaagggcaattaattcggtgcagttcggcaagtgcgatgaagaatactccccttaagctatcatatgtctatcagtgcactggttgtgatgcttttcatcttcagcctattgggagaaccgtttctaaggtttgcttcctgatttattgtgctaatgttgcctcttgtttgttagtaagatgctcatggattactccatttttgctcattca

SEQ ID NO: 2489 - DNA, 650 bp, Gossypium hirsutum
gtttgctatttgacttctgttccttcattttccttcaaagaaaatattaatatgcacctttaatctgatagttattaaatcttaatccaggataagcttaaaggttaccagaatatacagtatacaccatcacgtgaccgccagtggcatttatacactgttgtggacaagccagtaccaattcagaggatgttcctcagaacacttgtcaggcagcctacttccgatgatgggcttacagcatatcggggacttgatgttgacatgatgcgtagtcagtcagctatgtcttttacgtcaaggagcatcttgaggtccttaatgggtgcaatggaggagttggagattaacatgcacaatgcaactctaaaatctgaccatgcacatatgtatctttgcatcttacgagaacaacagataaatgatcttgtgccttaccccaagtaattaagccaatattaaatttctagtgcctttttttccctcctcttccttccgcatggtcggtgagcattttataaattttcttacatttgagatatttcaccaggagagttgacctagatgctggacaagaagaagctggagtagagtcaatcttagaagaactggctcaggaacttcatgcatttgttggtgtaagaatgcat

SEQ ID NO: 2490 - DNA, 1377 bp, Gossypium hirsutum
  misc_feature (350)..(350): n is a, c, g, or t
  misc_feature (420)..(420): n is a, c, g, or t
  misc_feature (424)..(424): n is a, c, g, or t
  misc_feature (449)..(450): n is a, c, g, or t
  misc_feature (469)..(469): n is a, c, g, or t
  misc_feature (527)..(527): n is a, c, g, or t
  misc_feature (529)..(532): n is a, c, g, or t
  misc_feature (537)..(538): n is a, c, g, or t
  misc_feature (549)..(554): n is a, c, g, or t
  misc_feature (558)..(561): n is a, c, g, or t
  misc_feature (563)..(567): n is a, c, g, or t
  misc_feature (583)..(584): n is a, c, g, or t
  misc_feature (586)..(591): n is a, c, g, or t
  misc_feature (593)..(593): n is a, c, g, or t
  misc_feature (597)..(597): n is a, c, g, or t
  misc_feature (600)..(605): n is a, c, g, or t
  misc_feature (607)..(609): n is a, c, g, or t
  misc_feature (615)..(627): n is a, c, g, or t
  misc_feature (632)..(635): n is a, c, g, or t
  misc_feature (637)..(651): n is a, c, g, or t
  misc_feature (658)..(659): n is a, c, g, or t
  misc_feature (667)..(671): n is a, c, g, or t
  misc_feature (676)..(676): n is a, c, g, or t
  misc_feature (679)..(679): n is a, c, g, or t
  misc_feature (684)..(684): n is a, c, g, or t
  misc_feature (694)..(702): n is a, c, g, or t
  misc_feature (704)..(705): n is a, c, g, or t
  misc_feature (710)..(721): n is a, c, g, or t
  misc_feature (726)..(731): n is a, c, g, or t
  misc_feature (733)..(747): n is a, c, g, or t
  misc_feature (751)..(752): n is a, c, g, or t
  misc_feature (763)..(764): n is a, c, g, or t
  misc_feature (767)..(769): n is a, c, g, or t
  misc_feature (772)..(775): n is a, c, g, or t
  misc_feature (777)..(788): n is a, c, g, or t
  misc_feature (792)..(809): n is a, c, g, or t
  misc_feature (812)..(823): n is a, c, g, or t
  misc_feature (831)..(848): n is a, c, g, or t
  misc_feature (851)..(852): n is a, c, g, or t
  misc_feature (854)..(860): n is a, c, g, or t
  misc_feature (871)..(874): n is a, c, g, or t
  misc_feature (876)..(883): n is a, c, g, or t
  misc_feature (891)..(892): n is a, c, g, or t
  misc_feature (895)..(896): n is a, c, g, or t
  misc_feature (901)..(903): n is a, c, g, or t
  misc_feature (905)..(909): n is a, c, g, or t
  misc_feature (916)..(917): n is a, c, g, or t
  misc_feature (921)..(923): n is a, c, g, or t
  misc_feature (930)..(932): n is a, c, g, or t
  misc_feature (934)..(936): n is a, c, g, or t
  misc_feature (938)..(950): n is a, c, g, or t
  misc_feature (954)..(955): n is a, c, g, or t
  misc_feature (957)..(959): n is a, c, g, or t
  misc_feature (969)..(981): n is a, c, g, or t
  misc_feature (983)..(983): n is a, c, g, or t
  misc_feature (986)..(988): n is a, c, g, or t
  misc_feature (990)..(997): n is a, c, g, or t
  misc_feature (1013)..(1013): n is a, c, g, or t
  misc_feature (1017)..(1017): n is a, c, g, or t
  misc_feature (1019)..(1028): n is a, c, g, or t
  misc_feature (1033)..(1035): n is a, c, g, or t
  misc_feature (1047)..(1055): n is a, c, g, or t
  misc_feature (1060)..(1061): n is a, c, g, or t
  misc_feature (1066)..(1067): n is a, c, g, or t
  misc_feature (1071)..(1073): n is a, c, g, or t
  misc_feature (1079)..(1083): n is a, c, g, or t
  misc_feature (1085)..(1093): n is a, c, g, or t
  misc_feature (1105)..(1106): n is a, c, g, or t
  misc_feature (1112)..(1116): n is a, c, g, or t
  misc_feature (1127)..(1130): n is a, c, g, or t
  misc_feature (1137)..(1142): n is a, c, g, or t
  misc_feature (1145)..(1155): n is a, c, g, or t
  misc_feature (1158)..(1164): n is a, c, g, or t
  misc_feature (1168)..(1170): n is a, c, g, or t
  misc_feature (1177)..(1191): n is a, c, g, or t
  misc_feature (1195)..(1197): n is a, c, g, or t
  misc_feature (1200)..(1204): n is a, c, g, or t
  misc_feature (1208)..(1208): n is a, c, g, or t
  misc_feature (1210)..(1211): n is a, c, g, or t
  misc_feature (1215)..(1224): n is a, c, g, or t
  misc_feature (1226)..(1236): n is a, c, g, or t
  misc_feature (1238)..(1238): n is a, c, g, or t
  misc_feature (1240)..(1240): n is a, c, g, or t
  misc_feature (1245)..(1245): n is a, c, g, or t
  misc_feature (1247)..(1253): n is a, c, g, or t
  misc_feature (1256)..(1259): n is a, c, g, or t
  misc_feature (1267)..(1269): n is a, c, g, or t
  misc_feature (1271)..(1289): n is a, c, g, or t
  misc_feature (1291)..(1297): n is a, c, g, or t
  misc_feature (1299)..(1312): n is a, c, g, or t
  misc_feature (1323)..(1330): n is a, c, g, or t
  misc_feature (1333)..(1338): n is a, c, g, or t
  misc_feature (1340)..(1343): n is a, c, g, or t
  misc_feature (1348)..(1350): n is a, c, g, or t
  misc_feature (1354)..(1366): n is a, c, g, or t
  misc_feature (1369)..(1374): n is a, c, g, or t
gatcattgcgacacatgacagcaagcgcatacaagtgcagcagagacagtttcacacaagcgccacactagaagtaattccaagaagtcatctacaaggggtgaggtatgttttattctattttgacagacgtcagttctatccaactgcaatacagtttcctacaatttgaacccgtcaccatcacaagtttctaattcccgatcccatcatgcttcttttattgcatatctggtgttgtttttattggttttatgaactaatacttttattgggaggtatgactctctacttttagtgcaaataaaactacccaatgtgctgagctctatgaaggagcaggcgaagcnaagctctatatgaaacacatgggaaggagaaaagctatggatcaggtcgaggtgtctcaagctcctcctnaganaaagggggtctcacgctcctcctcnnataagggacaaggagaatngcaatggatcaggtcgcggagtatcaagcttctcctcaaagaaagggtgtcacaagcncnnnntcagnnaaaggggatgnnnnnntcannnncnnnnngattagagggtgccannannnnnnangacncannnnnntnnnaaacgnnnnnnnnnnnnnatgannnnannnnnnnnnnnnnnncacccanntttccccnnnnngctanccntacgnagcctactcnnnnnnnnncnnttatnnnnnnnnnnnncctcnnnnnnannnnnnnnnnnnnnncttnnaatttctaccnnctnnnttnnnntnnnnnnnnnnnnacannnnnnnnnnnnnnnnnntannnnnnnnnnnntttccttnnnnnnnnnnnnnnnnnnaanncnnnnnnnattatcatcannnnannnnnnnncccttttnnacnnccccnnncnnnnnccctttnnatcnnnaacccannnannnannnnnnnnnnnnntatnncnnncctctgatannnnnnnnnnnnntntcnnncnnnnnnnncctttttccctgcctntttncnnnnnnnnnncacannntatatttctttnnnnnnnnntcccnnccccnncccnnnccctcnnnnncnnnnnnnnntctccccccctnnctttannnnngtctctacccnnnncctcttnnnnnnttnnnnnnnnnnnccnnnnnnncccnnnccctccnnnnnnnnnnnnnnntttnnntcnnnnncttntnnttcnnnnnnnnnnannnnnnnnnnnanangtttncnnnnnnnacnnnnctctaacnnnannnnnnnnnnnnnnnnnnncnnnnnnnannnnnnnnnnnnnncacccttcccnnnnnnnnttnnnnnnannnnccccnnncctnnnnnnnnnnnnnccnnnnnnccc

SEQ ID NO: 2491 - DNA, 176 bp, Gossypium hirsutum
acgcgcttattcagatagcaaccctggtctgtcgctccctgttaactcaatttcagtgtggtccattgtttgcttcaccccaacagatctcattgcagatgtgaagcaagattctggccccagagactgaagacaaaacgcacaaacaatcaggtaggcatgtaaaaaaaaaaaaa

SEQ ID NO: 2492 - DNA, 749 bp, Gossypium hirsutum
  misc_feature (664)..(681): n is a, c, g, or t
  misc_feature (685)..(689): n is a, c, g, or t
  misc_feature (692)..(710): n is a, c, g, or t
  misc_feature (712)..(715): n is a, c, g, or t
  misc_feature (717)..(728): n is a, c, g, or t
  misc_feature (731)..(735): n is a, c, g, or t
  misc_feature (738)..(744): n is a, c, g, or t
tatctactttttgtttagcttcccagtcctggctgcttcatgtggaaactttagctgattaacctcaatttttctgtaaggcacttgctattcggataattcccttgtcaaaaattaatccagacgcaatagcaggcaagatgaatccttagcaaagattttgaggtcaaacgttgcacaaaattctatccgtacatacttttattcattatccatcattttattcaccccacatagtctctaagcagctgctagttgaaccttttgtttgtaatgccttctcaaaaacatacatacagacaactcctaattaaagatagcttggaatattaatggatgatatgtcaaagttatcaagtgcaatgcgtataaacctttctcaactatgacaatgatacaagtctgtaataagtgtggggaaagctcaagttcactcaactaaaaaaatattctctatctcatcatttccaattcccaaatgccataattctgactaggttcagtttcagtaaattgccgcatttggattttgtctcgtatgtaatgccggtcggatctgttgaagcgtcagaatgacttggccaacattcacgtatagagccttggttggatctgttgaagtgtcagaatgacttggccaacattcacgtatagagccttggannnnnnnnnnnnnnnnnnaatnnnnntannnnnnnnnnnnnnnnnnnannnnannnnnnnnnnnnaannnnnaannnnnnnaaaaa

SEQ ID NO: 2493 - DNA, 630 bp, Gossypium hirsutum
tttgatgaacttctaaaaatggaacgtcctggtccagaaaacaaagatgctagtgatacagaggatgatgatgaagacgaagacgaggacaatgcagatgatcaagatgatgatggaggtgatgaggatttttcaggtgaagaaggtgaagaaggagatcccgaggatgaccctgaagccaatggagatggtgggagtgacgaagaggatgacgatgacgacgatgatgatggggatgaagatgatgatgatgacgatgatggtgaggatgaagaagaggaggacgaagaagatgaggatgatgaggttcctcagccaccttctaagaagaggaaataaatctagtcataggtcttgagatattctactatttcctgcttttttcctctctgggtgaggaaattttagtagggagggagattgcaccttgtttgtttgcttagagtagaagattcgtcattccaaacgaaccttatttccagcatttgtcatgtagtcatgttataggtggttatgatacatatcattgcatcttgaactaacagtcaaggcctatttgtttagtagaacttagtattcttagtagaacttgggcttttctagtatccttgtagggtttgatcaagcaat

SEQ ID NO: 2494 - DNA, 471 bp, Gossypium hirsutum
  misc_feature (416)..(417): n is a, c, g, or t
  misc_feature (419)..(419): n is a, c, g, or t
  misc_feature (450)..(451): n is a, c, g, or t
ggtggcaaccccaacttgttcccttgtttcacaacttcttcgacatcgttattccaccattcacctgcgtttcgattaacaagaattacatgaattgtgcaactaaaatggagctcaactcaccattatggatcaaatcatcccacctaaaactatgttagtttctctgtaaggctgaggaaaagggaaaggggtcccttgctttggcatgatcacaattgcaccataaacagtggctcttagccaaaagatatgtgcatgccaccaaagtgtccctctttgacctggtacattaaagacatacgtgtaactatgcccgttctgtatagggcattgtgttatataagctggttcatctgcccttccatagaacaactttttaaaaccaaatctgacaaagcgatggaatgcttacnncntaattgacatgccatattgtgaaaagaatgnnacattaatgaaaactctatc

SEQ ID NO: 2495 - DNA, 619 bp, Gossypium hirsutum
cttttttttcaggtttggcgcataaggacaggtcaatgcttgcgccgtcttgaacgtgcacactctcaaggtgtgacaagtcttgtcttctctcgtgatggaagccagttactaagtacatcttttgatagcactgcaaggttctaattctcctttgtgtatactcttttgtgtcaaatttaaatgtttgcatatgaagcaagcggttaagtgtagaactatttagctttgttttctcttgggattagtttcttttcatttgtttgtatttttttttctttttattctgaaattctcatgcccagactgttttggttgctgaattatattttttcatatccatagttgtgacatgttgacattatatgccaaatataatattgtccggttgcttctttccacccattattttttttcctggagtgcagagtccatggattgaaatcaggaaagttgctcaaagaatttcgtgggcatacatcttatgtgaatgatgccatttttacagctgatggaagtcgtgttattactgcctccagtgactgcactgtcaaggtaaattctctatgcatgtattttgaaatatcaatcttttaatcatgtcttcggtatctaactg

SEQ ID NO: 2496 - DNA, 567 bp, Gossypium hirsutum
  misc_feature (34)..(36): n is a, c, g, or t
  misc_feature (514)..(517): n is a, c, g, or t
tgcccctttgcctttttccttgaaaggttcattnnntctccccaatctcactacacactttcatgtagagacatgcatatataatccccagcctcattgctgcctttgccattcgtttgtacatgcaggaaaattaggccaaagatgaccctgcctatcttcctcaggattgttgttctcggcttcctggagtattgctctaaacttatcgcatctttatcatgcatttactaaatgcatgtaatttcttgtttgttgatatatttatgaagaaatagagttgacagtggaatatatatgcgcaggccagtgcttgaccaaaacttatactatctgggaatgaagttcacaacagcaacatattcatctgctttcgtcaacatgcttcctgctgttactttcataatggccatgattttcaggtaaaatccatcacttccattaacatatgccactgcacactacaccacaccacatcagataacttaaaaggttccatcatgatcttcatatnnnngataagattgaaggaaattatcattttttaatgggtaattatttagtcaa

SEQ ID NO: 2497 - DNA, 593 bp, Gossypium hirsutum
aaaacagaggtagaaaacaaaagtcatttacatcaataatgatgtagtaaagcagaaaaataattccttcaaactaggagaacaaactcatcatcttttccacccaaggtaccatcaaacatgtcatattgtctcatactgtctcatactgaacctatttcaatccagaagttggagtcgtctattcccgagcacgaagcttcccattattttggctatactttctatttttactatttcaaaatcctcaagttcggaggtaaatcattcagtggcttctatagagtgctaaaactgtggtgtgttactaatgcctacccatctagactatctgtttttcgcagctatataaacattaaatgttcgttaattgactcaggtgagagagaattcttgaggggcataaaaaatggagggaaacaaatgagatttgccaaagccttgaaatcagctgctaaagccaaaagattttggtaataggaatagtgaatacagcaacaaaaattgtaagaggttatttaaaactgtaaaatgaaaaagaaatgcctacaagattggataattctatgagctaagacatggacgaaagaaaa

SEQ ID NO: 2498 - DNA, 608 bp, Gossypium hirsutum
aaaataatatcctatatctgaaattaattttgaaaataaatttagtttagattaattatattaaaattaaatcatgatgaaaaatattgttgttaaaaaatcataaaaatatataaaatatcacttcaaaagttgatcaaaatctatggaaccaaaagttgccattgctgaacgtgacatgagataaagtaaaaaaacatggttattttaggaaatgaaaggatgttttttaaataaaaaatattaaaatgattttcttaaaattaaatgaagccttaatttttgttttccctctatcagtcggtcatcacttggtcagtcggccctgacttttaggaaatactccgtaaaaagaaatgtgtaaaatgaataaatatcccaaagcaaaacaaagtaaaaacattttttttacactcactgtatttaatccaagcttttctggattgtaacaaaaccctaaaagggttcttgtaagaaacaatcgccgcttgatttgatctcagccgtctactctttctctatatatcattaaacttctttcactcttttctttgatctctctgcttcaaaaataacgcttttttttttgcccttgaacttttttggct

SEQ ID NO: 2499 - DNA, 453 bp, Gossypium hirsutum
  misc_feature (23)..(24): n is a, c, g, or t
attggacagtaagctacatatannggtgcagctgggctcctatatgaatgtagtggttgcagagttttattgtggtatttttctaataaaactcacttgctataggtggtatgctttacttggcatgtatgatgttgctgtcactcatatgttggaggtcttggccagcactcatcagtcaaagacaacgcaggagctctttctgagagattttcttcagattgtccaggtggattagaagttaatttgatttctgttatgctttgttgactgaggaatccaaatttacaggagcttcttagatcatagaaaatctaccctatgtttggaaagtgggtttgtctaattagtttgttaggtgcgtgcaagtttaacaggattgtctaattactactttttttttttcttggataatacaaaaaactggaaaaacttttaaggggctcaaactat

SEQ ID NO: 2500 - DNA, 627 bp, Gossypium hirsutum
ggggagccaaatgggaaatatcccacttccccaaaacgcaatgcagtgacatagaccaaaatgtgacaatatcaaaatgcagggtaaaaataaaaaaataaaaggaccgatttaaaaaatcctgcaagagaagaaggaccttttgcgcaaatctccctcccctgccagaacacgcgaatctccccgcatccgggtcgggtcatcgggtcaaatgttaatacgacaccgttttggagccactgaatctagccccaaacagtgttgttttgaacactattaaaggcctctgaaaaaccctaaaaggaacttaagaaacaagagacctctccttctgctcccagccacctcacaggcccgaaatctcgctactatcagctccgatttggaacggagcaagcagcgattccgacggcgtgctcacaggtaagctccctcttttcttttttatttcgagctatttatgaacggagtagtaaaaaacaaagaaaagtaaagagaaaaaaaagaaattcaaaagccaccttacgaaactctgctcttttttttacttgaatatttttttttgcttcctttgtatcccttctctgtatgcgtaaaaaaggggaaaagagagccccctttcagtac

SEQ ID NO: 2501 - DNA, 1087 bp, Gossypium hirsutum
  misc_feature (20)..(20): n is a, c, g, or t
  misc_feature (43)..(44): n is a, c, g, or t
  misc_feature (589)..(597): n is a, c, g, or t
  misc_feature (600)..(626): n is a, c, g, or t
  misc_feature (629)..(637): n is a, c, g, or t
  misc_feature (640)..(646): n is a, c, g, or t
  misc_feature (648)..(651): n is a, c, g, or t
  misc_feature (653)..(654): n is a, c, g, or t
  misc_feature (658)..(658): n is a, c, g, or t
  misc_feature (661)..(679): n is a, c, g, or t
  misc_feature (683)..(693): n is a, c, g, or t
  misc_feature (697)..(705): n is a, c, g, or t
  misc_feature (711)..(726): n is a, c, g, or t
  misc_feature (731)..(760): n is a, c, g, or t
  misc_feature (762)..(762): n is a, c, g, or t
  misc_feature (767)..(782): n is a, c, g, or t
  misc_feature (791)..(797): n is a, c, g, or t
  misc_feature (799)..(802): n is a, c, g, or t
  misc_feature (804)..(806): n is a, c, g, or t
  misc_feature (812)..(817): n is a, c, g, or t
  misc_feature (824)..(826): n is a, c, g, or t
  misc_feature (828)..(836): n is a, c, g, or t
  misc_feature (838)..(839): n is a, c, g, or t
  misc_feature (841)..(842): n is a, c, g, or t
  misc_feature (845)..(851): n is a, c, g, or t
  misc_feature (853)..(853): n is a, c, g, or t
  misc_feature (855)..(864): n is a, c, g, or t
  misc_feature (867)..(874): n is a, c, g, or t
  misc_feature (876)..(877): n is a, c, g, or t
  misc_feature (879)..(879): n is a, c, g, or t
  misc_feature (881)..(881): n is a, c, g, or t
  misc_feature (883)..(897): n is a, c, g, or t
  misc_feature (901)..(903): n is a, c, g, or t
  misc_feature (907)..(913): n is a, c, g, or t
  misc_feature (918)..(921): n is a, c, g, or t
  misc_feature (925)..(928): n is a, c, g, or t
  misc_feature (935)..(935): n is a, c, g, or t
  misc_feature (937)..(948): n is a, c, g, or t
  misc_feature (961)..(961): n is a, c, g, or t
  misc_feature (964)..(965): n is a, c, g, or t
  misc_feature (971)..(973): n is a, c, g, or t
  misc_feature (975)..(983): n is a, c, g, or t
  misc_feature (988)..(1015): n is a, c, g, or t
  misc_feature (1020)..(1025): n is a, c, g, or t
  misc_feature (1028)..(1040): n is a, c, g, or t
  misc_feature (1042)..(1045): n is a, c, g, or t
  misc_feature (1052)..(1055): n is a, c, g, or t
  misc_feature (1058)..(1062): n is a, c, g, or t
  misc_feature (1064)..(1069): n is a, c, g, or t
  misc_feature (1078)..(1083): n is a, c, g, or t
cgaagcttcttaatgcttcncaacctagactaaactcaaatcnnttaaatgatagcttgaatatctaaaaggaatttttttttcttttttatttgaagatagaaaagaaaagaacaatggggtgttcattttcttggttgaatgctttatacgacgccgtaaatggtggaggggacgtttggatcgatgacaacaggttcaggatcgggaggcagttgggtgaagggggattcgcttatgtctatttggtgaaggaagtcatatccgacccctcttcaccttcatctgttggcttagccaaaaaagtcaaggacccttctcatctttccggttcgtccccttacaaaattcatctttttaatcttttttttttttgaggaatttataattgggttttttttctttttcatgggtttttcaatgatggggttctttctaaatctggggttttttttttattttggtcctccccttctggccctaaaataattcggttttttttttttttttggagggttttaaattaatttttttttttgaaaataaaccaattttttttaaattacctgccccgaaaggccctgcccannnnnnnnnaannnnnnnnnnnnnnnnnnnnnnnnnnnttnnnnnnnnntgnnnnnnngnnnncnntttncgnnnnnnnnnnnnnnnnnnnggtnnnnnnnnnnngtcnnnnnnnnncttctnnnnnnnnnnnnnnnntttcnnnnnnnnnnnnnnnnnnnnnnnnnnnnnncnctccnnnnnnnnnnnnnnnncccttcctnnnnnnncnnnngnnncgttcnnnnnngtttgtnnncnnnnnnnnntnntnnccnnnnnnntntnnnnnnnnnnttnnnnnnnntnntntncnnnnnnnnnnnnnnntccnnntccnnnnnnngctcnnnncccnnnnccctttncnnnnnnnnnnnngtggtgtgttgcngcnnctcgtnnncnnnnnnnnnctcgnnnnnnnnnnnnnnnnnnnnnnnnnnnnccctnnnnnngtnnnnnnnnnnnnntnnnnttgtttnnnnttnnnnncnnnnnntccttttgnnnnnntgtt

SEQ ID NO: 2502 - DNA, 619 bp, Gossypium hirsutum
tagcccgcttgcaatttcggttaaataataataaaaaagttgtacttcgataaaactagatttttcactgcgtttgccgggagtcgaacccgggtctattgcttggaaggcaattatcctaaccgttggactacaaacgcttgttgacagaattaagacttcaaaattgttattaaataattaaaatcttgattaaaaattaaaccgataatgaaattaataagcgaaaatgtaacaataacgatcaagctctctgctttaaaaatagtgaaccatccttcaacacaaacctacccccaatttttaacatggcttatcatatatatacataagatatgcagccttcaccaaaacgtcaactcatctttgcacttcgtagcactgcactctgcatttttcagttcttttactaatccattgaaatagaacaacccatttggcgcccgataccagaaaatgctcgactgttcttttttctggccacttgtggccgtatagaacaatggttaattaattgtccttgctccttttcttgtttgtatttttcatatccaacttatgtcattgcaacagaaatgtcactacaatctttacatctgttgaattggtttgttgggaa

SEQ ID NO: 2503 - DNA, 607 bp, Gossypium hirsutum
aaattattgcatttaaatcgacttgatttcatatcctattcactaattacatgcaatactatgcgtttaagttagaatgttatgtgaacttatcacattttttaaaaatgttaggtcatattttaaaattggttaaaatatgccataagtttttgtactctttgaaaatttgaaatttatccttgtagttttatttttaggaatttaatacctttactttcatatttcaaaattcaggtctaattattaacgatgttaaaattattttgctaaattcaagttcattacaatgttatttttgtagttatatggctactaagtgagcattttatgtatttcaaaatgtcaccccagcaaatttaataaaaaaaattaacaatgctaacaattggaattgaattttgaaatctgaaaagtagaaggactaaattcctgagaataaaagtacaaacactaaatttcaaatttgtgaagagtatatggatttatgacatattttaatcaagtctaactcataatgataaatttagccctcaacgtttatatcttttgtcaatttggtatttgttatgtttttttaagctcaatttgaccctcaacctttcaa

SEQ ID NO: 2504 - DNA, 587 bp, Gossypium hirsutum
  misc_feature (556)..(556): n is a, c, g, or t
tgaaggatctgtaagtacaaactttgtgattatattccaactattgcaatgacctaggatgtgtttcaaacaggacgaagcctaataagattctttatgtatcatgtttacataatcaatttgcagagataaatttctataattcagttatcaacttggattggttaatttttctgaactaaaccagagtattatggaactcattatttatactaatagtaaaatatacatggtaagctttaacttaggcttaactgttacattgcctaccaatacagtttagcacaagccttgtgtacaatactggaaatgaaatcataagccggataatatatacgattttcaaagaaattaaaccatcttcttcgccagtaaggattcagatagagaataattatggaagtaagaaagaaaatgatgtatgtggtgctaaatgttacggagaagaacacaggatcaatactataccatttctccttactttgatctacgaattttatcaggggatgcggtgacacgatgctacagttctcgttcaagggctgtccacaaaganattgatttccttcgtaactgcttctatcaaa

SEQ ID NO: 2505 - DNA, 626 bp, Gossypium hirsutum
tgaggcctcctttggcagtgccttcaacatcaccttcactccaaccttcacaaattgctccacctggattgccggtgtcagcacctacacttcctgtatcccaacctttgttccctgttgtcaataatagtgtaccgactcaaagctcaccattttctgcttctttgccaacaagtgttccagaaggaaaaggttcaattgaagcgcattcaagtggtagtgcttctctgacaggtagctatcaccttcttccctgctgttgtacttctacttaattttgactcaacttgcttcctatttttgtaacttctcttttaatttgcttggttataggcggagctggaggcaattctcattcttatgcctctggtccgaatactggtggtccatctattggaccaccccctgttattgcaaataaagctcctgctatccagccagcagtaaacgaggtttatttagtatgggatgatgaggcaatgtccatggtcagttcctaacttctctttaattgtgtttttatttgctcttttctagattatggttgcaaaattttattgaaggattttattttatatacttgcaggaagaaagaagaatgtccttagcgaaatatcagatgcatg

SEQ ID NO: 2506 - DNA, 615 bp, Gossypium hirsutum
tctgttgggtttagaagggagcgccggcgagacaggctcgagttcccagagggatggggattcgggcagggggcgttgacaaatcggatccaatcgatatgtttggtaaaagtcaagcattttcggttgtctcagactcccttgtctccacggcaccaattttatattatacgatgtaccactgttctccatgttaactatagtaggattcaaatactctgaaccaggggaatttgtcaaacatcagccatcagtgaaactaataaatgggttgaattgtcaacttttacggacaaagttgaataaagggttacaacattcttcaatgaatttgagcaatagttccgacattttagattgacatggaattatgtacggagaaactatacacgtataggcattccgaggaatcatatcatatattaggcagaatgccacaattattaatttattcaattaaatgtaaactatagcatggaaataaggtccctgcatgatctgctagccaaatgtattttctccactgtatgtaacgtacagaaatccgtcttcatcctttttttcatcatagatagttgacataattgctcctgcataacgatcatggctacttag

SEQ ID NO: 2507 - DNA, 622 bp, Gossypium hirsutum
  misc_feature (37)..(37): n is a, c, g, or t
attttctactgatcctgccctagtaacttttccaagnccatgtgttgagtggttcacatttatttttatctatgcaatttgtgatgttaaaatagaactttcatgttgcaggttggatgttttggggttgcacgagtttgatagcgtgcgcaagagaatgtcagttgttattagatttccagacaacacggtcaaggtgttagtgaaaggtgctgatagcacaatgtttagcattttagcagacaccgagaaggttgatcagataagacaagcaactcgaagtcatttgactgaatactcatcagaaggtcttcgaactctagtagttgctgcaagggatcttacagatgcggaacttgagcagtggcaatgccgatatgaagatgcgagcacttctttaattgacagagctgcaaaactacgtcaaacagcagctttagtagaatgcaacttaaaattacttggtgctactgcaattgaggataagctacaagatggtgtaccagaagccattgagtctcttcggcaagcaggaataaaagtttgggttctgactggagataaacaggaaacagcaatttctattggactgtcatgtaaacttctgacagctgatatgcag

SEQ ID NO: 2508 - DNA, 559 bp, Gossypium hirsutum
  misc_feature (12)..(12): n is a, c, g, or t
cagtcgtgaacnatctattgagaccaattgtattcaaagtccatccatgaatgcaaccaagtattcagtttcgggcataatgcagaaagtaggtgatattattcttcagtcttgaccattcatccaattgttcgttgcggttatcttattatgtcgtgttcggtttttgtcagaaatcaacatcaagactggtcgaggatggatcagtggcagaacttgctatggttactccggaacaacctagcccagtttccgttcttgacacctcaatatatcgagatgatgcgccatctccagtaaggcagatattgaatgcccccgaaggtaatgcttactggtttctaagatacttaattttgaaataaactgttccgagtttaacgaagatgcaaccgtttttgcttatcccggtaaccttttctacaaaatttacaactcacattgcacatatatttcttaggctatgaaaattatgtcatctttcattgcaattgccaccattgctattgttgtaatggagcgatcccgagtaacttttaagcattcataccccttccca

SEQ ID NO: 2509 - DNA, 633 bp, Gossypium hirsutum
atcagacatcatttccctcacattgagaacatgagcaaaagtgagagcttgtcttttagcactggtgacaatgatcaatcagttgtggatttgacttcaaacaagtatgcaggtaaacattaagattcgttcccacacgttgtatgaagtgtaaacgtcaagaacaaagtgaaagttgtactagtaaaatttggataggtaaaatatctagcggccctgagaacttgatttcctattgcttttggctttaaactcttttacattcaaaagctgtaggatattctgattcttccctaagttaacatagaacatatgactgacttaacatactgaataaaggcctggtttcttgtatggtgctgacttgtgcatctaggccaatggcgtgtccactcctttaactagtgtcacgatttgtgcaagtgattgagacaggatagcttcactctttgcttctgggtcactgtgaagcactttgttaaaaaaaattgtcacttctgatccatggagcataaattttggtttgaaagccgaaaccagatgagaattgtcttgctttaggtaaactaatccacgtaggtacatagagaattgaatttgactgtgttgtggaagacatgagtgctttcttgc

SEQ ID NO: 2510 - DNA, 611 bp, Gossypium hirsutum
gtttcctttctagtgacaatgaagtcatgcaaaggaaaggtaatgaccaggttttgacagttgatatacaaaaacgaaaagccttttaacatacaaacctcttctgcatcaaacaggttcccaaggtttaacccttttgacatagaaattaactcgaatgcattcatagctgttggttgttcgtctctctgttctgttacatggtgctcctgttatgttaaccaacatattgaaattattaagataaaaaatcaaagaagcaccaaatataacagcagttgtccaatatgcggatgtcaacttagagaaagactgcatcaacttacttcataatctttaaaaacagcttctacattgtctaaattcgtatcgtctttctccttgaacacaggaggcttgtaaccctttttaaaccattcatctttcaaaatttcaggaatagtaatgcgctgcaacatgagaaaaatatatgtacaaattaaccttatgctaagtcgatatgattagataaaagcaaaacaaaatcttgtgaaggcaaatgattcccaaacatttaagtccaacataaaaatgcatgaatacaagcagaatatgaaccttgaagccgaaac

SEQ ID NO: 2511 - DNA, 568 bp, Gossypium hirsutum
agtttttgatgttctaaattcattgtaaaatatttaattaaaaaacttaatattttattgaattaatatttttaatttcactcattgaacattattttcatttaataaaatatgattaatagatttttccatgtaaaatttaaatttttttattggaataatattttaattaagatcatttttatttaataaattataattaatagacttgcttatatgataaaaattataatattacttaaaattttaaataatatgttgttataaagaagtaatttaataaaagaaatgtacttcataactatgcttattgtggggatggcacgagccccgatctcccccaatatggaaaacttttcatttaggccctttaaaattttaaattagtaaaggtaaaattacaccttgaccccttaaaaatgataaaaatttgatttaatcctttaaaaaatataaagatataggctattaaaatgataaattgtatttttactatagtaaaaattacaatttaattttggtcccctaaaaaaattttatgatttcccctctggttataagtgaattg

SEQ ID NO: 2512 - DNA, 889 bp, Gossypium hirsutum
  misc_feature (543)..(543): n is a, c, g, or t
  misc_feature (607)..(607): n is a, c, g, or t
  misc_feature (654)..(654): n is a, c, g, or t
  misc_feature (820)..(820): n is a, c, g, or t
  misc_feature (835)..(835): n is a, c, g, or t
tctttcacataattaattatgaaatttataaaactaacgagtttaattaattagtataagttatctatctttaaaaaatatatacaggagagcattatgttgcaggcatgagatcaatttataagtttttgatgttctaaattcattgtaaaatatttaattaaaaaacttaatattttattgaattaatatttttaatttcactcattgaacattattttcatttaataaaatatgattaatagatttttccatgtaaaatttaaatttttttattggaataatattttaattaagatcatttttatttaataaattataattaatagacttgcttatatgataaaaattataatattacttaaaattttaaataatatgttgttataaagaagtaatttaataaaagaaatgtacttcataactatgcttattgtggggatggcacgagccccgatctcccccaatatggaaaacttttcatttaggccctttaaaattttaaattagtaaaggtaaaattacaccttgaccccttaaaantgataaaaatttgatttaatcctttaaaaaatataaagatataggctattaaaatgataaattntatttttactatagtaaaaattacaatttaattttggtcccctaaanaaattttatgatttcccctctggttataagtgaattgttttaaatgattaaaataaaaatataaaagttgattctactaaaattttgattattataatgaaatattgttataacaagttatcattaaagaaagtaattcaaacacattatttgataattgaattanaatgttgattgaatnaagtgggtagtaaaaaagattctgttaatatttatcgatatgttatttaaacca

SEQ ID NO: 2513 - DNA, 606 bp, Gossypium hirsutum
agatcctccttttgcttgaaccctgaaaacagaattgaagccatccacacgttctaacattaaaacctctatgcacccattggtttccttcataaccagcactatgtcatagtaccagttctccaagtccgaacatttaatttgaggagtccagttccgatataatgcccagatctcaccttgtctaggtgagatggcaaattcatccttagtaccggtagactctgcctttaacttatgagaaaaggagtcagtggaggtgtagacttgggaaccctttctactaaatcttccgcaacaagtaggcatgcttgtatcgtaccactcggttcttctttctgatcggcaaggaagaagccacgtcacatgtattttgaaaaccgggtgggactcgatgttcttaatctcaccatagtacttaggtaagccatcatcatcaccatacaatgcccagacctgaccaacaagaaacttttccttggttttgtcggcatcaaaattgtagaattcagattctgggatttcaaagatttttgaggccgaagctgaaggaacaggctcatcagatcccacagtaggcttcagtatttcacaagcagccgaata

SEQ ID NO: 2514 - DNA, 628 bp, Gossypium hirsutum
cagcagtgatgacgcaatcaaccttattacagttaagtgcaagtctgctctttgttgctttttattatccttgatgggactgttcaaattgacttttgcttggcttttgtttttagtctctctgttcatgggatccttgcaaaaggccatcggctgccgacgcccttcgacatcctttctttcaggtggtgtgtcttttatagttattttggtgttcttaatattgttctggggtgttcttttatgaggttaaaatggcaattatgttgttgctagtgctcttctgacataatttctctttgttgtgcagagctgttattatgttccgccctctcttcgtcccaaagcagctgtgtctggaactcctccatctggtttgttcaaagctcttaccaattttgctcactctttttgagggaattcgttatctggtttagtttgttcctaatatttaatttgcatgcatagttggggtgaaaggaacatgggaacagcaatcacctaggagattctctgggtttctacctaatgcaaagctcactggcaatcattctactctgaaggcaaatgcagctttgggcacaggtaatgtattttagtgtgtaataatgctctggggtagtcagta

SEQ ID NO: 2515 - DNA, 593 bp, Gossypium hirsutum
tggcagcgaacgcaacaaaaccaccaaaagttgtaagtgttcaaaacgatggccagaatcataaaagctcaatctatcctctgtggaagaagcattgatctgagaaaaaataataatgacttcggcattcagtgctatatgcaagtacaagatgccataagaagctagcatagttccaaagcatagatgatatttttacttcagcaggctgaaaaaataccacatcctggttatactttaaaaaagaaaagaaaagaattaaaagaaagttttagaaagttgatgcaatggtagaccaataagttttccaatgcacaaaactgaaagaaaatataagcagaatatcattgatcatcaaggtcaagataatattaaagcaaaagattgttatcatactgaggcccccaataaagcagtgtaagcattgcttgtcataagcctgttaggagcagcctgaaaagccgtctgcaaagcataaaacaggagagaaactttatcatcaaacatactgccacctgaatcactcaatgcaacaccaaaaaggctgcttgtcatttcggaagactcgcgtaaaccaaattcagatgcccatg

SEQ ID NO: 2516 - DNA, 656 bp, Gossypium hirsutum
ctctgcctcgaggtctaaaaccagtttgatacccttgtttataatatgttgtgaataataaccttgagaaactgaatctgatctgtcactaccactagactcagtatagtagacagaacttgaattactttgatgttttgaatcagttgtacttttctgttgaacaacattagcagatacatttattaagagaagaaatcatcatttgtctagcttcagcatccaacaaagcatatgtaactccagctaaatcatactcttgttgacttgaagtaataatagacactatgttttcatattcaggtggcaaaccattaagaatagtgggctgatgttcttcttcagtaataacttgaccacaactagacaatgtatcacatatgtgctttatctctgccaaatactcagtcatgcttttgtttaacttcttagcattgtgcaatttgcatctaaaatgcattttgtttgtacgagactgatttgcaaagacttgatgcaattttgactaaatttcataggatgaatctaaaccaattagatgtgcatgcaacataggactcacagaagacattaaccaggatgctaaagctgaatcctgttgttcaaaagcaatatacgcaggattcttcatttgcttaccagcagcaactttcact

SEQ ID NO: 2517 - DNA, 615 bp, Gossypium hirsutum
gatgtaaaatttgataatttaatggttaagttatgaagtaggaaagtagttatgaatcttaactatttgattaacaaattttctatcttcattttttccattcttcataccaagcaaagccttaaagtttttgagttatgcactttttgtgtactgttgcatagcaagtttcttcagatgaactatcactaagtctagggctgtaaatgaattgagcttgaacaaatgggcctcttttcgtgttcatttgtttatttttaagtttgtttgtgttcgttaagaatttcaaaatttttgtttgtgttcgttcgcttaagttaaacaaacatgtttgtgaacattaaacgaacatgttctcaaacatgttcatgaacatataattgaacatgttcacgaacaatgtaataagaaacaaaccaacaataaataaacatatatatatattattttttagatataaactagtcaaatataaatattaataattatattataaataaaaagcatacaaaccataatataagaacggacctcttttcatgttcgtttgtttatttttaagtttgttcatgttcgttaagaatttcaaattttttttgcgtgtttgttcgctta

SEQ ID NO: 2518 - DNA, 509 bp, Gossypium hirsutum
  misc_feature (434)..(435): n is a, c, g, or t
  misc_feature (437)..(439): n is a, c, g, or t
  misc_feature (461)..(461): n is a, c, g, or t
  misc_feature (475)..(477): n is a, c, g, or t
  misc_feature (480)..(480): n is a, c, g, or t
  misc_feature (503)..(506): n is a, c, g, or t
ctatcctcctgacgtgtaactttcttcatgccacaacttgtgcaagctctgcgatatgataaaggggtgagttatcactggaattatgggtatttatctatattttctgttgtcattgaggtgcaatactagaaagttaacctcacatagggtagtttgtaggcttgatgcttattaggtcaggctgagagctttcaggctctatctcaaaattttgacacaaggtgcggagatatacaaacaaaattgtgcatgagacatcttttatacaccgtgataatcaacattgtcgccattgttgcattttgtatatgtatatttgttactaatctgatttttatttcctccttctccttcccaccaaaaagaccttaatatttttatcacagtatggtatctatttctgtgttcggatgattgttaacttgactcanntnnntgcatctgagtgtttgatcttngtcgtgagaggtannntantctttccttgtcctaatagcctnnnntgc

SEQ ID NO: 2519 - DNA, 632 bp, Gossypium hirsutum
aaattattgtgggataaaagtaggaaattattgtatattggtgaggaagtagtgagagaaagcattgagggattgaggaagtaacccaatcctcatatcgacgcctctggaatcgatgggattctgcataaaataagcaacttgtggaattggagaaagcaatggagatacataggctgcttctccgtgaaaaaaatcaatcttgtggaatggcatcctagtccaatcagagacaagggtgagttgattcagtggagggagagtgccctgaggcccatctaacgcctggttatatgcaatcacatagtcgttgctaatcgaacgcttggcttcttttatcttgtctacgatatcttcatggcttcctgcctccagttcttcagctgttaaggcagcagaggctaatacataagcgttgccactgaagccttctggcagtgggggcaccgtcttcttccttatgtccacagcaaattgcaagcataccattgatcctttcatcactcctaatgccttggttcttgcctggagtcccaaaaaccaaaaaacactagttcattattgtataagtgcacattacctgtgtaaatagcatacgatcatctgcataaaattgaaccctcaaattattg

SEQ ID NO: 2520 - DNA, 469 bp, Gossypium hirsutum
attcttaacaacaaaaatggatgaaatttttaacagtttgctcttggatccaatgtgtaagactaaattatccaattttcaaatagagggagtaaaatgcaatttgactcttaatagaagagctttcatgcaacttttacctaaatttagatttttttgaggtttaaattaaatttagttcgagcatggatcatataacaggttttctgagtctcaaaattttttagactaaataattaaaaaagagaaaactcaaaattttttaaaactaaacaattacaaaatcgaataattatgagctcaactctaatgattatgttaaattagctgctaaaaaaacttgtaaattggctaattgactgaaaaacgaaatctgggccgtccaagaaagaacgatgtcgtattggaaagtgggcccatgacacgttgggtttattccattaaaaaaacgctccagatccaacatcac

SEQ ID NO: 2521 - DNA, 532 bp, Gossypium hirsutum
  misc_feature (11)..(12): n is a, c, g, or t
  misc_feature (479)..(479): n is a, c, g, or t
  misc_feature (524)..(525): n is a, c, g, or t
aaaattgagannataatacggttagtttttataaatgaactaactgtgaaatttgaagataattaataaaaaaaatactttaatactttattttagacaacagttataccctttattttatttgaatgataaaattgaatatttttggttgtttttcaacaaagtcatgacgacaccaacataatgaacagattctagcaataatatagatagataaacataatagaaaagaggtaactcaaataaaatacaaaagattaattaattatcccaaaaataattcaattcttttggaccattcatgatccattagcatcttcatagcaactcggatcctgtaaataatttctccttttcctgattttcacactatatgataataagtttcaaatcggtaagctaaaaaaaaaaaatttccaaagaaaggggggtaagaattattataccacccccttcttattttgtaaaattaattaaantttaaaaaatttcatttttaccccaaaatttttacaaaaacctcnnattaaaa

SEQ ID NO: 2522 - DNA, 624 bp, Gossypium hirsutum
catacatgagagtagttcttccataaactttctcatagtatttacgatcacgagacatttggctgaagttctcatttggatcatctacaagttggaagatttttggaagagaggaaagatgctgcaagtggatggccaagcgattactccttttaccttctagatatagtcggaggccggtcactggcctcttacccacatcaacctgttatgaaactagatatcagctgtggttccttcctttcaacatgaacaaggtataagacattgccaaaaaaaggccacagcttaaatgatgcaagaattaatgttagttctcaacatcacacccacaatatggaacaaagttgaattatttctcttcactatacctaaagaagatgaagtatcattgataggagttcccttgaagcatcctatatatatgtatgttattatagataaatcttgtctcattacaaaatgttataaccttttaaacatacaatgctgaagagactctagtgatcatctataaattcaacagcagcacatcaacatgttttgtaagtttaagaactactcaatacatgcatgggcgaaacctacatggtcaaacactcagatgcatcaaacaaaaaatcc

SEQ ID NO: 2523 - DNA, 608 bp, Gossypium hirsutum
tttcctttcagtatgcattctaattgcagtttccgtccttcatgttttatgaagctttcttttacttttgcaatgatatgttattgtatttattccattggttgaacatatactgcttttataaatgaataactttcattcaagatatcttaaccaaaaaaattgcctagattgtatctgatattttctgtgatctgtttgcgttgtctttgtctgtatgtcggaggggttaggcaggtttggttggaagaagaggaaaagaatacatctgtttttaacaaatgagtgcttgtttaatattactactctctttccccacacttccgtacgggttactcacattaaatttttctagataagccaccatattatacaatagcggcaaggcacagcaagtctttagtactgttcatccttctttcatataatttattgttgacctttcaaaccttttatttctgaaaaaatcaaaaattataggctgttctgcaaggtagcaaagcatatcggtatattttccccatatttagtgttatgaagctttcttctgtgttgaaatttatattgctactctctttccccacacttccgtacgggttactcacatt

SEQ ID NO: 2524 - DNA, 601 bp, Gossypium hirsutum
  misc_feature (494)..(494): n is a, c, g, or t
  misc_feature (496)..(497): n is a, c, g, or t
  misc_feature (503)..(504): n is a, c, g, or t
  misc_feature (523)..(524): n is a, c, g, or t
  misc_feature (530)..(538): n is a, c, g, or t
  misc_feature (549)..(560): n is a, c, g, or t
gtcctgacagcagaatgcagagaatcaaagttattactagcaccatttgagcctacagctacatcccactgcttgcaaattgcttctattatatcaccatactggaatgaagattttagcacatcaagtacaaagatgaggtcatctctatggtagtaattcgatgggcattcagcatcaaatgaatctaatctgcaagtttaacaatacaatatcagtaacaacaaaagtaacaacaaacagcaagtcatttaccctgacataagtaaatttttgtccccatattttattagatgaaggaaataaatgattggatcctgcttaagacacaatggaatctgagataaacaaagattggggaaaataaatgccaacacattcagaaatggacacaaacaaaggaaaaaaacaaatctcgaattctattaagacccgataataaactcccccatgaaactaatttaataaaaacaaatctaattgattcataaccnanngaaacnnttaaccatgactggtttcnncgactnnnnnnnnnaagtttaaagnnnnnnnnnnnnatttcacaaattattttactgcaagtcacaaactcttctag

SEQ ID NO: 2525 - DNA, 477 bp, Gossypium hirsutum
agactctcttttatttttggaggtattttatgttgctgaaatatagaaatggactatgtctagctatggaagttatatttgtacattagctctttgatgttaatcttttttataatttttgtttccaatagctgcctcaatgtctggagaatttgaggaagttgctggggaaagtgaagaaagacgaagggccagattgggacgtcatcaaaggacccaggacagagtggtgcgtatactctcaccttaaagtttatttttgctctttcattattaggcgtcaattagattagtagcagtgttgtcaaggatgctaggcttattcaaggtgcaaagtcctctatatagcccgaggcgcaaaaaaagcactcgcctgagtaaaataaggcgcatgcatatacatataaatacatattacattgtattatggttggtctgttagttaaaaaataaataaaaaatactttactttcacct

SEQ ID NO: 2526 - DNA, 391 bp, Gossypium hirsutum
tattttcatctttctgtttttctctccctcaaattttctttgttcaattccaagcatcacaataaaggcataagttaacccgtccttaaacaccctgatccactttcctgtaaatgcaaatgataaaattagatcactaaacagtcttgctcatataggcaaccaagtggcccaaacattaacccagaagcgggtccaagaatgaagaatggcaaaattctatacttcggaccaaaatcaaggaaaatgaaaggaacaagttggatgcatgatgaggcaaaggcaaccattaaaaacaacctgttttagaagggtgtctatataacatatcctttgatgtaacaatatctggaactggttctccaatttgcctgaagccatatgtttctgc

SEQ ID NO: 2527 - DNA, 631 bp, Gossypium hirsutum
gtctatttgcatataaaatttttttttaattaaatttaaatagcctttaaaagatatatgaattacaaaaatagatctttttgatttttttattttttaaaaataataaacttaaaaattatataaaatttttatttaaattattcaatatatccctaaaaaaatttcctccagtttatctaaattcaaatatgctagggcatgaattgggtttagatttagataaacttgaaaaaaaaatttggaggaatatatttgggtaatttaaataataattttatatattttctaaatttttttattttaaaaaaatataaaaatgagaagatatattttaagggttatttcagtttaattttaaaagaggacagattaaacatataaatggaccaaaagtttaatttataccctgattttacctacaaaagataattacttcattacgtccttgaatgttttacctttgtatacttcagttcagtgtcgtaaatttattaaacaatattaaatgtgtccatgaacggtcgaaccaaaattttgtgaattccgttttccttagttatgggatttaagtttcttttctttggtctcaatgtgtcgaccaaaaacaattgtgtcatgggatttaagt

SEQ ID NO: 2528 - DNA, 670 bp, Gossypium hirsutum
  misc_feature (636)..(638): n is a, c, g, or t
cttccctgcgtgtaaacatggtctaaaaacagtgtactgaagaacatatatggaggaaatgcaggttataatttgcagttaaaatttcgagtattgttgtatattctgcaacaatgtcttttatgttgtatattctgcgtttatcttgacatagtcgtaacttaagtcacacccccatgctttaccgaatccaggtccatcacctgttatagatcaatcacagacattaaaatccaaagaggaagacatgtataaaggattaagggcataatttgcagagaaacttaccaacagcaattttaatttccaccgttccatgtgtctcaccagccttaatgagatagttgctggctgcggtcctggaatacatggggcaactacatattaggcatgataaagatttgaatgtatttacaaggtcacttcctaaccccttctaaataacttgtaatttctccttaatcaccaatggggcataactttacctgtcaaattcaagtggttgcccaccatccatgagcataatatccccaagcagtatctggaggttgtttagattaaaagaaatccctgcatagccagcagcagcagcaatacgtccccagttcgggtctctcccatatacaagcagcctannncagttcgggtctctcccatatacaagcagcct

SEQ ID NO: 2529 - DNA, 503 bp, Gossypium hirsutum
tgtctcaattcttgggtttggagcatggcaatgcaggagtcttttaacactggggattatgttgatgctgtagtcaatagacagagggctgaaagtattagtagcatactataccccgacgatcgttcttatcaggtgtgattgcttttccttaacttgattggttacatcaagattagagtctgcctcatcaattttttcatgcttcgttttttaaagtttttactgcaattgtttgatttatgggaaattaaaggtacttagtcggagattattaatgttgcattcactgaaaacttggttgaaatgtttgctaggggttgaacaaatatgtttctttgtctttctgtagatctacattcatatttctttagggtttttagctgcatgtttcatgtgtttattagtgcagaagcatatgtagagacacctcaaatcggattagtttgtactgatttgatcatgtagtgaggtgacatgccttggttctaccctcctgaatc

SEQ ID NO: 2530 - DNA, 444 bp, Gossypium hirsutum
  misc_feature (440)..(440): n is a, c, g, or t
gttcagctcttggagatactctaatataaatcttgctgtctctgctccatatctccgtcgtccttcatagatccattgatttctagcatgccagatagcccagatagcgcaaatgaacattcggcaactgtcgttctctttgtttagcatgaaccaggtaaaccaatccaagaactccaaatgagataaatcctggggccaatcatatcgtaatgtattccatgtttcttttgtaacagtgcaatcacggaatatatgctccctgttctccaggccttgcttgcatcttggacatactccctcgtttgttaaccttttgattcttagattcactagagtaggcaaataatgtaaggtggctctccaaactgtaataagtatttttgaagggaggtcactatcccatagcttgttgctattattactgatttcgatagcanggaa

SEQ ID NO: 2531 - DNA, 654 bp, Gossypium hirsutum
ttttatagggttaccatgagtttctacgtattccagtcctattatttggattaagaattttatttatttatttaaagataactttaatctccgctcctaacttactctccattaatgaattttaattctggtaacttgaaggattttttagaaaaattttagttttttccttttagttccttttaagaattaattttatttcttgatttaatggacactcgatcccaatcccctattaataaaactaaattgattattttcaaaaaaataaatgtaaggtccttgaggtattatgcactacaaaattgttttctttaaaatatatttaagaaaacatttttcctctttgagaggaatatagctttaaatatgcgtattactcaatatttttttttcacaattaaaaaaagaaaaaaattgagtattaaacataaaacaatatataatacttttctaagttttataaataattttcaaaaaaaagtataagtacaagtacaataaaaaatattttttttaattaattagaatcaaaatcaattcaataaaagcacaacaaactaaaaatcaaaatatatctaatcaattataattagaataaactcaatacaaaagcacaacgaattaaaagtcgtaatatatttggatagggcc

SEQ ID NO: 2532 - DNA, 618 bp, Gossypium hirsutum
aattcaaataatctaatatatacacactattgtttttaaagcaaaaatggaaataaacttatgccgacgactggtactatatttatatcacacatgtatatttaatgtatgaatacttttcatgggtaaatgcaatattttagtgtaaaaataaatgttttatgtgtcaaattgttttaatattatatttgcattgcctcgaatttaaacctatttcctacaacataatacttttgtcgttaaattataatttttttttgacaataatgaaataattcttaaggtactattagtaaaagtaatatgaaaattcttgtattaagagttggattatattttattttattttttattcattaaatgagtaagctagcctcaatacattagatcaaagggcaaaatgatctttttgttaaaaatttcatccatttatattgttaaaaagtggtgtggttgatgaaataacatatgtgatgaacatatttttaacaacagaaatgaataaaatttttaaaagaattactagttttttctttaattaacaaacaatgactagcttatccattttttagtggaggggtaaaatgcaatctaaacctccatgtaaagttgtccatg

SEQ ID NO: 2533 - DNA, 425 bp, Gossypium hirsutum
tgtaaaagtagttttctttgccctttttaaagcacctaaggaggatgaaaggagtgttgttgggttctgaaagtgaagcttgtaaatgggttgaaatgaaagatgggttgcaaatgagactattccaggtcttacaaaccgacctgcatttcaccaatgactttattgggagtcttttaaggatttcaaggatcacttctacaggcaaataatcagacatctttttcttttttgctcagtttttgaagaaatgaaatcgaaatgtatataaggggaagaagaagaagaagaagaagaagagactaataattgctttgtcaatgacaaccataatattttaagaattttttttatttttcttctgtaatctaaaagctttcactttactttatgagataagataagggtgggttactttgaaacaa

SEQ ID NO: 2534 - DNA, 617 bp, Gossypium hirsutum
tattgagtctccaagccacgacaaccattccaacttaataaatcctggaaaaaatatcggagaaactatcaaagattgccctgcccaatcaagcctgcgaacgatgcaagaatctataaagatttcaacatcaggctttcttgatgctgctaagcattcagcagttctctttaaagatgatagtcaatctacaaccaaagggcacactcagaagaatcgagccaaaacaggattccaccatgcagaattaacagcaactcgtggcgtcctaaaagcaagaaattctcggaaagtaaaaaacctcaaagtcaacaaagaaaaaggtaacccctttaaggtttctgctttaaaaaactcactatctgattctatcattagtatggttgaattactgcaaacccaagtccaacaaggactggtaaatgaaatccctagaggatttgggaaaacaggagacaatatagagacaaagtagtagttttaaattatttcttttctttaataccaatgaactctagcatctcaattttttcttggaactgcgaaggatgtgcgaatgaaaaattccttcgtacttttagagagtataatagagagcataagccagacattgttag

SEQ ID NO: 2535 - DNA, 633 bp, Gossypium hirsutum
ctcttttccaccctccccaaaaaacatagcagtaagccaataagtgttattacaacacaattccttcaaggaactatttcaaacaacaataatttgagagcataagctaaactccagaaaaaagtaaagtttttcattctatagtgaaaactccaaaatatcatttttaagtgctgcttttgttgaaaattagtttttaaacttcactcaaagaaaaaaacatcagaagcaagtttacttgacaattgaaccagctaactgagccacaatgatgaaggtatagaaccacagcaaaataatactgttaaagaaagaattaaagaaggataccaagatgcacatctaaaaattaaaaagagaggtggtaagaacttacatgcacggtttgcatttgatgtaaatctgcaagagccttctgtcttgactgcaaataggaattttcaggttatgcaaatttgttgacagcaaaattcaatatttcacccacaataatcaggaaaaggaaacaaaagagaaagctaagataaaccaaacatagaattatataacatcctaaatgatatttcaaaaaaatgccaactcattgttttctactaaagctatcaactttctctacatatacttgcaaagctg

SEQ ID NO: 2536 - DNA, 639 bp, Gossypium hirsutum
gagtggcccctatttggcagcaagacaactcgaatttttcaaaggaaggaatgactccggaccaaataaagactcattggcagatgccttggctattgctcaaatcaagttgttataggtgccaagaagcaatacgtggccaatgattatgcaaaaaggctatcaataggctacactatcactcagaaggctgttgcatcctcacttgtttgcttaactgatttgaaaccatccatcagctataggaactcaaccacaaatttccagcagtctccacttttgaatatcacttactgccttgcaacaggaactgaccattctcatggaaagatcttgtgtgttgtgatctacaattctttgggatggaaaagaaagtaagtagtacattttgctactgttaatgaagatgttagtgattttgagggaagaaaagaattgaatcaaagtttgttccaattgataactaagcgaacctaagggactattacagtagggcatatatcttctgtccaaatggcacatatctcataaaagttaacagttcttcgcaacaaagatcaaggatttggaaggggaacttgaaaccactagcgagggatgtgatgaaaacatgcagcatcgattggatatggagttaca

SEQ ID NO: 2537 - DNA, 620 bp, Gossypium hirsutum
ataatttctgaaggtcaagccttgcaggtaaactacatttctatatgggaaatataaaggttatatttttgtggaagttaagtgtcattgatcttgcaggctggtgagctcattgctaggcttgatctggatgatccttcagctgttaggaaagctgaaccattccatgggagcttccctgtactagggcctcccactgcaatttctggcaaagtgcatcagagatgtgctgccagtataaatgcagcccgcatgatccttgctggttatgagcataatattgatgaagtaagtgtttctctatcccatagtaatatggtcatagggattaaattgcacaagaaatcagcaaatatcttcttcagtagtttttttgtcaacttaccaagttctcttaattaaatatctcttaaacaatgggtgcatggtttaagttgttaagcatccaacctaagctcaattgtaaatgggtgtagggcctaacatgaatataagacttctggaaactcaatagtcaactgatgtgggataacactacgaacactccccctcacacgtagctctcaaaggcctacatgtaggcaacctccctgggggtcagcaacttcacatggtgttag

SEQ ID NO: 2538 - DNA, 525 bp, Gossypium hirsutum
accctggaagatgtggagtaaactaccaagctgtggacaacatataacatttcctacaagtgctgccaaaggtagagaacaatcagatgctgttttccccatgatattcgagatagcagaaaaatttacagggcaccttccagttaaatttggttcatatgttgtggggaaacttgggtacatgggtggtacagattcgtcaggagaagggtatcgtggaatgacagcaggggatatttctataggttcaaataatgcagtagtcggtggattagctagctcagacgtggaaggaatgtgactagggtcatgcaatgtggcaacatcttggaaactcgataaccaaaaaatgaatattaataactgttggcatagggaacctgaaaccatacacaagtcacatttgtatcaataaagggataaatattcaaaagataaatatagtaagttctggaacgaaggttaaagtttaatgttaaagtaccatgtatacgttttgccagtaaggtaaacacaaagaacaaa

SEQ ID NO: 2539 - DNA, 466 bp, Gossypium hirsutum
  misc_feature (412)..(412): n is a, c, g, or t
ttttgtcaacagtttccattagttaccttgatgccatattaggggtctgttgtcaaggtagttcctcactattttttgtgttatcttacattcatgcattaaattttttatgctttagttttcatattaattcttataaatttaagaaatgcataaagtttgaatgaaaaagcatgtgcattttattacattacttgtaagcccattcatatctcccttatgaaatcacattctcaaggtgtcatcctaaaatgcactgcacatagcttcaatcagggagacagcctgatgcatgctcaagtaactcatctaggttctgcatcacagccatatgccattttatgccagagagtttttgcgaatcactgccctgcaccgtgaagtgttttctgagctatatctactacttttntgttttttaacatgatccaaataaagatacaaatttgtatttttggtgtcttat

SEQ ID NO: 2540 - DNA, 629 bp, Gossypium hirsutum
tgtactcagttcattgaattttgagtatttccatacgtgcatatgtacagtgtttttgatagtcatgactattcaagaattagctgctgcatacaagaaatgaatttcattatttgattctggatgaacaaaacaggatactcattcagcctaacgtggataaacaaaacaagcggagaggaagccgagttggtgtaccgggtattgtcattagggacatttgagagagttgcaccggagtggatgagggacgtcatcatgttcagcacaaatatgtgccccattttctttgagaggttagctcgtgtaatcaaattgcattgctaaccagtaagttgtctctctggtcttggaattagatgtgaaaaagatatgtataacacttgggataacaaatagttgtcaagtcatatctgactaaatctattgccgagtttctgcatattggttactaaattttttattctttgtttgggactttgtattttaccattcaaaattgcaggaacttctgtaattgataaaatatgttttgaaaaccactagagtaatttacaaactgggaattatcagaaaaccactaggttattcaaatgactagttttctttcatctttattcctttcttgt

SEQ ID NO: 2541 - DNA, 663 bp, Gossypium hirsutum
  misc_feature (654)..(654): n is a, c, g, or t
tttagtcgataatatttttcagcttaatttctgacttcttttattgacattaattttagagtttagtaatttttttaatttatatttaaatttagattttgtttagatgtgatggtgtgacattttaatattataatattttattattttaaaattttaaaaaatatataaaatctaaaaaaaaattataaagaaaattttatcaaataatgaactttaatgtaatctaaattcaagtataaaatttaaaacatgtcaagttttaactaatatgaaccaaaaaaatttgagtatcaaatatgagaaaaattatgaaatctagggactaaatactactttatctcatgaaataaagaaaaaaaaaacatttcaaaatattcttcctaaatcccttaatataggatcttgtcaccccaatgatatttttgccttcacctctcactaggacccatcactaggatccaggaataatatgattagtggagctattattgttgaaggagcaattgacatgcaacttctctaacaaaagattcatatggacaactaaaattcaggctagattattactactaagatccattattgtgattcttaaatttctcaacatcttttcttgcaaattactcaaaacaagccgcaaatggaacaacngtaacctgg

SEQ ID NO: 2542 - DNA, 930 bp, Gossypium hirsutum
  misc_feature (135)..(135): n is a, c, g, or t
  misc_feature (244)..(244): n is a, c, g, or t
  misc_feature (713)..(713): n is a, c, g, or t
  misc_feature (811)..(811): n is a, c, g, or t
  misc_feature (883)..(883): n is a, c, g, or t
  misc_feature (912)..(912): n is a, c, g, or t
  misc_feature (917)..(917): n is a, c, g, or t
actctcgtgctccaaatagtggtaaaggagaagtgaaatgaaacaaggatgaagtaatatttagtcgataatatttttcagcttaatttctgacttcttttattgacattaattttagagtttagtaattttttnaatttatatttaaatttagattttgtttagatgtgatggtgtgacattttaatattataatattttattaatttaaaattttaaaaaatatataaaatctaaaaaaaanttataaagaaaattttatcaaataatgaactttaatgtaatctaaattcaagtataaaatttaaaacatgtcaagttttaactaatatgaaccaaaaaaatttgagtatcaaatatgagaaaaattatgaaatctagggactaaatactactttatctcatgaaataaagaaaaaaaaaacatttcaaaatattcttcctaaatcccttaatataggatcttgtcaccccaatgatatttttgccttcacctctcactaggacccatcactaggatccaggaataatatgattagtggagctattattgttgaaggagcaattgacatgcaacttctctaacaaaagattcatatggacaactaaaattcaggctagattattactactaagatccattattgtgattcttaaatttctcaacatcttttcttgcaaattactcaaaacaagccgcaaatggaacaacngtaacctgggccactccaaagtggggtggaaagtggaaactttttccaacccttgatgacatccacctcctccaattcgtctccttctaccaagatgntactgattttccgaggctcagagctatgagctttgtgcgtttctaaattttacattagtttctcttcacttnaactttttttttcttggatttgtacaaanataanataaggcagttga

SEQ ID NO: 2543 - DNA, 615 bp, Gossypium hirsutum
tatcatcttaaagtataagagtagctgtaggctgttaaggtataatgaatttcccctcaggtgtatttatatgaatatcatgcagccaaaagagtaactattctatcgcaatacaaaaagcatagatagaactctttaccatctttcggaactttcagcatttctactacagttggaaaactgatgtctgtgtccttgagaggttcggtcaccaattcaccaagtgccattgatctccttacctccctaactgcattatttccttttgtttcttccccagatctttcagggacagtgaacaaggcttgcaagatttctttccccagcgcggctttatcttggtttcctcttggagatcttttagaatttcttatcataggtgcagcttcttcactgcaaagggtgctaagaataatagtggcccaattaaaaataagaaacaacttatggcaacttcccaatgaacatctttggttcagaaaattatgaaatccaacaattcaacaaaacaaaatgaaactggaaaaacacacctttgagaaaattctttggattgcattttttctcggattaaaaaggtttggtccagacaattccctgtgatctgtagaaaga

SEQ ID NO: 2544 - DNA, 540 bp, Gossypium hirsutum
ttctgatgattcagaaagccaaattattatgggcaaagatgggaagaaatctgccgatataaaaaagggtttggtgtcttgtcaccgttgtttgatatacttgggagacttagcgaggtacaaaggactatatggagatggagattctaaatcacgtgagtatgcagctgcttcgaattactacttgcaagctgcatcaatttggccatcaagtgggaatccgcatcatcaggtttttccattttcctggttaatagagtattcttaacttttacgcccttataatctttctgcacttgttttgtatttcttctgttcaacaagattctgattttttacatggtcaattatctccttatttcagcttgctatattagcttcatattcaggagatgagctggtggccatttatcggtatttccggagtttagctgttgataaccctttttcaactgcgagggataacttgattgtagcatttgagaaggtatgagtgcaaattttagtttctattcgggtttagggttttggacattaatg

SEQ ID NO: 2545 - DNA, 485 bp, Gossypium hirsutum
ttgggataatcttaaaagaaatccaattctgatcctttttttaaacttatttaatcaattatattatttaaaatagttaaataaaaaaattgacctaaaaatatcaactttaacattataaaagtgcattttcaattcaaagtgtgatctttaaaactatataaaagtgccattttccgcagactccactagctttatagtcctttttcaaggggatattaaatccagcctcgtgaagaaaatcaacacagtcctcgatgccaccaaagtttcagtaatacatgttaaatttacatctaaacaagtagataaaatcgatttaaccctttcagcattccccaatctaatattcttcctgcttcattatttctagctcaaatatatctcaacaaggcaccagaggcagcagaatattctctttgccaaaaattgtcaattttaaattgaatatcatggtgtcaatcaatcagtagtttgaccgagga

SEQ ID NO: 2546 - DNA, 626 bp, Gossypium hirsutum
gattttctgatttaagcattatatcaaatcaaatagaccttatgttgatacactagttaggctgttagggtttcaactgcatatgcttttggcctcatttttttaaactgcttcagtaagtgagtttctactttgtttcattgctcgtaaaagggctaaattttgcattggtataagcttcagcaatgcttgagcaggaacctttaatggtttgagttcctgcaataaatctggacagctaatctcagtagtttatatttacaagttttaaggttctttgaagagatttaagagtttgcttgacacgagacaatatgaaaatggaaagtgcagtctttggaactcaaactaacagcaattgaaacagattttaaaaatttaggggtcaattcagttctcaaatataaattgtgataagctcagcagaagctattaaggcagagaataaagcaaattgccgcttactcttatttttaaggaattgatctagacatgctaatggtggctatgcttcatctaaataatctcatcataagctattaagggagagaaaaaagcaaattgccacttactcttatttaaaaggaattgatctagacatgctaatggtggctatgcttcagcta

SEQ ID NO: 2547 - DNA, 664 bp, Gossypium hirsutum
  misc_feature (19)..(19): n is a, c, g, or t
tcggggttgggggggggantttagttctggtcataatcactgtcagtgcattagcacagagtacctatactatgcatgatgtttaataatttgaacctgaaaacctgaatgcttggggcatagcatcattctatagattttgatcaaatggtatggatataggcaaaagcaataaaacaaaataaaaatttacagctcaggatttaccatcatgggctttctcagcagtatccaacacctttcctgtttccaaacatagccactgcaatgttggaccacgggttgctgccagtatctttccatcaggggataagctgagacgatcatagtgcagagcagaaccacttgaatcatgaagtggtattggaaacaccttcagagtttttggatcctcagaaagatggtatcgaacttcaacaaagcatttacaacagtcagcagggacaaagtaataactccactacaagaaatagaaattgttaccaaactaagtctatcttagcataacaatctgtaagttaacttcaaaacaaaagaaaagttttctcttcttccaaacaccaatcgtgtcttttaaatttatggaggttattagtaccgatttctccttccaccgcccaaccctgactgatccttttatagtgttaggtttggaaggaaagac

SEQ ID NO: 2548 - DNA, 635 bp, Gossypium hirsutum
  misc_feature (11)..(11): n is a, c, g, or t
  misc_feature (618)..(632): n is a, c, g, or t
aagcttggagnaggagttggttttagggtcataaggaagcaccaatggatcagaatcaagtggtgccaaaacaggacaagaaggtgagattgaagctctaggactaatcttgaagctgggatccacattaactgaatccttttcttctgcaacagtcttcggaaccgaatcagaattgttttcggactccttgtgatcaaattctgccttgcttttcaaaggttcctcgtgttcatgagtcaaaccccatggagttgattcggtatcagcgaatggcaccttctggtttaagctaatctctggggttgactcagtatcttcaatgattatgcttttatcagaaaaggaaaccttcttctggttcgaaccaatctcctgtgttgactcaatatcttccgtgataacgcttctaacatcagagaatgagaccttcttctgcttcagagcaacctccggcgttgttgcaccgttatcttccatgattaggctctttacatcagagaacgaaacagaagatcgagctggctcatttctctcaaccaagatttgctttcttggtgatgcattgatctttgaagcagcagagattgttggtgacatgaaatcttcgcaccctcnnnnnnnnnnnnnnnttt

SEQ ID NO: 2549 - DNA, 636 bp, Gossypium hirsutum
  misc_feature (48)..(49): n is a, c, g, or t
ggtatttgctcagtcacacaggcagcgtttgatggatggtgagtgatnngtggaaagcaataactcttaggagcaacttcagtttagttacaagtatgccatacataccatgaagctaatttcattagtgagtcaacttcttaatataagctggtcatgaatttccataaaaaaacaaaatttttaatcgattattctcataaatttttaaaaattctaaccaaatactaaaatttttattggaagatgttagatatgttgctatatattataaattttattatccatatagaatgttgttatataaatagatatgttggtatatattatagattttagtatttgtataaaatattgtcatttaagtagatatgttgttataataagattttggtagttattataaaaatgttgttatatatttagatatgttatatatattatataaatagatttcggaaccagtgatgtggcatgttaaccccgacattgatcggtatatctaactttgtaatcaaatactaaaattcctattgaaattccaactttgtaactaaatactttgtaattgtgcgtaggtgtacccaactttataaccaaatactcatttatatgcgagtgtacccaactttgtaa

SEQ ID NO: 2550 - DNA, 606 bp, Gossypium hirsutum
gttgtggtggtggagcagtcgaacttcccattccagagtcaaatgtctcccatttcgttgtcaccgaggcagctttgttactgtcgtgaaatggattggaatttctggctttcattttgtccagtgtctcgtggaaaccttggacacgacgtacctggccaagaaaaaaaaaacaatttgatacaacagagtggtgcttgacacatgatcaaacaggagattatatatttgcctaatctaaaaatttgcataaaatccattcctctttcaacacaaaagtaaaagatgatgctctgctagaattcgtgcaccaaaattatgtctagattatggccaagagagaacaatagcagttctatatttctcatatagagtagtcattggcaggcatgaaaatgcaattagagacttattagacatattcccaatatcggtaaacgtatcattgaagcccctatgctaagagtaagactgcattttgccccctctactcaaaaaagggcaaattagaccttgtacattatattaaagagcaaactgatccttctattaaaaattccatccatttttgctattaaaaactgatttttgtacttcaccataagg

SEQ ID NO: 2551 - DNA, 329 bp, Gossypium hirsutum
tatggggaagggttggttttcagaccaaagagcatagatagatccgaagaaggtgagggaggcaaaagagagcagttatgatgaaataaataaataaaaaggatctaaacagaatcaagagaataaacttgggtaccaacaaaaaacaaatcaaaggatgaaaaagaataagagagtttatatttatggctgaggaagaggaagggactcaaaaggaaattaagagagaaaattgaagacaaaagaaataaaaacaacaaagtcggggcgtcgcgtaacaaaaaaatgaatctttgatgtttgagagagagagagagagagagagagag

SEQ ID NO: 2552 - DNA, 482 bp, Gossypium hirsutum
ggtggggggggaccccctctaaaggcccctacttgggaaaacccccggggattggaaaggttggataaatttgaggtaatttaaatttgggttaaatttttttaattttgattttattttggtttgaaataattggaatttaaaaaaaaatttttcaaattaaaccaaattttttttacaatcaaaattaattgccaacccccaacctccacccattttgatccaagaactgaaattgaaagcaaaaagaaaaaaaaaaaaaagtcagttaaatccaatttaattatgtattttgtcaaccaacaatctgaccgacacaaacttaatcaaatgagccgattataactagtcatcagtatcatgattagaagattgaaaaatgacttgggaactgtgaaactgtcataacatttgtatttgacttttgaatcaacaaatccaattttaatcaaagacatgaagttgagagcagcaggatagaa

SEQ ID NO: 2553 - DNA, 566 bp, Gossypium hirsutum
actgctatttcaaaaggcattttagctggctcagatgattgtgtttctgagggtttaacttctggatcacgaacttcaacattgtcaatcttggtagtttgaactcccgcagacaattgcttcccaccatcaacttctgtagcagaatccctgttggcggattcagcagtaaaatctttcaaagaagacaacttggtctcacagggatctactaccatatggcgaatctcagcaacatcaccctccttatctcgaaccaccggggattgtagcaaggctccaccatcttgtggaacaagctctatatcagcagattcagttgtactagaaagaactggctcaggtatagggttcttagagtcatttcccccagattgaccctccacatctcggttttcaacaggagcatcatccaaagtagcggcctcatgggttggagtcataccttcaaccacagaactagcttgatgattgtttgagttttctatagtttctggacctttaacaacaatggattcagtccttataaccatagaaggcacgactgacttgtcaaaggcaagatc

SEQ ID NO: 2554 - DNA, 632 bp, Gossypium hirsutum
cccagaaaaatgaaaggtggggaaatcatgaacttgataatagaacatgatatcgcacgagaagaggggcaaaaaagtcatacaaccatcttcacatataagagaggaaaattcaaaattttccaggctaggataaagtgtttcttgctttacctgtaggcacccatcttcacatcccacagcccagaagtttgcatttccagctaaaacagaaacttttccagagatacgatcagaccaaagagtttgagacccttttgtgcaaataatttctgtttctttcatcatacatgcatgtccaacaccagcaatgtcattcatggcatgttcccttagacaagcttccaagcaaactggagtcatgtcctcgccttctttcttatcaaaaacactaattgaaagagatgtggaagaggaagcagtggaacttgaaggtctcatgcttccagacttttctacattgatgctatgatcttgagcagcagagactggaactttctcaataaccaggctgtcagtaacagtagccctggcagtgacccctgagcgctcctttaagtcagagctcctaccaacggtacccctgacagaagcttctctcaaaccaacatcagaacgaactgcaccattat

SEQ ID NO: 2555 - DNA, 641 bp, Gossypium hirsutum
caagagcctgataccaaattctttgccttgcaggtcagtcaaaacgactgttttctctttgatctataataacaagtacatcaaactggcccaagggagctctagttgacatccatatgttgtctggtggtgcttgtacctatagtttgctcttgctcttgtagttggctagttgattgatagtttgcaagaactttttctaacaaatgactagagtattgcaaattagtgatgattttggggagcttttcttgtgctttgcctacaggttcttgaaggtgttatcaagtataggtggaatgcgttgcctgttgagcagcgagatggaatgaaaaattacatttctgaagtcattgtccaggtaaaatatttcttaattgctgtttctctttaggactgaggaatctgaaaaatttgtacctttcgtcccattttaattcttctctctttgtgttatcatcctgaaatgccctgctctagttgtcaagtaacgaggcctccttccgagcagaaaggctgtatgtcaacaagcttaatatcatactggttcaggtataacttatctgcctcacaaaatattcttcctaaaaaaaaaacaacttggtttaaaatttctttgatttggaaccaaataagaaggc

SEQ ID NO: 2556 - DNA, 625 bp, Gossypium hirsutum
tgaatttcccaaaggtattgtcaaaaacaatattaagattcttcttactcaaataggtcatcttggctttatataacagtttcccttaacaagctggtgccgtggtgcaccctttttagctagtatgtgcaaatagtgccttttctgagcttttcttatttcaactataggtacagaaaatttcaagtccaatgccatatttttattaagtacgacataaagagatttaatattttccaccaaagaatagtaggaaataattatcatgactcgtggagctttgtgtggatattaaagtttttccataaacaaatgatggtgtgtccatatatgtctacatgttgatgataattttcatctaaatttattctacaggccatattttgttattggattacatcaaatttgttttccctctcttatggactaggtgagtccttgaatttcttgtaccatgaaacaggacttattatttctcaagaattttaggtatgtccatatatcagtcacctcgaaacctttatcccttgcagtgcttaaggctccccgggttaagaaggctttaggcattcctgaaatacctgatcaaccagcagctactgcatcacaaccttctatcgatctg

SEQ ID NO: 2557 - DNA, 411 bp, Gossypium hirsutum
aacagttgggtgcttcgctttttaaggtgagggataagtgtccactttatcggatggatgggagtccagtggatccagatatggatatgaaggtggagacagcttttaatcggcttttggataaggctagtaagcttaggcagttaatgggggaggtttccatggatgtttcacttggggcagcattagagacgtttagacaggtttatagagatgcagtaactgaagaggagattaatttgttcaattggcatcttgcaaatttagaatatgcaaatgcaggattggtttcaaagctttcacttgcattttgggaccaagatgatccatatgacatgggaggggatcattgtttcttgcctggagggaatggaaggttgattcaggctctagcagagaatgtgccttaaa

SEQ ID NO: 2558 - DNA, 472 bp, Gossypium hirsutum
gctctcctcagggaaaaggatgaagtagatgaactaggaagctttaccatgttgacataatcaaggacccgcgaatccttcatagcatcagtagagttcttcaacatcacctgcaagttccaatctatttagaatgacttaaaatggataaacaattaaaggaaacgattacagaaagaaccagaccgtcttaaaattctgcatcagaataaatccacttttgttaggccctaacaatgagaattgttcccggagataagcaagctgtgggatagtcaacgtctttgcaagagcctgccataatagggaaatttcatccaacatacccatagtcaccaaggctagtctttacatctttatatcaagaagagaggctaatcttaagaaatttaataagttaaactgaaatataatagaatcatttagtgtacaaaatgtcaataattcagcatctctcaactagtataccaaa

SEQ ID NO: 2559 - DNA, 612 bp, Gossypium hirsutum
ctggatgtgaaatgaagaacatttcttgtgtagagggaaagtatatatggttttacaatgagtttttagttttaattttgttctttccttctaagcagattgtctctgctgttctgggcatgttcggatttgcaaatatggcaagcgatgtctgggtaagtcttaataaaacaagagaaactaattaaacccgtcaaattgaggtacaatcaaatcaaatcctgaaataaaagaaaacatgaaacaagagaggttctaggaaaaccttcctaatcttttacttcaagcaaggaaactaaagaaactaatcccaaaagtgtagggaacaactttgaaattctaccgattaaaatgtcttcagctgcattagcatgaaataaacaactcgaaaaagtgatccactaacaaatgaggtctttgcttgttggttaaggcagaggccctgggtccttgagtacccaagttcgtgtcgcaccatgtaccattgcgatgtgtgggtctttgtcccatcgtgtgcgagttttgtctggttcttcgtttgttgtgcttttgttttcaaaggtccttttagggccatggcttaacaggatgaatgttgacaagtgttcatct

SEQ ID NO: 2560 - DNA, 520 bp, Gossypium hirsutum
catcatcataatagagatgacatagcatgccagaactaaggaatatgaatgctagaatatttgaaccatcatgctatttgtaatagtaatccattgctatctgccgaggtgaaacaaatcgattaattttacctacgttcacattggtaaggttcatcattgctatattaagaaaagtagggaaataagagcgtttcaaggacttaggatcaaagcaagttctggctcaaagaccgacagaatcagtagtgaactgaaaactagtaaaaaggaggattatgactacgggtgtgcaaaattcgggtaaaaccgaaaaaattcggttaatcgatcgaattcggttaatcggtcggttaaccgaattttttcggtcgggggtcggttaattatatttttatttttcggttaacggttaattcggttcgaaaccggtcggttaatcgaattttttcagttaaccgaaaaaattaataaataaaattataatatataaataggctcactattcacctaaacccat

SEQ ID NO: 2561 - DNA, 661 bp, Gossypium hirsutum
  misc_feature (652)..(658): n is a, c, g, or t
tattgaattcatcaccagtttttatctttccatatatagttaaattactcttttatactatactcttattattaattacggatactgttgatgtaggtgagcgtgttaatatttgttattaatgatagtatcattttaattattttaatatacatttatttttttataataatatacatttattttttttattgtaaatggggtgatgatttttatttgtttattattggaaatttagccccattcttttatttataattgtttgttacttctctgttccatgcgcaatcatgttgccatagttttaaaattttatttatacttttgataaataaatatgagatacaaacttttatttaaaaatgtttatttccgtgtttgttgttttttcggtttagaaaatagaaagtgtcatcgcataaagttgtattgatatcaagttaaaaacagcttgttaatttggtgttgatagacatatagttgaaagtaatgaattgatcatttgtcatatttgatctaccaaagattacattggcatatccaagtaagaagttagttgaattctatcaagggaaatgacaatcggatataaacaactcgtgcggctgaggccgttggttcgagttggacccttttagttcataaggctacnnnnnnngcg

SEQ ID NO: 2562 - DNA, 617 bp, Gossypium hirsutum
tttgattgtggtatgtatgctcttttctttcaatttgcacaaagaaagatgacccagatcatcttattgccactaaataaacactaagaagtcaacaatctgaaccagtcagctacccgctattctagacaacacactgacaagcagacagctcaaaataaattagtcattcatgacttttctatgatttcccttcattaatgactgcttagtttgtcaaatctctagactataagtgaagtatatgcattgttgcaagaagaaccatggaataggcaaatgcaaaatactcatgatggatttcaaagccttggggcatgcttcattacttatatcatagcataatctgcagatatgagtggttcaaattacttattttctttcttaatgcatagcagtgtgaatatcacagtgggagagaaagaagaacgcatgatgatgactggattgcacactgttgttgatatattctgtgttgggtgtggctcaattgtgggatggaaatatgtaagaactagtttttcagtttttggcgcatttgccggtttgattccttttcaaggcttaggtgcatgagttattttcagagaaccttttctcttctgctaacgttgtga

SEQ ID NO: 2563 - DNA, 543 bp, Gossypium hirsutum
gctggtaaaaaactgacataaaatcatgtggaaaaagttggttcccaaacctttctcaaagaacttgaagatgtcaacccatagctgaggctctttagaaccaggaatttccacttgatggaatctacgaagttgcttagcaatttctgcagccagcttaggctttttcatgtctgtcaaggggaaagataaaattatcagtgcaaagattgcaggcccaacgatagctagcagttgagttaaagaacaatttccaatattaaaggtagtaattacttgcaaagaagtcagtgacttcttaaattaaatttaatatactatgagactatgtcaatatcaataatagttatacaataaacagggaaataaaaggctttaagagaggaagacaaatttcttgagcatgcttccagcgcaaaacatgagattaagctgctcaaaggattaatccttctcaaatttctaattccaaaaaaacacaattccaggggcagttttattccctggggtgacccccctaaggctaactggcggggttaaagg

SEQ ID NO: 2564 - DNA, 830 bp, Gossypium hirsutum
  misc_feature (615)..(617): n is a, c, g, or t
  misc_feature (619)..(619): n is a, c, g, or t
  misc_feature (621)..(633): n is a, c, g, or t
  misc_feature (638)..(642): n is a, c, g, or t
  misc_feature (645)..(663): n is a, c, g, or t
  misc_feature (670)..(676): n is a, c, g, or t
  misc_feature (687)..(694): n is a, c, g, or t
  misc_feature (696)..(711): n is a, c, g, or t
  misc_feature (714)..(715): n is a, c, g, or t
  misc_feature (717)..(720): n is a, c, g, or t
  misc_feature (722)..(729): n is a, c, g, or t
  misc_feature (731)..(736): n is a, c, g, or t
  misc_feature (743)..(756): n is a, c, g, or t
  misc_feature (759)..(766): n is a, c, g, or t
  misc_feature (779)..(787): n is a, c, g, or t
  misc_feature (790)..(793): n is a, c, g, or t
  misc_feature (797)..(799): n is a, c, g, or t
  misc_feature (806)..(823): n is a, c, g, or t
tcacgattcgtctttctgctttgatcatcaccatcttctgtctctcctttcaaacttgcttatgagcaaaagcaatgcatcgtagactactggctgccatgctttggattatggtttcgattctgtcccttccgtcttcgctcatcgaccgtatgatcccattgctttcataatattgtgaacacatggctacaatcatctctgcagctcctttccaatgtatgtgtaccatttcatcagcctttttctgaactgataccccgctacgctttttctccgagttgaaggtttcaacgtggagaatgctgtattgttgcttcagcttttccatattcatatccaagcctaggacaccccaagacagaattgccttctcggttggactgcctgaaaactcgggaagggatcccgagacaggtttgcagacactaccagttgtgttcaatccaactccttggtagaataattcaagaacacttggggcaatttttttggcaagatcttcttcaacggactcttggctgagccaaaactgggtaactttcatctgattcaatgtcaaggtgccagttttgtctgtacaaatgattgtagccgagcccattgtttcacagnnngnannnnnnnnnnnnngggannnnnggnnnnnnnnnnnnnnnnnnnaaagggnnnnnnntcaaaaaactnnnnnnnngnnnnnnnnnnnnnnnnacnnannnnannnnnnnnannnnnntcgggcnnnnnnnnnnnnnntcnnnnnnnntctttattttttnnnnnnnnnaannnnaagnnnttccgcnnnnnnnnnnnnnnnnnntgggaaa

SEQ ID NO: 2565 - DNA, 564 bp, Gossypium hirsutum
tctgccacctcaaattttgttgggacttatttggaataatatctttttaagtccccaatttcctattgttttgggttcctttgttgcaattataataaattactcccacccagtccaaaaccaaattaaaatacctaaaatacattatctatatcataactcaaaaggcattatatcatctatttccattcttaccattatttatataacttgatattgttgaaaattcaaaaatcatttatataatattctaagaaaaccatttatataatactttctgtttgcatccaaaagaaatttatttgtttaatttaatctataaaaattatttaataaattaattttgttgggtatgcctgaatttcgatcgggctttgacaaaatatcaagttcatatttcaagtgaaactaaaatgagtaaagaaagtgcttaaagatactttgtttaggtctgacctagacccgacccacccacgaattggcctagctactacttgtatcaagtcatctatctaaacttataaatggtaaactataagaatattcacctaattatgcctttgg

SEQ ID NO: 2566 - DNA, 642 bp, Gossypium hirsutum
  misc_feature (69)..(69): n is a, c, g, or t
tctcccgccgtcgaccgctgccattgccgctttagatgctggcctctactccgaagccatacgccattnctccaagatcgtggacggccgccgtctcgcccctcagggcttcctcgcagagtgttatatgcatcgagcctctgcttacaaggcatcgggtcggatagcgtcaatctccgactgcaacaaaacgcttgctcttgacccagcttgcatccaagcgctcgacaccagggcctcacttttggaaacaatacgctgtttacctgattgtttgcacgaccttgaacacttgaaactactttacaattccatcttgcgggataggaagcttccagggcctgtctggaagcgtcacaacgttaggtacagggagattccagggaagctttgcgcattgaccactaaaattcagcagttgaagcaaagggttgcttctggggagactgcaaatgtcgattactatgcattgatcggtttacgtcgtgggtgttcaaggtctgagcttgagagagctcatttgctgctttgtttgaggcacaagccggataaagctaccaactttatcgatagttgcgagttcgctgacgagcgtgatgttgactcggtcaaagacagagccaagatgtcggctctgcttct

SEQ ID NO: 2567 - DNA, 357 bp, Gossypium hirsutum
atgcggtggtcagaggttgcgccactgttacagcaaccggtaacggtggtgttggaagcggttattccatggcggatttgcaccctcctcagtctggtgtttcttcgtttggaagtgaagaagcttttgagggtcatgctttgtcttccccaaatcagttggaagaattgcatgagctttacaagcctttcttccccaaatctcagccactttccccacagagcacgcctttatcttcactttcttctatcagcttctctaaagaagcgcggatagaagagcaacagcagcaatctaagctgtctctcgctgcctctgttaccactgctattactgcacctactaacaattctgcga

SEQ ID NO: 2568 - DNA, 625 bp, Gossypium hirsutum
atctgcatgagacgcataattgagagaactatcaagcccagagcctttcaatgatgatgccaaccgatatccatccaaccaactataatcatccatcacaggggtttcttcacttggtggctttggaggaacagggccaaaacctggtggggggccaagatgcctaacagcaccattaactggattattatgcatcccaacttgtgaagctgaggtagttttagaagccaaagcatcagcagcaactctagacgacacaattgtatcaattccagatgggatcacagtttctggcacttttgtctgactgtagtacataccgccagcactagcattgataggttgttggatagcaaaagagtaagcagcaggatgacgaaggcctagattatcttgcatctcatgttttcttaaatgcccattttccaacattgtcaaagccctcaaactattagacagtgaagtagcttccttcactgaccacctagatgcatgcatctgaacaggctgtaactgctgagagtgaatgctaccaacagatgcaggcagtggaggactagcatcagatttattatgctggtgaagactatcaagagaagcagacacggtactgccatagaaattg

SEQ ID NO: 2569 - DNA, 579 bp, Gossypium hirsutum
  misc_feature (569)..(572): n is a, c, g, or t
atgtttttaatataacctttgttgtgcaaagcgctgctcctctaacaccctcattttctcttgaatctctaccaattgttggtaccttgaccagtggagaactcaaggggcgctggcagtagcctcactctcttaaaatacaaaattttctatttaagttgttttataatttataaaattttaaattagtaatggtaaaatttagttttagccccccaaaaatgataaaaatttaatttaatcatttaaaattataaagatataggctattaaaataataaaattatatttttactattgtaaaaatatacgatttaattccgctcttcaaaaaaaatttctaatttcacctctaacttgaatatgaattttggaaggtttaaccacctgataaggcactagtgttacctcgaaaatactgagaatagtaccagggtggaggaaattggtaatattgaggataagttgcataacaagggtattgagaatcatgaggctgctagggttcttgaggataccttgatgggattggttgacgttgtctactgctaatttgaggttggttaaannnntagagtt

SEQ ID NO: 2570 - DNA, 595 bp, Gossypium hirsutum
  misc_feature (447)..(452): n is a, c, g, or t
  misc_feature (454)..(456): n is a, c, g, or t
  misc_feature (462)..(466): n is a, c, g, or t
  misc_feature (489)..(493): n is a, c, g, or t
  misc_feature (546)..(551): n is a, c, g, or t
  misc_feature (557)..(562): n is a, c, g, or t
cactagactgaatttttaaattcgaacaactaatataagaatagtaatgctgcttagtgtcttgaaaatgctgcttatactagggttacagaagcttttaatcctagctcttggatgcaaaaaagcctgcttgcatttcaaagtcattaagtgttcacatgctagttatataatcacttaatataaatataattgttgaacatataactaaataactaacagaaaataatggataataattaacttaatatagtttagggttggaacaagagcagtattttatgttttagggttctagactactgaatgataactgaatataatatggcagcctaatgtgttgaaaagattattcatactggactacagcagctattaatctttaacccttggacacaaataaatccacaaaaggactgaatcaaggttttctgctgctggagaagnnnnnntnnnatgtgnnnnnggccctgctgttggggagataannnnngacagaggaaaccgtatatcaaccttgcatgccttattacttttactagaaannnnnngagaannnnnnaaaaaacacccagataacaactgatactttttt

SEQ ID NO: 2571 - DNA, 641 bp, Gossypium hirsutum
cagggtaggagggaagaaggtggttctgtttatgcaaataacaagtctgttcctggtaaaaaggttcttgagaatgaagagagtttaactaccccaatggcttcagtagatcaaactccaaggataaggcagactaggggaaaccaggagctgaatgatgagttaaaaatgaaggcaaatgaacttgaaaagctttttgcagagcacaaacgtcgggttcctggtgatcaattaagttctgcaaggagaagcaagcctgctgatgagcagattgaacaggaaggaagctcacagtacaacaagcctgtggcagtagatgtatctcctgtgcagttgcctgacaaaaactcaacatctgaatcagtggggagcttgagtaatattgctaacttttgtactcctcctacaaagatggtcaataaccaggactgtgctgatagtttgaggcaggatttctctagtatcagcttttcaggtgactctagaggaaaattttacgaaaagtacatgcaaaagagagatgcaaagctgagggaagaatggagttcaaaaagggctgagaaggaagccaaattgaaggctatgcaagatatccttgagcaaagtagaactgagatgaaggccaagttttctggtactgt

SEQ ID NO: 2572 - DNA, 620 bp, Gossypium hirsutum
catgcttactggcaggattccaggatcactttctcgtttgacaaatcttacaactttggatttgtctggaaatttgctgagaggtcctattcctgttgaattcggtgactctctcaagcttcagggcttgtatttggggaataaccagcttacaggaaccatctctgaaagcttaggtcgtgtgggtagtttggtaaagttaaatttgactggcaataggttatctggtgtagttcctgcgagttttgggaacttgaaagagcttactcacttggatttaagcaataataagcttgccggtgagctaccttcgtcattgtcccagatgcttaacctggtggggctctatgttcagaagaataggctttctggtgagatacataacctgttctcaaattccgtgtcttggaagattgaagacttgaatttgagtaataacattttctatggaagcttgcctcaatctttgggcaatttgtcttatttgatgtacttggatcttcatggaaataaatttactggtgccattccttcagaaattggtaacttgatgcaactagagtattttgatgtatctggaaacagattatccggacagattccagaggaagtgtgcagtt

SEQ ID NO: 2573 - DNA, 624 bp, Gossypium hirsutum
  misc_feature (58)..(61): n is a, c, g, or t
  misc_feature (530)..(531): n is a, c, g, or t
ttctacaacacaacattgcaaggaactcatttctctgtcattaaattaaaagataagnnnntatgctttatctacttttcaaataaatagacatctgagtaattcatgcaccatgcaataattaccctgttcattctgattccacttcccacaatacatcctcacaccaactagtacaccaaagttatagaaaatttgagttaagataatctttaaaactttgaggaaaaacaacaaaaaagatgcgagttcaggaagctgacaaataagaggttaatgtagcattctcgactataaatttgcatggttgaggatcgctgtcctgaatatttagttttcatgattttttaaaaagggggacacatccaagtctacccccacccccttcccctcttatttttcctttttctcaactgacttgaacggagttacccacctaaaatacagttaatcaaataggaaaaagacaaataaggtcaactgttaactaatcagaacatactacttaatagagtaccttgtacacagcnngatgcataatcagataggaagaagacaaataaggtcaactgttaactaatcagaacagactacttaagagagtaccttgtacacagcaggatg

SEQ ID NO: 2574 - DNA, 631 bp, Gossypium hirsutum
tgatcatctctcacagctgattcctcttaatgtcgataaagaaaatatagataagattaagaggttaaggagatcatccgattcaacttgcgtcattttcccacccaaggtcttccgagttttggagaagcctgtgcatgaattccaggggcacagcgcagaaattttggctctttcctggtctaagaaaggggtaaagttcctaggcttcatcttccttgttaagttgctttcaatctctattgacaaataaaaatataatatatatcctttattgtagtttctactgtcatcttctgtcgacatgaccgttcgtctgtggcaagtgggatactatggatgcttgagggttttttctcataacaattatggtaggccttccataaccctaatcctagctgtacagaaatagtagttaattacatttttttgttttgttagctggtcatcatctttcattacacgacattaacatgtgtattattctgtagtaacttctgttgccttcaaccctgtggatgacaattatttcatcagtggttcaattgatggaaaagttcgcatttgggaagtgcttcgttgtcgagtcattgattatacagatgtaagggatatagtcactgctgtttgt

SEQ ID NO: 2575 - DNA, 644 bp, Gossypium hirsutum
  misc_feature (589)..(589): n is a, c, g, or t
  misc_feature (639)..(640): n is a, c, g, or t
gacggctggggtgtcgaggagcaaggctgtcaaggctctcaagactcacaagggggacattgttagtgctattatggaacttaccacttaagttgtttttcctgtcttgcagtgcattctctcaggctgtcgatgaggttgctgaagttcggaattagtatcaacattctagtagttgcagtagttgcagcagttgagctaggtcatctttaatatctttttctgattttaaattttctccctgttcattatcagcttccatgtgactgattgcttctttacccttggtgtaacaaaattttgcaatttgattcaacttatttttggcccttcagaatatgcaacaacagaatttttatatgatttgatgatgagaaacgaattaatgtttagcttcttaattttgggtaataagctaataacttttattagttatgatttttgatattttacttgaatgaaaagtagagggactaaaataatcaaattatactaatgaaaacggatagtacaaggccatctgtataatttgaccaaacaaaaaaaaaaaggcctttgcccccccctttttacttggaaaaaaaaaggnctttctttcaggaatctaagaatcttccccctggccaacccaggggaccnnaaaa

SEQ ID NO: 2576 - DNA, 577 bp, Gossypium hirsutum
cttacgctttggaccatctttgccaccttccctgacagctgcaccaacaactaattagctcattcatataaataatggctataatactgagaaacacaaagctccccaactattaagttcttgtacttaacttacccatgctgtagaatctatacctaaggctttgagttcatcttcgtcaactatagcaccactggctcccgcattatttacctgtcaaatgtaatatgattttatgagcaattgcaaaactacaaaattgaaattatgttgtcaagatgcaggcgattaaggttgcttttgaagatctctgtatagggtacttacaccgacattcatagttcataccaaactgcgtaacagggatccttaccaagatatcaagtcttccaaacttctgagataaaaaatcagccaatgattcaacgctagcttgatccaaaacattgagttgatggaaaactacatttgacaatcccagctggtggagcttggcggttgcctcatttcccctcactttatttctagctgttaatacaactgttacgccatttgaagtgacctgccttacaatctc

SEQ ID NO: 2577 - DNA, 561 bp, Gossypium hirsutum
attttgcatagtaagggataagattggtactttggtattctatttgttttattttatatctatagttctaaaagttgtcctcaagcggacaataataccaaagcaacacacagattctaaccctaattgttataaacgtgatctaacttgaattcatttcttggcaaattgttttaactgtccttaattatttttgaaaattctgcctgatgtaattgaagattttttgtttttcatttatctggcacgaggaaaataaattttaattgattggtatcttcaggaggatcaaggatataatactccagaataaacgaagctttgtgcttgagttgcaacagagatctattgaatttaattgtattcttcagaagcatcagaacattaggtataattaatttttaacttttttagttgtacctcatagacttttagaaggcttccagcaacatagcatagttgtgaaatacaaagctgatggatgaatttgtacagatctgcactggttgaaaggatgccagttttggatgaggcaactttcagtggaaggagagctggctc

SEQ ID NO: 2578 - DNA, 587 bp, Gossypium hirsutum
caaggcattgatattctcccaagaataaagagggtgccaaccaaacgtggcctgattcttttaatctgaaaaccgaaaagaaacggagggagcaaataggcagaaaagaaaagaaaataaactgggagcaaatcggcagaaaagaaaagcaaagaaacaaggaagcaaatcggatgaaggtagaaggaacagaagagaaacaaaggggatcggggagggtaaaacagggagggtttgctgaagcggtacctaatctgggtaaaagaggggaatagaaatcggtggttttcaccgattaggaaagtaatggattacacgcgtattagcaatacattgaaccaaacggcggattagagaggaattagatgggacccatcgattaagggtatattggtgccaatacaccaaaccaaacatggtgttaatattataacaattgacgtcatctacgacgaaaagctatatttttacgcttaaaaggcgaagatcagtatgaacaagaaaaccaaggctttcccatttactaacattagaggcttgccatctttcttaacccgcacccatcctctcccttccaactcccttgt

SEQ ID NO: 2579 - DNA, 600 bp, Gossypium hirsutum
ctttaatctgtttatcctcttcatatatttctgctgcatgattaaagtgttctgatagatcttgagggctgccctcactttccatttcatttaggatctgctctttcaaatctcgatccgttggcaatgaatgttcaggactctcagcaggaaaagtagattccgaagtcatgcaagtgtagtttgctgaaagtttgtcctcagacccaggaattttaagtaaatcaacatcattgttgccaaagtctaattccagtgtagactccattgcaataatagatggttcctgaatcagagtggccatagtttcatgtcactgttttaattataattagggcatgcaaataccataaaatgtgagatagatcacgcaaaatgcaggaaacatagtactaaatctagcaagcacactagaggaaaaagggtgcatatgaaagcaactgaaacaggtgcatatgaaagcaactgaaacaaacatttcgacctccagggaaaattcagatatccaatgaaattcggacaaataatgcattaatgccttggtatttaagtgtacatgcaataagaacacttcatactcagtaaatcaatcactcagcc

SEQ ID NO: 2580 - DNA, 570 bp, Gossypium hirsutum
aaggaaccagtgaagaatgttggaaaatggttttttagtactacctatatacctgctattttctctagagaagtacaagagagcggtaacaatcataccagtttttaaaaggcgtaacacaatctcatcaagagcagaatttgatggtgcacataccagcacccttaggcgatatttccgtctggaattaacaacttctggcttctgcagagcaattaaagttagaagatgataaatgatcacattgtcagaagctaacaaaccaatatcaagacttcagcccaccatctcgtttccagaggtaggaaagaaaccatcatcaccatcaataggcatgacaatatccctgggattagcattcattaaccatggagaagctcgtccccaatgcttgtatctgcataatacagaaccattagagtctgataggtcagcagaaaatgggcatgtcagactcaatcatgtaatgcaatttcaggcacaaaagcactagcaagggttctcttgaaatccaccactctatgtaaagaaaaatgtaaaacttaagtccgtatatcgcctgacctattt

SEQ ID NO: 2581 - DNA, 625 bp, Gossypium hirsutum
  misc_feature (610)..(612): n is a, c, g, or t
  misc_feature (616)..(619): n is a, c, g, or t
ttatcttgtttagaaaattttgctcaagaatattcacaaagcactgaattttgtttttcctaattatactgtttggtactaacaaaattggtgcaggtcattttaacatttttgtaggggatctcagtcctgaggttactgatgcaatgctgtatgcatgcttttctgcctatcacagttgttcgtaagtgtgttttttccttgttgatcttgatttaaataaacacattgccactaatctaacttattaaaagtgaatgcctaagctataaggatggtcaagttaattagtaaaccttgattaatgtttttgtgctgcttacagtagtgatatattagtgttagaattaacaaatttgatgtcttaactgattcagggatgcgagggttatgtgggatcagaaaactgggcgttcaagaggatttgggtttgtttcattccgcagtcagcaggtactgttccttggttaaggttctgttgtccctttctcttccgttataatgttgttttgtctattgttattgacctttttttcccctttgttcaggatgcacaaagcgcaattaatgacttaagtggtaagatttttgcctcatcaaataaagccgnnngctnnnnaaaaaa

SEQ ID NO: 2582 - DNA, 619 bp, Gossypium hirsutum
ttcgtctagctgtcgtgcttgtactattgagttacctaagttatctggatttcacttcttattatgtatagtatagataatgattttacaaggacagtttctaaagtactttggttttgttgattttgttgtgttcttgaatcttttgatagtaaaaacaaacttttcaaaaagaagacggtcattttcaagtgaattgaaagaatcgacaatacagtagaaagtcttataacatggcaataggattgtaggtattttaaaataaagaaaaaagttaaaaacttttcccttgtttgaatgaggcatttcaaaggaagattcatttcaatagggcttttaaaaatccaaaaataaatttcattatttgttgatttaaatagaattttttaaaatttttgagacttttcaaaaataaatttgatttccaaatttaagtttcagccttttttttatttgtataatacaaaattaaattgaaatgatatgtcaatataattatttaccaaaatagggtgcttgaaatagtttctagagataaaagggagaaggatgggcgacactcatattttttctgacataataattgaaagggtggagagggagagatgggcggcactag

SEQ ID NO: 2583 - DNA, 623 bp, Gossypium hirsutum
cggggggtatcacaacatggacaatgtgaggaatatggttgccataatatctgatcttcaaacaaatttgagatcagggtactgtcttttttatcatcatcatgaataagtcaataaaccaaagtttggggcatgaggattgagagatttacaccagctttattcttctgaaaataaattaccacatcacaagtctagtggtcctcattttgtgtatttcatttacttccccctatctcttattgatgatgttagatctggttgttgcaaatataatggatggttgctttcatggtcatgattttgttaattacacaatgttagttgttgtttctcccccacggatcatttccaagtcttggtgcaaccccccatattagaaacttacttagatcggttaaatctcggctcctttaattaattttcacataataccaaatttagtcctcaatgtttagatatttttttccaatttgatccttattctttatttttgttgaacttgaccctcaaactttttttttaaagtcgaatttgactatcaacttaaaaaaagatgatttaacagaaatattgtctaaaatattaaacttttaagcatagtttgtccgcatgacaattca

SEQ ID NO: 2584 - DNA, 650 bp, Gossypium hirsutum
tcttggttgattatccatggtattttagtttgtttgcttcgttataggcacttgatttgatccgcggtaagaattttctcatgttgatggattctgctttggagggccatttctcaaacgaagacggaatggagttagtgcggttagcttctcgctgtttgcagtatgaagctcgtgagaggccaaatgccaaatccctcgtcatatctctcatgtctgttcagaaggaagcagaggtacatacaataattgctgattgaattaaatactgcaaattcataatctccaaccattaattctgtgcagtttggtatctccccaactcgatgtctttcattattaaggatttatgttttgtaaacaccattaaatttctcattaattatatggaattttgctaggtaccatcatatgtgttgatgggtattccacatggaactgcttcttcaaagcagccattgtcattgacaccttttggagaggcttgcatgaggatagatctgactgctatacatgaaatattggagaagatgggatacaaagacgatgagggaattgctaatgaggtttggtaactctgtcctcgatattctacttttatgaggtgcaaaataccttgtaggtcaaggggcaaaggaccattacccgac

SEQ ID NO: 2585 - DNA, 517 bp, Gossypium hirsutum
tgccttctgtacatgagaaaagaggtggtgtgaatttgcagaacctgttaacggggagtctacacaatttcttcaggaatttgcactcaagtataacatggtcattataagctcaattcttgagagggatataaatcatggagggactctctggaatactgctgttataattggaaatcatggcaacataatagactctctggaatactgctcttttctatttaaattggggacttcaatggagcctattgcctttgttgattgcaattgctgatatttctagcatattgctagttcatttgcttcatagatatcagatggttgtctgcctctttacctggttgtattaaatcaatagatgtcagttgaaaattttgattgtatgtatcattcattttgattttactattagttctatgaaattcttttttgggccatgagtgattttttcttaacagttgcgtgagcacgtttcgccatatgtctaggtaaaaagctgggttcttcgcttggattt

SEQ ID NO: 2586 - DNA, 771 bp, Gossypium hirsutum
  misc_feature (613)..(613): n is a, c, g, or t
  misc_feature (618)..(768): n is a, c, g, or t
acttatcaatgaccgcatgaactcttctctcaatgtctgtcttattgtgtgcaagatgtaagatctagaaagcatttcaaaagcaagggtttaggatgatataaaaaaattaaaaaaagaaaaaagaaaaagagggagcaaattcaggaataaaggagggaagaacaagctacctgctcgggtgcacctttactaactctgtgcattttaccatcactgtcaatataggttagagctgttctcttatcagtaggattgaatggaaggaagtgtacttcccgaatgcctgcacgtgcctgtaagaaccaaaagaagaagataaaaatactctgcaagaaaacatagtggaaaaaataataaacctgatagataagaacatcacgggattagaccaattacctcctttggatcagccagcataccaacaattgcagaatctatagcatcttggttctctgttctagaggctcgggccgccatcagaactacagtgtctgcatctactcctttggcaaacacctgataaatcaacacagacacaattacaaacaatgaattgccttctgtggagaaaacatgcagttagaatcagataacatcgatatccagcagncctcnnnnnnnnnnnnnnnnnnnnnnnnnnnnnnnnnnnnnnnnnnnnnnnnnnnnnnnnnnnnnnnnnnnnnnnnnnnnnnnnnnnnnnnnnnnnnnnnnnnnnnnnnnnnnnnnnnnnnnnnnnnnnnnnnnnnnnnnnnnnnnnnnnnnnnnggg

SEQ ID NO: 2587 - DNA, 690 bp, Gossypium hirsutum
  misc_feature (648)..(681): n is a, c, g, or t
  misc_feature (685)..(687): n is a, c, g, or t
aaatgaatcctacgaaacaaattccaagtagaagttggacagttatttctcagagattcttagtgaggaaagttcaatggcacacagatgttacttaagacacaagaccagagaatagcttatgagtaaaaatgagatcatttgcactgaatgactgatcatcgacagcaaggtaacgcaaataagcatgaacaagtttcccttagtaagtcatggaccacatcacctattagccgttgaaagatgggaaaagttcagtgtttagctgaccatcagatatttggtgctcgatcaatcacatgtggggatggtgtaaggtaaagcaatttagtaccaaaccaatcatgacggaaacggaaaccttcggctttttcctagttataaagtctaggacattggtagccggaatggtggaaaaactcagaaatgtaaattattttagggattttcatcttaacaaggatgccaaagaccgaggtaactaatcagtagtaacagtacaattttcccatgatttgttatcatcattaacgtataataacagagaaggtagttaatctatgagggtggaagcacagattacggttgagttgttgacagtgcagaaaagaagactcagtaaaatcataaacccgagaaggaacatgnnnnnnnnnnnnnnnnnnnnnnnnnnnnnnnnnnaaannnaaa

SEQ ID NO: 2588 - DNA, 656 bp, Gossypium hirsutum
aggtttttgcagacctttcaggtccaatgggttccatccttttctttttcttttggcttttttatttctttgaatagggtctaaattgatttgttttaactagtggatgttgtttgtttgctcagctcaaaagctgctctaaatgatgttatcggtaatgatacggattccagcgttgcagtcatggaaccacaggtaagaatattgaaagattaatggaagttactgctgctagtaattattaatgtcattcgaagttgttgtcatgtttttccatatgatatttcaataagattcttcgggcgtcctgtggtctttctgatgtatcatatgaaagcagtaattatataaagacagtgaaaatagcgaaaggagacagagtgaggggcgaacaacttctggtttcaatttccaactaaagtttaccattaaaatatctataatctggcattatctgtgtaataaacaggggaattgcatgaattaccctagttgtaaatggaaaccataggtgggtctgtactatatctagatagtgtactgttatcagcttttccaccttgttcattccttttctggttatgaaagaaggggggggggtactgtttggagtatttcaatttcaccaatggttattatgtcagattgtctggggg

SEQ ID NO: 2589 - DNA, 603 bp, Gossypium hirsutum
gcaataccttgattacagcttcaatacttggtacttgatgcgttaagtctcgaagggacctctggatgacaatagaaacccccttgacatccttaataatgctttcgcttaattttgattgagtaccaacatttaaatttatgtcctgaacctgcatcccattagagaaaagagggaagaaaatccatgcaagagattacgttagccagattaacaattgaaatatgccattcatcacacgattttttcctactatttatccaacccatgtggtaataatttattggtccaactaaaaacatttctatgaatttattaacccatcaatacccaccttgaatttctttgataaaattatttccatgttacgatgaaatactaggacaaaaaatggtggtttgtgataaaaactactctaggttccaagaaaatgttgaacactgttggtataagaaagtcaaaataaaattccaacaaaaacctcaaaacagatgaaacttaatggagagttcattatatctacattataacagggaaagaccatcaatgagttcctgccatttctattccaatttcttagaatttacttatcaggcctagcaa

SEQ ID NO: 2590 - DNA, 600 bp, Gossypium hirsutum
gacattactccccctctattatgagagtatacaattaatgagctaattaaaggtgcattttcttgtttgataaaagcaaaaaaccttgagatattagcttcactcagctcagcccctctctttgtcacaaactctataacagctagaatggccccttcagctgactgcttgatcctgttgcaaattgcaggcatgcaaccatgcagggtgtctacaagctgcaagtaataatcaagaacaactacttctgtttcgtttgaaagcatttatttttgagacaagcaaacagaaagataaatcacacctcatcctttgtcaaaagaatacagacagaattgacaattctgttaaaaacctctgagggatcaattgaagaatcctgaaaacacatacaaaattaaaattatagtgtcataggttcaactttctgtatgttcaaggggaaagataggacgaacacaattttaaatagggacatagttgctcagaataagcatacacttctcaagatggctattacgtcctcaagggaagataaagcgccatagcataactcaatatcaccaccaacactagaaccaagaggctttggaagtgaaa

SEQ ID NO: 2591 - DNA, 461 bp, Gossypium hirsutum
cactagcattaaacatacctatctacgctagaaaatgaaagaatcttgcatatgtgtgaaacagtgaggtgagaagtgtccatcaacaataaatttaagagtggtcctgtttcttctgtaatctagaagaggggccaagcccatgatcattggtgaaaggaattgcttatcagaacccggaagaaataaagactcataataaaagagagcacacgaaggcagaaacacagttgacttcaaatgaatgcaataaatcatagaagctgagacaacaacgagttaaagcatgccaaaagttgtgatatttatgattttctctaccaacaaaagcttgaagttgaagtgaacaattcccacaatgaaaacaaggggttcaatcatcaatggtaaatatatattaccttgtctaccataaaaacctcttcaccgttgacatccacttcaagatcacagcagacttg

SEQ ID NO: 2592 - DNA, 618 bp, Gossypium hirsutum
cattatcaactcaaataacatttaacctttcatctattttcagttagaatcaaataaaatctttaatctatatccaaatagccaaaaccacccattaacctttaattttgacgtcgaatatgaatcaaattttcaattgaaataggggaagggtatgataaaaatattaaggcttgcttaagaaaagtgaattaatttacaatcttttttaatattttaatatttacgtataaattaaaggttatagatttattatatacaaattcaagattaatagagactttccatatcccatcacataaaataaaataaaatgaaaagaaaaagggaaccagatgttaaacatatgcatagtctataaaacaattagacattttgaacaaccaaaggtcaggcaagcatgctaacccacgagcttaatatataggataattaatatggcaagaattagagctccgattattgaactcaatatcaatttgttcttgttaatccttcttgatatggttgtcaggatcttcttgctcttgctaatgttgtcatctactgcatggagctgcaaatgtaagaagcaatgttgatacctctggacttgggcgtaagcgttagatacgaata

SEQ ID NO: 2593 - DNA, 612 bp, Gossypium hirsutum
tgctttaaatcaataagcaacaatttgaatgaccattcaagcactcttacttattactctgataccaacaattagaagatcaacaattcctcatcaacgcataaaagagtatcatgttcagatataatctcccctctattaaatgcacgtgctagtttcaacaaatctctaaatccttgttgacatttctggtttaaatgctacaaaacgtatggatatactatgaatgttagcaaattactaaaataagaaaatagataggctcttgaaattttcatgcatttcccatatttcatgaccaaataatagcaccaccagcaaaatgttgtatctgaacatatctttccttttccctctcctaccagcttcttcatagggtacagaataaataccatttgaaagaaccgacaacccttaaccgattgttttgtcttgtgaaatactaacaaaatacaaaaataagtaaataggcagactcatgaaattatcacgaatagtccatatgtcaggaacaaacaataacttttgtcaggaaattatttatcgaaactttgcctttccttttccccttctaccaccttcttcataggttacatgaaacaaagccattgg

SEQ ID NO: 2594 - DNA, 630 bp, Gossypium hirsutum
aggaatgtgtgtatatatttttaattattatttttatggactagaatgattatattatatatcaataaaaaatactttaattttggctaaagggtacagaaaagccccccaaactttttcaaaaaatcaattaagctcgctgaacttttttgttttgactcaattgagcccttgaacatttgaattacaatcaatcaatcaagccctttgactgttaaagttaacggtcaatgttacaaagccaaggcagccagctttcttcaggctgtttttgccacgtggccatgtggtaaaaacatgcattttatatataaaatcaatagaaaattataaaaaaaaatattatacgattttctatgactttttataaatgtttgttgatttttttaatgttttatacattaagggtatgtttgtttgcttgtatttgattttccggaaaatgttttccacattttacgctgtttggaagcctgaaaataatttacatttagaaaatattttccaaaacatgggtaaaatcttctctattttacggaaaatgtcttacagattatttttccgtaagacattttccatctcttcatccaggtaaaatcttctccctcccttccgttcttcatttctttc

SEQ ID NO: 2595 - DNA, 606 bp, Gossypium hirsutum
ctaacttaagctcatttggaacatcgccaacttcagatgatggccaagagttctcatcttctgggagcatgaggtctgactcgataactctctctcttattgacgaacaatgcgggagtattgattgatgattaaaatttaccttgatagtatggacaaaaattcgatggagaaactgagggaggcttctgctgctgaagctgaggcagcaagcgctgtatggcaagctgcacaggctgcatctgctgttcctgctgaagaaacatctgtatctgatgacaactcacctgctgctgaaacagcatcagatggtagtgataatgagggtgatgttcgcctgcatcctcgagctgtatgtatactctaagtcgtgtccgtacagttctctaaatgtccagccatagtattctaatgaggctgtatgtatattttttccgcacaggttgtggtagctaaagaggctgttggtaacctaggtgggatggttaggcaactatctttggaccagtttgaaaacgagagccgaaggatgattccctcaaataatgacttgtcctaccctaccaaaaagtttgctagacagaggtctccgccaggcttgcataa

SEQ ID NO: 2596 - DNA, 655 bp, Gossypium hirsutum
aaaaaaggacaaattagtctttgtacatcaaatcaaagagcaaattggttctttctattaaaaattacatcaatttgtattgttaaaaacttacatggttgaccgaataaccagacaggaacacataatgtgtcgcgtgtaccttacgctgatatacacgaaacaatttaacaacaaaaattaatgaaaaattttaacaatagaaatccaatttctaatacaggggcctccatgatacctttaccttaatatctatgtgcatattcatatgaggaaaaacccaattgtacctcttgaatgtaggattgtacccaactagtccacgcctccttgcgttccttgccaatgtctagcagaacagctttcagtggcaccaataactcatcacctggaatgctaggatctgctttgatattggaaagtgctcgaaagaagttcgtgtaatccactttatcaacagccaaattactaagaagtttattgacaagctgtttattgtatttttggaggccaaccttttggctcagtattgcttgataatcgtccataaattttgccccatacctgtatagcaggacaacttatttgattgtctacaatggaatactttagttttattgcaaagaaagagaacacaaaccagacatacctttcc

SEQ ID NO: 2597 - DNA, 1240 bp, Gossypium hirsutum
  misc_feature (62)..(62): n is a, c, g, or t
  misc_feature (64)..(64): n is a, c, g, or t
  misc_feature (270)..(272): n is a, c, g, or t
  misc_feature (274)..(276): n is a, c, g, or t
  misc_feature (283)..(291): n is a, c, g, or t
  misc_feature (295)..(295): n is a, c, g, or t
  misc_feature (310)..(312): n is a, c, g, or t
  misc_feature (314)..(319): n is a, c, g, or t
  misc_feature (321)..(342): n is a, c, g, or t
  misc_feature (348)..(348): n is a, c, g, or t
  misc_feature (351)..(357): n is a, c, g, or t
  misc_feature (359)..(367): n is a, c, g, or t
  misc_feature (369)..(370): n is a, c, g, or t
  misc_feature (375)..(381): n is a, c, g, or t
  misc_feature (389)..(395): n is a, c, g, or t
  misc_feature (402)..(404): n is a, c, g, or t
  misc_feature (410)..(411): n is a, c, g, or t
  misc_feature (413)..(418): n is a, c, g, or t
  misc_feature (420)..(426): n is a, c, g, or t
  misc_feature (429)..(434): n is a, c, g, or t
  misc_feature (443)..(446): n is a, c, g, or t
  misc_feature (453)..(454): n is a, c, g, or t
  misc_feature (456)..(458): n is a, c, g, or t
  misc_feature (464)..(483): n is a, c, g, or t
  misc_feature (489)..(493): n is a, c, g, or t
  misc_feature (499)..(503): n is a, c, g, or t
  misc_feature (523)..(523): n is a, c, g, or t
  misc_feature (528)..(543): n is a, c, g, or t
  misc_feature (547)..(553): n is a, c, g, or t
  misc_feature (555)..(557): n is a, c, g, or t
  misc_feature (560)..(564): n is a, c, g, or t
  misc_feature (568)..(571): n is a, c, g, or t
  misc_feature (574)..(575): n is a, c, g, or t
  misc_feature (579)..(582): n is a, c, g, or t
  misc_feature (587)..(588): n is a, c, g, or t
  misc_feature (596)..(603): n is a, c, g, or t
  misc_feature (609)..(611): n is a, c, g, or t
  misc_feature (613)..(641): n is a, c, g, or t
  misc_feature (646)..(647): n is a, c, g, or t
  misc_feature (649)..(653): n is a, c, g, or t
  misc_feature (655)..(656): n is a, c, g, or t
  misc_feature (659)..(674): n is a, c, g, or t
  misc_feature (680)..(680): n is a, c, g, or t
  misc_feature (684)..(687): n is a, c, g, or t
  misc_feature (689)..(690): n is a, c, g, or t
  misc_feature (704)..(711): n is a, c, g, or t
  misc_feature (722)..(726): n is a, c, g, or t
  misc_feature (732)..(741): n is a, c, g, or t
  misc_feature (746)..(747): n is a, c, g, or t
  misc_feature (751)..(757): n is a, c, g, or t
  misc_feature (759)..(759): n is a, c, g, or t
  misc_feature (765)..(775): n is a, c, g, or t
  misc_feature (783)..(786): n is a, c, g, or t
  misc_feature (793)..(794): n is a, c, g, or t
  misc_feature (797)..(804): n is a, c, g, or t
  misc_feature (806)..(806): n is a, c, g, or t
  misc_feature (810)..(816): n is a, c, g, or t
  misc_feature (821)..(821): n is a, c, g, or t
  misc_feature (823)..(823): n is a, c, g, or t
  misc_feature (825)..(830): n is a, c, g, or t
  misc_feature (832)..(843): n is a, c, g, or t
  misc_feature (848)..(892): n is a, c, g, or t
  misc_feature (898)..(907): n is a, c, g, or t
  misc_feature (912)..(913): n is a, c, g, or t
  misc_feature (916)..(917): n is a, c, g, or t
  misc_feature (919)..(920): n is a, c, g, or t
  misc_feature (923)..(925): n is a, c, g, or t
  misc_feature (928)..(942): n is a, c, g, or t
  misc_feature (945)..(959): n is a, c, g, or t
  misc_feature (963)..(964): n is a, c, g, or t
  misc_feature (968)..(981): n is a, c, g, or t
  misc_feature (986)..(990): n is a, c, g, or t
  misc_feature (992)..(993): n is a, c, g, or t
  misc_feature (995)..(1006): n is a, c, g, or t
  misc_feature (1008)..(1015): n is a, c, g, or t
  misc_feature (1017)..(1028): n is a, c, g, or t
  misc_feature (1033)..(1036): n is a, c, g, or t
  misc_feature (1044)..(1047): n is a, c, g, or t
  misc_feature (1049)..(1050): n is a, c, g, or t
  misc_feature (1055)..(1064): n is a, c, g, or t
  misc_feature (1068)..(1083): n is a, c, g, or t
  misc_feature (1087)..(1092): n is a, c, g, or t
  misc_feature (1096)..(1102): n is a, c, g, or t
  misc_feature (1108)..(1109): n is a, c, g, or t
  misc_feature (1115)..(1115): n is a, c, g, or t
  misc_feature (1118)..(1119): n is a, c, g, or t
  misc_feature (1124)..(1129): n is a, c, g, or t
  misc_feature (1131)..(1134): n is a, c, g, or t
  misc_feature (1136)..(1137): n is a, c, g, or t
  misc_feature (1143)..(1151): n is a, c, g, or t
  misc_feature (1154)..(1154): n is a, c, g, or t
  misc_feature (1156)..(1157): n is a, c, g, or t
  misc_feature (1159)..(1168): n is a, c, g, or t
  misc_feature (1170)..(1173): n is a, c, g, or t
  misc_feature (1177)..(1185): n is a, c, g, or t
  misc_feature (1188)..(1188): n is a, c, g, or t
  misc_feature (1190)..(1198): n is a, c, g, or t
  misc_feature (1200)..(1209): n is a, c, g, or t
  misc_feature (1213)..(1219): n is a, c, g, or t
  misc_feature (1221)..(1236): n is a, c, g, or t
tattagaatacatacaaacagatagagagctggttcattgtagttacaacagaaatttaccntncagggctattggtatctctgagtgaatgctgaggagtggtgcccaaggaatcacagtttgcatcagctgctgatgtctgaaaaaacatccaaaataaacagcaatgatgtcaaaatacttacaaagggaccacagaaaatgcataatatatgtttatagaaaaaaggccaaaacaatcccataacacaaagtaaaatagcgagtgnnncnnntacaatnnnnnnnnngaanaaaaaaaattagaannntnnnnnnannnnnnnnnnnnnnnnnnnnnnaaattnttnnnnnnntnnnnnnnnncnnccctnnnnnnnaaaaaacnnnnnnnctttccnnnattcgnntnnnnnntnnnnnnntcnnnnnncgggggggnnnncccactnnannnttctcnnnnnnnnnnnnnnnnnnnnctcttnnnnntcctcnnnnntttttctatttctttttacnccctnnnnnnnnnnnnnnnnctcnnnnnnntnnnttnnnnntctnnnntannctannnngcttnnctccgctnnnnnnnnccaccnnntnnnnnnnnnnnnnnnnnnnnnnnnnnnnncttcnncnnnnncnntcnnnnnnnnnnnnnnnnccctcncctnnnntnnctcctctacacctnnnnnnnncttcccccccnnnnncccccnnnnnnnnnnctaannaaannnnnnncncccccnnnnnnnnnnntcccaccnnnnccccccnntannnnnnnncncccnnnnnnntaccncntnnnnnncnnnnnnnnnnnnccccnnnnnnnnnnnnnnnnnnnnnnnnnnnnnnnnnnnnnnnnnnnnnaccccnnnnnnnnnnccccnnttnncnnctnnnctnnnnnnnnnnnnnnnccnnnnnnnnnnnnnnncttnnacannnnnnnnnnnnnnatccnnnnncnntnnnnnnnnnnnncnnnnnnnntnnnnnnnnnnnncttcnnnnccctattnnnntnnattannnnnnnnnnttcnnnnnnnnnnnnnnnnactnnnnnncccnnnnnnnctctcnncttatnctnnttttnnnnnnannnncnnccttcnnnnnnnnnctntnntnnnnnnnnnncnnnnaaannnnnnnnnacncnnnnnnnnnannnnnnnnnnatannnnnnnannnnnnnnnnnnnnnnaata

SEQ ID NO: 2598 - DNA, 577 bp, Gossypium hirsutum
ctcttctggtactcccaccatctcaatctgctgcttgggatcccggatcatttgtatctgaaaaaagaaaaggagacaagttagaagtccaaaaccttgaaagaaccatataataaaggaatttatgtcattcctaagggtcaaaatctcccaaccttctcctacccccgtccccagccgctaaccaataagaaaaaagaacttgatttctctttcaattacaattaagaatatgtgagagccacacacctgatccatgtcaaatgacacccccaatttctgaaagcaagaaataatagccttagcagtaccagaagtgtccaatttgcctgcttgatgggactccatcacctaatcaagattaatgaagattagcaatatgcaaccaatatgacaaaacactaaagatggtgcccaagaaaacttattataaataatatttaagaaaaggaggcattccaaaggactatcatatccgaagaccaagataagcaactgtaaacacaagcccaagaaaacttgttacaaacaaattccctatggtatgtaaacactaatggataaatccatccacaaa

SEQ ID NO: 2599 - DNA, 624 bp, Gossypium hirsutum
  misc_feature (152)..(152): n is a, c, g, or t
  misc_feature (180)..(180): n is a, c, g, or t
tttttgctgaaccctgtagggtagttggtgcttgtagtagtaacaatatggttcatactgccacaagcacattaggatattatatatttaaggggccaacttcttttgatctttttgggagaccccgttcatttttctattatgccaatggnggaattttattttttcttatcatttagntgatttaagagaactgttttttgcttctatcttttaatgggtataatgtttatcttgcctttggtttccttttttggatttttctctcaagaatggagttgatcccttgagtagaagtgtcgaaaggccaagagttctggatgatgcaatagacaagactaaaccctggcagttagctgaaattgtggatcctggtcactgtcggttggttaccttacctgacagcacagatacctccagcaaggtgcgttgatttccttctataatctggtttatacaattttttgataccatttatctctgaattattgcatctctttgaaggttgttcgccttttgtacacaaattctgctgtcggtattttggcacttgggtcaaatggtgttcagaagctatggaagtggccccgtaacgagcaaaatccatctggaaaggtacagcac

SEQ ID NO: 2600 - DNA, 632 bp, Gossypium hirsutum
agactttctttcctgctttacatcaagatactgcaacagatttccatttgggacataatcatagatgagaaaacactcacccctgccctttgaacaacaaaagcctctcaacctcactagattttcgtgtttcaatgaagtcaatatcttgagaccttgcagaaactcagattcatcggacttgcagcttgtcttggcaatgcattttactacaacagcagaactatctcttaaggagcccttatagatggctgagaaattactcttccccaacaaatttgtttccgagaaacactgagtcgcacgctttacttcctctaaattgaacataaagctctcaaaaacttcctgggaaaacccattcccactcctacctttgtctaaaggatcccaaccattagaatactctaaactaattaggggcgaggcacttctcctgttaacctccttgacctggtccgtgctaagccgactatctgaactatcgaaagcactcccgattttctgttttctcctacggtaccatgcgaaagtaaaaagtgctgcaactgtcaacacaagagcaacgccaacaatgccggagaccacaccgatttttgtactaccggatggactcgagcagttagctttgc

SEQ ID NO: 2601 - DNA, 659 bp, Gossypium hirsutum
ctacaattccttaacatcacgtaactgccgtgattagttggctccatatggaccaacttatttagcactctctctgctctttcaacattattcaaggaccagtatgcaaataggagtgaagtgagaattattgcattggcttcatatggcatactttttatcagcttctctgcttcctccacacatcctgccctccctaacagatcaaccatacaaccataatgctcgatttttggggtgagcccgaattctgccattgctttaaaccacctcttaccttccttcaccagaccaccatggttacaagcagacaaaacaccaatcatggtcacatcatttggcacgattcttcgattctgcatttccaaaaatacacccaatgcttctttggcacacccatttacagcatatccatttattaaagcattccatgaagctatttctttttctggcatctcatcaaaaacttttttcgctttatttatctctccacattttgcatacatatcaataagagctgtacatacattggttgctctatcaagtttcttcctctgaacaaaatggtgaacccattcacccaattcaagagcacccaaatcagcaataggtggaagaatgctcacaatggtaactctatctggctcaaacaatgtggt

SEQ ID NO: 2602 - DNA, 624 bp, Gossypium hirsutum
gcttgctctacaacgatattttaaaaaagatgagagtgagtttttaatgagtttattactatatttttattctgtcattttaattagagatgactataggtttgatatctacatctcttttgtaatatctgtactgaaattagcataactactttaaaatccgattcctttattatttgcattaagtctgagtaacactatttgaacccgaattaaataatattctctaccagatatctggatttgctaaatatttgagttcatttagtcaagtttattattattattattattattattattgcattttacaaataagcgaaaatggatgcagatttagatatttgaatttgttatatatatgcttaagtattttggattcagataattgatattcaagggttaatatttgcatatgctttaaatttgttgattttaatatgcaaaaaccaaattggatgtttaagaatatccaaatttacactatccattgttattcttaattttcaggcaaacagtatcattgtcatgctatgagtaactttcagggagaatttcatccatattaatagtagtgaatgggatatgttgatcttacagtttatagtcagagtcaagtttcat

SEQ ID NO: 2603 - DNA, 608 bp, Gossypium hirsutum
  misc_feature (573)..(573): n is a, c, g, or t
taacatgctcaatactatgtacaatagacttatagttgaagccttattcgattgaagaacaccaagaagtgatattcaggggcccaatatacaaatccaacaaccggccctcctttgatgtactgttcagattagcaaatcagaatatcaaataatcaatatccatttgaccaaaaaaagtcattgaaccaaacttgatcggacaaaagagataaaccttcccgtcaagaataacaagctcgccgtcaacccatcgaggatttcgaaagcctggttcagcaagcctaccctgtcctttatatcgagcaacctgagtcaaaaataagaccacggaacttccttaacttttgaagcagatatcaaagagtgaaattcaaagggtatcacaaattcaaactttaaactttacaagttatcaatatatactaaaagaaaatgtaccactccaaattcttcaggaattagcccattatgtgggagttgatatcttttaccaactctggctcgaaacgccacctgtagatattcccaaggtattagatgacaaatcaaaaaaaaaaaaaaaaaatgtgnggggggggggggcccataataaaaaattttttggg

SEQ ID NO: 2604 - DNA, 658 bp, Gossypium hirsutum
ctttgatttttggtacggtggagaactcatatgtcaaggatatatcactaccaaagccttcattgaaacattgctcattttggttagcaccggcactttcattgctcaagctgcaagcatgacatcagactcggccaagagcgtcgaggttgttggatatttgtttacgatattagaccgctgcaaaaggattgaacctgatgaatctaatggttaccttgctgaggaagttccaacactattttctaagggaaaacataccatacggagcatcgggtaaaaccgatgagttcgaaatcattgaagcagccaaagctgcaaacacacatgatttcattgcagatacctagtagatggttataatccctggtgcggagacagagatgtgcaactagctggagaccaaaaacaaaggatcgccatagcccgagccatattgaggaatccgacaatgttattattagacgaagcaaccagtgcacttgacagtgtatctgagaaagtggtgcaagaggcattagatcaagtggtggagcgaagacccagtgtaacacataggctaagcacaattcaagattgtgatcttattgctgtgttagacaaagggagttacctttgtcagccaaggagactacagggagcttactacgctttgatt

SEQ ID NO: 2605 - DNA, 360 bp, Gossypium hirsutum
  misc_feature (51)..(54): n is a, c, g, or t
ggcaccatacacaatatcaatttccaactcatcaatatatatatttatatnnnnttttatgtgttacatttattactatatatcattaaaacccagagcttctataattgttgtccacacttctctcacctcgtcgctggttatcatgtgctcccgacagtgagctcaagatgctggctgtgctcgtcccggatattgcatccagtacattctcgccaatgtcgttcttgcaaagaggacaagatgcattgatctttagccatttgtcaacgcattccttgtgcatgaagtgagaacatgggagctcccttagctcttcgttattagtgtattttgccaaacaaatgcagcagacctgtt

SEQ ID NO: 2606 - DNA, 566 bp, Gossypium hirsutum
  misc_feature (523)..(525): n is a, c, g, or t
cgagtcttcaataccagtaacagtccacctgatacgaagaatgttgacttgtcagagaatgtcgataaagcttgtcttagcgtttctagagcagtgccggtgccaggggagagcgtagtccgcatggcagtggatcaagtcaacatccaaccagttggtgagggtgaatggagtgatattcaggcaacagaggcaagaatagctgatgtgagagagatagccccagagacagaaggaagcagccatgacatttccgtcgataaccaagcaatcgataagcaccatgagcaaggagcaagctctttccgccagccttgagaaagcattgcatatatacagacgcttccgatcataggaaactcaaggtaggtgaaatgcaaagaaatcttatagatatattaaaatttcatcctccctctcagttccataaatttaagctattaacaaactgtttgatgttgttgtggatgctaaccatacttgaatacaagggagcttctgaaaagaaaaaaagtacataaannnttgtatggattgtaaatttaacagtagtcttaaaataaggg

SEQ ID NO: 2607 - DNA, 642 bp, Gossypium hirsutum
gtcctgttgcatttactgcacacctttgttatttagcctagaaaatggaaccaaaaaaaggaaaaaagaagggcaaagttgcatgcctttgattttgaaattacataaatttgtacttggagatgtcttaaatttgaaagatacattgagaagttctatgctgttgagatctgtttctaggctagggtttctatatttttcttgatccaagttgaatttttctttagtacttgattcacatatctattactgccatggatactggctatgttaatgcaactctccttgaaatacctgtgtttagacctgttccacacatattcatggttatgggggcatgatccttcatttatataggaaccacaaaaagaattatcatatacccattccaggtacatacctcatctcaaactcatccttgaatccaatgctagtccaagtagcatatgatactggaatcccgggccctggctgggatattgataattttgtgaagtgtgtgttttctgttcatgtattcttttgaaaaccagaggctacttaatagtatcaaaactttataggattaccgctgctgttttagcatctcccataagttatcttagaattatgtttaaggtttcttcctcatttacttcctcg

SEQ ID NO: 2608 - DNA, 612 bp, Gossypium hirsutum
atcaacgagggtggggtgggaactactgatgggagtgcagccaatggccccattgtgcatgcaaattgcatgtcagaaagttcagttcaggacttgggactgtctggtggtattaaagtggtaaagtacttggatttgaatacgatataccattcttctgagttagttctgctttattcaggttgttttcccaatgtttgtcatctgatcatcactcttgacttcttgttaggaaatggaggaataacgctgtaaggtgaatgaatgaagctatcagttgcagggccatcagtagagccctgaccaaagaatccaggtttactttgtccttagcttaaatgttaacaaactgcccttgtatgctaatttttgtggtgctgagagtgtctagtattgttgttgcttttatcgttcccatttttgtttttcttcctttcaaaggtcaaagtctgatagaaagataagtgcatataaatacctcataatttttgcctttccgtgtttgacatgttgcgttatattaatagtttttttgccctttttctggagcggatttttagttcataaactagaacgcttttttcattttcagctttaacattggctatcagc

SEQ ID NO: 2609 - DNA, 617 bp, Gossypium hirsutum
acaacaagctacttactccttcgattttccccacaaaggctcaagttaaggacaagaagaaaaaaggtacaccttatctacatcatctttatttcaggataatagatgtaaaattcattgatctccaagctttgcaagaaatagaaaattcggaacaaaatacaaatttgtcaagtataaatgaacagctccaaagacagcctaacaactttattttacacttttgacagtcgcctaaggaggctgaagagaatctagctcctagacaggtcagaacattacatggcttgataaacattacaccataccctatgattccctatagctgataaacattaaagctccaaagaaataatttagccttgtcatttgcaaagggtccacaaaaaatacaagatagcttaagtacttatgacacttacaagtacaagtttaaatattattagatggatatgatatttagactactaatacattaaaaaatacaagatagcttaagtacttatgacgcttacatgtacaagtttaattattattacatggatatgaaatttagactactaatacattgagaaagcaataagtgtactcgcattcactattcttctcacaagcca

SEQ ID NO: 2610 - DNA, 667 bp, Gossypium hirsutum
aagtgcatagtgggtacatatatttgacctcacaagagggttacttactggctacatccactaatgctcctcttttaaaaaatactacaaaggggcctaagcttatgatggctgttgattcagaggattatgtgatacgaatgggagcacagtggctacgagaaacctatggcaacaagtatcctcctggtaatgtggttcatgtggagaaggccaatcttggtggcgagaattattacatcgattcgttttttctcaacctaaaacgattacctatggtaagttcagaaaatatttcgccctttacctaacattaaaataatgcatttggatcataggatacatgaagatatcatatcacagaggtgacctctttatgtttcaatcagaatacaaatataattaaccggagtattgtttataactgtttaataagacacttacaggtctgagacggtgcaggttggagtcataatcattccaagaaagtacataatggggaaggttgacgaaagatcattgaagacattggtcatattgatatctgcatctgtttgtatcttagttactggatgtgtctgtattttgatacttacaaatggagtatcaaaggaaatgaaactcagagctgagttgataagccatcttgatgccagaagaagagctg

SEQ ID NO: 2611 - DNA, 523 bp, Gossypium hirsutum
  misc_feature (479)..(485): n is a, c, g, or t
  misc_feature (487)..(488): n is a, c, g, or t
  misc_feature (500)..(500): n is a, c, g, or t
  misc_feature (503)..(509): n is a, c, g, or t
  misc_feature (513)..(515): n is a, c, g, or t
gagaaatcatctaccttcatttttgcatttgtggaagaaaatgagcctgccgttgtctttgaaactcgtggtggtcttgaaggagggggtcttgaagggggtggagcactagtaggttgtgtaaagagtggaatctctgatacagtgagccaaacatcatcagatgcatcaaaattctcctcagatctgggagttgaatgtacctgggaactagtctcattagaatcgacgttcatgtatgggggagggctagtagctcgaccaacagagctatgaaaatcagttgacagactgggcatgtcaaacatgggttgatgagagtcaagaaaattgtccatagaaggcatcctcttctttgtatggttctcataatccctatgattttgctctttagtaacaggagcttcttgtccgctatcagtgcttaaaggactcctatccttccctctcttattgatctctcaaaatcataactctcnnnnnnncnnctgtatttcatngcnnnnnnnattnnntttgtcaa

SEQ ID NO: 2612 - DNA, 630 bp, Gossypium hirsutum
attttcttttttttagaagaaatctatctagttattttatttagattattaaatttatataaaaaaattagctattaaaaatattaaatcttaattgatttaattttttcatgcccaaattaaattttggctacaagcatttcaagattatttggaggctttctcatataagacattgaaagaggtttcaaaatatcttagtgagaggatacgaaacttgtcataagatagtcgaaaacatttgaaaaataaaatgctccttcgaccctttaatctataaggcaaatgaaattttgtaaaatatagtactccctttagtttacaaggcaaatgaactccaacccaaaataaaatgcttcgctacgccaatcaatgagacaaacaaaataccttcttgttcaaatgaggggtttttttcttatcggttgaggtctaatcgatatagcaaatatatgaagtctagggtataccccaaactttacaagatgcccgaagtgaaaactgaaaaccaaccaccttttgtcaactcctcaaaatggttccaactcataaaccacttcactattttcaaccatgtttcctcgaaagaaaaaaaatgctataaacagcaactcagagacgttaaactca

SEQ ID NO: 2613 - DNA, 615 bp, Gossypium hirsutum
actcctgaattgttaaagatttgaagggctttcaggcattcaattacagttacatcccattaacattcaggactggtttataaaaacttgtggtcgtaaaaccaaaaccatttctaatcatttaactctctattaattattaaagacatgcaaactcaaaagttgtcctaaaattatctcagaacttccacaaggtatacagtatcaccaggaaccttaaccagaagcgatgacaaggaaaaaaggcatcacagaaacatcgaagacaataaccaagaccaagacacgggttaaaacaatctccactgaaaagatcaagcctcttgcaagataagtcactatctgaccaaatagatagccgatctaagctaaccatgtgaaagtaaagttttcattactattcatgttgtctgtggcaaaacacatattgaacttgttagatcatttacttcgtgtgccaaaatatagcttgctaaaattaagtatgttttaattgatagtctaacactttgcaaaaaagttgctctacttcatttctgtcctgtgacataataatgcatgcagattatttagcagcacagaatatacgataaatgctcggtacatcagactgaa

SEQ ID NO: 2614 - DNA, 570 bp, Gossypium hirsutum
  misc_feature (224)..(224): n is a, c, g, or t
gccgactggttcttgaatctttgacctatagttggtgagggtggataccaacttggaacactgaaactactgacaggggaacaagccccagccaactttctcgataaataaaggtctgtcatatcatcatcgtcatctaaaagttgctcaagttcatcccttacctaaaaatcaaaatgttgataggtaataagtctgaactcatgactagagatccagttatntatgttattctccggtcacaagtgccatatgattgacaatatatgcctaaaagcactacaatcatataagctttaaaattgaattttggaactcaggctaaatagccaaactaaagaagatatatactaagaataatcctggtcctggagatgttccattagtttgttgtagcatcaattatattgtcaccaaatgtcatttccattagcatgctactggtattttgcattctccttttaagcttaaagaaaactatattcgtatgcttagtctattagcggcaaaatgcccctcaactgatgctccctaaggcttttcccttttaaggaaaaatatttaaatcgc

SEQ ID NO: 2615 - DNA, 605 bp, Gossypium hirsutum
atttcagcgacaatgtggctttgttgtggtgatttcagagcattcttgggaagtgtaagtgactattgtgcacactacgcaaaatgtccagtcctgattgttaagccaccgaaagagatggccggccagtaaaagcaaggattaaaaatgttgacattgaacctggatttaataattaaattttattgcttcatgtcatcgtcggttttaggtcgtgtaacttttttataccaaaacaagtttgtcttgagtttgacacctattcatatatatacacatatatacaaagttatatgtttgcttgtaaaccctatatatatattttttaaattagtgtgaatgaatggaaatacgttggagagttttataacatcaaactttgattttttttataacattaagatcttaaacattacaacgaggatttacactacgtaaaatgaaaaagagtttcttatttttagagtgattcataatatataggggcgtaaagttgcttggtttgattgccgaaaaaggttgaaaagatgttagagtagaatttcgctctcgtcttttcttgccccttccttttaaaagagatttattttcaaaagatttattga

SEQ ID NO: 2616 - DNA, 581 bp, Gossypium hirsutum
  misc_feature (529)..(529): n is a, c, g, or t
  misc_feature (571)..(577): n is a, c, g, or t
gcttttatgtgtcatttatctattcttttttcttttgttatttgtaggttcttatttgtcggatgattgataggccattgcgcccaactatgcttaagggattctaccatgaaactcagttactatcttgggtaaaccttatttctttttcttcacatgattgtttttcttttagccagcgtctgttggattttatgtaattttgacttatattttgaatttttcggtgaaaattcattttctaaaatttgatactgtggtgattcttaaacacatgatggtgtagaaaataagtgaactttatctatgcagttgttttaaatctacacgataaggtttcaaagcctaattatctgcaatgtctaaataagaattatttcatattgtttcaaatgttagctaaaatgagaggtaaccaacccttttgttttccatgcttgataagctgcttcgttttttggctgttttttttttcctttttttcgaatttcggttaaattgaaagaacggcacccttgtccataatttntttttggggtttacaaaaggggccggacccgaaagcttgccnnnnnnntaaa

SEQ ID NO: 2617 - DNA, 372 bp, Gossypium hirsutum
ggaagaatcacccaaggtgtcaacaacatcaacttggtcgccgattcccacaagaagaatcgtattcaagtctccaataccaaaaagcccttgtttttctacgttaatctcgccaaggtttctcctttgctttgttttttccttttctcctcttctccaattactatcatattctgtcgaaataaaatgctatatttgaataacactggtaaaattttgttgcattttatattcttctccctgctctgggaagttgtttcaactatcgttctgcaacataagatttaattctttgttcatgcattacattatttctgatattcttccccccccccccttttttaaggaatatgcagcaccacaaaaaaaaaa

SEQ ID NO: 2618 - DNA, 535 bp, Gossypium hirsutum
  misc_feature (514)..(515): n is a, c, g, or t
  misc_feature (520)..(520): n is a, c, g, or t
  misc_feature (522)..(523): n is a, c, g, or t
  misc_feature (530)..(532): n is a, c, g, or t
atttgatcttattgctgattttcgtgcagccaacttacaacaccttgaacttttgggtatgcagcaacgagtgtgcgctgacccagtacaatttcccgactttagtttccatgaggggctgttattatttcggggtcgcttaatgattccagctgattctcctatccgtttactgcttattcatgagtttcacgcatctcccatcggtggccattcgggtattacacgcacctttcatcgtctttcctcaaatttcttttggacttctatgcatcgggatgttaaacaatatgtaaaagagtgccaaatttgtcagcaaatgaaagcctcatccttgagtcctagcggtttgctgcagccattaccgattcccaatttggtttttgagagcatctctatggattttatcacggcattaccttcttccaaaggcaaaaccgttatcttcgttgtcatcgatatagataccactttatctctgaattattgcatctctttgaaagatgttcgcganntgtanannttttctnnngcc

SEQ ID NO: 2619 - DNA, 598 bp, Gossypium hirsutum
ctgcctatctcccaccttcctttttactccctttgcttccaagaaactgggtcttaaatggaatcccgctaatatatctagcaacatcactcttggagattgctttttatttcatttgcattcctttcatttaacagtattcaaccagaaaactggccagcggctccagtatttgctctcccatctttatcagcatctatgttttcagctattttttatgtcagttactacaaggtactctcctcccaggtcaaacatttatttgtttccatgtttaagtgaaagttgtaaatgctatttatatataatttcatattatcatcactaaaacattgtcagcatcatgttattttctttatcttcgttccaattagttggtggctcttcctcagataccgctaatgacctgaagacatatgaaagggggaaaaatgcatagtgctgatgactctgctcctttggaagctattttgttgtctattcctgatggttatcacctttatttaaggtgaaaagcttggttttactttaggggctccttgtgtgtctattcccgaatatcgaacacagatctttaaaaaaaaaaccgtcaggagca

SEQ ID NO: 2620 - DNA, 647 bp, Gossypium hirsutum
tatctttacaaatcttatgatttgtatacaataccttaagaaaaaagttcaatacaattttccataaaatattatccttataaactaaagactgagaaacataaaatgcataggctcaccacgtataaatgtaaagaccaatttggcaacaacaattaatatatgaaccacaaatgcatggcttaggctaactacctggaccacgccttcagtgaagccatctccaacttgcagattccggacagcttttgaaaaagcctccgcaaacttctcataaatacctgaaacaaaaggtaaataagaattaaagcaaatatatcttcttgttttagaaaaatccttgtataattaaggaaaataatggcctgtggttttacaactcaactgctcacatatcagaagtacaaaaggaaaaaatgttatttgtttgttttcaaaaggaaataataagtataataataagtattccactatatatattttaattgaaatgttaacagaagttatatttattagtcattttttttaaatataaaatcttgatactaaatgtacttttatcatttttattgtgaagaaaaaaaattactaaattttcatttggctaataaatagaaattagaaaaaaaatcctcagacacaacaac

SEQ ID NO: 2621 - DNA, 631 bp, Gossypium hirsutum
gatgtgattgcttcaagtatgatggtggaatggatgctaaatttgagtacactgagacaggacaagctgttttctcaggtcagttgcagttacaatctcatttttcctggcttgaagcaatggagatttacacccttcttgtgtggttattaccagtgataaatataggttattctatctttaactctgtttttgatgctcaaatgaaggctatgttttcaccagaggtggctatgttgaactgtcgaaaaagctttcacttcctttaggttccacacttgacaggtatatgataattctattatctacataccttctttcttagcagaagctggctgttatttgatttgttattaacagatacattgactctacctttaagtgcacctcactcaagtgaattcggtgttcaggtatgaaggtcttgttctatctgttggtggtaatggaagatcatatgttgtaattcttgaagctggtccttcagcagatacaactcaaagcaaattatattttgccagaataaacacaaaaataggattttgtagggtaatgatctctcatcctgagaaacctatgggctctccgttataaccattctatgcatcaaatcttctttttcttaacattg

SEQ ID NO: 2622 - DNA, 599 bp, Gossypium hirsutum
atttggtgtcaggtgttggagcaatagggtgcgtaccagcacaaagagccaagcacagcacccatgaatgcaatgaagaagtaaacatgtgggtagttaagtacaatgaagggcttaaagaagtattaagggggctgaaatcagaacttccaggcctaaactacgccttcctcgatttgtatggtatcatgcaaaaagtcatccgagatccatcggctcacggtaaaaatacatcaccaccttgttattattcatattttcattgggggtcttaatagttggaaattgacagggtttaaagaggtacgagcagcctgttgtggccttggggaactgagagcaaaaatcccttgtttgccattttcaagctactgccccaacagggcagatcatgttttctgggatttataccatccaactgaggcaatgtctcgcattgttgcggatactgttttcgatggcccttccgagtactgtgttcccatgaatgttcggcaattaattgctgcttaagtttttttttgtggccaaaagaacatcagtaaattaatggccggggggaaatcgaggccttcacctcacacacacaagccatgttg

SEQ ID NO: 2623 - DNA, 624 bp, Gossypium hirsutum
ttcggctcaaagggtttttccttttatttgtgaagacagatcagaattttgactgaggccaatataagtcaattttctcattatgcttcaagataaatacaaaggagaatagaaaccttaatcaaatagccaccaaattaaaatattcatgtttgttttacccactcaaaggcataaattacttgtccaatgcaacaaaggcacagatataagaaccttacagtaaaagccatatccaaccatgatcatacatcaaaacaggaaaaaccacaatgtttataagaatcagagtactattataactaatcagttaaatagatcaagtggaggctaactttaccttgaattaagtgggaccttcatcttttttccctcttgttgaacacccattatagatgaatccagctccacagaaccattattgatgcgcaagaactgcaatgaaaaaattaagagacagcattaccaaatacaactaagagaaaaaaaaatcttaaaatggttcttttcctctaagtaaaatagaaatgttgattgccttaaaagagttcagtattacaatttcgattagaaaacctcttttgttagttatattcctatctatccaacctattcaaatacccg

SEQ ID NO: 2624 - DNA, 630 bp, Gossypium hirsutum
ttctcgagcaggtcagctttgttgagtattagaaggaaattctttttctcgaaggttggatgggttattacggtttcaaaaagttgcttgcttgccatcattttgtttgtgagaaccccattactgtctagtgaaaactcatcgtagtcggtcaatgagacacaaaataggacaatgtcaacatcttcaaacatttccacccacttacagttctccccaaggctactgggatgcaatctaataagctggtagctgctgattcaaagcaagaaaagctaaacaagataaatatgatgttgaaattgtaataatgcaccgatcagttcctcggggttgaataaaactaaccttgatgatggatcatgctgataaccatcgatagaaacttctcgttctatggagggaaaagagaattctgtgcaagagagtccattcgatgatgtaattccctcagcatacaaaatatccatgtcggatggctcatagtccatccttgagatctcaacagcctgcgaagaaggttattttaaactattagagttacaaagaaaccttaacgcaaaaagtcgaaagggaaactggaagttggaacattggatattactattgaacaagcagggcttacccaaa

SEQ ID NO: 2625 - DNA, 636 bp, Gossypium hirsutum
agacaggtatgttctcaaacgtaatatgtggctttgcacaatagatttggtgcttgaatccacatgtcatatgtgatctcatgtttttagtttccattttttccccatgactgattgacatcgggggtgtgcagcatgcaacaagggtcatcatggtcctgtacattgtgtacgtttctcaccaggaggggaatcatatgcctcaggatccgaggatggaaccatcagaatatggcagacaggccctttgactgatcatgaagaaaccaaatcacatgcagcaaacggatcagttggaaaggtgaaggtatcagtggaagaagtttcgcagaagattgggggcttccatattgcagaagagggcaagaccaaggagaaagagtaaacaagagggtgataatatcgagcagtctgcaggcataattgcattcagccaacatcttcaacatagtttttcatatcagaatttcttttctatttttgtataaattctggttttgaatttgctatatatgtaaacttggactaatgttttgtaaaaagttgtaatgacatatatactttaaatttatggtgttgatgtgatcactcacatccaaggactacattataatgtcttattgcttgccaagtctc

SEQ ID NO: 2626 - DNA, 606 bp, Gossypium hirsutum
ggcgtgtgaagcattttatgtcaacaaaaggtctgaacaaataaggggaaaacttatattggtggtaaactatgaaccccttaatcttttccgttaggatgataaattcccactgccaaataagaagacattattctccagtttagccaaagctaaagtctattctaaatttaacctcaaagctggattttggcaattaggagtcattccagaagacaggccaaagacggggttttgcattccaaacaaacactactagtggaaaagtgatgcctttttggactaacaatagcaccatccaaatttcaaaaagccatgaccaggattttccagccaatcatgaatagtgccttgatttatattgttgacattctcttatacagctcagatgaagaagctcattctgaattgctcaaccagtttagtcaactcgtattccattatggaattattatttttgaaaggaggatgcacatcaacaaataagagatataatatcttggaatgaatcttaaagaaggaaaatattctccaagaccacatattgctgaaaaaatccttgattttcctgatgcagatttaaccaagaagtaatccagcatttct

SEQ ID NO: 2627 - DNA, 622 bp, Gossypium hirsutum
ctgaattgcaacagaatcctcatgcttcaaggcacctggattcatcgctggagcagatcatccaagtgaagattaaccatggtgcactccaagggcagcaggctgagtttttggatttcatgtcacaggcaaagtatggcaatatgcttccttcagagcatcagctttgtcttcaacaagaacagttgcaagcgcagcaattatctatggcacttaggcaacaattaggaatggagggggatagaagacttgccggttcattgtctgtagatgatgttggtcagtttgttgggaaccctagcagtcatcatcaggctcaatctgtagggttgaatgcttcagatctttaccagcagaggctatcatctcttgaagagcatatctgcaatcttaagcagaatcatgctttgcaggacctaccagagcgagggatttttgaccccaactccacagcatttggcaggttgacccttcctgtagctgctcctggaatgaaagtagacaatgcaaattctctagatctagccgaacatctttatatgcactccaacaaccaactggatccattttcttcaggtaacccctctttttaccagcaagttttaggcaatgtatatgcttc

SEQ ID NO: 2628 - DNA, 507 bp, Gossypium hirsutum
tatttgtactgattcaaacatggtttttttcttttttcttttgctttttttgtcaaatttactccagttattgctaattggaggtcaagcgaaagaggccctaagtgaagtcgaaaagttctgtaacatttcgaacatgccttttccctttaggtactaatctgccaaataagtttgtttttctcctgttttgctaagaagtgtattcaaattggaaaatgtaatccctgaagatgccatatttgattttggcgtaattcagtttacttgagaaaaacagaataagtaaaatgaaaaattagtggctagaggacttgcctaatggttatggttaaggtatttattgtgacttaattctggagagaaatgcttagagaatagagattatgtcatacctgaatgtgtttgtttcatttgctctctggaacacataatttttggaatattttctaaattttcatggtgaagatttaattttgcttgcagtgtgctaatcttgatcatctt

SEQ ID NO: 2629 - DNA, 619 bp, Gossypium hirsutum
tggttggtctcaaattgcagccgtttgtggaaatgttaagaatgctaagttatatagcgatttctctttgccacctaagtgtaactctttggcagaagctcgcggatacatatacttaatagcgaaagaccaacatggctgtaggttcttacaacgggtattcgatgagggttcccaactggatgtgcaaataatatttaaggagatcattgatcatgtggttgaacttatgatgaacccttttgggaattacctcatgcagaagttattggaagtgtgtaatgaagaacagagaatgcagattctgttaatggttacagaagaaccagggcaacttgttagaatatctctcaacactcatgggtatttctgaaaccctgcaatatattaatgtatgcattcttatctgcaggttctaacatagtttttcattcttccagcactcgtgtagttcaaaagttgatcgagactctcaaaaccaggcagcaaatttcactggttatatcagtacttgagcctgggtttctatctctcatcaaggacctgaacggaaatcatgtcgtgcagcgttgcttgcaatgtcttagcagtgaagataacaaggtaagccttccatctg

SEQ ID NO: 2630 - DNA, 554 bp, Gossypium hirsutum
  misc_feature (538)..(538): n is a, c, g, or t
ggaacagcaaggacaaatgcaaaatacaatgcaaactaacttccaagatgcaaactaaattaaaacattatattggacacaatttgagattatgtaatgcacatatgatttctttttaaatgcaacgtacagaaacagagaagactaaacaaaaaacttagcctagaaagccaaaaatcacttaagagtttgcagaatttcttcaaaaaaggaaaaagataaaagataaactttcataacataaatttatgccaaattctagctaatgataaaaggaactaaagctcataaaagtacataaaattcatatgtactcattgaagaaaaaattcactaaaagctaccatgtcatataaactgctatgataagagaaaaaaagcacaaactgaagtatttattatccaattgtaaaaccgtggagaaaagatgaagataggacaagtccaagaggattaaagctccgtggcctttcctttttaaatttatattttggttatatatgtcctctttttcttctgatttcctctctcagtctcntctcaagactgatcac

SEQ ID NO: 2631 - DNA, 639 bp, Gossypium hirsutum
  misc_feature (612)..(614): n is a, c, g, or t
gggttgattcataccaagcacttgtatgtcatttttctttgtattttatgtatgtttagatgggttttttttgccaatattctatttcttcatatagtaatgatgttttccattatcgacagccatttcgggttgaacaaactctctggtccaattccaagtaaacttttcatttcagatatgactctgatacatgtgtaagttctatttggttttctatcaagtagtttctgcaactagagaaaaaggcacattttcaggacaaatttcttctataaatgttgatttctctctcagcagtccatgcataatagggtacttcatatttgacgccatcctttcaaaggagagagggacataaattttttctctcgtttctgctccttctgcattcattaactgtgtacatttgaaacaattgatttcccatctctgtgccaggctgtttgaaaacaacatgctctctgggcctcttcctttgacccttgggcttgtgaaaactctggaggtggtgtgagtatctagaccaagtacttgattgacttaatgtcaaggttttagatggaagattatttgtacggggttttgacaattaataaatttattgtgttnnnacaggcgctttgacaacaattccct

SEQ ID NO: 2632 - DNA, 624 bp, Gossypium hirsutum
tcaattaaatatttaagataaatatattatagattgatgtaaaaagatataaattttataaagattaattcttttctattatcacttttaattctaataatgttataatcaagatttaaaaagtaattctttttttaaagtataatatatcttatcattattgttagttatttgcttaaggaatgttagtttgatttcttgtttatttgaaattcaataaatttgtttcacagttagagcatatccctattttgaagggaattgttagtattctgattctcagaattgatatttttggaaacaacctacgttgtaactcagctatttaaagggctgaatactgaataactgaaatagatacatatacaaataaaaactattctctgcagtttcttctctgttaaagctttaaactctttcttgtattgctgcaactgcatttttattttttttattccattttcttcatttgaatcttacaattggtatcagagctattttcttaagggatctgtgtgtgaaatggagaccgaaaccagcttttctcaaattgctcctcctgtttttgatggtcagaattatcatctgtgggcagtaaagatggagacttaccttgaggctttg

SEQ ID NO: 2633 - DNA, 626 bp, Gossypium hirsutum
  misc_feature (65)..(66): n is a, c, g, or t
ccctaacggaaggtgaagaaaggaaaggtggtatatggtgtggttgtgcgtgctgccatgccttnnggtcgttgtgatgggagtgaggtcaagttcgatgacaatgcagttgttcttgttgacaagcaaggccagccaatagggaccagagtttttgggccagttcctcatgagctgaggcagaaaaagcatgtcaagatcctcactttggcagagcacattgcctgaggcatggatccatcatattttttcccccgaacatgactttttttagcaatccaagcatttagatattttcatgttgtcccaatagcaggaaaaaaaatgggaagagggaagaactaatctgttgtttctatcacaatcctgagcaatgattagtagatgtttgccttatctttaatgagaatgcaatatatctgataagacaaaattgcattgatgacctcatgctattcttacctggttgaataattaggagatgctcagaagagtctttttgtagaaaaaaaattatgatattgaaaagtagttcgcagttacagttgacagttaattcatgcccttgaagtactgctatttaccctataaaatactttatacttagaaatgccttagagaagagc

SEQ ID NO: 2634 - DNA, 621 bp, Gossypium hirsutum
tagatgcattagtaaatagcaatataagaaaatttaaaacaagcaaatacgaaggaagttttgcagaatacgtcagtgtgtaagcgtacacaaaaagaaatttatttttaggatcaaaatccaccctccaaacaacataaaaatagccactacaggtctcccttctctaacttattggggaagtttccgcacaacgcaaaggtaagaattgcaagccaaataaataattaccctttccaaggtcatcctcaagctcatgaactacaaatgctcttccaatgacagcatttgggccacttagtggtatctgcacatgaaagtcaagaattacaaaggaagcaagactgagagccctctctcattgaaaaggaaattcatgcatgcaaagcacacaagggaatatgcatgcattacaacacctgcttgtccacgattgttgcctctgccactcctgcgtcactcaaactttaagtaacgaataatttaatttgtccaaactaatttagaaaagaaaatgagtaaaatttaagaatgcattaccatcagcattagcaactatgtttcccaggtcagccgcatggcggacttcgctctcactctcaggagcaccatgtgtcatac

SEQ ID NO: 2635 - DNA, 453 bp, Gossypium hirsutum
agaatgcgtgcggctttgcccgccgaaattgggatgccgcaccacgtctggaattgcagccaagcgggtgcactggtagcatcagtgttggagggcgacgtcgtggggttagggaaagcattgtcgtcggacaagatcgtggagcctaaacgagcaccccttattccgggaatggaagctgtgaagaaggcggctatcaaggccggagctttcgggtgtactattagtggtgctgggccgacggcggtggctgtgatagacaatgaagaggaagggaagaagattgggcaaaaaatggtggaagcgtttttagaagaagggcatttgagatcggtggcaatggttaaaaggctggatagagttggggctaggcttattgaaggtgtccccagatgatagtgatgatcaatagcagaatcacaggtctctcttttcctttttttttgttttttt

SEQ ID NO: 2636 - DNA, 612 bp, Gossypium hirsutum
tgccttttctttaaatagtgcaattcaacttttagcatttattaagctagaattttcaaagccgttatcaaagatagttatggcagagaaaaactcatggtttcaaaaactacaatttgcaccttgaatttacacatgctacatgaggtaaatcactccattacctgccacttttcttgagcatgtgattgatcctcaaacgcctgctttttaagaaagctgttgtcaaatagcagccccacagtatcattttgtttcaaggtaaatggtggctgatattgtgcagattcaaccccacgatcacagtcttccaacacatcctcccatgatgtgaaatcaaggttcttctggggctcatacgttattccagcatcattatactctctatccttgttagtttgagtaagttgaaaagcagttagagatggcttcccatgataattatctgttagcagtgaaggccagtaagcaaaaacggagaggtaaatcaacaggaaagaagggaataacacaaaatcaaagaattaacatacttgaatgtgatacatgaacatatggatcatagaatctggtatcagtcctccctgcaacaggctgatgtgaatcaagaaa

SEQ ID NO: 2637 - DNA, 618 bp, Gossypium hirsutum
ataaaaaagaacaatgaattcatgtgagcagtattctaattggatgagaggctctttcaagaatcgggactctaatacaatcatcatacagatactgagtaacttggattacgcacctggttttggcaggttgttggtgaatcacagtagaattgatcaataatgatggggttagcaacatcttccatcctcacattttcgaaacgcacaccacgaacataaccagaaccaccctatatcaaagaatcacaaagagacagatgtcattctcaaacccgaagtgtctctaactacaaattgtgttcaagcaaatatcagatctcatatcttactcataaacagcatctaaatgttaaaagtatgctaccaacttgtctttttctcagatatgttcacaactgaagccccatatagtcctctactttctacttcgctaatactggctaaatgcttattctcattgataaacgacgctaggtttacaagatatgtctcaaaatacctgccaagttttaatcctgacaccattcgtagtctccctgagtaatgctgtatccaagaccacgtttgtgacaatgcccaccgagttatcctccccaaggcttccaatgctaagtg

SEQ ID NO: 2638 - DNA, 628 bp, Gossypium hirsutum
ttctggtactggagaaccctcggcgactccatcaccatcatcacaagcaaatgcccctgctctggtcctgtcgaattccggcaagcgcattgatcaggctgccaaaaagaaatacgtgaagcaggtaactggacgccataatgacactgagctgcacttggcagcgcagcgtggtgatttggctgctgtaaagcagattcttgccgacattgattctcagatgatgaagactgcgagtggggaagatttcgatatggaggtttcagagatacaggctagtgtggtaaacgaggtgaatgagttgggggagactgccttgtttactgctgcagagaaagggcatcttgatgttgtcaaggagttgttaaaatactcaaacaaagagaccgttactaagaagaacaaatctaggtttgatccattgcatattgctgcaagccaagggcaccatggtaataatttttagctttcattttgtgatttggcttgtgctgttatttgatttcaattggttagtcaagttcttgcaaatatgatatttagtaaaagtactggttcaagttggtctcaaagtctgatgaatacatttgatgataaagctatgtttgatagctcgaacaatgttggt

SEQ ID NO: 2639 - DNA, 621 bp, Gossypium hirsutum
aactgtttcaagctagagatattagtcactgatactggaattctcccactcaagtggttgcctccgagatgtagtatctcaagttccggaaaagcaaaacccagttcaggttcaaggccaccatgtatgttatttgtactcatcctaatatctttcacggcggaaagattgtaaaacgaaggaggtataattccagagaggttatttcgactaagaacaagtattttcaagtttgataatctgcctagagaaatgggtatattaccttccaaatgattattcccaagttggagataatccaaagatgaaaggtttcctaaagaagatgggattgtcccaataaaatcgttgccggcaagagagagtttaatcagattcttcatagtatcccccaattgaaatggaattttcccggaaaaactgttgtcacttaaattaagaaattgcaggttggagcaattgttgagctctacagggatgttaccttggagattattgcgacttagattcagtgaacgaagctgtctcaaatggccaaattccctgggaatattgcctttcaagctattgttgaaaaggtttgcctctctcaggaaacttaagttccctattgatggagat

SEQ ID NO: 2640 - DNA, 218 bp, Gossypium hirsutum
cgagcctaccctatctcacagttctaaggtgaaaggcaaaaaggtttggactatttttgtgttatacatctttatttaaaccaaaaggttaacatatgccataggtccttatactctttctaaatttgaaatttagtccatgtacttttattttcaggaatttggtccctctactttccagattttaaaattcaggtccaattgttaatttttttttt

SEQ ID NO: 2641 - DNA, 637 bp, Gossypium hirsutum
acttttgcaaccaatttcttagaaattgagatgaaagttaagagttttatgaatattatagtttggttccttccatacataagaaacctcatcgactattaatttcaaggagaagcttacttggaaacaataattaactgacaatgagcaacggcagcctcaaccagatctgctgagatttcaccaaaacctgaagatatataaaaaagggaaaagagaacatggaagcccaattaatttatctacttcaacaacttaaaagcagagaggtcagtccagattatatatcataacaaaatgatattcataattgagctgagctgaactcaagcagtaagaagctcaatctcgacttgaaattcaaggctcaaagtatgagtcggactcattgagtttaacttttaaagcttgaaattaattcggttcaaggggtgaactgcttgaacttgctcaattaggcatgattacctagtaaaaactaaggtagatctccatgcttaacctcaagcttgattatttgtgctcgacttctagttcatgctagaatttttcaatattggtgaaaaataaatatatattaaactcgccagctatatgaataaaacatgaaagtacacaaattcagtccaaccaacag

SEQ ID NO: 2642 - DNA, 902 bp, Gossypium hirsutum
  misc_feature (97)..(97): n is a, c, g, or t
  misc_feature (321)..(321): n is a, c, g, or t
  misc_feature (382)..(382): n is a, c, g, or t
cctcgaaaaacaaatcaagcagccgacactatgttgatcctatgatttggtgttcaacttttgcaaccaatttcttagaaattgagatgaaagttangagttttatgaatattatagtttggttccttccatacataagaaacctcatcgactattaatttcaaggagaagcttacttggaaacaataattaactgacaatgagcaacggcagcctcaaccagatctgctgagatttcaccaaaacctgaagatatataaaaaagggaaaagagaacatggaagcccaattaatttatctacttcaacaacttaaaagcanagaggtcagtccagattatatatcataacaaaatgatattcataattgagctgagctgaantcaagcagtaagaagctcaatctcgacttgaaattcaaggctcaaagtatgagtcggactcattgagtttaacttttaaagcttgaaattaattcggttcaaggggtgaactgcttgaacttgctcaattaggcatgattacctagtaaaaactaagctagatctccatgcttaacctcaagcttgattatttgtgctcgacttctagttcatgctagaatttttcaatattggtgaaaaataaatatatattaaactcgccagctatatgaataaaacatgaaagtacacaaattcagtccaaccaacagcttgagctactcaagttagagctcaactcgaaaatgactaagccaaatttatttttttctagtctaacttgagtaatttgtgatcaaaggtgtctcatttacgcccccaacatgaccatctacaagaggaccatgcaagagtgaacttggttgagtaacatgacaataaaaatgactgataaaagagaatgcttattcaaccatcaagg

SEQ ID NO: 2643 - DNA, 623 bp, Gossypium hirsutum
tttcggttgcaaaactgacaatgtgcttgttcggaaagctgaaaacagagatggccatttcacctgtttaggctgcatcgttgtggtttggactagcataggttttgtttgattgtagaatgttctttgttcgtcccatttagttccttggtgaaatatttttggatgtccttttcttttgcaacgttacaatttcttctatattagcatctaccatgattttaggtgtgccgagatggccgatgttctagactcagatggcaaaccatgtgaagaaagtttgccttgtacatctcaaaagcatgaaactcgtgatgaaatgctttctaggcacaggtaattctgatacgatgatatttaatatacttctttaattttttttttacttacctgtagtttaattgatggttttggactgttgactgttgtgttccttgcttgctatcacatttaatctagttaattaatctggtttgtttcctggcacaatttagatggcttaacaaggcctactgctattatgaataaggctgttatattattaaaatgccctgatttgacaaatttgattatgaaaaaaacaaaagcagcattttgttttctagggtttagcccattcaaag

SEQ ID NO: 2644 - DNA, 514 bp, Gossypium hirsutum
  misc_feature (419)..(419): n is a, c, g, or t
  misc_feature (454)..(454): n is a, c, g, or t
  misc_feature (457)..(457): n is a, c, g, or t
  misc_feature (480)..(480): n is a, c, g, or t
  misc_feature (508)..(509): n is a, c, g, or t
aattagaatcttcatttccctttttacatgaatcttctatgatcatcatttagatctctaaatgatctaggagtgcggttaatttatgcacaatttattggctctttaattcttttagctgatactctattttccttttttcttcttttgttaggaactgatgcaagcaatttcaatactagtgtagctgatcagcaagtaggtttggctctcttttgaagcccattgctccgactgaaattcttttttttttctttttattgttttgatactaaggaaaactggattatagtgtttcctctgtaggttcactcttttacgagcatattgttgccaaggcccaatttctcattttgatttttagtagatttatggttttggctagagctcagatatataagcctgttacatttgttttnttcaaaatctttttccaaactttagtaggcatccnatnttaaaggaataaataaaataatntactgagtgatcttggttatgtgtatgnncactc

SEQ ID NO: 2645 - DNA, 643 bp, Gossypium hirsutum
tttgatttgtagccaaaggtcttgaaaatttgtaaaacgtggtctatcattttaagtcatgttgtatgctatgttcactttcttcacgccatgattgtgcctccccttttcttcttcctccaatttaggactcagaaaaaaaagacgaggccacactggactttttatagcaataaacaaaaagtcttaacgaagaatctccgaccaagtcaatcaacgccctttaagttccaaactgtgggcccccacttccatcaccgcctaagtcaaatgattttttacattaaattttattttaaggtaaattacagtattggtcactcaattctggattattttctttttctatcactcaattataaaaattataaaatgatgattcaatttttttgaatttatcctttttggtcactaacagttaaatctttgacgggtatccaacgtggccatttaatcaaaggttccacataagaaacgctgcattttggtttcatttttttcttgttctaatgttttcaaaatagaatttaattgaaataaaaatttaaacctaactaaaagtgtattgacacaaatgaagcatctgttcattttttttcttttgttccatatagggttttttactggaaaatctgaactgtgg

SEQ ID NO: 2646 - DNA, 657 bp, Gossypium hirsutum
tttaaacacgagcatacaattcaataaattttggaactccaaccgcattcaagtccgaaaaagtagttctttcgaggatacatatagttaccttgaaagcaacaaatagtagtggatcagatggtgtataaatcatgtaatgggcaccatcctgcattgaaaatcaggatttggtaagaaatgtcaaattaaataataataaataataatgatgacaaccatgttatttaactcttttcaaaagcctgcatggtcacaagctaaaacctcttttatagtatatgtgtagcaaaaactctctcagtgcaaaattactaaagaatctttattggatcatttattggatcatttatgttcacaaatctttaatttcatcaaattacatcaccatacttccattattaacaaattagatcatttatgctaatttcatttaaataattttaatataaaagctaactcaaaatgcatatgcaatttattttcttaatgaagtcaactaactctgagatttcatgccgagctacataagcaagctgagccaatttttttcattagaattacgtaacataattagcattagtgacctaattgattaataacagaagttcagtgatgtaatttgataaaactaaaaggtttgcgacatgcatgata

SEQ ID NO: 2647 - DNA, 623 bp, Gossypium hirsutum
gttatttgtggattttataagcatatctttgatcttattgaactcaagtgacccattttatgtacttgtcttgatatagatagataatatgaattctagtttcggtataaaggaggtcttaacctaggtataggggaaaggattctgattgccgggattcaatccccgaacttgctgaataacacctcttaagggcgactgtatgaatctgagttaagctcaggagatcttgattcacttatgtaataagtagtttcatgctcattatgtctgttttttcggagatgtcattatcctccatgtttgtaagattctgagccatgagcttggcctaaagggttggtgccctttggattttcatgttcaggtcttacagcctctggatatcttttctaaagatttcatcctatgctttgctggttgtttgaactagaccagaaatcgggcggggtattagtccagaggcatcagtctagttgatcaggaactggtatgaaccgtttgaacctgactaaaatatttgggtttttcttagtttttataggaatatattaatttttatccatgtggatgccacatttcgcattctaatcggctaaaattttcacgtggcatgttcttat

SEQ ID NO: 2648 - DNA, 613 bp, Gossypium hirsutum
gttacaataaaaaatcttacaagttgtatcatcccatttttacaatcagtgttaaactttcattttttttttctttttggtatataaatattcaaatgtaaagttctgatcaaggtggaaagaaaaaggaataaaaggaaagaccatacgctatgcatatttattcatccatggctctttattgttgtttcaatctatgttttcctttcttcatttaaccaatattgcaaaagatatgttggcattgaaattctaaagtgctaattctttctattaagatcatcaatatgattgttggttcattcatggtggggcaaagcatttggaagctttataacaacatttgtttgttttagaacagaatgttgtgagatgttcaattacagttacctaacaatcacaattcgttaccaaggacttcttgaacaatgctttcatggttcggtttgatgtttttgttggagaacaccttgatccaaaactgtatcaaagcaatgcttttgatggctcatgcatctggaaacacaacagcattttctgtttccgtaacagattattttaggctgatcaaacgaactgattacacaaatcatgcagcaatttgtgagtaatt

SEQ ID NO: 2649 - DNA, 565 bp, Gossypium hirsutum
ttattaaggttcttcgagatggaaggtggaacgagcaagatgctgctattttggttcccggagacataataagtatcaaactaggtgatattattcctgctgatgcccgattacttgagggtgatccgcttaaaattgatcaggtaggttttaatataactgttgctttgcttaccatcttaatattgatttattgaaatcttagttgtttttactgactgcaattttggtatttgcagtctgcactaacgggagagtcccttcctgtaactaaaggacctggtgatgggatttactctggttctacttgcaaacaaggagagatcgaagctgtggttattgccaccggtgtccatactttcttcgggaaggcggctcaccttgttgataccactaaccaagttggtcatttccagaaggtcttgacagcaatagggaacttctgcatatgttctattgcagttgggatggtaatagagataattgtgatgtatccaattcaagaccgggattaccgtcctggaattgacaatcttcttgtccttctcattggtgggatcccgat

SEQ ID NO: 2650 - DNA, 600 bp, Gossypium hirsutum
  misc_feature (556)..(557): n is a, c, g, or t
tgtgaatgatgtagaactagaaggtgatcctgaattgagagacttttggcaggacgattcgaccgcattacttaattctcttagcttctgttccaaaagcatgcttaaagcatctccccctatcacattatatcctgatgaaggcaacttcagactctcaatgtcaggcaacaatctcttaccccggttatccaagcaaaagctgttatttttctgagaaacctgagatgtttccattgaacgggtaagcggggctgtgaatgtgaatgagacaacatccatgcctttcttcttgctatcttcaacccagctgatgttcctttctgtaacaggatgatcttccttctggtttctgtcaatcaacacactatcaacaacctgatttttctcaaaatggaaatccctatctattgatcttttcttcctcgggttctttgtactggaatatggacctcctttttcgctatctgctgtaactaatcccaacttcctcgagccagtttcggaatttccaacagttttaactgacattctatgttgcgcaaaagcggaatcnncagagagcacttttctactgtgcgaattggcacctcgcattct

SEQ ID NO: 2651 - DNA, 598 bp, Gossypium hirsutum
gaataggatgtgtcgaccacagctttgaaatcaaagcaggaagtacaaaaaattgtagagcaaccaaaaaggccaaacaatcaaatctaaaactgaattatccaaagagatcaacctagagtggtaaccaaaaaaaaatgaaatcatatttgataaaattgcatagcaaatttcataaaagaatttgcatagtaaataggtaacaaataccacataccaataaataacagaaaggaattctgttcgataccttttctctcgcactctagtttcaacatcaagagcaactttccaattctcaaacatgcctggatactcttgaggattggccaaagattcagcagcttttgggttaacctgcaaatgatgcaagcattacatcaaatcattttgcaatctataccattaatcaaacttaaccagaaatacaagtaatagattttgagcatgattacagtaaacatggaagtccaacagattcatgttgcaatggtagaaagaattaaatatcgtgacactcggagtaggaaagaatatatattaaaatgctccaccaacaaggacttattaaatgaaaaagattcccatcaaagattca

SEQ ID NO: 2652 - DNA, 628 bp, Gossypium hirsutum
  misc_feature (580)..(580): n is a, c, g, or t
  misc_feature (612)..(613): n is a, c, g, or t
ttcctttttgccattttaatttgttctatccaaagccaaccacatagtgtaatttattctttttttggccttttcttcttcacttgaagaaagtgagatccattcattattggtgatttttcgtttacctagacttttcaagatcttattgtcttttttggtgctcaaaaagctgcttatgactgacaaaacgatgccatcatagccagatgactactcctggtcatcgatgttttaccttcctataaattaaaaatcattaagaaaaaattacctctttaactagatgtaataatgctgttttgctacttaagaaagaatatggtactataactgctgctggtgtgatgggttggggtggtggtggtggaggaataacaccgcagtattgctacatactacaagaagatgtcgaggctgctgtgggtgggttgcacccaccccccccataacatctaaaaatttacaacataattgaaagatgaaacattgctgtgagaatattgtactacattagctgcttctttttttgggaggtgattatatgttgtgttgtccagaatcctcagcagcagctgcnacttatttcgctgatgatttgctgagactaanngtcgacgatgatgat

SEQ ID NO: 2653 - DNA, 604 bp, Gossypium hirsutum
tcgttcttcattcaaactgagtagagactcaactagagtcacgcgtggattagttagaacagctaactgcaccgctgcaagtcgacttctagcctcccttactctctgagaaatatcactatacaaatgtttgtttagagcaataagttccttctttagtctcttcatcttcgaaaacgaaacatacatgggattgcctctcactggtaagacacacgattcttgaactattgtcatgaaatccttatgctgagtcaaaaaattgaaaaattgaatggtttagttggggagaattgctgcttctgtaaccaagcaactgctaaacagtgatcagaaacctaggagcaagaaattcaacactagattgaggaagccaaaacagccagctatgattaatcagaaccctatccaacttcttagccaagaaattccaatcttgaagatttgtccaagaaaataatggaccattaaaaggaaaataaaaaacttcaagagaatccggacaatctctgaactccttcatatcagaactaatagttgaattcccattatagttcgagctgtctggaggcaaaagagtgacattaaaatcatcgagaagaat

SEQ ID NO: 2654 - DNA, 660 bp, Gossypium hirsutum
ttaaaatagagatatattatagcatagatgctgttccaataatgactttataacctgccataagcaggcattcgcaacggaatcaacatggggtaatcagaaccagcctggtgatgaaacaaagaattaaaatggacagctagtaaaaaccaagaagcttttttcaaggaatcatcatgagagagcatagttaaagtttcaccacgtaagctggaagaaaaaaagaacccatttggaatgctttctgaacagataatttaacatgaaatattttctactgaatttaggaaaggcatgctcacaaatcagattaccaaataaaatcatgttcaatcgtttagtatatgaaaaatggaaacaacttgtcctaccaacctatcaaatgtggaaccactcaattgtccttctgccatttcattattcatgttttcatcccaaaactgagttccagcctgtaaaaaagtgcagaattttaggatcaactgacatattttgatccaaattagtcaggttccgtaaaaattcttcttaaagaaagctgagggattacaaagcagtgcattatcaggagccattgcctggtgatggtaaaatccaaggcttagttacagaaaatatcatgttcatgtaaaatttacctggtgataagatcatgtccaa

SEQ ID NO: 2655 - DNA, 567 bp, Gossypium hirsutum
  misc_feature (422)..(422): n is a, c, g, or t
  misc_feature (444)..(444): n is a, c, g, or t
atcgtcgatttcgacgatgatggtgaacttaaactcgatatcatccgtggtgaagatatcgaaatcgaacgaaaagaagaagaacaaggagaagaaggggaagaagtttctagccggagtgaagtttcgttcatcccagcagggaggtttaaaccactttttctcctttgtgaagactccattttttgagatttttggttccttgcttagcttgtgagcttcttaaaattgggtttcgtttagattttgaaaatggagattaaaaatggaagattttttggtggagaaaagagctcctatagggttttccaaaggggatatatttttgggggaggagctgaaatttcctgccttttctttagatctgcaacggtcacattttggtagggtagattgtgtttctttttatatgtttagaaaanggggaaaggaggatgtcgtttngagttttgtagaattaaaaacgacatgggtcgtcgaattttgatactaacggtcatttttcatgaatatatacatgcatgcatgcatacatacatatataatcacatatcgtgtaacaaagag

SEQ ID NO: 2656 - DNA, 629 bp, Gossypium hirsutum
atgtttatagatggatgacagtaaattaacttttattagctgtgaaaatatctggctgtaattttgaaaatctttagtatttcttaaatgcctttttgatgttgaagttgcacaagtatatgatgttttagggatgactgagggtaattgttttctctaactataaaggtctctcgaatggcagtttcaattagagaactatttcatgaagggatattttgatgatatttttttaatggaaaaaaagttctagtttccccacttatcttcctttaagccaaatgtaattttcaaacctctctgctaatatcctttttattgcatgttgttgctagtaatgcttcttggtaagactctctgttagagaagttgagaggacgtctaatataatcaggctgtcttttgaggaagttacttagatagtgtctaactctcctatttcttggtggacaatgcggggagtgggcataaggttagggtttctctcttttatggagtgtccttttcatgagcttttactttgagaatgtcagcatgtacaatatctatccctaatacaaaataacttgtgtataactttaagctcaaactatccatttcttttaaaagttatttcctgaaggtgcctt

SEQ ID NO: 2657 - DNA, 466 bp, Gossypium hirsutum
gaaaggatcgttgtcaagtggaatgctgaagaatttgcagcgaaataaaaggaagaacagtgaaaggattgaggcattcatcatgagatatggttcagatcttgctccgaagcggtattcttattcggacatcaagaaaatcaccaagtcgttcaaagacaagcttggcgaaggcggattcggcagtgtctacaaaggtaagctaccgggtggacgtcttgttgcagttaaagtcttgagtgaatctagggaagatggagaggaattcattaacgaagtagcgagtattagtcgaacttctcatgttaacatagtgacgtttcttggattttgttatgagagttcgataagagctttgttatatgagttcatgccgaatggatcactggataagtacatctaccaccacagatcaccagataaaagttgtatactgacccggaaaacaatggttgaaatagctgtc

SEQ ID NO: 2658 - DNA, 654 bp, Gossypium hirsutum
  misc_feature (451)..(451): n is a, c, g, or t
  misc_feature (454)..(454): n is a, c, g, or t
  misc_feature (556)..(556): n is a, c, g, or t
attaagctaatcataggtaataaacacattcttatatctgtgtttataagaatgaaaaatcaactaatatttctgactaaagaaaattgacctttcatttaaaacagggtttacagtggtaggggccactgttatggtagtttgcttgatggtgtttgccttgaggcttaagaaaggatcgttgtcaagtggaatgctgaagaatttgcagcgaaataaaaggaagaacagtgaaaggattgaggcattcatcatgagatatggttcagatcttgctccgaagcggtattcttattcggacatcaagaaaatcaccaagtcgttcaaagacaagcttggcgaaggcggattcggcagtgtctacaaaggtaagctaccgggtggacgtcttgttgcagttaaagccttgagtgaatctagggaagatggagaggaattcattaacgaagtngcnagtattagtcgaacttctcatgttaacatagtgacgtttcttggattttgttatgagagttcgataagagctttgttatatgagttcatgccgaatggatcnctggataagtacatctaccaccacagatcaccagataaaagttgtatactgacccggaaaacaatggttgaaatagctgtcggcgttgcacgagggtt

SEQ ID NO: 2659 - DNA, 607 bp, Gossypium hirsutum
tgaagtaaattctctctgcatgcactatctatctgtagacttctacttattttctaaaagagctgatctaaactttcacctgataaacattacaggtagcagagattatcaaggaggatttgtggcccaacccactcacttatttcaacaatgtaacttcttgatcttctggcttcttcccctgattttgttatatacctgttgtttgatcagttttgcttcctgtgctaattttttttgtcaacttgatgcaggaagctgatgaagaggattttgatggtgatgaagaggtaaaaccctttttttgaagttttttgtttctgtgaaaaaattaatacatgtatttcatgtaccatttttactagatttttttttcttttcagataaaaatagcatggctgtaggttttggtctttttttaatatttgttttgtttgtttttcaccaatgattgagtactatttttatctagatatgtttgggggagctgggaactatacttactagagtttctcttccagtttaaatgtgagtttatcagtggaactaggttttgttaataacaaaaatcagaatattgacaagaatggtatccttttccggctag

SEQ ID NO: 2660 - DNA, 196 bp, Gossypium hirsutum
tccggaaacatttcatcaattggggcaaagacaagctccgaacaggctccaacagcattctcatcgattccactacatatctgcaaaaatgataatacagataaaacgtgcctgtatatatataaggtcgggatcatattcaatcaacttcattacatattgaacattacatacagctgtaaatatgaaggcaatt

SEQ ID NO: 2661 - DNA, 615 bp, Gossypium hirsutum
aaacttcctatcaatgctaacaacatgaaaccgagctgtcaagcaagaatgcggaatatcaagtaagaaatccatcaatgtattcatatgaaggcaatatttcagatccgttgccaaaacttaccacaatacggattgtaatggagactgcatatatctgtgaatatgaaagaaaccaaatgacttaattagacaacaatgtcgattcaagtttcaattgaatggcataggccatggtttagactcactgtgtagtttttcatcctctggaatatggctcgactggttagtacagcactgatgatgacactaagaccaggttcggtcaagacaatgtcagaagcactacgagctgcatcggttgcatcagccacagctatgccgatgtctgctttcttaagagcaggagcatcattgaccccatcaccagtcattccacatatatgtttcctggcttgtaagcgcttcacaatctcatacttgtgctctgcattgacaattatacaaaaagccatataagcgaacaacaaggatgggaagaagcatattctagaaccaaaatcgagcaccacattatcgataaactgcatccaaatatcacaagtcaagatggga

SEQ ID NO: 2662 - DNA, 599 bp, Gossypium hirsutum
ctggtgtagctttgtcgtgatgatattcagtttatacacttaaagataaaaggggaaactcagacaaatgatgccatcattacaacctatcatcatcctcattattatgatcatgggtttttgatcttaagatctgtggcactcaaaatgaatcaatgtctttgatatgaattagcttccaacactgatgaaggcatatgcaattagttgtgcttggtacttttggagaaattctgaagctgtcaagtcatcatgagcgtcccaagctcttttttgagacccaccattgataccacttgatcttttagggtatctacgaccataaatggttttttgttcccttttgattgccttttttcttgtagggactgaagattttaaaaaagctactgtgctcttctgtttaactttacttccctcctacttgctgtagattctaactttgcttttttcctgtgggctcttatagtgtttgaatcatgggaaaatgctaaagaaagaaaattttcaagcaaaatgaccagatgaaaaaaaaaatggggaaggctggatgatgatttgttaatctttttactgaaaattttgtgacctttgatatg

SEQ ID NO: 2663 - DNA, 641 bp, Gossypium hirsutum
aaggggaaggttgagtttttcataaataagcgcacgggcaataattatacaatttcattgacaaattattctgtcttgtgatgaattgataatgtcgaaacctcttgatttcttacttttgaaatgcaaataggatctaatactgttattgaatacttattgtcaaagattgaactgaatgtgcctatcaaagattagctctcttcctaagtggtgggtggcttctccactccttgaaatttgaatcaaatttcgcattgtttttcctataattgttgtcaaggcgtgcccctaggttttgcgtaaaatccaagatcggccaagttaaatgatgataattttttttaacaatctaatttctgattatatttgcactttttgtttaatacttaaaattatgtatggcctcttcatgttctctttcgaattaaaatttaattgacaaatgatgataaattttgaacgtgaatacagtaatcagttttgttcccacgcaaataatcattgacggctttggtttattcccaagtccaaatcaccacttaaacgtcacattatctctttttcttcttttaaaacttggatatcccttcgggatgtgcgggcagggctgccatgacgccagtttctactggaataag

SEQ ID NO: 2664 - DNA, 989 bp, Gossypium hirsutum
  misc_feature (325)..(326): n is a, c, g, or t
  misc_feature (500)..(500): n is a, c, g, or t
  misc_feature (619)..(619): n is a, c, g, or t
  misc_feature (680)..(680): n is a, c, g, or t
gtcgattccgggatgatcaagcataaggatgatgcagccacatcgaatgagtcttagcatgtcgattctgggatgatcaagtataaggattatgcagcctcatcgaacaagtcttagcattttggatgttaaaggggaaggttgagtttttcataaataagcgcacaggcaataattatacaatttcattgacaaattattctgtcttgtgatgaattgataatgtcgaaacctcttgatttcttacttttgaaatgcaaataggatctaatactgttattgaatacttattgtcaaagattgaactgaatgtgcctatcaaagnntagctctcttcctaagtggtgggtggcttctccactccttgaaatttgaatcaaatttcgcattgtttttcctataattgttgtcaaggcgtgcccctaggttttgcgtaaaatccaagatcggccaagttaaatgatgataattttttttaacaatctaatttctgattatanttgcactttttgtttaatacttaaaattatgtatggcctcttcatgttctctttcgaattaaaatttaattgacaaatgatgataaattttgaacgtgaatacagtaatcagttttgtncccacgcaaataatcattgacggctttggtttattcccaagtccaaatcaccacttaaacntcacattatctctttttcttcttttaaaacttggatatcccttcgggatgtgcgggcagggctgccatgacgccagtttctactggaataagctaacgttgattttgaattgaaaaaaaaatattttttaacattttatttgttcggtaaaactaaaagccacgtttgattcgctggaatggaataaaaggggttatggaaatagagggcgtaaataaggtaaatccttttgttttgtttaatggaaagggaattgaaggggtaaggggatcctggggtttgggtggaaggaaataagggggaaaaaca

SEQ ID NO: 2665 - DNA, 613 bp, Gossypium hirsutum
tgttggagatggtaatggcagttgaccccatgacagcatcaacaagaccatcagcacaattagaaagagaattgtgatcaacccaaacgtggcttgacccaaagatggagattgcatcaccatcagccattgtcctccacccgaagtgagtgggtgagcttctaaccatggcattgccagtgggcttacagtcatgaatatgaagaccatgaacaatgacattggtaacgtattgaattgtgatacatgccccattagcaatatggacattcaccccacgaccatcaatggtcttaaagctgttgaccagcaactcctgcttcaacttaataaccatgtccctcttgaacacaatccaaagtggttgttcctggatcacagcatggcgcaaggtcccaggtttggggttaacagggtcatcatcattagagtcagtgacaacgtagaagcgtccatcacgccccccaattgcattccttccaaaaccaatgccacagtcagcaagtctcttccggttcttctgccagttggggtcacaacgccagcaatcatcaatgggattaccagttccgcacgagaagaaccccaacttcctcctttccgtcgcatttcg

SEQ ID NO: 2666 - DNA, 627 bp, Gossypium hirsutum
caggttcagatccaattgattgaagttgcttccttatctaccgaaaagtattatgttatatagaaatcaaccacgtatacagcacgtattacagaaaacatgtgcagcatatcagctacgcattgttttatagatgacaactctatttaaggcataaaatacaatggagtatatgctatcccctttgtatattgtaaatgacaaaaatctaaagtctttacaattctgaaggcaaacaacaaaatcctggcagggaaggatgtatgaaacaagtcactagataagtctcatttctaaaatttgaactcttcaagacttataggaaaacctttctacaccggacttcatggtccagcaaccctcaaaaaccatattcaatgtcaacaaccacttcatactcacctcagtaacaaagctcacagccaatcctcctctaccagcccttgcagttcgtcccacacgatgaacataatccctaggatacctgcaacaggtggaagctaaattttagtgcccaaacaaactatagagaaactaaagaactagaaatttcttaattaatagaaccttggaaggtcataattaatgacaagatcaacagtaagaatggctaaaccaccactaaca

SEQ ID NO: 2667 - DNA, 366 bp, Gossypium hirsutum
tggatgggtctcggtccactaaggtcattattgagtgtcctattaattttaatgaagagaaattagatgccagatcttttttccttgacccaaattccatttcctttgaactacatgtttcgataggtaatatttcaaaagccaccccacttcctttttctcctgacttaccatatattcttggctgtaatggaacccctcggattctttctctcttacttcggcttacaatatagcttgttaacattgtaaatgaacctttactaataggtatctcgaattggaactgggtttggaaattgcaattattgcccaagctgaagttcttcatttggaaacctcgtcactacattcttcagacaaaaa

SEQ ID NO: 2668 - DNA, 581 bp, Gossypium hirsutum
gggttctatatctgtggttggtttagtgggagttgttggttttgtattggctataataagagatggaaaattgggggaaaagagaaaaaaacatttaggagaagttatgcttagttcctgggttgcaaaatcttggcaataactgcttcttgaatgtaatattgcaggttcgattcctttaagcaagtgggtatttttgtttttatttagagtctttgtgtttgctaagaaaaatagaacaaaaaataggaaataaaaaattaattacaacttgattcttgattctttgttttttgtttagtctgaacattttcttgatgctcatttttcattaaaggaaaattatgttgaaattctgttcattttgggttcttgaatctgcaatattccaggctctggctagctgctcatattttcagtcttttcttccgaagatactagacgaatgtgaatcaacactagttgacagacagggtgaaagcctgccacttacaattactttatctgatctcttagaaggtaacatcagaacttggtgaactgttttgctttctttaaaacttctatatctacaaatttta

SEQ ID NO: 2669 - DNA, 624 bp, Gossypium hirsutum
tagttaagtttctctgtttgattaatggttgaaatatttgatacagcgactttaacaattgaggattccaactccaacaagaacaagggggcttcgagggcttatgcgaaacactctatggcggatatggcggtcatggtggaagatgatagaccagaggagtcaccagtctatggaccatggatgcttgtggagagaaagttaaggcgtaattttagggatccttggaagccaggtaacgctaattcgggggttttgattggggattctagatttaaagttcttgattctgtcaatgatattggggaaggatgggaggaaataagggagataattctggaagctaataaaaaaggaaagggtgtcttggttgaggctggaggtagtggggaaagtcggaccactgacccaattcgtttgaagcaggggtttgtagctaaagtgggccaagggagtggtaaagggtttattgtttatattaaaataatacaccaaaaatatataagaatcgagaatagcggtgttcgcaagtgcacgggtcaaagtgtaatatagttagtacaacaaaatatttgaaaatattttaaggaacgtacccaagagatgatggactaaatctgcgaa

SEQ ID NO: 2670 - DNA, 639 bp, Gossypium hirsutum
taggtagggaaaaacctacatgttctcagtcagatagaaggtgtggaccttgagatgtacaaagaaacagttcttcccagagtcttagagcaggtaattttacttctttcttctgtgtttattttttcttctctaatgttacaagttgaaggtctgtaacataaaagactttatatggttcttttacaggttgtcaattgcaaagatgatcttgcccaatattatctaatggattgcattattcaggtattccctgatgagtatcacttgcagacgctcgagacattgttgggtgcttgtccccagctccaggtgggtaatgggaactggtcttcttattttatcttgtgtcttcccgttcctccctgtgccacctgacacaaatacctcatagcacaattgttagccttaggctttgttctagttgccccattatggcatctttgcaatgagtttccctcctccaggtttttctataatgcttattgtttctcaatatttaaataatcgttatgctagtatgtgtgactagaaaatagggtgactggctactattttcctgttatcaagggaacaaaattgcattgcccctgattgacttatttcttacttgctagctagtatgattgttccatggag

SEQ ID NO: 2671 - DNA, 610 bp, Gossypium hirsutum
ctctgcattcacgggttccgtcgtccccatcgctctcgattaatgcttaggtctgaattctccaatggagccttaatttattaatatttattaatttaattttttaatttaatatttatttaataaaataaaaataaaatttcttcttgagtcaaccttctcagtctttattgacttaagttaaggctcttgattttttcttcaatgaacagatattcatctaattattgatgaatctctattgatgctctattacattgctctttatgagatgcttcatagaccttacatattggaatcctatatcatttcattgctatttctgtttctctctttctctcatccttctatttatccacatactttttattttgcttcacaatttcgatctattcataatcagattggttttgtcttttacttaatgcaaaaaaaattcagttgctataatgatatgaccaatatatcatatcttgactgattctttggatccagataatccgaagcgatgagttggttattagtgctatagttattagcttatactgtggtccgcccattttttttgaatcctaagcctaaaaaacccaacgagtcgcacactaagcat

SEQ ID NO: 2672 - DNA, 494 bp, Gossypium hirsutum
gaacgataatgttacccggctgtgattataatcattggcttattgttatggagttccctaaagaccctgctcctactagagaacaaatgattgacacttacctcaacactcttgccactgttcttggcaggtgagatgacttgaagctttccgggttttcttttctttagttgaaaactatgaaagaatatggagttttttttgtatgtttcttttttctctttgggatttttcttggttttttatgaaatgggttgtttttttttgttgccttgctgggtaatgtcaagttttgatgagatttttttgttggttttgcttggttttttttttctatatatagattattatttattcctcacattctaatacatttaaaatttttgaaaaaatttaattataatcatattgtatacatattcatatatgatacttacataattgagttgctcttggaataatgaaaaatttgaacttgaactcaaataaaaact

SEQ ID NO: 2673 - DNA, 614 bp, Gossypium hirsutum
cgaatagtgggctccaacccattgagacgctatcagcagtgaaatcgcaacaaattaaggtaactacttagtagttcaatgatggctttgatcttgtataatcttcacctccatgaagtatcttcattaattttgaatttacatttgatgtctaggagaataatcctcactttggaatcgactgcaatgatgttgggactaatgatatgtgcgagcaaaatgtcttcgaaacgctgattggcaagcagcagcagatcttgcttgcaacacaagttgttaagatgattttgaagattgatgatgtcatttccccatctgactactgagcttcacggtcagctggaggttagcctaatttgatggttttgtattttcttggaaccatgtattcactttagactttggagagagcatgttttgcttctaatttttgaactgccagttccttggttagaattatcacactcttattgttaaaggtggttgcttgttccctttttgagtcactggaattacctacggatcattggtactagttcttcccctgtatgtaaaaatgctggacaagaaaaaactgcaatttaatgtgcaattttaattttggttgtttctct

SEQ ID NO: 2674 - DNA, 618 bp, Gossypium hirsutum
tctttcgacatttttctcattctattatctttcttttgaagtatccgttttgtttgacagctctttgattttgatactttagatacttggaaaccaccttgagcctttgacagaccaacaattaatgggcatatgtaatctgcagcaatcctcccaacaagctgaagatgccttatcacaaggaatggaagctttgcaacaagctctagtagacactctttcatctgcatgtttgggtcctactgcctgcgggaatgttgcagattacatgagccagatggctattgcaatgagcaagcttgctactttggagaacttccttcaccaggctgacctattgagacaccaaactctgcagcaaatgcatcggattttaaccactcgccaagcagcccgagccctgctagtttttagtgattacaactcacgccttcgggcacttagctctttatggttagcccgacctagaaactaatgataattctttcattccatgaagcttttgttgatttcattaatgctctttgcacatattgatgcggttctgccatatattgcaccttctttcacaacccattgaaggtgatgggatggccatgtagaaacatgatggttatg

SEQ ID NO: 2675 - DNA, 515 bp, Gossypium hirsutum
agtactacagagaaaaaagaaaagaggtacctgtgttttccaattggcttcagcatccttctattgctgacttagaactaaattctcttgaaaaaaatacaaatgtgaagctgaagccctaatataataacaaaattgaaagtgaatttatttatttattgtaagaaatagaagaagaaagggaacctgattggtagaaggatgagtgaaaccaaaaagattggggatgtcatgcaatgaaggagcagtggaattatcagagaaatcaacggcccaaattcggcctacccccatcactcctttcgcctctccatggttcttttgttcctatctcttcttttctctaatatatatgaaaggaattcatcggtcctgcattttggttaatttctcatcattgtcgattattctctaaaaacctctagaatttttgtttctcaaagagaggaccgaagaagaagaaaacgagaaagggagagtcaaagagagaaaggagattgagttgcgtaacatga

SEQ ID NO: 2676 - DNA, 651 bp, Gossypium hirsutum
ttactcttttctataaacatttccattgcacataagaaaagcttcatggaaaaaacacacagaggaataaaagttatgcaacactattttgttccttcatggaaaaaacacacagaggaataaaagttaaaaagtatttggtgccatactgaagtgcatcgtttgcaacctctgcaacgaacttttgagtagcaacagctacaagccttattctgcaaaagcaaaatataaagctagaattaatggaaaaatcatgcccaacacaccactctttttcttttaacagtagaaccgcaagcaatatagcaaccgtataaagcttctttcttttcttttggattttgcggactacatgaaattagtggtttgcatctgtctcatttttcgtcacaaagtacagtaattgaagtttgtagggtgactcggaaggcaaccgataattaaattgaaggattaaattttccattacccggaaccctagaaccatcttaacgaacgataagaacccctattcgaggaaagcaagattgaaattaggactctttatcatgaagaccaataaaagctgtaaagattaactgaaatttttataaataaaagaaaatactttcttgaaaatttccggttgggcagctaaacagaggataaaga

SEQ ID NO: 2677 - DNA, 632 bp, Gossypium hirsutum
  misc_feature (615)..(618): n is a, c, g, or t
ttccttaattttttgggttatcctcttcgcccggtatggatttcttttctcttttactgtgtacaacacaatttataacatgcaaatttaaggcaatattcaagttaatctttgttcaattgtatggtcaaactgactgaatgatatatcatttagatccaatatgaaaaatacacacgcatagagaattaggatcataatgtcaaatcttattgcttgctataactcaaagcgaatcttttattagctttgagttatgaatttgtttttttaactttaaatatggatttcatgaacaaaaatactgttgaattttggaccattaatggcctcatggttgaggttgaattcttgtgcaaacttggacctcattaaggcaagctgtatttcttcaatgattaatttctaaccggttttttggtggttaatttctaaccggtttttttgtggttattagtgtttcataagcttaataatgtaacttgtttcctttctactttttccttctcagaatgatactgagtgtgcatattatctaacaactggacaatgcaagtttgggagcacttgtaaattccaccatcctcaaccatctaacatgatggtttccttgcnnnnatctcctatttatc

SEQ ID NO: 2678 - DNA, 638 bp, Gossypium hirsutum
attgttttctgcatttcttgcaacgtgttttgcagttttgctacctcctgagcttttgcttcttctagatcagtctgcatacatggtttcaaggctttcaatgaacatatatatatatctaaaagaaagcagcataggatacagtataatatctgcagatttcgaaacacttaaaaactgatgaaattctagaatgttggcattattgcttgttattacacaggatacaaccaggcaacttccattagaactgtcatgtttcatggtttagcacttttctaccaaacattatcgttctgcatgattaaatagttacccttaaacgtttctcaagctgtaaacgccaagtaagttcctccacattcttttcaagtttatccttcgcttcttttagtgcacctgtttcccttgcagcctacatataaaatcaaggaaaaatggaaagcattaatagaaagaaaatcaaacgtttgtccttggaagaagcaccgtgcttgatgtatgttttgcaccaagaaaactgctataagcttattgagaaaaacacagatcagttgattaatgatgttaaattctataacaacatcatgtcaagacagcaatatgaaacatcagttgatggacatagtgcagtacac

SEQ ID NO: 2679 - DNA, 645 bp, Gossypium hirsutum
aagtaaacatcaaaacaaaagaacctcttgcattatgaagttacatcaaactctaaaatcagtttcattcttttagtagaggattataagtttataactactaagtaatcccattgctcataactaccaaataatcctattgctcataacaactaagtaatcctattactcatcaagctaagtaaacagattgatattagacaaccatgctatgaacttggactaaaagcaaactaagcttacccataaagggatcatagctggaaattcgaaaggacaaataccagcacaaacaccaagaggctctctaatgctataagaatcaactccattagatatattggaaacaaattcaccaatttgcaaattcgccaatccacaagcatgttcaaccacctctagcaaggaaaatcaaaaactataaagcaaaccattactagaaggtttattcaaaaaacatactaaatgagaaagaaaattataagacattaaaatagaaaagagatactgacctaacccacacaagacatcatcgtacgcatccttcaatgccttcccgtgttcattggtaatgttcatagcaagcttatcctggggccataatgatatttcccatcaataaaagataagtgccaatcaagaaca

SEQ ID NO: 2680 - DNA, 607 bp, Gossypium hirsutum
aagaggaaatactactaaatgaaaataaagcagttgaagcccaaaacttgtgacaacagaaaactaaagccattaagagttggacaatcccagcaataagtgtttacctgatattgaaccttttttcttaactcatcagcatattcttcagatattccttgttcagaggacaaggataatttgtcaccagacaaagatgccaaccgctgctccaggagattcaccttattctgcaattcctcattctcagaacactgcaaacatccagaaccgcaagtcaaaaacatatgtttgctttaatagagaagctagcaccttctaaagattgaccaaattatactctaaaatttatattagagaaataatgtcattttgtgaatggaggaaaaaaagacatcaagcacaaagctttcaccttgttctgcaattgttcttggaggatacgattatctgctgattttatctgtatcaaagagaagaatcaacatgataacacaattaacataaagaatcattgtttaacaagcctaatcaatggcagaacagtgcccatcaaatgcctttcaactccataaaagagaagaagaaaccaaatcactcacctcca

SEQ ID NO: 2681 - DNA, 626 bp, Gossypium hirsutum
tggaattgagtgcagactggagggtctgtaagcctaaatgccttgaggtctttttttattcgttaaatgcctacatcaattacggataataaatccaacttctggagaagatttattaccaaggttgcagtaacgtagaatgtaacgcaatataagtacaatggaggttcctgtataatgggtaaattagtcacaatacattagaagatcaaagagcaaaatgatcattttgttaaaaattttatctatttttactgttaaaaattggtctccatacatcaacatgaggtataattggcacaccacatgttactgtttgattattccatcagccacgtcaacttttaacaatacaagtggatgaaatttttaacaaaaattaccaatatgctctttgatcaacgtacacggactaatttgcctatttttttagtagagaaagcaaaatacaatctgactcctagtacaggagcttccatggaacttttaccaatgtaagactgttagcagtggagatactttgatgaagatagcttttaatgcattatggagcaatgtaaacaaattcaataaataaagtatcaaggttcagacatttctaactctgccactacaagtctaaccac

SEQ ID NO: 2682 - DNA, 649 bp, Gossypium hirsutum
tggtcatcaagtaattcaagtctcaagaaggaaactgacaaaatcagcgggcagcaatctgtacctcagataaccaaccttgatgagaagaccaaaggaataagcaatttaagctgcatagattcaaagatagaacgtgttgaagcatggcgttgaatgatactcttaacatcatctggggcctaagatactttgaataattactgtgcatctgttcagtttggaacttgtgaatcgtttaatgtatcttttcggtgagatgagtggtttggttaaccttctgtacaatcatggatcgcagttctttacatttaagctttcatatgaacaaattatatcatattgaattgatgaagcattcacttttccacaaacctgtttcatcaaggacatgagatttcctttagaatccaagatcagtgccaactcttcagcaggttcctgcatcctgaaagcaagcatttagacagaaaaggaagtccaggtaagtaaattgttcttgtaagagaaaataacatataatagacacagtgaaaattaactccaatttagatgccaatcagtagacagtaaccttttttgagtttagtagacagtaactgtatctctggattgtggggtgatcctgaaagctatctctggatgttca

SEQ ID NO: 2683 - DNA, 586 bp, Gossypium hirsutum
caggccgttgtctcggttcgctttgtgaccggagtttggccctcgaagattgtgtgtttgccatgtaactcggcatgtatggataatcatgagaactgaaagaggatctagcaggcgttaccttcgacatcggaggagaatgtcgcggactgttgtgtgtggtgaatgagaactcctcatgcttttgttgcctctttaagattggaagctctcctgagtaatatttgatgattccttgctcaatcctctccatttgtgaatgattcattaaaccgttttggctcttcacaggcccatgtttttcattaataccttcctatatgcacataacattgataaattagttgttgaatttggacttattgcaacaataattgatgtttcgttgcttagaaaatgatggaaaaaacttactctttgtgatcttttgaactccatctcctggagaaacctgccatatcttaatgattgggattttacatcaagttgtgattggtcagccatctgaattctctgaaaccgagctcgaacttgtatagacattaacgcatgcatgcttcggagagtagcagttgttgtttctcac

SEQ ID NO: 2684 - DNA, 614 bp, Gossypium hirsutum
tatcgtattactaatcatctaaatcaacccaaaatctgtcgtgataataaaattggttattatagaaaagggattaaattcaaggataagatatgtatttaaatttaaatacaatagtaacaatgaattacgaaataaaaaataattaaatgtatatctaatcaataattaaaatcaattaaaattatttatattagattataaaaattaaaaaaattaaaaaaaattatttatactaaaataattaattaaaaatataaatacatataaaaaaaagctttcgatcgagttcgagtgaattcgctcgatcttttgatggcaaatgtatcttattttatttaaatgcaataaaaatatattttttattttaaatagtagatgtggacaatcggaatcgcatattaatttatataattttattttatggtttgacattaaatatatgttgcatgtggatggcctttacccggctaggaaccattttaaataactggaaaccgacaaaatatatggaataaaagcttattagttcaaactagaaagccaaacttgaaaataaaatttgttcaaactcaatttatttacggtcatattcgaaaacttgatttacagtc

SEQ ID NO: 2685 - DNA, 638 bp, Gossypium hirsutum
cgtgttgtttcttggagctccaagaaactggattccctccaagaaacacacaaaacccggaggtggacctgcgatcatcgacatcagacccccaactagcatttgaataaccttcaagtaaaagctttgaagttcgagtgaactataaaccatagctcagcgtcccttgtcgataatgcaatatcctcttaacagctttgaagtggacatctagtggcttatgcatgaattgacacaccttgtttactgaataggcaatgtcaggactggtgatcaccacatattgtaaagcctccactatacttttgtattgatgttcatcttcgagagggctcccttcatcagcagacaagtgactagttgtgataattggtgttggaagagcattcgacctgtccattgagactttgtgaagtaaatctctgatatatttagtctgggatagaaccatcccatttggtgtgtttttaactttaatgctaagaaagtaactcaactgtccatggtccttcaacgcaaactgaaaattgagtttggtaacaaaccgatcaatttcctagaagttattgcctgtaactatgatgtcatcaacataaattaaaacgtacaacaattgagcacctttctgaagaatgaag

SEQ ID NO: 2686 - DNA, 646 bp, Gossypium hirsutum
ataagagaatttgaactttagaatatgaaagactccatgatagttaaaagagtattctgatagattactcagcattgctaacaaagtaagattacttggcttgaatttattgattttagattggttcaaaaaaattttgtaacaatccctgaaggatttgaagcaactatttcttctttggaaaatgctaaaaatatgtcaaaaattagaattggcagaattactgaatgctttaaaagcacaagaacaaagaagaggtctgaaggtctgtcgagggtgcactgcttgcaagagttcagtcaaatcagggagacaaaaaatttgtttttactctttgtgtgcattgtggaaagagaggtaatgaaaagtgtcttattgatagtggtggcacaaaccatatgacatttgatcgtgatctctttagggagttatatatttcgatagtttctaaaatacaatttgttaatggagactattttactgttaaaggcaaaggcattgtggcaattagatgccctcaggtacaaagctaatcaatgatttgttatttgtacttaatataaatcaaattttgtttagtgttggttagttgcttgaaaagggcttcaaagttgtctttgaaaccaatcattgtcaaatcaaggat

SEQ ID NO: 2687 - DNA, 630 bp, Gossypium hirsutum
ctgagatttctgatatgtggaagtatgacctgcattctctcagcattaagtacttgctacccaacaataagcgcacccttatcaccatttccactgacagagacatactccgtttccttgaattccatgaagactctgcttctgctgatgtttatgtcatgaccccctcgcctccagctcctagcgatgctacctccttgccttgcagcaggtcaatacatctttgcatacccctttttatttttttgtcaagtgctaataatttctgtatttttcatcacttttggtatcaggtttattacaaaatttatgaggaatataacatggaacttaacagatgttagtgtttgcagttttgggtatttgatgttttgacaatttggttccttaaatggcatgatacttacctatgcaggtccagtcatacaatgcccaatggacctgtttctcccattgatgctcctacggattatcttcccgatgagcctatttttcccgttgatgctcctatggattttcttcctgatgcagaagatgctgggaagcaaaaaacacctcaaatttcatcacggaagagttgcattacaggcgtaggtcagacttttaatactcgatgtgaacttcatgagg

SEQ ID NO: 2688 - DNA, 619 bp, Gossypium hirsutum
  misc_feature (614)..(615): n is a, c, g, or t
gaagctaacacctggcaccgaaaataaagtttggagggaggggtgaatattgcaggatgtaaccatcttgaaggaaagactcttttccagtagtctcctcagggattctcttaataaattccatcacctcacaaggaagcaacgatcgagtgaataccatatctttctgataaatcccagaaaacatctcttcttagtcttgatcttgacggtatccaagaaagaagcaccatctgttgttgtaacccctccccaatataaatttgtgaagcctcctcacaagatgaaaaaaatcatttagccccggtttgaaactttttctttttcagtttaaagtactgaacatggcaagctcaacatccgcttcaattcattggtatgagcaatgacctccacattttccaagttaagaagtttcacaagattcaaattgaccaaattagaggggtccatcaagggagggatagggcagtcactttctttcctgtcgatcgtccgtccttccatcttagttctttcccctgcagaggatacccaaaggagatcagttcagtatgcccataaaaatgcaattcatgatgattaaggttttatcatgcgaagaaagcagctannctag

SEQ ID NO: 2689 - DNA, 627 bp, Gossypium hirsutum
tgctcctgaacctagtggttatctccatatagggcactctaaagcagccttattaaatcaatactttgttcaacggtaccaaggtgaagtaatcttgcgctttgatgataccaatcccaccaaagaaagcaatgaatttgtagaaaatcttataaaagatgttgagacattgggcatcaagtatcaaatgatcacctatacttccgattacttccccaagttaatggatatggctgaaaagttgataaaggaggggaaagcctatgtggatgatacaccacgtgagcaaatgcagaaagaaaggatggatggcattgaatcaaaatgtaggagcaacagtgttgaggagaatttaaagttatggaaggaaatgattgctggctctgaaagaggtttgcagtgctgtcttcgtgggaagctggacatgcaagacccaaacaaatctctcagggatccagtttactaccgctgcaatcctgttccccaccatcgaattggagccaagtacaagttgtatccaacatatgattttgcttgtccatttgttgatgctgaagaaggtataacacatgcactacgatctagtgagtatcatgatcgcaatgctcagtactataggattcaaga

SEQ ID NO: 2690 - DNA, 645 bp, Gossypium hirsutum
ctgcaactttgctagtcaagatttagttaccaacaaggcagttgcaaaaaacgctacagaccagtgtgatcagtatcaaagtcgggcactaacagagatgggagacattgacttgtacggtatttactcccctttatgcaattcatcggcaataaaacctggctcagatggtaatgtaagtatcaccatgcttcataacaagtcttttaccaagacaatgaagaagtgagtaggaaagaaatttcggttctcacagactaaaaacttttacccacttgtcctatagattcatacttttatgcatatagcaacgtaaaaaggattggccagggatgagatgagagctatttataaaccatggagtagggattagagaaactaaatctgaaacaaaaacatttctcaaaggaaaagcaccttatggcagggacctacctaattctgtgatggtgttgaattgttaggtgttgaattttgatccctgctctgacgtccacgttaagtcctacctaaatcttgccaaagtacaagcagcccttcatgccaaagctacaaaatggtcagcttgcaggtaaagcaagaccaccgcttaaattgaaagaaattgtttatctcaagtcaaaagaaccttccagagggtgaaac

SEQ ID NO: 2691 - DNA, 580 bp, Gossypium hirsutum
aacttgctattctacggaatagcctattacagcagactgggaataaggcctgaatagccattttgggtaccccttcagaatggctattccataccctaacgaatagcctccccaaataaaattcctagaatacccatgctatcaacggtaacctgattcaatcaaaacaacatactcataaaaaatatataaaatctgcaaatcgttagtatgaatcagaagaagagagaggttttatcgttatgcatgctaaagtggtttggatgcttgaaaaattgcagatgagaaagaggtgaggaagaataacacgtcaataaccaaagcaatcggagcgatttccagcaacagaaagaggggattttgttgacttatttttgtagatttgtgtttttgtggtgatttttagagagaattaattagaaaaattgaaagaggagatggagatgaagcaagagccaaaattttagcgccttctaggtgaggccacagtggtcggcggtggcagcaagcaaaaacttgttggaaactggtaatataggtgttcttgggttttttggggggatttagaagagaaaaaaat

SEQ ID NO: 2692 - DNA, 623 bp, Gossypium hirsutum
  misc_feature (614)..(614): n is a, c, g, or t
tatgattttattctcccttttagcataaaacagcgggaatcaaggcttttaatccattcctgtaagcatgtcagctccatgaatgacccctaagccaaccaatgcaatgtctagcctctaaaagtaatctattcctaaggcttatctccaaaaaaaaaaccacagttgcaagaagccaaagttataacatgagctaacgtcgaagaaacaagcatgctaataactgacctgaatttctttctgaagaaaagggtctccaaaagaacagtgcaggggataattgccagttttgtcatctaaaatacataaaaagggcaaacattttcagaaactaatgctcctaatatgcttgtaaaagtgaggaagaaaagccaaactttgaactggatatatagcgctagctactgacaaaattccataaaccaataagctgtaagcacaaggtatcattttgtatgaattttgttggaatcaaccaaaacttggacatgaatttgattccagaggataatgacaggaaatggaactttacctggtagaaaccaacaaaattgaaccccaaactaaaattcaaaagcccaatggatatcccatttaatataacaaatcccatnacagctcag

SEQ ID NO: 2693 - DNA, 624 bp, Gossypium hirsutum
tattgttctttctgtcttccttgcttattttttatgctgtgctcgcttgttttcttatcgatttctatgttattgggggtttagggcactgattcataatattagccaaatagaatgcctctttccattgaaccctattaagtgggcttttaaatattttcaaaattttcattgcattcctatgaatttcaaagcttgttgcctaatttgctcaacttcctgaattgggaatttttgtacttcagctgttagatgatagggtgtgttttgtcattagcttgttaatgactatctaataacctagatttttttcctatgttttcagcaaaaaagttactgattcaagtgcattgggatggaacaagaagtaggggaatccttgattcagctggggaactcagatggttctaattctagcagctcagatcccgtaactcgtgtaaggaagctattgtttcgccggatgctggtggggatcaaagacggccggtttttcttgggcactttccactgccttgacaagcaagggaatatcattctccaagatacaatagagtatcgtagtacccgtcggtcttctccgtctcctatggagcaacgatgccttggtcttgttctaatcca

SEQ ID NO: 2694 - DNA, 631 bp, Gossypium hirsutum
aaacatacataatcaggtgtcattagacagaacaaggcatgatatcagtaaaccagaacaaaacatgattcaagaaacttaccagagaatggcggtggaggatacctccagctctctctaagatcatttggggccagtttcattctctcatggctgttataataatttgcaccatcaaagttcagtgaagagtatctgtcagtgtatggaggaggtgcatccctcatcaaattcacatgtgggcctgaattaacatatgcaaactgatttgttggtgcaggatgaagaggttgcggagggtagggattgtgaaagctagggccatcaggttgttggatattattaactggaggcactgggcaactgttgaaagcagtattacaatccgaaacctgcataacaggaggatttctaggatcatgcccattatatgggactgcattggtgcacactgttgaatttattctgggtgcaactgatggtggaaccaaagatctcaaatcatcttgcctgttctgcaaatataataagaacacaaccacatgaataatctaattcattattaccttatcatcattgtcataaccataataagaaaccagtgcaaggaacacaaacaaggacctacttg

SEQ ID NO: 2695 - DNA, 647 bp, Gossypium hirsutum
atccattaagatcagttaaaaattagtacttcaacaaaatgttacttacatggtgaagcctaaaaagcacgtaaaatgagtcatttccatagaaaacttgtgaatccttcttgttctcatgtaatggtgaagggacgtactttgcaaggggctttacagttagcaggaaatgttctgaaaatggtaacaatgtaacatcagcttccgcatcatgggcatcagccatcccttcagcctccccttcactctccactttattatcatgttcatcatgatcaatatcttcctcttgctcctccctcgattcaccttcgccagaatcacttccaaaaacctcaccattctcagaagcattctcactatcctctgatgtcctctgagcactttcatcaccttcatcatcagcatcagcatcattctctcccccagcctccccacggcacacttcctcctctccatgtctctggtattgtctgtttgctgcaccttccttcaccttaagagcaatctccaaactagcttctccataatcagcaaaattgtcttcctcaaaatccccatttggagatagttcaccttcttccctttcaactttaagttgtgcaacagattcttcattatacctgtggtttttagagccttctgtc

SEQ ID NO: 2696 - DNA, 624 bp, Gossypium hirsutum
ttgagatgcaaaagtctccacttgcattcgaagctccaaaatatccttatgttcttggagactcttcacagaggccttcagcggcttcccatgatcacgctgcatcatactagctatatgtgcagctctgagaagaaagcttgcgattgtgtcaaaatcagactctagacaacctctcgatgtcatagcaggagtacctccagaaataaacatgaaaagtcatcatactattaacctaaacctcctctataaagggtaaggaactgcaattttaattgaatgagatctgcactcaccaatccttactcctccaggagtaatgacaccattctcgccaaaaatagcaattttgttgacagtaatgtggcacatctcacacaccttctcgtaaattttacctacaaaaagaaaagttggaagattagacgtgctctgacatgaaagagagtagggatacgtagtattatctctagcaagtaacagagaacttactacatgacatgttgccaagagataaaagaaacaaacgaaggtgtgcatgttccatatgtgtaacagagacataagcagagcgaagacttaacttcaaattttcaacaaatttggaatttaaaccattaccca

SEQ ID NO: 2697 - DNA, 404 bp, Gossypium hirsutum
tgtgtctgtggaaggaaaataataggacccacagcctctaaaacctggacatacagattgaaaattcagtgcaactatttccaacataaagtatacaactctgggaactaaagctcttggaaagataaggttctcgaacaatctttcaacatttaagtgataagaaccactaaatcacataaaagctggacaaaagcattcaaattgatgagcagttacctatgtagtaaaactttataaaaggataatgatgtattaggaaatttttccttgctacaacttgcaagcaccatttcaggcagtattaatatttctttgttccttagaagggcagttacaaacatttgcataaaatataatgcacacaagactgagatggtgaactcctccacaatcttttaaaa

SEQ ID NO: 2698 - DNA, 648 bp, Gossypium hirsutum
caaattattcttagggaaccaaagaagctacagttatgatgagatagttgaagtccttactggtgtgaatcatatagttgcagctctgagatatgggaagaatttgtggataatgatatcagaactcaactaaaataagcatggtttctgtttaatcaacatattatatatcttcaatgattatggcatagcatttaatatgcaaaattgcagataagagaaaacagagcatttgatttttgaagacgaagaggagagagggggagagagagaaataaaatatatataatttttatttttattattttatttaattttaataaatgttttcaagtcaaaaaaaatatttaattaccaaaatgagaaaataaatacacttcaagggctaaatagcgaattaaaccttttttttactagaacatacatgttaacatattctcattgggcccctttggcatggctgccaaatttaatattgaagaaagtcaaataccaaaatctatattaacctatttttagtattataatgatggatgccatgtgattctctttgtggggcacaggaaaaactacaacatgcataggactacttaaggcagaggattttgctgtaaacgcattatcagacgttgtaaaccaaacaaaaaa

SEQ ID NO: 2699 - DNA, 599 bp, Gossypium hirsutum
  misc_feature (553)..(553): n is a, c, g, or t
tattatgggcttgggaaggcgtgcaaatcaggtttctgctttctgctcaaaatattattatgttttatgtgttctttttcttccttcttttatatgttgcaggaaaatctaatgtgccattgcttttcattttcacataggtctatatgattgactttggtcttgctaagaaatatagagacagttcacatcaacacattccttacaggtgagagaactttgcataatgtgatgtattgtattatacgtgcaggttaaaaatcctggtttgttcccaatccccccccccatttttaaaaatgaaaagaaaaaactaatacggttagtgtaatctgagctgaatctactttgagattcccatgtttttcatcattgactggttattatagtgaaggtgcatcctcttttagaagatgtgattttgatggattccatatttcttttgtgattttgataaatggcatgtgcaacttactatataatgttttgacatgaaaatattgatagagaaatgatattaaactcaattaagggagagtttttgctgatgaanttaaatttatcaagcttttacctgaggcatttacctgatttacttt

SEQ ID NO: 2700 - DNA, 619 bp, Gossypium hirsutum
attttaggagaaaaataagtctaatatcaagagaacataaaggagaaaacacagattgttggggagaagacttattagctcaatagcatttgaagttttcctacctatgcacctataaaccataacattctaaatgatcacctaaaaggccctcaagtctgatcggattgtaaaggctttactactgaatatataaatgacagacacttgagaagagaagtcagtctgcagcttcaaagcctcaaaaacatttagaaacggacaagtgggggagttttagccatccagggactaactgcttttgtatttatgtacagcttcttatcagattggaagaagtgtactaaattaccaataaacaggaactccacctatatattgtaattttgatgtgcattggtggcctggaaaccggaaaggcaaaatggaaaagaagggaaagagaaagtgacattgaagaacaataattattgaacaaagaaaaccaaggcagaggataaaaagaggttaaagaggggatccctgatgaacatgaaaaaagtgcaatgcagaattaatttgccgcttaataatgattttgctgttattgctcaatgacaaaaagctgcaaaacaataga

SEQ ID NO: 2701 - DNA, 619 bp, Gossypium hirsutum
gcctaaggagaaagtgattactcataattgaaaattatcatggaaagaacaaacctctgcctcaagtaattgctcagacaaggaagccaaagcaaacaaagtagcctctttcatctataaaatttaccattcaaaaatgagtttttgaggaggtcttaaaaaaataaataaagaaaacaaaaagagagattgcatgaagaaaaaggtattccattaaaatgatttagaacaggatcttccacatgattatgaaaaaaccaagctcactaaacaagtaatgcacagagagaggaagaaatttaaagaaaaagttgaaaggagactccagcgagacaaatgcttagagcccaaaccataaatccttcataaatggtaggccacaagaggaaattctacttaccctccaccaaaccacagaaccaacagctttttcttgttgagactcgctgaatcttttgcttgcagcatttataatagcatcaatgccatctcccccacaacaagttgccacctcctctagtaaaagggcacctacagaaagtaaatttttataggaaattactttttcataaggtcaaggaagtcttgatttctttgagatgggcaatgtaagaaagag

SEQ ID NO: 2702 - DNA, 603 bp, Gossypium hirsutum
acttcattctttctctctcatgttttgtttaaaaaattgaacttctgattactgaaagtctttaaaacgtgcagctaatatctttgactttcagtaatgctactttctaaacaggattttgatatcacttcatatatctgtttaagtatattcttatgcatgacctagcttatgtgtatttgggcaggtggatagcttacaggcaaaactgcttgaaaagttagagcaatctcttggagaccttgagcttaaaccagatgaaattgagaatgtttctgtggagtctaatgatcctaaacagggagaagtgtcagactcaattcctattgcagctcatgaggtaaatgagcataaactagcattttgttaatttctttatatatggcttgttggataggccttcccagcatcccctcaaatgaaaaggaggcttggggtgtggggagggagggaaactgccatctagatggactaatgaagaatctcttgttttcaattatctcaaatcagggttctgtccttgggtttgcggaggctatccgtgcttatcgagtcatatttcctgactcagaggggcagctaactaaactgctcaagactggt

SEQ ID NO: 2703 - DNA, 619 bp, Gossypium hirsutum
aaaacttttaggacttcaagagtgctccatgatttctttttaaaaggtaaatattattcagtttggtcattggagttcgggagctatggaagaaatggttttgcagattttattgaagtccactgttcctgtttggttgtccactaccccaccatattcatggcaagtaaaatccatttattttaacattcatattatatatgcaatgtacgaacatataatccttttttggtaacaaactctggatttcccctctaatattgaagatgtgatttattttgctgcaatgcatcaagaattagctgaaaccccgacattaacataaaatattttggatcaaagcaccatatttcagtatttttctgactagttgaggatcatcaaggtgaatgtttttcagtgaaaggagagatgaagatctagcaacaattatgagctttttgaaccccaaatctgggtaaacgcgaacaagagtaaatcacaaacggccttttagaagaaatcaaaggcaaattccaatctccgggaaatcttctaaaatgtcgaagtggtattcccaagcctttacggtttcatcaacattcttttaacataattaaggacttcatccacatccacc

SEQ ID NO: 2704 - DNA, 538 bp, Gossypium hirsutum
  misc_feature (294)..(294): n is a, c, g, or t
  misc_feature (431)..(435): n is a, c, g, or t
  misc_feature (437)..(441): n is a, c, g, or t
  misc_feature (446)..(448): n is a, c, g, or t
  misc_feature (452)..(460): n is a, c, g, or t
  misc_feature (464)..(466): n is a, c, g, or t
  misc_feature (472)..(476): n is a, c, g, or t
  misc_feature (478)..(478): n is a, c, g, or t
  misc_feature (486)..(492): n is a, c, g, or t
  misc_feature (501)..(501): n is a, c, g, or t
  misc_feature (514)..(516): n is a, c, g, or t
  misc_feature (518)..(519): n is a, c, g, or t
  misc_feature (521)..(524): n is a, c, g, or t
  misc_feature (526)..(526): n is a, c, g, or t
  misc_feature (529)..(535): n is a, c, g, or t
ggctgcaaaggaaccactcagattcatgatattgcacatattgaacgaggctacgagaatattgacatgaagcttcaaaatctaggagctgatatccaaagactgacactcacaccagcgccccttattttataaccttcttacatttcaaacatgcacccagatttgcatttcattaaatcccacgactctttaaaccatttcataccagaaaacatctatactccacgtatattcgcctcttatctcttttctgtggtgtagtgaaagagtgggttctcgagaatattatgnagatctcttgtgtttataatatactcaatctctgtgcgtggcgccatatgtgcctttgtgtaatgagattaatgtgctgtgtgagaaactcctgcatctgaacgaatgagctggagatgttgatactctctctgtgnnnnntnnnnnaaaannnaagnnnnnnnnnattnnncattannnnnanctacacannnnnnncacgtgacnagatatatcctannngnncnnnnantannnnnnngtc

SEQ ID NO: 2705 - DNA, 623 bp, Gossypium hirsutum
  misc_feature (63)..(63): n is a, c, g, or t
tctgaggcttctgccgttttcatgaatgaaaaatgacaatgctgttggaggataacgcatgtntatgtcttgataaatgctaaagacgcttgctttatggaattcatatcagacaaggatataccgattacacatacatataaattcaaaatattgcgatacaattaatgaacaacatatttcagctgaaagcaggtttaactgctaaaaaatgctggattcattcatacatttattattgccgaactacaagggattgatacaaagccctaggcacctgtcagactacattggcaaaaagttattccaaaacgctttcgcggttccaagaggcacacataatagctacttcttctaccttctctttcccaatcatttttggttctttaaaaactgtgtgatgtcgcaagcatcagaaaactggcaaagcacgtacgttattccatggaaagcagctccaacctttatgactccctgacaagcgcaaatagaagaaatcaaggtacataatcttctggattagaataaatttcatacaaattgagaaggcacattaagttatatctagcatgaaatcaactgtcccaagccccctttttgcctctcctttccacctcctgtga

SEQ ID NO: 2706 - DNA, 617 bp, Gossypium hirsutum
gccttccaggacgaagaagagcagggtccaaagtgtctgctcgattggttgccataatgaccttaacattcacagtctgatcaaacccgtccatctaataaagttcagaaaagaagtttaattaattaaattactaacttcctcatgtattttgaagaataacagcagcatctatattaatatgtcgacagattcctcattcctcatcatatacctgattcaggagttccatgaggatacgctgaacttctctatcagcaccggtttgagcatcaaacctagcagtagcaatggcatctacctcgtcaataaagataatagctggagcattttctttagcaagacggaagacatcacgaaccatccgtggcccctgagacaaagcaatgctcaagatattattatccatcaacattaaaagatagtagccagtattagaaaaaatcaatattaagggaagtcaattttcattgcagagaactatgtcttgcattgattagggaatgatgaatttagtaataacaattaaaaaaatggccataacatctccttacctcacccaaatacttctgaacaaattcagatccaactactctaaatgaagggcagcagttgta

SEQ ID NO: 2707 - DNA, 622 bp, Gossypium hirsutum
aatcccccctgaggtaagtctttgcaccaatctggaatatattggactctacaacaactttctaagtggtgtggttccagatgaaatgttttctctaccaaatttgaagttcctctatttaaacacaaataacctcactggttcagtacctgatttcccaccttcatgtacaattcttgatttctggattcacgagaatggattttcaggttctttgcctcgtacccttggaaactgctataaccttacaacatttatagcatcctacaacaaattccaaggggtcattccaccagagacttttgaggggcttttgcaacttgaagttctctatcttggtgaaaacaatgtggagggcgaaattccaaacactttgtggagtttgcagaacttgcaagagcttattctgtcagggaacaagcttaatggaactatttctgagaggattgctcaatgcaatcagcttgtggcagttgcactttcaggaaataatctggttggtcccattcctcggtcaataggaaatcttacaggtttagctaatttatttatttatagcaacaaacttaatggctcattacctcctgagcttggaaactgcacttcacttgttgaactcagg

SEQ ID NO: 2708 - DNA, 596 bp, Gossypium hirsutum
gaaatgtctaccacaatattttctacaagacacttgattatcttcacctgaagtgcatgagaagaaaaaggaaatataaaaacaaattcatgtgttaaaataacataatcaagcaaacatgtgaagaattctacagctagtttaaagcaagaccttctaaagataatattaaaaataggaagaatagcattaacacagcaaataagaagatcccagccagtagcaagtgtcacaaacatgcaaattttcattgaagaaatcaggccaaggatactaaaatgttgacataaggataaacaagatattctaagaatcaagacaatctctgagattccagagaagattccataagaattgtgaagaaaaggcatcaaatcatgactttacctcggcctgaatgtactgaacttctttcactcggaattcagcattttcatttttttcttcattttccagcatatcacgaacctgatgagcccatgtatccttcaaattttgattcttactgaaggctgttaagtcaatatccccatcaggcaaatacgtcttgaggggcacagacccaaaagtaaacacctagcatcaaaaagcaaaga

SEQ ID NO: 2709 - DNA, 390 bp, Gossypium hirsutum
tattgttttctaatgatcaccataaaaatttgagcatttttatgcttctaaaagaaaatgattttatatttgaagtgattgccaaagttagattgagaggtttcctattaatgaaaagaatctttgtgcatgacattttaaattttagtttcatgacctttttattctttattctttctttttttttattatcaattttgatgtgcatgtaatttatgggggttttccattgactgaaggatcgagccaatgagatatataagaaggtggaagatcagaagtctagcagaggaagaaatcaagatgcattgttggctgcttgcctatacattgcttgtagacaagaggacaagcctcgcactgtcaagggtacagcctaagattctttta

SEQ ID NO: 2710 - DNA, 558 bp, Gossypium hirsutum
ttaaaagtgctttagacagatagaggggatgattttaagcgttgaaatggtatttatcacaaagaggtatctctcacaggcttatgtgtccttacacatctgagtaaaatagtatttttaagcgaaaacacagacaagttgtggagtctggtctctcggttttggctcatgtgtgcatgcccttgacttattggtatgaagctttcagtagtgtagtttatctgataaacaagttaccttctctattactaggcaatatctctcattatgaaaaacttttttgtgttaaacatgattatctgccacttagaatacttggttgcttatgttttcctaaccttaaactttataataataacaaattttaattttgatcagctccatgtacattcttaggctattctcctcaacacaaaggttataggtgtcgaaatctttcaggtagggtgtttgtgtctcgttatgtcatgtttcattaatgtatttttccatttaaaaatattatacatacatccaagttgtccagtagtccctctactgtaacatctagcttaaaat

SEQ ID NO: 2711 - DNA, 675 bp, Gossypium hirsutum
  misc_feature (652)..(653): n is a, c, g, or t
  misc_feature (655)..(672): n is a, c, g, or t
aacctggtattgggaaggacagggggtttgggattaaagatgctggggtatcgaatgggcaacgaaatatacatccatttccgagaatggctgatgtacatgtaagctgttcacctactcatgaaaagccagcatcctcggctagtaccaaagacaaccctgtcactaagagggttgatcctactagctgtgcagtcgaaatatccaaagctactagtgattccaaagacacgtccactgattccgaagtaagtgttagcaacggagacaaacaggctcagcttagaagtgttccccgaaaggatgctgatgtggagtctacttcggagacagcattcaattctaagcatgatgaacaagaagaacccacttttgagcacactcaaaactttcctgaagctgatatgaagactaaaaataaaaaagatgagacaatctgtgatgttcaggttcttgaagaagcagcaaaagaggttctcgatatatcgagggattctagtaaactgacaatctccagtataagttgtgatgataaaaatgggtaccgtgatgacggaagttcatcatctactatttatgagactgatgttgatcgaatatgctcgtcaactaaaacatgtagtcataatgctacaacagaaggtgctgacannannnnnnnnnnnnnnnnnngtg

SEQ ID NO: 2712 - DNA, 644 bp, Gossypium hirsutum
ctagttatttcatcaggcacgctagtttttaagcttacaaatagatgaagtttttgctatttgatctaacatatagggactaagttgccaattttttttaatagagaggacaaaattctaactgacaactgatacaggaagctccatgctacttttaccaacataatgtacatagaaggagacaaaacagtaacttttgatacaaaatagtgagaggaactaaagaaacatagaattgccaatgcaaaacatgagttattcaaattctttgaaatggcagaatatcatcaatttttataagacacaaaatactgaaacaaaggggaaacaacaaaagtaaatgataaatacccaaagttccacaaacctgatcaccgagcttggctataacataaggatcgctgctcttaaaatcccggataaccaaccttttaccttgcacaaccaccacttttagcagtcccaacagctcccccattgtttcaattctatattaaccaaatcactgcaaagaacccaaattccaataatttaaaaaaagaagaagtgaaaaacccagaaacaaggaatccataatttgtagagaaaataaaaataggatataataaacaaaaaaaaaaaaccatcaaaaataagggcaatac

SEQ ID NO: 2713 - DNA, 651 bp, Gossypium hirsutum
  misc_feature (28)..(29): n is a, c, g, or t
ctgctcagtgtcctgcttgaatgaaagnnaggatgccttaaaataattaaatacaagacactgcaaataaataaataagcctaaatataaaacaaacagcagtacttacaggaattggagatttttaagattaccgagggaagaaggtatatctccggttaaacgattattttccaaatccaagctggtcaagctcgacaagttccctaactcttttggtatctcaccagttataccatttcctttcaatgtactacaggatgaacacatggtatacagagatatatgaacacatgaagaacataaactattgaaatatactgtttgattgaatatgctcgatacatacagtgatgaaagtgtcgtcagaactcctattttaggggacagcataccagaaaagttcatggatgccaacatcctgaaagcagaattacgatataaggataactatttatttatataatgaagaagaatgaacaaataataataaacatctcataatcaattgaataatgtatgcatatatttacaactatgaataatagtcaaggaggaaaaataaaagtacagcaaattacttacacggaaatgacattattattaggatcacacataacatttgaccaagtgcaaggattaactttgatc

SEQ ID NO: 2714 - DNA, 610 bp, Gossypium hirsutum
ctccaatattcatgtttgacgacatgggatataaccctccaaatatattacaaatacatgaaaaagcaaagatatgtactcacatccgatactcactgaataacataacttaagagtgattgcatcaatcaactaaggtcatgtccaggatggacctttttgtgctgtgaaagttatatgaagttatatgtgaagtgttgtacatatgttattccaaaaacaaaattaaaacagaaagaatattttgtctggatcaaatagatgtaattttcatgaaaattttcatcctttagctttattactttgtctttttctttatgattgtgtttaatccttctttatctttatattctctgttaggaacgttggccaatctgaagatgcaatgcgaaggagactgcttcaagcaaggccaccctctataaacttcaacaacatatctctgtcttctcgtccttcacctcgagttcctactcctgtatccgctgaaccttccggcaatcctacattcagaagagatgctcaggttaaccgatcgtcctctccgactgcttctccgtctccgtctccgtctccgcctccgtcaatcccaaatgctttggctccatca

SEQ ID NO: 2715 - DNA, 607 bp, Gossypium hirsutum
cagtgggttagggtttgtaatgggctttaggtttagttggacccaggccaaaaattgggtattacaattgtacttttaaatattttaataaaatattcaggtgatatttttaaattaattaattaaggatttttttaggattctgttaatatttaatagtaggatattatttttttattctagtaaattcataaagtttatttattgataaaagatagatttttaatatttttgtgtatactaagagataccaaaaattattctactttgcaatgttggttcactcaaaaattgtaactaactcaaaggatcgtaattagattttatattttatatttttaaatttcgaagtttttcaaagcacgtggttaataaagtatcaattttaagcgtaaattttcaaatctagtttttctctaatttcttaaattgtgaattttaaaaaatatattataaaaatatagggtaagctattaaaatagttatttttgtttatctcaggttacattttagtcatttaagtttgaaatgttacgttttaatcacttatgttatcgtgttgtaacattttagtcactaagccattaattgcctttcatggtgtaac

SEQ ID NO: 2716 - DNA, 619 bp, Gossypium hirsutum
gattttatggcaccgttctctgcaggttcttgctcactacgtttttcacttaggggcgatggaaagcaccttgtttctacagaggacaaatcatcatttaagaacattaattaaaaattttgcaattaagacttaaaatgagaatccaaaacctaggtcacaacaatcaactaaaatcttcaacatgaggcagcaacttaaccattaggaaatttttcgagaaggaacaccggttggagtttgccctttatttgttatccaaaacttattggagtttaaattttggagtctagatttgtgaaaacaactagcttaccttttatgctcccacgagtaataagttgattgagaaaatcacgaaacactgtcaaaacaagactttcctgctctgcataaacctctgtgcattcgtgcccatttaatgatttctgagtaatattttgagaacgatctgtcaataaatcaggtgacccaactgccataaacattgtatcttcttcatcacacatcaacgcacgtgttctaggagacaaaggctttccgttttgcacactgtcctcatttgctccacagtcaccacttctatttgcatctccatggttctcactctcacaatcgt

SEQ ID NO: 2717 - DNA, 624 bp, Gossypium hirsutum
tagttcctccaatatgtagatcttttagagattgaagcattggcagtttaaccaacttaggacagtcattgatagttaatgaactcaggagaggaaaatgttctctaccattcactgttgtccattcctccaaacatggcaccttatgtatactgagaaccttgagtgatggaaaagaactttccatatcaccatagaagctgttgtcaatatacttcagagcacccattccactaatataaaggaacttaaggaagcgcaatttccctagaggtggtagttgatggtatctttcacagttttctagtgagatttcaacaagttttggtagaggcagatccatcatccaatatggaaacatcaaaccttggtaaccaacaatgcgtaacttcttcaagtttgaatgaggttggagagcactaagaatctcttcatcattttgatgatgagagttctcggtgctgcatactcgcgaacataagttgctgcttactggccaagataagctaagtgcttttaaattgtgcttctttatcaaatttgcatttttagcttccatcgaactcttcacgttgtgaagtcctttgatgcttaattccccctctagggccaagtctttcaact

SEQ ID NO: 2718 - DNA, 577 bp, Gossypium hirsutum
  misc_feature (569)..(570): n is a, c, g, or t
attatggattacttgcaatgcatcattgggcataaactttgagagcatgaatgattctttttttcctcgtctctacacttctcattgaaatttattttctttccatgtagctacatatgctttacctgtatggcttttatttatgtatatggatattccatgttacatcttgtttacttttctacaaggttgtatttaaaaataaaataagtaaagaaaaggaatgtgaaaaggtatactgggtttttctgccttaggaaatgatggtcattccaagtgatattgggtctcttggaatctacgttggctaataaaattgtgaaaaatagtacactgctaattttatttaatataatttgtgacataggaggtggaagtgggcatgaaccagcacatgctggatttgtgggagaagggatgctgacggcttccatttgtggagatgtttttgcttctccttctgttgattcaattttagcagtatgctttctgtttcccacctctttttggtggtttagaaggaaatgtatcatcctgctaattatcattgacatcttcatgtttgtgcnngaaataa

SEQ ID NO: 2719 - DNA, 624 bp, Gossypium hirsutum
gtgatgttaaaaagatttgactttatggcatggagatcgaatctcttggaagggaaatgacgtaggaattgtgcattcttcacctcttagcatatttctttattcttttgtcacacagatttcttaaatttagtttttgtttgacatgtgtataggcatgaagcactggatgctttactcatcacctgttgctgcttagtctctataacaatatgcttttatctcgttttctctatttatttctgacaatatatataatggtaggccacttcaagtttatgtttattgtttcgacacgtcttccatgcatccaacacacaacctggaaccttataactacagtattcttagtgatgcagcttgccattgccttgaggcccatttcttggtctaaaaaacaactgcaatagccgaagcccattatcgaagccattttggatccctaacgtagcccaaaatttagacccaaatttatcactaaaaaactggttcatcaaggcgtactttagggtccccccagtcatacccaaacctaaccctgaaaatgctttttaattttaagctgaaaaaaatgagccacatatactaccctacctgccgttacggtacacgccatgtgtactt

SEQ ID NO: 2720 - DNA, 624 bp, Gossypium hirsutum
ttttgaaattgatcatgggagctatttgggttgtgattttgccaataggttattccatttctgtgaagaatccaactggggtcatcaagttcctaaagcattggactggggatatgcaaaaccagtcattatataattatctcatcgtactttatctgataccagatttacttgctactgtattatttgtgcttccacttttgcggaaaaagttggagctttcaaactggcggatagttactcttgttatgtggtggaatcaggtaagcatatcaagcattatttatgtttgacattttttgtgctttcattttgttacttcagttgtatgcaaatttgcttctattcccgtttatcttccacccttatgttattgcttaaatttgctctacttttgtgcatatatattttttgctccagcctaaactttatgtgggaagaggcatgcatgaggacttcttctcactcttaaagtaagagaaaaaaaatgtttttggttgttgctttctcaacaatgtttctggctcttctaaatacgcttcatgttaaacttgttccactgacagaattattgaatgcacttaggtacatgatgttttggattatgttgctagtcatcaagca

SEQ ID NO: 2721 - DNA, 648 bp, Gossypium hirsutum
gattctaaagcaatgtatattctgatatgttaataatttgtattctatagattttgacatgcttacgagtttgtgttatttttttcatattgagttctatgttgtgttttagtttgtttttctctgtcatgcaatcatattgtgtccatggttgccatgtctaactaagaactaggtccactgccagtcaagtggttaaggtttcatgtattctcaagcaaattccttgccttcattcccaaccaagagataattactttgccccatatagcagcactgatcttgactggggtctgatgtagaaaaattgagttgattggcttgaatttctcaagcttcatccatttggaattttagctcgtttgctaaatattgcacctttaattttgagcttttgttgcaaaccgtgtgcaaatacctctaactctaagtttggaatggcatggcccttttgctagcctagctaacgtgtcacatcagtagacactactacttatgagtatgctttcccgctgatatgtgcagagttgtttaagaaaattgattgactagtataaaatttgtgtggcttacctgaactatgagaagccttgttaacttacactttctaattacgtaaatgaatcactaattctcaccatcatttgg

SEQ ID NO: 2722 - DNA, 633 bp, Gossypium hirsutum
taataaatcggtttgtattttatgttatcaaatagtaactattatgtgcttgtcctgtccatacttttttttccttgttgtaaaggttcaacaaatgttatctaacaggagattttgatggttgctattggaaatcgtatcctgaaaattgatacaatgaaagttggaaaacttgaagggtttacagcagaggaacctcttaattgctctgttgataagcttattgatggggttcagtttgttggtaaacatgatggtgagcttacagagttgtcaatgtgccaatggttgactacccgtttagcttcagcttcagtagatggcacggtttgtacaaacactttttcttatttgctggtttatttcctctcttttggttcttaatatagtttcttctgagaacaaaaatgaaaactgagtgatggttatatctagaacacagaaaacctcttcaaagattttcctataatggctgtacgtgacatgtaaagctgataatgttttatttccagctaacatgatgactgtagttatggatattgagcctttttaatgtaagttttttggttgtccaaagcgattttctcattataactattagctattattgatgtgggaatattgtaatcaagt

SEQ ID NO: 2723 - DNA, 642 bp, Gossypium hirsutum
tacccttgttgccagtcaagtgaagcccctcagccaccgcctacaactctgcctgcaaaattgaacagagaccattattcctcccaaatcttactctccaactcccccactcatcccgatcaatgtctttcactttgatcattaattaatggagttttcctattttgggggagccaacaaccattcttaccccacttcatgcttctactataatccaatttcttttacttgaaaatgaagcacagtgtagaaatggtggggatctttgcaaatagaaatggtggctaaaatactgttcggaactgtggttacagttttaatcacaaaattaaaagtgttaaaacgtaaagatgcatgccgaaattgattacacaattcaaccctagtctacgttgctcagagtaataatctactatctttcttatagtacaacaaatgatttaagttttaatattggtttaactcttactaatttagtgaccttatcgttgtataaagattagatcactctctcactaaattttctgctcgaaaatttagttttgcaatacaagagactctcctgattgcttacaaaaataatgcacacataaaacgttcctaacttagaacaaatttgtgctctatcaatctccttggtct

SEQ ID NO: 2724 - DNA, 636 bp, Gossypium hirsutum
cgtttccttctccaagaaatacttttccttttctctccttaataagatctctttgagaatgttcatttcttcagcatcatatgtgaatttcgcctcgatcatcctccggtattgcttagcttccatctcaatggctgccttctcttcttgcaaacgtagtatcatcgccatagcctcatcagcagcagtggcagcggcacttctctctttctcgagctcaatgtaaagagcagcacaagcagcgtgctctgcatcgagagcttgtcccaagactctgccgccatcaaaatcttgagccgatgccgagcgcttgataaccattgctatttccttttcgtccaccgatttattctcagcaaaagagtcataatccatttgtgaaccctgaaaattttgtttaggccctccaatatcttttgcagtttccttaccatctaaaaagtacagaactatgaacacattagatgtgacattaacataataaaaaaaccaaaggaaggtttcgtaaaagatcatcaccttcggaatgaaccagagtcttactctcttcggtaacatctttgccaagtttaacaaaagtagcagaagaattgaaaccagttggtgtcgtaatggaaaccaatggatcattcggag

SEQ ID NO: 2725 - DNA, 652 bp, Gossypium hirsutum
ctcaattcactacctttctatattgatacacttgttgatcatcggttggcagaagagaaaatgcatacaaatgatgctagaaatgatttaagtatggagtcatcttctacagtactgcgttctaatctagagaaggtagtcgaaaacatcagattctgcgaaaccaagcgtgcaaacataagggatggcaattcaagcataaagaaaacatcaaaaggatctaataaggaaatggatgtaaaagaaatggctggtccggaattagaggctaagctacaacgattgtatgagcaaaagaaacaaatttataaagatcttagtgctgctcaggcacaagagaagaagactaatgaggaaaccaaagcattaagacataaactgcggaagtctattttaaaggaagctgaaataatcgttacaacattaagtggttgtggtggagatctctatggtgtatgtgctgaaaccatatcaagttttaagtttggcaatccatctgaacatactctttttgatgctgttgtgattgatgaagctgctcaagtaattgccccctttttgcaaggcttccattttgtttcggttattgttgctttctcttggttataaggtttgaaattgtcattgcaggctttggaaccagctactttga

SEQ ID NO: 2726 - DNA, 500 bp, Gossypium hirsutum
gcagtttcgtaagccttttatcagcttgcagccattcggggcttgtgaatgaagggctttggtattacagggtaatgttggaggaatatggagtagaagcagtaacagagcaccaggtgtgcgtagtcgatatgcttggaagagctggaaaactcgaagaagcctatgagtttttaaagcagataccaggagaggctggagttggcgtttggggagccttgttaagtgcttgtaattatcatggaaatatggagatgggaagagaagtcgcagagcatctttttggattggagcctgaaaatgttgtcggctactatatttccctggccaacctgtatgttagtgtaggaggatggaaagatgccatggagttcaggcaaataattcagcacaaaaatttgaagaagctgcctgcttacagtattaatattgatgctgcttcttcttcggcttcagcatggaaatgacaaaagaaatcacacttttttaaaaaaagtact

SEQ ID NO: 2727 - DNA, 498 bp, Gossypium hirsutum
gcatttgcaaatggaaatatatgtctttgggacagtattgaaatggcaagtctaacgagattttcattgcatgacagtttgagcagcaagcaaatgaagtggtggctaggcttccatgggtgaagaaggtcactgtgaccatgtcagcacaaccagccaaacctatttttgccggagatcttccagcaggtttgcggagaatttcaaatattgtagcggtttcaagttgcaaggtaaatgtttcagaaccatttggttattgtctgtctgaatttattggtatacaaatatgtttgtatctgttgtgaccttgctaaaatgagtaatgttgaatgcattgtttatttttctcataactcctgtttgtcaaaaactctgtagggaggtgtaggaaaatcaacggttgctgtaaatcttgcgtatactttggctggaatgggagccagagtaggtgtttttgatgctgatgtttatggaccaagtttaccaacaatggtc

SEQ ID NO: 2728 - DNA, 458 bp, Gossypium hirsutum
  misc_feature (388)..(390): n is a, c, g, or t
  misc_feature (435)..(437): n is a, c, g, or t
  misc_feature (445)..(447): n is a, c, g, or t
atacatcttggcttatgtattttagagcgatcaaaggttataaccttcctggaatactcccccctcaactggttaagcttccttaccttcgggaaatgtaagagctcttgaaatgattaactatgatgtttatattgtacatactgattatataatctacagcaatagtagataactgtcctaagtaatcttacttttttatcagtgactttgcttacaactacctaaatggtaccattccaattgaatgggcttcaatgaagttgacttctatgtaagtttttgaaacttttaacataattttttgttcatatggtatattaacctgaagtttttgtgcagctctcttctagtaaatcgcaaaaaattagcctctattgagagaggnnnctcctccggatgccactttcttttccttttctcagaatgaatcannnaaatctannnaagctaagtca

SEQ ID NO: 2729 - DNA, 613 bp, Gossypium hirsutum
atggaacatcttcaggtttttcaggttgagtttcttttgcaagagtgttcaccaaatacctacaccgatgaaacaagaaaagattatatcaatcagctctagccatacgcaataatagcttccagattatataaaggtaatgataaacatacccaagttgtgataaggacttcttgacatttttgccttcctgtaaatgttgtctaccaacatcttcaagtttgtttctatccaatcctgcaaggtcaatcaggctgattctgcttgtttttgaactgctgaaacattttgatgaagctccctgctgtatgaatcaatgatgatcagctcattatttctagaacagcagcacttatattctagatgtgcacgagtacatttcataacattaatcatggaagtgaacaacatcaacagtaaaatgtcataaaacgaaacctgactggttgacacccaaaagaaaagattagcaactaaatcttgtcttgacttcagtgatataaaatcaagatttggctctgtaccttgcaccaagattcaatgaaaaaagtaaaaacaatgtgagaccgagagctcttggaatttacagtagttgctccaaccttcctacttg

SEQ ID NO: 2730 - DNA, 522 bp, Gossypium hirsutum
  misc_feature (49)..(49): n is a, c, g, or t
  misc_feature (152)..(152): n is a, c, g, or t
  misc_feature (159)..(159): n is a, c, g, or t
  misc_feature (168)..(169): n is a, c, g, or t
  misc_feature (190)..(190): n is a, c, g, or t
  misc_feature (201)..(201): n is a, c, g, or t
  misc_feature (211)..(211): n is a, c, g, or t
  misc_feature (228)..(228): n is a, c, g, or t
  misc_feature (279)..(279): n is a, c, g, or t
  misc_feature (306)..(306): n is a, c, g, or t
  misc_feature (341)..(341): n is a, c, g, or t
  misc_feature (344)..(344): n is a, c, g, or t
  misc_feature (355)..(356): n is a, c, g, or t
  misc_feature (362)..(362): n is a, c, g, or t
  misc_feature (364)..(364): n is a, c, g, or t
  misc_feature (368)..(368): n is a, c, g, or t
  misc_feature (396)..(396): n is a, c, g, or t
  misc_feature (460)..(461): n is a, c, g, or t
  misc_feature (468)..(470): n is a, c, g, or t
  misc_feature (481)..(482): n is a, c, g, or t
  misc_feature (492)..(494): n is a, c, g, or t
  misc_feature (497)..(502): n is a, c, g, or t
  misc_feature (505)..(507): n is a, c, g, or t
  misc_feature (509)..(511): n is a, c, g, or t
  misc_feature (514)..(518): n is a, c, g, or t
ggtgtctatctatggtatggattacttggaaaatcgagtgtgtacattnattcaagtcgtgaaaacattaatatatcggattttttttttaaactcagatgagtgtctcttttccccacgggcccccccgagaaaaaatagagagtggatantaccaantttgttttnntgggggatttgatttgtgctntgcgctatganacacatgaanacacagggggagataancccccccctcaatgggctgggaaaaacaacaataatccccggggaaatctntatttagaaaaaatacactttgggctntcccgagaatatcaagtgattgggtatattatacntgngttatacaccnntctatngnggcngtgataccccgggaaacatctctacacnaatatggggggagatgtttggggcagatttcacactctcgtgacttataaaagggtacctgtgnntctatannnaatatcccccnntaaaggggtnnnggnnnnnnccnnnannntgnnnnncccc

SEQ ID NO: 2731 - DNA, 574 bp, Gossypium hirsutum
  misc_feature (49)..(49): n is a, c, g, or t
  misc_feature (52)..(52): n is a, c, g, or t
  misc_feature (170)..(170): n is a, c, g, or t
  misc_feature (266)..(266): n is a, c, g, or t
  misc_feature (307)..(307): n is a, c, g, or t
  misc_feature (309)..(309): n is a, c, g, or t
agaaaagagagaaatgcattaggattcactcaacaaaagggaaaacatnttntgcttctacaaagtaacctagaaagttttgtatcgccttctgtaaaattgcagggttttatatccaagcctcaagcaacaaaattttgattgaaaattgcatctaagtcgagtaaatngaacacatcctttgtagtccaaacattttaatcacaaaaaaattatccccctcccaaaagcctctctagagaacagagcacacctgatagcttttntgttctttcggcagatgctccagaatttaaggcagcttttncnctagacggctgaaaagacacaataaagggattaagaataatcctgataggagaaatgtacacctcaaggttgcgtagcactgacccgttgtctggagctaccagtgagctgtggatacttgagtatggtccagtcatacacaaagtcaaactgatatcctgcaaataaaaccacctcaggaatcaaacaaggccatatgcattccaccatcatccaaagaattatttgcaaatgatgttttcacatgatatacaggcaagcaaac

SEQ ID NO: 2732 - DNA, 611 bp, Gossypium hirsutum
tgtgcttaaatgttcttattttgctgttttacagggattactttgcatttttatgatttgatttatcccttattttataagggctgttcttgcatcggtcaagcatcttaattgatatatatattaaattacagtggctgttcttgcgatccatttcttgtgcaatcatgttgtagatttaacttaatctgccttcaacgacagtatgttttggcagaattagaaaatattaaaaaaacagctcactgggaggttgatgttgaagtggaccttttccatgttaatgttggtgcaactcgcctggacagtggcatgtttgtggacagaacaattatttattctgatctggatcacatcgtattaagaatgctgccaaaatatgcacctgaagcaagagaaaatgctattttggtttcttcccatattgatactgtgttctcaacgtatgtttcttccttctccgtttttctacttcatgttggttcaaataagttttgtttttgaccaaaatgtgcaatatttagtgtatgtgtcctttatgttgcttccatttgaattcagctagtgctcttaattataatttcttctgacagcctgtattgtgatatgta

SEQ ID NO: 2733 - DNA, 640 bp, Gossypium hirsutum
ttttgcatttgaagaaaaagacaacattgcattaaattcgcagaccaattctatcccccaataagagcaggtatgaataaatagatggcaaataattttagtttctaacttcttatgctcatcacacgtaactttgttaaactctattatatatatatatgtgcataggcatgttattggtcgcttcgttgataaaggttgaggtgctgaggctttgatgtgtcgagtttgaatcacaccatgtgtagttttttctttagattattttagacttaagtattatcatattgagtcatactcaaatatatgtcccaattttcgaattatttattggaacgtaaataatcttttaataaaattatacgaaaaattataatgacattttttattttatcaccctttttaatattattagacttctcgaattcttttatgcacggtaggaagtacggtgattgtcactactcgactcgagaaagctgctcttatgatggctacaactcctttctatcgcttgggatgtttgtctgatgatgattcttggtctttattcaagcaaagagcctttgggatgggaatgaatggaagcaacgcgaacctggaaaccactgggagggaattagtgcagagatgtggagtg

SEQ ID NO: 2734 - DNA, 430 bp, Gossypium hirsutum
cggtgtcccttcttcaactttggtctctgatgaatccagagtcatctcagaactccataatcttgttgatgctctggcaaaggttggtctctccctccctttcttgtcttcttcttctttaacttattcccttgattttgttgtcatggactcttaactgtcttgaacatgcaggttgcttcaaaacctggagctcctgaatcattgcaacagttgattgagatgatcaaaaatccatctgctagtatggctgcattatccagtgccactgttgcaaaggaggataaggccaaacaatctagagacaaaaaggtcactggctcatcgttttattgctttttctttttttttttgaaaaaaaaatttgggccgaaaattttttttttaaacccgggaccccccccccccccaattaaaaggaaaaaaaaaa

SEQ ID NO: 2735 - DNA, 604 bp, Gossypium hirsutum
tctcagagagaaagatctatattgcaacttaaacaacaaaagcaacatagatacgaaaagatagtcctcatacatcaaattctaaacttaaaagagtcattgatttagttacaataagcaatttcagatgtcagaaacatccatctagtatatataataataggtggaattcattctagcacttaaaatacttcttatgacatatcttgtattactcataggcgtaacaaccatagcactccctgaatgaaggtagctcttgaggttaaaacaggggagttgaaattgtcacagcgggtaagcattaagcataaatttgctgctacctgaaaagaaaatgccagctacatgtttaccactatagacaaagccaagatgtgaaatatatctccggtttatgttaacttacctgtgtaatattggtgcggtccaagcaatcaatacaattggtccttacaactccaagttgctccattttctcactctcttcattcaacaagaagtacctatcagtttcacacaaagcaaaaccaatattaatggggcatatttcagtgtcataactttaaccagggaaataatatttcaaaacctatccttgcat

SEQ ID NO: 2736 - DNA, 613 bp, Gossypium hirsutum
ttgagatctttccttggaacctaatgtctgttgaaaatttcccgatgtaataagccaaatttaacaatgtgtttttttttgtggtggttgaggcattgatcctcatttcggactttccctgaatttaccttacaaattgctattgctctaatctttgatctttgcagttgaattgcctattttctttcacggatgcatgttaaggaaaaaaatctggttaatgaaatatacattattgttgaatttatataatttttaatcaatagctataaatataaaatatctggtgatggcatcattcatttatataaaaatgtatatttttttctctttctttatagttgtgtcgctacaagttttatctgtatgccgtttatggggttaacttttgactctgtaaagccgtggaaaattgtcaaatatccctatgaattattgtggtcgattacttgaggtatgaagcagaaaaagccaaagtacatctcttccgtacagtcaattaaaagattcctgggtgtaattgccaaattatgaccccctttcaacccaaacttgaaggcaaaaacgatgaatggactaatttttccgaaatttggtccagtcgtataatatt

SEQ ID NO: 2737 - DNA, 1198 bp, Gossypium hirsutum
  misc_feature (537)..(549): n is a, c, g, or t
  misc_feature (554)..(558): n is a, c, g, or t
  misc_feature (560)..(563): n is a, c, g, or t
  misc_feature (567)..(574): n is a, c, g, or t
  misc_feature (579)..(584): n is a, c, g, or t
  misc_feature (593)..(596): n is a, c, g, or t
  misc_feature (598)..(598): n is a, c, g, or t
  misc_feature (601)..(605): n is a, c, g, or t
  misc_feature (610)..(612): n is a, c, g, or t
  misc_feature (614)..(615): n is a, c, g, or t
  misc_feature (624)..(632): n is a, c, g, or t
  misc_feature (634)..(638): n is a, c, g, or t
  misc_feature (640)..(643): n is a, c, g, or t
  misc_feature (645)..(647): n is a, c, g, or t
  misc_feature (649)..(649): n is a, c, g, or t
  misc_feature (652)..(654): n is a, c, g, or t
  misc_feature (657)..(661): n is a, c, g, or t
  misc_feature (665)..(676): n is a, c, g, or t
  misc_feature (678)..(678): n is a, c, g, or t
  misc_feature (681)..(692): n is a, c, g, or t
  misc_feature (698)..(704): n is a, c, g, or t
  misc_feature (707)..(710): n is a, c, g, or t
  misc_feature (715)..(722): n is a, c, g, or t
  misc_feature (726)..(726): n is a, c, g, or t
  misc_feature (731)..(737): n is a, c, g, or t
  misc_feature (739)..(740): n is a, c, g, or t
  misc_feature (742)..(751): n is a, c, g, or t
  misc_feature (759)..(763): n is a, c, g, or t
  misc_feature (766)..(773): n is a, c, g, or t
  misc_feature (775)..(791): n is a, c, g, or t
  misc_feature (795)..(803): n is a, c, g, or t
  misc_feature (805)..(805): n is a, c, g, or t
  misc_feature (816)..(826): n is a, c, g, or t
  misc_feature (829)..(832): n is a, c, g, or t
  misc_feature (835)..(849): n is a, c, g, or t
  misc_feature (854)..(868): n is a, c, g, or t
  misc_feature (874)..(887): n is a, c, g, or t
  misc_feature (889)..(889): n is a, c, g, or t
  misc_feature (891)..(891): n is a, c, g, or t
  misc_feature (893)..(918): n is a, c, g, or t
  misc_feature (922)..(939): n is a, c, g, or t
  misc_feature (944)..(950): n is a, c, g, or t
  misc_feature (955)..(983): n is a, c, g, or t
  misc_feature (986)..(994): n is a, c, g, or t
  misc_feature (996)..(1029): n is a, c, g, or t
  misc_feature (1035)..(1045): n is a, c, g, or t
  misc_feature (1047)..(1049): n is a, c, g, or t
  misc_feature (1056)..(1061): n is a, c, g, or t
  misc_feature (1064)..(1069): n is a, c, g, or t
  misc_feature (1072)..(1077): n is a, c, g, or t
  misc_feature (1079)..(1085): n is a, c, g, or t
  misc_feature (1087)..(1088): n is a, c, g, or t
  misc_feature (1091)..(1099): n is a, c, g, or t
  misc_feature (1101)..(1101): n is a, c, g, or t
  misc_feature (1105)..(1112): n is a, c, g, or t
  misc_feature (1114)..(1125): n is a, c, g, or t
  misc_feature (1129)..(1129): n is a, c, g, or t
  misc_feature (1132)..(1134): n is a, c, g, or t
  misc_feature (1136)..(1147): n is a, c, g, or t
  misc_feature (1149)..(1151): n is a, c, g, or t
  misc_feature (1153)..(1163): n is a, c, g, or t
  misc_feature (1166)..(1181): n is a, c, g, or t
  misc_feature (1185)..(1187): n is a, c, g, or t
ttttgcatcatgaatgaaggtaaggcaaaaaacacatgaaaatcaatatcatgtgaacttaattgtggggcgtcggggaccaaatagtacactaatgaatggaacaattatttcacagactaggcaagaaaaacagtccctttaaattggatattcatctaagggtaacagctcgtattactaacaatatgcaaatgtcaaagcttgaaggttgatccaaaatattagagaatttgaataaaaaataaatttagacaaaattgaaggctttttatttatttatttaagctagcttgatttagactaaaggtccttttatactgccaatatgtaaaatcgagagtaaatttattcaagtggctgaataggtcgaactattcgtttaaatttgaaggttaatctaaaatataagaaaatttaagtaaaaaatatgagattcgaaaaataggtttagcaaaaaatttaatactcttttttcttattcgagccttggattaggacaaattggctatgcgtcagcctaatagaaacacttannnnnnnnnnnnntcctnnnnnannnnctcnnnnnnnntttgnnnnnnttttttctnnnncnttnnnnnccctnnntnnccctctctnnnnnnnnngnnnnngnnnncnnntnccnnngtnnnnnttcnnnnnnnnnnnnanccnnnnnnnnnnnncaatannnnnnntannnnccctnnnnnnnnattnctctnnnnnnntnngnnnnnnnnnnctcgtttnnnnnacnnnnnnnngnnnnnnnnnnnnnnnnncccnnnnnnnnncntctctctattnnnnnnnnnnnagnnnnctnnnnnnnnnnnnnnnactannnnnnnnnnnnnnnttattnnnnnnnnnnnnnngngntnnnnnnnnnnnnnnnnnnnnnnnnnntatnnnnnnnnnnnnnnnnnntacannnnnnntacannnnnnnnnnnnnnnnnnnnnnnnnnnnnttnnnnnnnnncnnnnnnnnnnnnnnnnnnnnnnnnnnnnnnnnnnctcccnnnnnnnnnnnannncccttannnnnncannnnnntannnnnnannnnnnntnnatnnnnnnnnntntctnnnnnnnnannnnnnnnnnnntttntannntnnnnnnnnnnnntnnntnnnnnnnnnnnttnnnnnnnnnnnnnnnngtcnnncctttctcttc

SEQ ID NO: 2738 - DNA, 648 bp, Gossypium hirsutum
  misc_feature (13)..(13): n is a, c, g, or t
  misc_feature (61)..(64): n is a, c, g, or t
tacttgcatgagncatctcttgatgcaattatcgattttttttaaattattttttgacatnnnnttttatttaaattttttaacttttattaaaaaattattttaactctttatttaatttttttagtctttgaatttatattatttgtcaatttattccaaaatggatagaaaaattaatgtttattaattttaccaatgtgacatccacataataatctaagtgtatgctatattagcaattaattaaaattttaaaaatgaaaattatttaataatattttttatactttttaaataattctaataaatttgatatctttttgaattatttacaatctaaacttaattaattgctaatgtggcatctacgtttataagtcaacaaagttaacaaacataaatttttacatctacttttaaaatgatttgataagcagcataaatttaagagttaaagaaaacaaaaaattaaataaaatgttaaaatgattgtttttaaatttgaaggattaaataaattatcttatttcttttataccaataacagccgaaattttagtctaagtttcattggtttacagtgaatcagttatgaatcatattttcttataatagtagtttgtagccgacaaatggaaacaaaaa

SEQ ID NO: 2739 - DNA, 569 bp, Gossypium hirsutum
  misc_feature (199)..(199): n is a, c, g, or t
  misc_feature (233)..(233): n is a, c, g, or t
  misc_feature (238)..(238): n is a, c, g, or t
  misc_feature (240)..(241): n is a, c, g, or t
  misc_feature (243)..(243): n is a, c, g, or t
  misc_feature (254)..(254): n is a, c, g, or t
  misc_feature (291)..(291): n is a, c, g, or t
  misc_feature (297)..(297): n is a, c, g, or t
tatgcttatcatctgtttctcacctttcctaacaaaatagtttctgtggttatttctcatgtttataattttcagaacttagcatacgagtgttaggcattggtttgtggtaagagtccaggatgacaaggacctattatacagatcgtacactgtcttggttgaacatgtagagtccttgtatttctagtgtgtcctntactttaaaccctctcttcgggcctctgaccaanggaananncnttaaggatatntgttgtcctgtggtttaaccctgaactattatttttnttcccntttaaaagcttttatttgaagtggttagaggcatctggtaagtggttgaggcaactgaacttgattaggctgttcaagggaaggttgaatacctggaaagcatgaacgtatttttcatagttgtttgctgaattatgaaagaatgactttctttttacttttcttgggaaaggaattgtcatatgtaatattcctatcagtcttagtacttgtccttctgctgtaggctgaagtcactcagaggctgaataatgctaaggaaatatcaagta

SEQ ID NO: 2740 - DNA, 579 bp, Gossypium hirsutum
  misc_feature (312)..(314): n is a, c, g, or t
  misc_feature (564)..(564): n is a, c, g, or t
atattgatatcacaaaaatcacaccatcaacaagagttgctctgcgtaatgacagctatgttctccatctgatcttacctagcaaagtagaccctttggttaaccttatgaaagttgaaaaagttccagattctacgtacgatatgattggtggtcttgatcaacaaattaaagagataaaagaggtttgctttttaacttgcttgatttgttcatttatggattatcactttctgttttttttttttttttttgttatggttcattattaatcccataatgcgatgggggttggtttaattttttaaaccnnntttttggtataatttgtaggttattgaacttccaattaaacatcctgaattgtttgaaagccttggaatagcccagccaaaggtactattattctgccaagtgatatctttatgttgatttgtttctcatatgatttcactgtaaaactaaatcttgctccgtgtcataaattatagggtgtcctgctttatggaccacctggtacaggaaaaacactattggctagagctgtggcccatcatactgatngtacctttatcaggg

SEQ ID NO: 2741 - DNA, 659 bp, Gossypium hirsutum
tcttggtatatccttgattttagtgaaggctgtaggtgctccattcttaccgtttgtatggtggtttttattttgtcgtccttctttgttcagcgtaggccagaatgggaaattcgtcatggaagccttttgggtattaagtacttggttgctgttcgacaggtaaggaatttgttgtcttcagtactcttttgcctcttctaagtatgcaaattcaatatcttatgcaacaattgttgatcataattagtgtttggaaggagtgttacctgatcttttaataaatcaacttctacaactgtttttctataattattagcctttgaaagcaatactcttaactatgtaaattctatattttctgggaaataactgttgtctatctaaattatcctttggaagcagttttgcctgatcttttattaataaatgaaatgttcataactgtttctctagaataattagcctttgctagcggtgctctctaatctgttaataaatgaagttgcaaggtcacaaattatcaatgtgtttcaactgaagtaacaaaatcctgtctcatttctatagtaccgagactgggggaaaatagatgaaatggtaataggcacttaatattttctattattggattttgtgttccatgtagttcacttgtc

SEQ ID NO: 2742 - DNA, 612 bp, Gossypium hirsutum
atttgacgctcgttataattttctcactgggactattccctattctattggaaatttaacggggttaatgttccttgctttaggagttaacaattttcggggcaacattccttctagtcttggtaactgcaaagatttgcttgtattgggtctttcttacaacaatcttagtggatcaataccgcctcaagtacttggactatcatccctgtccattttactaaacttatcatcaaactatttgactggtgagcttcccgtagaagtagaaaatctgaaaaatctaggagatttggatttttcaaaaaataagttatccggtttgcttcctaagagccttgttagctgtgtaagactagagaggttgttccttggtggtaatttgtttgaaggacctattcattcatctttgagttcattgagaggtcttgtggaattggacatatctgaaaataatctttcaggtggggttccagaatttcttgtgaattttggagcattaaagtatataaatctctctttcaataattttgaaggagttataccaagtggaggtgtctttaagaatgccagtgctgtatttgttgagggaaacaataagctatgtggagg

SEQ ID NO: 2743 - DNA, 246 bp, Gossypium hirsutum
ttgtgctttagttttctgaatgattgatagacgtaaagcattctcctacgttttaaccaaatatttttccctattgacaagaggtgctattctttcttcacgttgctttgtctaaattacctcaaagccggagcgtcacaagtgtttctaaatatcggggattttggaagaagagaatgaaattttcttgttctaagcaggaaaaaatgcctgaaatagtttgttcttcagaatgtgcccaaaaaa

SEQ ID NO: 2744 - DNA, 597 bp, Gossypium hirsutum
  misc_feature (545)..(546): n is a, c, g, or t
  misc_feature (548)..(548): n is a, c, g, or t
acttggcacccacaccacagaaaaggagacgctttaccccagctgcctgtatatttgaaaataaccattctaccccagttaactttttgcacaggaaaaaaatgtacaattttgttttcataataaagcaaaatttaccaatctggaactagtaaaaatgacaaaataaaaacaatcaagcatgttgaatatagaattcatttattataaacttttttcttagggcactgcaggaaatatgaataacactcatcttgccccttgactaaccccttttttcattttcaattttcattgcattaattttcagtttccatgaaggttgagcatgggataaggcacatgtgcaaacttgggttcaatcttttccttttaagttagggctagcctatctgtctatgattaagaatagtggtggtagtgatctcattgttcaattcccccattgtagcctttgctcataaaaccataaaaaatgctttaaattatgagctcataaaaccaacttcatatctttcaataatatttcttaagcataaatgatnnanaaagcttaaaaatcctctatggtggcatcaagaatttaaagtacctcaa

SEQ ID NO: 2745 - DNA, 600 bp, Gossypium hirsutum
actcaagaacagcattccatgtgtcttgaagacagtctggctctacgttacataaatcaaatagagtccgcaatgcttccacatttttaatacgcatttcctttggggaatgcaagaaagtaaacctaacatccaaaatatacagaaagaattacagctaagttattcccctatggttaagagaattataattattgagacatggactgcccagttaaacaaatgcaataataattgatgcaagggctttatgatgtaattagctgtacttctttagaaaatagagaaaccggacaaggtaagaagaacagaacaattacaatgacaaagcacaacaaagcaatggttacaaacggaggtggggtaatggaactaggtaaataacagcagcaaaaggagctttttaagaacaagacagctgtacctgatcagagatgttacaaaggcaaagcgcatagtatccattccaagggcataagtgagatatatcccagcactaaatccttccatagaaagaataaccattggcttgtcttcactttgctccattgtaacagagaaggtggccaacaatgaccatcctacagcttcaaccatcat

SEQ ID NO: 2746 - DNA, 630 bp, Gossypium hirsutum
ttttttattactgatacttgtcagtgttgaatgctggggcagtgatagtctattagagtacctgtatttatgattagcaacaaaaagatgaaattatcggatttaagacggcgcaaaagagaaaaacgactcaatccatttgttctaaagcacttcaaaatacaacagaaaccaaccttgaaaaggctgatgaattaggatgccagaggataggtctttctcgagtaacattatccttgaaatcattattattacatcttctcaaggaaagatctaagggtggagaagaatcaaacttgcatgtgctatttattgaagaaaaattgaaatttctgttaaatgttcccatgaaatcaatagcttctcttggtgaatcagcaagtgcattaccagcctcagccgaaatattcgtattcgttctttgacattccagttcaacacccttgtacgcagttgtcaggttgggatccttgcagtcattgactgcttacaaatttgattgagacatttgtaaaaggttagatgttctcctactgagcagaaaagcaatgccaaaactcaaaaatatcttgtcttaccactagttttcgtctcatgcatgagcagattctgatttaaaccgtcatgagc

SEQ ID NO: 2747 - DNA, 594 bp, Gossypium hirsutum
ctattcttttctagggttttctttatttaattattttatggcgcctcgaagtttagccgccattaatttgttttgtaactaattcttgctttaagttcgtttgcattgtgttccttgaggtttaactttactggttgtttacaatagtttgttttgtagcttaaggacttcactttaaattcccaattttttttttaaatataggagactcacattctaatttttgtttcatatttttcttttttaagttgcagtaaacttctttgatggggaactttgtttcgtttaattatcattgtcccattatagtccctgactagtgggcagttcaaagataaattttgaataaaacctacggaaaaaaataggaagaaaaagggggaagttttgaataattccaggaatcaagacctatttagttggggagctttatctgaggttattgttttattagcttcactcttgtaggaggaaactttcaaagaatatatatggaacttgcaatttgaatatagttgtgcttagttagatagtcctatatttataatttttccagctgaatgcaaataattgttgttcacttgtcctttatct

SEQ ID NO: 2748 - DNA, 649 bp, Gossypium hirsutum
atatactgatatacatatatcaggtctcaatgtatcattccttaacacataatcaaacatatatgcctgaagaatggaataagaaataaaagaagtagcagatccagaaaagcaatctaagtttcaaatttcaacaacattaaaagcaacccattgaaaagaaaaacaaaacaaagaacacattccataggcataaacgatggcagagctatacaaaagaaccccaaatagaaataaaaacccagaaaagaagctaactaacctccaaaacaaaaaaataagaatcttttagagaagtgtaatagattatctctaagatttcgtttaagaaaacacactcaatggggtgttggtaattcatctcaactcagaataggaaccagagaagatgggatgaatccacccagttggaaaggcacatcctcctcctgaattgagatgcaacctaatctacagctctgttggcgtctcttgttgtcagcaagtaaaaaaccttcatgcatagcaagagcctcaacttcaagggtagagctagccaagaaacttcttcccttcttagcaactaaagcagccatagaatctctaatgatcaccccaattccaacttccttcgacaataaattgaatgcaccatcacaactaacattcc

SEQ ID NO: 2749 - DNA, 576 bp, Gossypium hirsutum
  misc_feature (22)..(22): n is a, c, g, or t
acagcgatgggtattccatggnctgttaatgatgcatttcgcatgaattccatagtacatataaccgatacctaccattgaattgcaggtgatactgctaacaagattggaacctatagccttgccttatgtgcaatgcatcatcatattccattttacgttgccgcaccgcttacttccatagatttatcactttcttccggacaagaaattgtaatcgaggaaagatcagctaaggagttattgcacacacggggaggactgggagaacaagtggctgcttccgggatctcagtctggaacccggctttcgatgtcacccctgccaatctaatagccggtatcataacagaaaaggtctcacccttctcccattcgttatgtctgtagagataaacatcaaccatgcacgtgttaatatatctacggtagtcgaactcggatgagtttcatatatcggtatgtgtgatttacattctaatgattaactgtcatttaagcagggtgtaattacaaagaatgacataaaggatgatgcatttgacattaaggattcatagagaaggcaaccaggca

SEQ ID NO: 2750 - DNA, 627 bp, Gossypium hirsutum
gtaaaatccgaaagacaaggtaaaaaagaaagaaaaaagaaaagaaaaatctggcccccttatcattttatcaaaattaaaatggttttccatgtgtgttatttctgataaattagaatgcaaaagttccatttttcaccccatgatttataactttgctttaacttttgattaattttaggaactattattagtcagcgtagcttgtgaatatatatgtaggtgtgtagaacgaaatccctttctgtactatcatcattgcttatattagtcactcacccatgcttagagttgagtgccggacacctgttatgtgtcgacgcaggtaaactcattctttattaagaattttttttcatacatttaaaagatttgtgtttcgcatgcatatccgaacatacatcgaatgtaccaaatacacaatacgttaaaccttgtaaaccttgtgtagctggaaagtttggaatggttgatatcacagaaatgtttggaggaattaccaaaatgtaacattccttccctaccaagtattctcaagtttcgatgtaataaaaatttgaatacaggactgacatgaattgctatgttaatttttattaatttaatgcgtggttgacgaaataacta

SEQ ID NO: 2751 - DNA, 469 bp, Gossypium hirsutum
ttgtctttttactcttagagttgtcaataaatctcgtgggttatggagcttcttacacccttcaacgcggaaacctgacaccgagtcatcagctcttgaaaaatcggtatgacctgtctctacaagcatcattttacacttattgatcttgtgcttatcctctcagtgtcagactttttcttcttctgttctctttcaccatgcaggacctggccttaaactctaatttcagggttcttaatgactaggcctttcatttctaaaaattatatctttgagctgtctgtgtggttgcaaagtgagacttgctttcggcatttgtttcaataataaaatattataaagctgtgacgtctcatcaagcttaagttgtttgtatattcggatggaagattggtacttgagcactgattgaaagtttgagggtctgtactctaactaaaagtacagagaagtttaggcgtgttta

SEQ ID NO: 2752 - DNA, 596 bp, Gossypium hirsutum
cttcgtttattttccttcctattgtgaaataaacttgttcatatgcagttagcgtcttagagataatacatcatatgcataatcagcactgttttatgacaggttaatgctcatgtaaaagctctcagaacattgtgcaaggtaaagtcattaaatcctgaggaggctgatcaacttgttatgagatggggacagcagcttctctctaaagcacatgaaattttagaaaagtacatttctgatgataaagaagcaaataacaataatagtttctttacaccaccaagaagtgggagcagaaaagggaagcaagcagcaagagcatccaggttattatcaaaaacagtcactgcggtctatactgttggatctttggttgttgtctgtcctgctgcggatgtgagctccattgttccactattatacacagtcgtaacttcagggaattctgatccgaagttaaataaattaccagggcctaaggtatctttgaagcagacagccccttctttgtacattcaagcatggttgacattggggaaaatttgcctcgctgacgggaagcttgcaaaaagctacattcctctctttgtgca

SEQ ID NO: 2753 - DNA, 653 bp, Gossypium hirsutum
cccggcgcccaatcgccttcgaaatcaaagtggagattaggaagtaaagcaaaaagatatctccatcgggtagataaaatagaggtcctaatgacttgttttgcataaaggaatgacagaatgtgaattaaaattgaatcatgtaaaccactaaatcctgtctacattctccattttcacttgcttagccattccaagttgaataagaaataattctgtctacaagaaagaagacggcagaaacagaaaaaagataaagcctaacattagggttttctttttatagactattttgattaggttgaatgtacggtgcattgagttttagtatgtagttttaattattaaattttatataaatttattgatggattattaactcgtttggtaagtagttgccaatgtaagagaatatggattcgagtgtcctcaaacgcattatcttcctatttatgagttgagtttttataaattattcaaaactttcgtaacaatttctataaataataaaattttttaccataactttagaaagtgattgtttataaataaattatgattaacaaaactataacattttttattgaataaatatattatttttataatatataacatgagcatataaataagttttgtccatacttctcgac

SEQ ID NO: 2754 - DNA, 523 bp, Gossypium hirsutum
actactgaaaatacagttgagagggagaaggagagtcatttaaattttttaaatgaatttcacttctcagttctcagtacagtgatttacagaccattaacaaagtcctgctttggaaaatagaaaattagtttgggtttgggttttcctcattcatactgcgtgggctaacctacctattagatttaatgggtcttatgttttatttctgaaatagcccacaatttgatttaattgtactagaatttaactaaatttgaaactcaaaattcatctaaatttaaataattttttatctctagaattttatttcaactccaaaaaaaaattgaatttctcaaacatgcgataacataattttatggaaaattttatatgttatgtttaatataacttgtaattattataaaatattatttataataattcgaaaaaaaatcttttaacaaaacctaaaatttatatttgttaagtgtattttcttttaaattttatctttatcatcgttgattgttgattgtcg

SEQ ID NO: 2755 - DNA, 583 bp, Gossypium hirsutum
  misc_feature (379)..(379): n is a, c, g, or t
actctctttccttgtgctgcatggaagtacagttcgcttttttgtcaaaaatggaatacaaaggaaaagcataacccctagttagcaacaagaaccactgtgccttcattaccctttgtatgtagtcatatatatctgccattgcatactcagtaattccagtcatcgtatatgtctttccgctgcttgtttgcccatatgcaaaaacacttgctgaaaaagtaatttatgttaaggaaattaaacaagggactaggaagttatgtggagaaacaaaagagcttaataaaaataatacaaaagaaaagaaaacaaaccaaaaacaattcacatttaataccatgaacaatgaaaaaaacaacctctttggttccggttnattaacttggccaatggggcaaatcgaacccaaaacctttgccaaaaatccacagccaaacccttaattttgaaaaaaaaaaaaaattaaaaaaataattaaagcttttgatggcaattccctgaatgaaaacctaaaaaaaaaaaaattggcctattctcctgaaaaaaattcagcctttcaaataaacaaacccaaatttcc

SEQ ID NO: 2756 - DNA, 620 bp, Gossypium hirsutum
acaccgtatcggctgcaaccctgcataacaaaggtaaaaagttaaatgcaagaagtgctaatgtagagtacaagaaaagaattctgagaggcaaaaattgttggcaaatcagacaaataaactggcaagaatagtaagctttaaatactttccagattaactaccaaagaaacatgtcccatctacatgcattaaaagccatcataaacaaatctgttgctagcgataggcagattgcatttgtttagtcacacaagtccaactgctaagaaatttttgtttaacaaaaacctaattatgataggaaaggtaacttggacaaggtcacacctcaatattgtaaatgccaatcttgccatcaaaggaagacgctgatattactccaggaatctttgtataccagtgcacatcaaagttccagttggtaccggcaggcaattcacagacaatctaagccccaaaacagaaacaacccaattcagaatgtaatcttttgataataaggaagatacaaatccagaagaagtgaggaagcatattagtaattaagtcattccccgacctctccagtcactgtatcccaacaaatagttcgattatctttggcacatgtgagcaaa

SEQ ID NO: 2757 - DNA, 461 bp, Gossypium hirsutum
ttctcttctttcgcaccccttcacttgctaatatcacatttcataagatcttatttatgtgcattcatacaggaatggaggaatgggcaatggacttcactgcctacagattcacattgccatgcgaggtatcaattatagaacttagacttttattagtggatgttatcaattatagaagaccttaatttttaattagtggacattccagtctctaatttgttgctctatggcaggtctatctttgttgaaagttggtggaagaatggtttactcaacctgctccttgaatccagttgaaaatgaagctgtggttgctgaggtaatttatgctgcccaagagacaaaatcactaaaccgaagtaacttctttggttgtttttacttttgtgtcttttagaaaatggagttacctttttaaaaaagagagggagaggggagagagaaagagatggtatgaa

SEQ ID NO: 2758 - DNA, 561 bp, Gossypium hirsutum
atttttttttcctacaccaaccacggtgcgtggttgatcgtcaaccgtgacatgtgtaaaaggaggggaaaaaaaagtgttggatgagtggcaggtgttgcggccgtcattatctgcaaattccaagttcatctccttcatgatgagttccattataggaaaggcgtgctgtttttatatacctttccaactatataggggcgcagttcttatgaattcactttttactcctcaaattgatgtctcattttcgattcagttgcttaccatgatgaaaagctgaaaattatacagtcttactgttacattcggttgttgaaggttccaaggatgttggtcctcaggaaacttcttaccaagctgatatgttgatgcaatctaaaaaaaaaaaaatactcgtatttatcacataactaaatatatgtagaggaaaccttcaaaataagtgaattttttattaaagatataaaatattcatatatgatactgattgtcattcgacgtatacccgagtgagctgagagagactggttgatgttcaatcagcggagcagaggccgc

SEQ ID NO: 2759 - DNA, 632 bp, Gossypium hirsutum
tgaataatgttaaatagacttcccatcatgcatatacattatattgtttaatactagcatgccttcattgaggctcatgttcttttattattattatatcgcataactaagtctcagattcaacatcggggagagttatgacttaatactgttattgattatgttattttcttaacgtggtggatatatatatttgagaaagaattatcaatcaaggggtacaggaattggaaatagaccatccaaatccaaccttattttcagagataattagccaattgagaggaaacaacaatgttcttttatttcctggaatcccacaaaatacatggttacaatgttttgtttctacaatgttataaagaggaaaaaatagaaagtatagttaccgcactagctcttccattttcaaaccactgcctgcctgtgagcttcttctctttgggtgccgtgagagcagactcgggcattagcctgagatttgatgcatacagaaaatcaaggatactctccgttcactgaactacaagagagaaactagcacgggattatttcctagtcgaagctatattgatgacccagttatgattgttgttattgttattattatcatacatatcagagaactaaag

SEQ ID NO: 2760 - DNA, 830 bp, Gossypium hirsutum
  misc_feature (643)..(700): n is a, c, g, or t
  misc_feature (709)..(715): n is a, c, g, or t
  misc_feature (718)..(727): n is a, c, g, or t
  misc_feature (729)..(730): n is a, c, g, or t
  misc_feature (743)..(749): n is a, c, g, or t
  misc_feature (755)..(773): n is a, c, g, or t
  misc_feature (775)..(777): n is a, c, g, or t
  misc_feature (780)..(781): n is a, c, g, or t
  misc_feature (784)..(792): n is a, c, g, or t
  misc_feature (795)..(796): n is a, c, g, or t
  misc_feature (799)..(801): n is a, c, g, or t
  misc_feature (806)..(807): n is a, c, g, or t
  misc_feature (810)..(824): n is a, c, g, or t
tcatagacacttcctaggccattggatggtgatgtggagccaagttctttcaccaagatgtatcctatgaactgcaatcccagatacctacggcttactacaagtggcgtaccatcttctcagtctttagcttcaagatggcatttgactcttggagctgttgtctgtcctcttgcagaggatcctgaaggggtaagtgtctcaagattcaattataatttccttttttagatttacaataagtgtattttgttgaagactaatgtttttcctgtcgattaccttttttcctgttcaggaggaactgccagtcattaattatatttcaactggcattattcgctgtagaaggtgtcgcacatatgtgaatccctatgtcacttttacggatgctggaagaaagtggcgctgcaacatctgcgctttactaaatgatggtaaactcacttaatttaggaagcaaaaatatgtctcaatggttgaaacttgaaagtaaaatagttacttagttgtggctaatgtgtacaaaatcttttccatgccgtaggttcttttatatgttatcagcactcgttttcctctttggaatgttcaattctattgaagtgcaatgagctcatgcttcacttatactgacttgcannnnnnnnnnnnnnnnnnnnnnnnnnnnnnnnnnnnnnnnnnnnnnnnnnnnnnnnnnccccccccnnnnnnncannnnnnnnnnannaaccccacaacannnnnnnccacannnnnnnnnnnnnnnnnnncnnnacnnccnnnnnnnnnacnnacnnncacannccnnnnnnnnnnnnnnnaccccc

SEQ ID NO: 2761 - DNA, 615 bp, Gossypium hirsutum
cagaggcagtttgctggctaactgaaggagcagacatagcagactcaatataaatctgctcagacggcttcttattcattggaggatgatccttccctcccattgccccaccattgctaagagagcaagtgaggtcagtttggttcattgcaagcatagaagcatcctgacatgaaactccaacattgcttccactgaagctgcttgcattctcaacatcaactgaacccaaagctttatgactttcctttccaaaaggcagaggtgatccagtagaaaattttgcatcttccttcacgtttgctacattgccgcccatttcgagtggagaaaaaatattttctgggacattccaatagcgtataattgctttgcatatatcaaagtataatgttctatgttcaacggatgaagaaagcacctggaggactctgggaatgtcattcagattgtaatatctgacatatgattcagtatcacggggagccttcagcctgcaattatcaattttaaaattgtaatcagaaatttagaacagattggaaagctaaccggagaaaaaaatgaggcatcaatgtcatgcatattggcaacttagcacaccaagcaacaagt

SEQ ID NO: 2762 - DNA, 624 bp, Gossypium hirsutum
ggttatgatttaacttcttccacgaatggccttcttcatcgttcccaattcgccgaatgcattggtatttctttcctcatccaaaaatcaaaccaaaatggcgaagtactgttttgtggttttactttacgaattttcttcgtttatgatgtgtagggatgaaccagtctaaagagtttgccgacgagctgtttcaagcactggctcgacggcataatgtaaacggagactcaatccataaaatacaactcaaacgcttctgggatcagatttctgatgaaagctttgactctagactccaaactttctttgacatgtaaaagtttttcgtatcaattttgatcaatcgaaaaagcatatattttttaatctcagtgtttgttttctgagtataatttgtaataatgaagggttgacaaagacgctgatggaaggatcactgaggaagaagtcaaggaggtaagaattaagatcccacacacacattgattatccaatctcattcaagtttaatcaactagaaatgaataaaatttccaaataatatggccttctatacatattgtagatcatcagtctcagtgcttctgcaaacaaacttgctactattcagaaacaggctga

SEQ ID NO: 2763 - DNA, 572 bp, Gossypium hirsutum
cgatttttgagtacttcatgagttgcactgtcttgcatttactttgttagcatctgcaatacgtatctaatcatcggatttcgtcttgacaatcaacagacgaggaagatgatcttcttaaaggcatcaacagttaccgagcttcgttaaacttgacaagcctaacaacaaatgagaacgccgagtgccttgctgatgaactagccgaagaattcaagaaccaaccttgcacaaactccacaggcgccaacactgtcccaggcaccgaaccacagtttgccaactatccaaaccttctagccaaatgccatttgaacgtttccgtcacaagggacggagcagtaatgcctgcttgtgttccgaacctggctccgagtcttgtgctcactaattttacgcagtctcaatactccggaaacctcaatgaaaccaagtatacaggaatcgggatcggttctgaaggagactggattgttgttgtcctaacaaccagtacaactgaaggaaactacgctacggctactactgctgctactactagtgcggccaattcagttccaagataaccataa

SEQ ID NO: 2764 - DNA, 622 bp, Gossypium hirsutum
gaaattggttgtaaaggagctaataaaaaaagttgtgatttcttttaatggatgttgcactttctgcctgctattgtgacaattaccatgaggtattgcaatttgagatagtaacttagcatgatgatgctggagtgaagagcgattggaactgtttcgctgtagagtaaaactggtctgatatgataactacaactggtgagatatgtataaggtagcacatacttctactcaggtatagcttagacataagccagtagttagatgggcactaagacaaaatataaagtttttagattctttcagatttgtactttgtaatgaaattggatcaactacgtaggatatctttattttgctttcagtctaatcttacgacttcgtaccagataatgttctgctatgtattactttctcgatatcaagtcacatggtatcttcaattttctattgtgttaaaatgtttcatcagcatgccatttgttatgctagtcttctttcaccagactacttttgttttaagcattttaactgtgcagctcttatttgttgagatatatgggaattagaaaacataatgagagtattatgaataaaaatgagacaaacttgcagtcattgg

SEQ ID NO: 2765 - DNA, 616 bp, Gossypium hirsutum
gaggtgggttcggacgtgtttacaagggccgcttggagagtacgggacaggtctgtaacggctgcttgaattagatgtagatgactgtgttataaacatgatgtaattgaatttttatggattaatttgaattatgggtgtgaagaagtgaaatcttttgctttagtaattgttttatgtttacaggtagttgctgtaaaacagctcgatcgaaatggtcttcagggaaatcgagaatttcttgttgaagttctcatgcttagcctcttacaccacccgaaccttgtcaacttgattggttattgtgccgatggggaccaacgcctccttgtgtatgagtttatgcctttaggatcattggaggatcacttacacggtaagttagccagtcttttggtgttcatggtgtatgcaatttatgttacttgtactcggtacgaatatcagatatcaggaaaaatgaagagtcagaataacatagattgagtcctctactttcgttttgactgcaatgtaacacttccatattggtgaatatacatggctatttgcttttaccctatgttgctcttaactgttttcttccttaaatcacacataatctccaaggatcctc

SEQ ID NO: 2766 - DNA, 465 bp, Gossypium hirsutum
  misc_feature (42)..(45): n is a, c, g, or t
  misc_feature (449)..(449): n is a, c, g, or t
cgatccatgcactccaggttcacaatggactggtatattcannnngtactgccttggatggagtagctgtgaaggtaccttttctcttttctgctatcccttcccttccatcttcattttgatgacaagcaacggctttttaaccttctattaattttttttgttcctgcaaagatttggagcactacaaattataacatgatgggatcattgccaactacttcagaagtgaggtctatggaaataagctcagagctgatatacttgggatgcaaaggaggaattgtggaagtttgggacctcaaaaaacaaactaaaattgaaatactgcaaacaggaactaatggtaaagttctttgcatgagtcttgatcccaatgaggaagttttagttaccggaacttccgaaggccgaattcaggtaaaaaaaaaaagaaattttctccgctncttaaaaaaacaaaca

SEQ ID NO: 2767 - DNA, 648 bp, Gossypium hirsutum
  misc_feature (611)..(613): n is a, c, g, or t
  misc_feature (615)..(620): n is a, c, g, or t
  misc_feature (622)..(625): n is a, c, g, or t
  misc_feature (627)..(629): n is a, c, g, or t
  misc_feature (631)..(641): n is a, c, g, or t
atttatctgattcctggctcagtcttgatcttccattttccatgtcagcagaatcatcaacagccatagtttcaagctcgtcctcttcgtcttcattggccatatccatggaatcatctgcttcaaattctggctcatcggattcttcgccatttggagtcgcaaatgtctctgatgctttgaactttgcaatattcactccagcaccaggaccaaaaccattacctttccggaggaaaggctttgcttcctcattcttcagagatttatcattgaagctctggcccatctgctctttatcaaatttcaaaggtgccaaacctatgtcatcagagttcaaggctggcacatctgaaacatctacaggaccagcaaagcttttcctgtgggactgagaccgtcgagactgttcatccttgccaagagcaatctcttcattattactcttgctacgagcatagtttctcgcttggaaatggctcgtcaccttgccagctccagaagagggctttgtattttcttttctgagatcagaaaagttgggaactgactgaacaagaggattttcagattgtgctcttcgccttccagaactgggattcgaaactttnnntnnnnnnannnncnnnannnnnnnnnnnaaaaaaa

SEQ ID NO: 2768 - DNA, 624 bp, Gossypium hirsutum
atgctgcttgtgttgaccatttgtgatttgaacttgcctaatgtcttataggtttagcattctgtttcttctactgaaattttaatattttcttcatatttccttgttggttaaatctgcttataatgttttttattttattttatgtatttacatttctttttttattttattttataatgttttttattttattttatgtatttacatttattttttgacttgttatagatagatatggtttatgaattgctgcgcatatcaatggtgtatgtctagaatctatttattttcttcttttcttatattatacagctttctgttccaatttagaagttttctgactatttcaaaccagtgcaacaaattaaataaaatgatggttatcaagtaagacattttatggtttcaatcgaaggaagacattttccataacctgtaatagtttgttatagttatacatggtaggaattaagcttttcatttaaaatgtgtctttttggttttccactgaagtgtcaccacagctatctattgattacaagataagaagtttattttgctaatcacttgctttttcatgtaaaggtaggtgtaaaggcactaccttaaactgaaataatg

SEQ ID NO: 2769 - DNA, 618 bp, Gossypium hirsutum
  misc_feature (574)..(576): n is a, c, g, or t
  misc_feature (588)..(594): n is a, c, g, or t
  misc_feature (613)..(615): n is a, c, g, or t
actcctagttcaagacattatcttttaccggtaaacatatctaaatgatctcagataaaagaaagcatgtttttccacagccctaatagttcactagccttgtatcactgcatacatgactaactacaataacttgtactgcactactgctaataaattttcctgcatctcataatctcagctgaagctcactagtagagggacttgtaaaattcacaactacatgaactgtaaattaccattacacattaacacattaaaccaaactataattaaccaacaaagcacggctgctataaaaccatagccaaattcaacatcagggagcagaaatctatcaaaagcacttatttttccttcaacttcttaaaatcatcactcacttaactgacacggacaaaaagaacggcccggactcacccaactcactcactaatgaaagatccttcctccctccaactacacatccatcccccatcactctccacatatacatccgaccgatacctacccccatcactaccaacccatccctctctagctagaacagactgcgagtaatatctatccccannncgaccgtcgatnnnnnnngcagacagatattaatcannntct

SEQ ID NO: 2770 - DNA, 672 bp, Gossypium hirsutum
  misc_feature (614)..(618): n is a, c, g, or t
  misc_feature (664)..(669): n is a, c, g, or t
tcacttgtcgcttgtcagctcatgaaggaagtatggttgaagataaaagtttttttcagaagcaaagtaggtgcacttcaatacatagtgatcaccagaccagatattgcgttttctgtcaacaaagtctgtcaattcatgcacagacctctcgatacacatttcaaagctgttaaaagaatttaaaggtatttacagggcacgttagattatggtcttcatttttgtcaaacatctaagtttgttcttgaaggttactctgactccagctggggtgctgacatcgatgatcaaaggtccacatcgggctattgcattttcttagaggaaatctgatttcatggagctctagaaagcagcatgttgtctctcgttctacagcagaagctgaatacaggagcttcgcaaatgttactgcagaaatagtctggctttagtccttgttagctgagctctgtgtcccaattcagaagaagtccttggttttgtgtgatagttccgctgctattgctgttgcaggcaacctagtcatgcactccaagtttaagcatgtggagctagacatattctttgtgcgagagaaagtactagcaggaatacttcaagttggacannnnncagagctcagctaagaaggactaaagccagactatttctggagtannnnnnttt

SEQ ID NO: 2771 - DNA, 598 bp, Gossypium hirsutum
ggcacaggcttcacagcaagctctactttccaagaaaggaaaccacctgtattgagatcatttatgaggattagatcaaaattaaaatgcagtataagatgaaacagaaaacttgtgtctccataattgtttgtttcatcacagtaaaaacaggtggaaacatttttaccgatgccaactcccactagcaccagccgaaaaccccaagatgtttccaacagccatccataagcaaaatatggcatttgaagaattgtgctgatcaggacctgtcatccagcatcttgtcatgcacagtatcaaacaagtgtaaaattatacaacctcgtaaattagaggcatcaaaactaaacgtcacaatgttaccatgtacagactaaattgtttccattttcttaagaaagaagttcacctgatagatcagccagaagggcacgagctggtccctaagaaaataaaaattctatcattcacaaacttatacaacagcaaacttgaaagtaagaaaaactcaccatggatggcttacctgcactgtattgttagcaagatccaacatccagaatccaataacaaagacaaaagccgccctcgttcg

SEQ ID NO: 2772 - DNA, 651 bp, Gossypium hirsutum
ctatcagattgtgtcgcatacacaaagctgcattgaggacacaaccagccttggttgagaatgagaagaggctcttggaaaaaattaatgttctttgcttaatggagattatcttcaggtgtgtcagtttacagtgtcctctagtggatcaggtcagagtaaattgctgctatctgtatgtgtagttaataactaaactacaatatgtttccatgcagccgcccggctgaagatcgaaccattcctttaaaagttatagctgagcgaacaaaactgtcaattgaggatgttgagcatcttctcatgaagagcctgtctgtaagttcaaacattcttcagatttgtttcgccctttctgttttctcgcgttttctttttccttaattcttcttattatttgttcatgacgtcgaacatgtagaagccctgtctcaacatttctttgaaatgggctaaaaatcctgaagatgacttgtataaccttttacgagtcgcactatacaggtgcatctgatagagggcataatagatcaagttaaaggaactgcctacatctcctgggtgcagccgagagttctgggaatcccacagatcaaatccttgcgggatcggttggataattgggtgggcaagtacacactgctttgctta

SEQ ID NO: 2773 - DNA, 658 bp, Gossypium hirsutum
attgagtcttacaatcccaaacaaggacataatcatgtaaacaaaccacactatgtcaatactgatctctatctatgtccacagccaagtcactactaaatacttaacaaacctatgcaataacataagatgacaattcgtactaagcttataatgcatatttgggtctattacagccattgcgttttatgcatatattcagttgttgcctaaattgaagttcatataaagtcaagtcagttgcctagatggataaacacaagcaattcggatcaacacataaacagaaataatgtcataccaataggacattatagcaggctgatccactatgctctcacaaccaccaaatgatggagcaatgtatggtatctttaatgcatcaacaaacttgatggtggtcatcaaatctccatccacctgaatgatttagaatacattaatgtcaaataatttttgcatcaataataccaaatgaagtaatagatactaaaggtgaattttccgaggtgcaaggttgaagtagttgaagaaaacaaacctcaaaactgaccacaccaccaaagccagtcatttgctgcttggcaatttcatgttcaggatgacttggcaagcctggataatagacgcgcctcacctgccattgatatttgataag

SEQ ID NO: 2774 - DNA, 570 bp, Gossypium hirsutum
  misc_feature (470)..(473): n is a, c, g, or t
  misc_feature (489)..(492): n is a, c, g, or t
  misc_feature (513)..(514): n is a, c, g, or t
  misc_feature (516)..(517): n is a, c, g, or t
  misc_feature (560)..(560): n is a, c, g, or t
  misc_feature (564)..(565): n is a, c, g, or t
tggtcaagcattggggaggacatacatgtgcctgtccacctccagctaagccagccacagcagcaaaactatgaaacaccaacaagagctacaaaattggggtacatattccttcatacagtaaatgaatcttattaaaaaaccaattactttgccacaaactgatctccagctttttgcatggtaacccagcagattgcaattgcattagcaaaagaagatgcattaaagtgggcttggatgtcattcaatttgtatcaacacatagctcctggttccaaaagttatgcttctcatagtaagatgttttatgttaaagccactgatcattcagccaaaagaaaaattggtttgaaaatgattaaacaaatgaaatttagcatgagtgtgatgatcaaaaaaaccagctagttatgtaaagataaattaagtgtaataaagaaatataatatgaaggagaaacggacaannnnagtacctttttttttnnnngttttaaagataactccaatnnannccacaactaacacttatttaagttgatttaacatgaaaaatcntaanntagtt

SEQ ID NO: 2775 - DNA, 625 bp, Gossypium hirsutum
gctgtagtgggcagcatattacccgctacaccgttgtaccctcaacgccgacgtatgggtacacctggtttttccttgtcaacccgcgtggccacaatctattggtggtagtggaactgtggcagtggggcaggcctctcttgcgttttttctgacgggagaagacaaaactcactagattttactattaaagctttgcctttttaaccactttggctttcgtgtaattttgtttttaatttatgtcttacatgttgaatagttaatgttaccgcgttgtgaataaaaatacgagtgaattacatcgaacagtcacttaattttttagtagttgataaaataattacattaattttatttcagtcactcaattttagaaatgtaataaaatagttatttttattatttttcatcacatatgtcacagtaaagtaaaatggtagattgcttggtgttaaaaaaccctctagctagccagttaccaccaatttaacaatcatattagtatcaatttagggtttaagaatagaaaaagaaaaagaaaaataagaagaaggagaagagaaaaaatggaaatgcctccaattttcaaatcaatcacatgctacatctctacaagcgattc

SEQ ID NO: 2776 - DNA, 614 bp, Gossypium hirsutum
aacactaaaatgtgcattatttatccacaatcaaaagcattaaatccttaagaaagcaacaaaatggattcaaattatatcggcaagctaaaaagcatggcttagaaaatcaggatagaaatagaaatagaaattcaagatttccattcacaaatacctgcatccagacttcaggaggcattactccacaaggtacgtttgtaggactggatttagcattcatggaggaagggttcctaagctccaaagccgtggtcatgccaggagaaagtacagttccaattggtttaggggaaatggttgtagttacctctgccacggcaactgcattagactttgcctcagttttaccatctccaactgctaaaacagaaaaatacatcagtcaacctaaacctccagacatgaaagtagactgaatgtatcccaagttttaataatttatttatttttccattcttttcattttcaaacacaagtttcttttagaaatcataaaaaaaaattgcacgtcaaagtcataaacctagcctacgtactgcacgttaaaggaaccatgcaatcgcaaaatgtctcaaatatgacaactatccactaccatacgcctgactaaa

SEQ ID NO: 2777 - DNA, 591 bp, Gossypium hirsutum
gttctatcaaatcttgcaaatgaactccaggttccgctattgtcattcacggctttagatcccagcctgagccctctccagtaccctttttttgttcaaacagcacctaatgatgaattccagatgactgccattgctgagatggttagctatttcagttggagtgaagtgattgctattttcagtgatgatgatcagagcagaaacggtataatcacattaggcgataaacttgctgatagacgttgcagaatttcttataaagctgcgcttcctccggaaccatcggccaaaagaggtgacgttttgagagaattaaataagattcaaatgatggaatctcgaattattgttctgcactctttctcgaggacaggtctcttggtctttgaagtggccaagagccttggaatgatgggaaaaggatatgtttggatagcttctacttcgctgtccactgttcttgattccttttacccacttaaaccggagatagcaaactcaatccagggagcacttacacttcgccctcatacacctgattcgaaaaggaaaagagattttatgtcacgttggaaccagctgagtaaa

SEQ ID NO: 2778 - DNA, 651 bp, Gossypium hirsutum
acctgcaccttttcattcttcatttcttctgattctgagtagcaaggagggcttattcgataaatttaaacccaaacaacgctggattttgatgccaattcaagtctattttattgatccttagaatttcttgatggtcaaactactgttttttatttgaatttaggggaataatatgttacaatccttctaacgctctgtatatatatatatatatgtatatatatatttttaaggataagaagtcaattgctttataattgttagactaggaacacagcatggacatgacggctataaaaagattttatatgttgaatttgtacttttcaattaaaaaacaacttgcaaatagtttttcaaaattcaaaaattgaacctcaaaaacacctatgagaaccgaattgttgattccatatttggaagaaaaaaatcatcatttatccaaacatgttcaattgtgtccattcatgtctgactttatcttgatcatcttttgacagtgttcaattttacttttacttcttttaatgtgtccaacatgttggacatttatcgacatatggacactccactgatagaaatgtcatgcttcatagttagatgaattctgttagctgcttaaaattgtctttggtaagtgacctcaac

SEQ ID NO: 2779 - DNA, 618 bp, Gossypium hirsutum
agattgagaatagatttgtttacaaaaccggacccttcgactccaccgacctctaggttatagttgccaaaaccatcaataacatgtaattcagaaggattcaattgagacaaagtatgattcaatccaacaatgtgtttcataacgccttcccttgataacgtgccttcttggtcatggttccccaaaacagcagcccatggaattctagcagcaattgcaggggcaaatgctgcatccattgatttcgccgaatccttggaatcgaatccatagatgttatcccctaaacatatatgcataacagttgcatatcacaataaagaacattaaagccaccatataaaccaaagcaagcttgctccacctgtatgttaactaaacaatttactaacttaaagattcaattttcacactttcatctcataaagttcaaattttagggttttggttgtaaaagtaccttagaggcccctgaagtaagagtcaaaatgcattttaccctatctactaaaaaaataggcaatttcgtccttgcatgttagatcaaagagtaaattggtccttttgttaaaaatttaattcacttctagtgttaaaagttggtctttgtacatc

SEQ ID NO: 2780 - DNA, 652 bp, Gossypium hirsutum
aatttgatgaatgtaacttcaaatttgacagatccaaaagaattcacatccccaaactgaagagtcggccatgcattcagtgtattgtggaaaacgacaaaagtcaaagagcaccagaatttgaaatgactgcccaactgtatcgattaaagacttcatccaagtaatagcagattgcaacaatcaattatcaagcaaagggatattgtagggcggcacaactcttaatgccagcattcaactcctggtttagagaaagcattagttataagacagtcgtagtgcccacgtataaaaatttacattaaaagttgttcagtcaataattttggcttgatgatatacttcttaccttcgaagcctgtctgggtggatctagggtttgatctcatacatcctaccccccagatcatccacttcctagcaggaatcaacatggcagactggcaaaatttcactggtgacccatgcaaatccctctcaacttgttcatcttagggcaattatcagacacaagtctggcaccaacttccaacaaattgtttcaatactcatggagctaagagctccataaatttcaatgcaaggattataaataaagttctgctccacggaccgccatgagccaaaacagttcgtagacaacaaccat

SEQ ID NO: 2781 - DNA, 505 bp, Gossypium hirsutum
gaatggagaccttttttttgtaggctggttatcgacacatcgactgtgcccatgtttatgataatgaaaaagaggtaaaattttccactttcttttttggatttttttttatataatttgatttaccaatttgttcacaactgtgacttgaaaatgtagattgggcttgcattgaagggactgttttcttcaggagtggtgaagcgcaaagaattgttcatcacatcaaaactatggtaaagtaaaaccccagattttatattcaggttaaagatgaattcaattccatttttattttcctttttttttgaaaggtgttgtgatcatgcacctgaagacgtcccaaaggcaatgatcagaactctagaagaccttcaacttgactatgttgatctctatcttgtatgtttaccactgaaaccatcaatgacaatatgctattttaatatttaaaaaaaagaagaagaagaagaagaaaatatgctattttagttcattttttccc

SEQ ID NO: 2782 - DNA, 621 bp, Gossypium hirsutum
ttatgcttttaattcagctgttatgatccttaatatatactagtcatttagaatataaactataaataatctaagtgtttctgaccaaaatttcaagttgaaaagccccaaggttttaatgattgaatgggtttggtcagcaggacatctttatcagacttttcaactgttgttttctgatgtatgaaaaggtaaaaaagtgtgggactacgtatgtatatatatatttataatttggattatgggattcaaatccgaatttcattcatgcatcaatcaagtgtctaagggccaaatatttctcattaaaaggagaagaaataccacaacatggattgacatcctctttgtaatcatgcctgcacattgcggaaaactttatagagaaaaggggtaaagtctctttgctttacctaacattgtggaaggagaaatgacaatatctactaagttatacaatgaaatcagaccagaaaaaaattggattgcaagagattctctgcttcactacactgattgctcttctttaattaaattgagaatcaatgaagttaagaattcttatgtatgggcatgaacattaatcgagtatatggggcctcttaggatcatttatgcaat

SEQ ID NO: 2783 - DNA, 613 bp, Gossypium hirsutum
aatccaatgatttgtatgaaatgcatcttcactctttatttattgtgcatattattggattgtcaaattcaattttaggaagtggtgtatgtgggaaggagggaactaggggatgattatatcaaaaggtgaggtgtaatgctacgtaacccattttccctttcttttggtctctcatgcaggagcccatccctctaagtgcctgaatacatgtgaacaaacttcacaaaatttctattctctaggtacggaaaagcaagttgccccccctagtatagataaactagattataaccctgtcccagggcaaaatctttctttcatgcctgttggctactcgaatacatcagttatcgggtccagttcagcacttcctgaagcagatttgcaggtaccttccttaaatctagtaagttgcaagaacaatctagtgccattcaactttccatatgagaaacctgtgagacagcatgatatgagtggcaacagtccttctaatgtgaaggaacctcattatttgttaaactttggtagcaaaaatgagttcgacccaagtctactcagctatcatgttgatggaaattgttatctgtatggggattcatcaacaaca

SEQ ID NO: 2784 - DNA, 627 bp, Gossypium hirsutum
attgcaaaggtcaaaagaccagcagcaaaaaaaattaaatgaggagagttccaaacctgtatcactcggcacccatatggatgagtggaaagggtcacaacttgatcaaaaaacgttgtaactataaattgaatgtgctcctcaggaacacattcaatacacttctgaatgacatggttgccattctgatcacgtacacaacgcataacactaccatcaagctcttgaaccattttaatcttctgatccgtatcaacaacttctatagccttgagtgttaaagaaagcataaattattatcagaatgcagggcagaattcatcaggtaaccattgagattaggatcaaaaagcataagtgcttttacgaaatctatatagaaagcaagataaggcgatgaaaaattaagtgaatgaagcatatatagcacatatttacaaaataaatataaacaaggacactcattcacttaatgaaatcaatatagaaagcaagataaggagatgaaaaataaagctctattaacacaattgaagcatatatagcacatattcagtatttagaacataaacataaacaaggactcatatgaaatgaaatttccaactcaaccacagtagtgacacc

SEQ ID NO: 2785 - DNA, 617 bp, Gossypium hirsutum
aggttagatttttctcttcacgtcattgaagtttgctggaataaggccttgtttggaacgaaggatggaaagaagtgaggatggaaaatttgttaatctaatggttaagctacaaagtaggaatgtggttatgaatcttaaccattttattaacaaatttaccttccttcgtgccaagcaaagtcttgtatcttctgttaagtgctaaataaacatttctggcttcatgatatgcagctctttaccggtatacttgggaaaggtgcttttctcaatggatctcctattagaggtgaatccggtgatcttgatgtatgggtctcaaatgtcatttcaattttcaagtgaatgtctaaaagctgatgccttgtttcctgaaaatttgcagtgtcatctcaaacagaacttgtgaagtctcttcttgcaacagaggtgtgaacattcttctgtgtcgaaatcccgagcttagtcctttttctttgttggttgaaactgaacatgaaatttctgcctcaaaattccaatcccattttacagtattatctcattattactaggagattgttattgaatagtgttaggctaactgacacaataaagttgtccttcttggcaag

SEQ ID NO: 2786 - DNA, 637 bp, Gossypium hirsutum
gactcatatcgttgaccacctgaatcttgaggtacaacttctgacgagtaggtactttcctgatgtctttagttgtatcttttgtggcagtcttcatttccacgattattgcaggcatggagtgtgccagaggtgctgcgcccgctttatgaatcgtctaaagtaattgcacagaaaatgacaattgcggtgagtagatagattgatttatcaatatggttatcctcttaactttaaaactactgaaacatggagagtttcttttgtgttgcctcaaaaggcattgctaaaagcactgactgtttgatctctgcaaaggcactacgttacatcaggcagattgcccaggagacaagtggtgaggtggtttacagtctcggcaggcagccggctgtactcagaacttttagccaaagattaagcaggtagctaaaaggattatattatgccctgtaatttagattttgagtacaaatgtgcagcatctgtattttggtgtcatgcgctttatttcattgtgatatttgtgtgtctatcatttacttgtagaggcttcaatgatgcaataaatggattcaatgatgatggatggtctataatgaattgtgatggaacggaggatgtgataattgcagtt

SEQ ID NO: 2787 - DNA, 561 bp, Gossypium hirsutum
  misc_feature (217)..(217): n is a, c, g, or t
gaggatgtaatctctttctctattcccctattttctctttcatagttccactctcttcttcaagtgactaagacccaatctttttttttaattgtctgccgatcatttatttgaatacctccattaattttcaaatcaaacatcagtaccacagcacagtaacgaataagaatattttaaacaaaaaaaaaccccagatagagcaaagccggctggngcaatagggttctacaggatctagttggtagagtttgattatccttttcactttgtctttttttttattggattggtgggtgtgtttaagtactcaacctggtttggtggaagacatgagagattactattaagggtatgcactcaatcgtgaagcgacgtcccttctgatttggaaggtgaccattagcccaccatattacgtatcaaaatcattgaagccactgctacccgagagatccatacccatcatagcaatatttcagggaaagccatatatatatataataacctggttgactctgggaaaggcgttgtgctttcattttccactctttttccata

SEQ ID NO: 2788 - DNA, 567 bp, Gossypium hirsutum
tgtgattggtatttttggtctagctggaaaggcaacaaagatgaatctccacgttcgagatgaggcacttcggtgacagatttttcctctgccctttctacagtatgacgaggtcgaacccggatactacgctttctttttatcttgggttggacaacttgttcatattcaccttcatcacgatcatgaatccaactttcagactgctggtggtccacgtgagaatctcctgatgctgcaatttcaccttcctctagttcatcaggctgccaacattaacataacataagaaaatagcagaattgaaaaatgccataataacagatcgataaaggaaaagagacataccagccttcttaaaacagaaccaggcctagcatctaatgcggaaagagagccaaatttctgaggagaaatgggagacaatatctgctgtggttttcgactgtccaatgatgatccagaagaaccagcttcgtcaagcatccgatcatttctaatgtgttctgaagtctgggcatattcatacccatcatcgccaagagggccatcttcagactgtactag

SEQ ID NO: 2789 - DNA, 548 bp, Gossypium hirsutum
gagttattctaagtgataaacttgacagcttcgccagcagtgaaaatgggacgaccggtactatcattggcagatagcatggtagcaagaatagcaccgatgacaataccatcgatgatgtcgacaaaatcgccaatatgaacattaagatcaccagttttgatgtggttctagtgttcaagggcaacatcagcaacaatattggtggttccaccacagtcaatgctgagaattcgaatcttcttacatagtgcgataaccatgtctattccagtttggtaaagatctccaaagttaccttacgcagctccattttaggtagttccttgggtgtatttggtagcttgacgggagaaagtggagacagtttcctttattggtttttcaatgtagtaatgggccgtgtgagtccagagacaagcttaaaacttgagacgttatttttcgattgagttaaaaattagtttcatcaaataaatttttataagtttaatgctcacgaccacatccatgagaggttgacacagtggcggagccattaagagacc

SEQ ID NO: 2790 - DNA, 611 bp, Gossypium hirsutum
tttgagtttggagctcaaacacttttatctggtcattcatctggcagttccataatgttaggaacactaggacctggtgtacttttccaaaatgtttgtcatatatgatatttattaccgtttctttcatctatacaaaatggaagtccctggaagtccatgttaggtaatttctatttggttttggtggtcaagaaatgaactactatagatttctatctttacttgtagacaatgaagtttcttgctagaagtaagcacttgtttatggtaactaattcttgttcaccataggatgtggtttacaaagatgagttttagtgtttggtttgacttgatttgacttgttcaccataggatgtggtttacaaagatgagttttagtgtttggtttgacttgatttgatttggtttctgatcatatatactctttcagtgagtagcttaggttacttctcggtatatttttggatttaataatttatggtggctacaaggcataaaaaagtaagccagacaaatcatacaaattagttagaatggttacttgcttaaaagtattctgagaattgaatcatgaggtgaacattggtctggtgtcagagtgaaag

SEQ ID NO: 2791 - DNA, 602 bp, Gossypium hirsutum
tcgaatgataaaaggaataatagaaatattattattgggactttagcattttgagaaagacaaaaagaaaaccatcaacagaaaatacaaatcaattcggatttgcaaattataggaaaattttttaacatgactccacaaggtcattttcaagtgactagttgagaaatgtagtgagcatgcgagatagtataatgacatgcatgaaatgtatttaaggttatgccaattgcctcctacgtgtatttattaaaatttagatttcaaattcaaaagcaactttatttccatgtagctatcatggatcatcctagagagggatgcaagccaacagtatcaatcgttttagattctatatgccaagaactaatgtcaataaaaggagagtaatatgaacatgcaataaggagctgcgatagtacctgcatacatcaaaccttgtttattaacttcccgatagaaaggtcttgtttgcttctctttagcagctttttgaagttcattccatgctttttccctgtcttcacgagtaattttgcctgtggttaccacctaaaatcaatatggactatgatgtttcagtactaacacataagagtagc

SEQ ID NO: 2792 - DNA, 642 bp, Gossypium hirsutum
tggcacctaaatggattaagcaagcgattccaaagattccatgctgaaatgtcagggtttgccttcaacagtaccatactatgggatccaaagccatggcaccgacctactcttgaaccgataagacagcttgacacggtcgaagatggtttccatgttagtatttattggctcttctttgattgtctttaagtgtcttattatttcaccttactacagtgatcacagctgttgttgtttctggataaaagagaaaaggatgttggcaattcagataagattatatatatttatatttgagcactgaaaagatggaaacaaaatgtgggaaaaaaatgtgaatggaattctcccaaacctggtgtggaaaatttacccctggagaaagtatttagcaccgtaacctatattgaaatgctacatactggtgatggatttcacttcaatattttaagattatttatttgaatttgcaggcaagctcatttattgaacgagttgtgcaagatgaaagccagatggaaggcttaccacacgactgctcaaaagtcatggtttgggaactaaatgttgaatcatctaattctttctatcccaaaaaatggtcaatgaagaataatttagacatcattgctccacttg

SEQ ID NO: 2793 - DNA, 602 bp, Gossypium hirsutum
gcttttgtttcttactaatcataaaactaaactagtaggattaaagaaatttaccactcaagcattgcaccagcaaattaagtagtgtgtggatattcatggcactgtcttttgatgatggaaagcactttgtactgtagatttcacttttgtcaaacacaactctaatgataaaacgggaataagaaaaaagcaaacaagttttatcaacaaaaaatattcaagaactacaattttgtagaaatgcaggatctcaagatcttagctttattttatatgatctgtaaattcgctacaaaacatgttctaatagggtaagtaaatgtaaactcgttgacaagatgatgagtatgacccacttgagtgcaattttaaagacaaataaacaggaaaaatcgaaggccaaagacagttgaaaccccagaaaaggaaaaaaaaatatttaatatggatattgaatctacaaagtgagaatttaccaaaccatatgaataattagtatgcagcagaaaaaggaaggattttagaggagaatgaaaccccatatcaatcaatccactattgcttactcctcagtttattggattaccataagtttgacc

SEQ ID NO: 2794 - DNA, 634 bp, Gossypium hirsutum
gcctgtgaatttaaaggttaagccttttaattatttcaaaattccaatgttgcatgattgtttaacataaaaaacttgatgtttattcagagatatccttgatgctgtgtctgtcactgttatgggtctttgatgctatttgcctttgtattaacagctaaactaaaataatgaataaggtcaaagttgtgtattatgaattaatatttattctatttatatttgtaattaatatcaaataaacctaaaccttagattttaatacatcctctatgtgttgtaaaaaggaaaaaaaagaagaaaagaaaaacaaagtatacctgataaaagagtcaattgatgagttgagtgaataattctttttaatgtgaaaaaaaaagacataaaaatctctatttacatatttttatccagtagttaggtttcagttattaagctacaatgaggatattatagactgatcactgtactggagtttaagttagtgttggagaatggggaaccaacctttggctcgtgttggggtttgtgaaaatttttcttttaccattttcccatgttaaggccataaggttgctaatgcttgatttagttgatgcttttgctacttgcattttttggatggaccgtaata

SEQ ID NO: 2795 - DNA, 586 bp, Gossypium hirsutum
attccgatccactcacagttgacttgaaacctagtataccaagtaagtattttctgttccattccattcgcgtatatatattatatatataaccttgcctatgccctatagttaaaaactaaatcaaaccgtatatccacatctaatatgttcctctggagttacttcttaattaggtgaagctgaaagaatcctgaagtgcggtggcagggtctttgcaatggatgaagaatcaaatgtaccaagagtatggatgcccgatcgtgattgccctggcttagccatggcaagggctttcggggatttctgcctcaaggatcatggtgttatcgcaattcctcaagtttcttacaggaagcttacaagcaaagatgaatttgtagtgttagcgactgatggggtaagaaggaaaacttttacatgcacgtatagcgtctcctttttttctttttgaaatattattatagaattaaatgaatctttctttagggttaattaatttaaaaacacatatataagcggtaattatatttatttattaattaatggttgaaattaataacaaggttgtatgagaaaaaaatac

SEQ ID NO: 2796 - DNA, 584 bp, Gossypium hirsutum
aggggaaaccaaaatcgagacgtccttgtgggaagtatgagagagaaaatatgaaaattaaaagctccgatgcctccctccccatttctgttttccttgttgcaagtgtcttaaaagataagagctcgaaactactgcatgaagctcggggcctcgatgatgtagttaaggtaagcttacatgtttgtagcttttaatcggattgattacttggtgaataacaaccataacaccaccattatgggtaaaagaactgtggaggcacttgtactaggagtcagattgcatttttccctctttacttataaaatgggcaaattagtccctgtacattagatcaaagagcaaactggtccttctgttagaaagatttcatctaattttattgttaaaaaactggcctttgtattttagcataaagtacacgtggcacgctatgtttaactatctggttattctgtcagtcaagccggtttttaataatagaaatggatgaaaattttaatagaagggctagtgtactctttcatgtaatgtataaatactaatttgccctttcttcgagtaaagggaaaaatgcaatc

SEQ ID NO: 2797 - DNA, 628 bp, Gossypium hirsutum
cgggctgtagatttgattctaaacatgattatttccatgattaaaccatattgctttgactattcattttgcctaaagtacccattgccgacacctgaaaaactgaatgttccgtgtcgaacgcatacctgagtccaagtaacatggctataaaaatcttctgcatttgtggatgcttgcacaagcatatgttggatcacaaaaaattacaaatgtttgcaactgtgtgcacgaaaatctgttctttccaccttttcttactctatatgttgtatttttttcttattaagaaccattataatggcagcctcacgtcccggcatacctcagttgctagcatcacaaacaagcacccctcggctaactcctccaggttccccgccaagggtttcgggttctgcatctccaacaagaacatcaatgccagtttcccctaggaaacattcggtttcattttctacctcaagaggcatgtttgatgataggccatcaatgtcaagctctgattccggatcacagattggttagcttcaaatctgttctagaacaagaccttattttagaatctagttgcttgtagtgctggattgcaatactacataaacagctgacatagaataatgtgaac

SEQ ID NO: 2798 - DNA, 623 bp, Gossypium hirsutum
  misc_feature (64)..(66): n is a, c, g, or t
  misc_feature (609)..(612): n is a, c, g, or t
tacacaaattggtcacaataaatgcaagcaatcatcataactatagcttttcctaagggccttnnntataattcttttaaaagaatgcacagatgaaagcaaattgccaagagtattatacactttactctgaccaatacaagctgcccggtcagtgacatattgacaaatttttaactataaaccataaccacatgacaaaagaaacctgtttttcaatttctttacagacaaaacacacttccctttcttttctttctgttttttagatgggggaggaatgttcttgatacatggtatcaagatacataattgcttatgttaaggagaagtggttttaaccaaagataaaatgacatgaaatagtacaagattttagagaaatacaaaattcacctgatgctacttgataattctcctcaataaaaactggaggccaatatctggtagtatgtgtatgggaaacattttcagtagttccttcattccaatctgctgctgggggtctcttgcagaagctcatgccaactaactccacaggtttttcctcattgtcaacagccaagccagtatgggggccatgttgtccaccaggaccaccaccacaannnncattctgcaaa

SEQ ID NO: 2799 - DNA, 587 bp, Gossypium hirsutum
tgctagcctagagaggcattagagtttttcgggaggatgctaaatgacggggttgaaacgatttgcttgtgcacaactaggtgctgcaaagtatgctaactggattcgggatattgttgagattttagggtttaatcctactcgttgtgttgtagtgggatcagcaaagtgtgggagcattgaggatgcatgtaaggtctttaagacaatggaagaaaagaatgtgctttcatacagttcgatgattgcagggtttgctatgcacggtttgcttatgtggcattggagttgttccatgcgatggcgaaaatagggatcaaaacaaatagagttacgtttactggagggcttacagcttgtagccattcaaaaatggtagaacaggtcatcaaatatttgcatccattgaggataaattcgagatttctccaggcgttgattattattcttgcatggttgatcttcttggtcgagctggatgtctagaagaagcacttaatcttgcaaaaacaatgccaacaaaggctaatggaggtgtttggggagcattgcttggagcatttaagacctacttaaaaactacgagc

SEQ ID NO: 2800 - DNA, 613 bp, Gossypium hirsutum
tgtttcttttagtccctaaactttgtgaaagttgtgaatttagtcttatattttaatttaatcaattttaatcattgaactttttgaattaatcaattttaatcttattacttttcaaattttaaaattttagtactgagccaaatagtaagagttaaatttatttggttaaatttaattatcagtctcgtactatttgtacaattgtaaatttagtacaaattttctaattatatcattcaaagtttgtatgcatttttaatttataaatttttgtcttgacttaaatgattgtccttaatccattaactaaatttttagttagtaatgtgtaaaaataataagttaatatgacattacacttataataatacatttgtcgcataaccgtactttaaactttaaaatgtagagtaacttaattaaagtatggtattaaattcgcaactttttaaactacataggtaaatttatcaactttagtactgagctaaaaagaccaaaccaccctttttctgacccccaattgattaattttcttactcgtctttttcttttacccctttcaaaaattccttctagggttttcgaaaatggcaagtaactgcaacca

SEQ ID NO: 2801 - DNA, 622 bp, Gossypium hirsutum
catctatttttgctactgttcacatggctggtacgctctcttcctctacatcatctggctagatccttgacataggagctaccaaccatatgacatttgattttcaatgcttgaattcttctgttgctcttactcctaacagcccttgtgttcaattgcctaatgggaaatcagcctctgttactcatattggccatcatatcctttcccccacttatacatacttgattttaattataatttgctttatgtttctcaacttaataaagacctcaattgttttgtgtctttttacccttccttgttccttttacaggacctttgtagtggacggatgttggggattggtaaagaacatgctggtctctactactttcacccacatcagctctcttccagtcttattcatcctcgcaaattttccaatatttctttgcccattggtacttcttttatagctttacataatgatccacatgtatggcatgctcgccttggtcacacctctgcttccacaatgaaaaaaattgttcaattaaaatctattttacattatcttaatgaattatcttcttgttctgtttgtccactagctaaacaaactaaatttccattcctcgta

SEQ ID NO: 2802 - DNA, 636 bp, Gossypium hirsutum
atctctggaaaaatattgattctaaagtaaactctggaccaagcaggacaccggcaaattatcagcaaaatcttgataagagccctctatcttttgattcatcacgaaataattgcttggagaaaggattgtctgaagcaaatatgttggagaactctaatgtcaaagaaacttcaaatgacagttttcactcgaacttatcccaacatacctccactggtggcattataggcaatggctggttggatgcaaatgatccactggcaggagaacagaagtcatctgttcatgttagttgtaaaccttctggagcctacaaatttcagtatcatcctatgggggatctggatgcggaggttgaaacttcttatggaactaaaaatctcacacatatgcaagcaatagcccaacatgtttctcaaggattcaaaggtcatgaccaaggatattttgtgcagtcaaattatactgtacatgctgctggcaaatctacagaaactgagaaggttattttatttttgctgtatatgcgaatagcgtgaaatcccctagtctttctctctgtccttccctgcagaaatttactttatctttagaataataagtctctagaagactaaacattctctgtcctct

SEQ ID NO: 2803 - DNA, 634 bp, Gossypium hirsutum
  misc_feature (9)..(11): n is a, c, g, or t
tgaattttnnnaaaacattgttaatatatatttagttaaaatataccactcgactttcttttgtaaaagactttatttcaatgacttattatcaaaaacttcataaatttctttcaacatttagacataaaagttaaaatcttgtgttgcaacataaataatatatttcacaagattttataataaaacttttttaatggaaaaagaacgtagaaaaatcgagttgtttttggtgtaagacttttccaagtcttcatggtcaatctctgtagatgagtcttgtagtagggtgtacggaaattttttttatttattgaaccagaatcctttttcactacaagttagtaagtttataatagtacaaaacttcatttagaaaattccatcgtcattttctccaacatttttatgaacatcaaccacttctaatagtccagcgctatgatttgttgtatgactaatgagctcgaaatcatgaaattgtaacatgatcattctcgtaatagcgaaatctaagacactttttaatagttaagaaagtttctccgaaaagtgaactaggattaactcttgagaaacattgtgacccgacctatccagttgttgttttagcctatgcttcagtggttatctt

SEQ ID NO: 2804 - DNA, 613 bp, Gossypium hirsutum
acgttcttactgacttatacacgttctcctagttggcctcatccgaagagtccgcccaaagttcagagttctgatgcacctaggtccctaaacaatatgtcattagaggtagaatttttctcctttttctctgctactgccttggatatctattccatttcatatcaggtgaaatctttcacaggattttggtttctttgagaagtccaagtaacatgagccctttgtttgttttgttatataggatggccgtcataacttagcatatcgggtaagtggttctgagtcacttaggcctggactacctctttcaaattttggaaccctccttgctttgaaggcatcgtctgtgaatgattcgattcaacaagaggtcagcctaacatccactcatgatgatgagcttgcctctaagtgcgattttgcaagcaataatgctgccaatctgccagacctgaagacattgaaggtgcgaatcaaagtgggttcagataacttgacgcaaaagagtgctgcaatatacagtggtcttggccttgatatttcaccatcttcctccttagaggagagcccctcagaaagtgaagggatgtatcggcagactcaagatcaa

SEQ ID NO: 2805 - DNA, 615 bp, Gossypium hirsutum
aggctcccattcgtagtaaaattagcacacaacccaagggcaaacaacacgatgagtttctgcagggtgtcggcggcgatgaacttgaaggtcatggcataagggtcgttggtcgaaatgaaatggaaagacaggagaggaactgcagatatggcgacgaaccaattgattcccgagcactcctcatgagagaatatcttccaccaacggacggaaccgtacgctaagttcctagacacgtatagtggaatcactgccgttaaaacggtgtaaagatcgccccagctgatcatcttttaagatattgttcttatgagtaggactgtagaagatctgatggagatacttttaaggaaggttgagaagtgagatacgactgtcaaggaagggcaaattggggataataaaaaatatcgttgcttaaagaggataaaatctcatctctgtgtttctttcacaactgcctactgctgtttcagacttgtttcatactcttcaatttttttcttttttctgatttaatatatatttaaaagatgcctggaaggaaagaaataaagaaaatgagtgaaaaaactacagtataatttatcagagagatatggctttagagca

SEQ ID NO: 2806 - DNA, 620 bp, Gossypium hirsutum
tcagctcacaatggcctagttgaacgtaaacaccgtcagattgttgaaacaggactctccatgcttgcccatgcttctatactagtggcctattagaataatgcattcagtaatgctgtctatctcctcaaccgattacccactacacctctaaactttgtctcaccgtatgaaaaactgtttcaaaccaagcctgattattcctttctctaaacctttgggtgtctttgctttttgaatcttagaccgtataataattacaaactccaatttcgcttcacaccgtgtattttcctcggctactcacctagtcataaaggatatcgttgccaaacctacagtggaaaaatatacatttctagacatgtcatcttccatgaagaagtgttctcctacgtcagctctacctcacccatgtccatacctcaaacacaaactagctccaaactacttgtattttcacctcgaacccaatcacacaatcagtcgtcctctgccccaatgaccatcaccacacctcaacctttgacatcttcacactcacctaacctaccaagttcacctcaacctttgacctcttcacactcacctaacctaccaagttcaacacaggcatctct

SEQ ID NO: 2807 - DNA, 663 bp, Gossypium hirsutum
  misc_feature (646)..(647): n is a, c, g, or t
taaggctccacgcaatgacaaaacccttacccttctcctttcttaccttttctctctcttttgcaaagttctgcatattttcgtgccggttttgcagggttaaatccatgtcaagaatgagagacagccccactgccactaactgaaactaaaagttcagaaataagggagagaaagagagagaagcttacaatctttccatttacttggtgatggcttccatttcataggaattgcaataagtttttcatttgaaataaattttaaatatttaatataaatattagattataaataaggtaattggtaaaagcacttatggtttcatgatatatatatacagtaaaatggcagagcggtgaacagttgatcgtgcctgttcttaaccatgtgctttgcacgttggggtattattatgatgggtattgattcttgtcattgttgaaggcagtttgatcgaagaaactgaggaaaaaataaaaatataggaaaaccaagtcctttcttttcttacagttctgtcatggaggctacaaagatttaggaagcatttcaatttcccataatttgaaacttaaaaaaaacttgcatagatttgtgtgtaaggcttgaaagggatttaaccctgcaaaaccggcacgaaaanntgcagaactttgcaaa

SEQ ID NO: 2808 - DNA, 611 bp, Gossypium hirsutum
catagctagcattcatagagatttagcaaaaatattgaccatgaccatatcgagaataattagatatgattgtaacccatattttacaaacataaaactaatattattattgttttgggtttaatttatttataatataattatcatttatgtttgattcttttacatctaaaaataagcaatatgcttattttttgttcgtttaaatttgtttatttattgttcatgaacaaaattgttaattattcatgaacgtggtcatttaatgttcaggaacaagttcatttaatttagacaaatgaaatgaacaaacaaaattttaaatgaacgaccacaaactgaagacaaacgagcctaaaaataaacaaatgaacatgaacaaaggtaggttcgttcaagctcagttcatttacctccctactaaaaagaaatggcatagaataaaacaagctcagaaaggcttcactgggataacatgtgatacattggagatataacatggaacttaacaaaggaagagtaatcaaatagtaaatcactcaatatgtggtataaaagtacttcttttcctggttaaacataccataaccattttccttttacaagctccc

SEQ ID NO: 2809 - DNA, 1088 bp, Gossypium hirsutum
  misc_feature (32)..(34): n is a, c, g, or t
  misc_feature (649)..(650): n is a, c, g, or t
  misc_feature (652)..(661): n is a, c, g, or t
  misc_feature (664)..(664): n is a, c, g, or t
  misc_feature (666)..(673): n is a, c, g, or t
  misc_feature (679)..(681): n is a, c, g, or t
  misc_feature (686)..(690): n is a, c, g, or t
  misc_feature (692)..(694): n is a, c, g, or t
  misc_feature (699)..(716): n is a, c, g, or t
  misc_feature (720)..(725): n is a, c, g, or t
  misc_feature (727)..(727): n is a, c, g, or t
  misc_feature (730)..(741): n is a, c, g, or t
  misc_feature (743)..(747): n is a, c, g, or t
  misc_feature (749)..(761): n is a, c, g, or t
  misc_feature (767)..(771): n is a, c, g, or t
  misc_feature (773)..(779): n is a, c, g, or t
  misc_feature (782)..(788): n is a, c, g, or t
  misc_feature (790)..(790): n is a, c, g, or t
  misc_feature (793)..(793): n is a, c, g, or t
  misc_feature (796)..(800): n is a, c, g, or t
  misc_feature (802)..(803): n is a, c, g, or t
  misc_feature (805)..(810): n is a, c, g, or t
  misc_feature (812)..(816): n is a, c, g, or t
  misc_feature (818)..(822): n is a, c, g, or t
  misc_feature (825)..(829): n is a, c, g, or t
  misc_feature (831)..(839): n is a, c, g, or t
  misc_feature (842)..(842): n is a, c, g, or t
  misc_feature (844)..(845): n is a, c, g, or t
  misc_feature (849)..(855): n is a, c, g, or t
  misc_feature (858)..(867): n is a, c, g, or t
  misc_feature (871)..(885): n is a, c, g, or t
  misc_feature (889)..(889): n is a, c, g, or t
  misc_feature (893)..(896): n is a, c, g, or t
  misc_feature (901)..(905): n is a, c, g, or t
  misc_feature (908)..(913): n is a, c, g, or t
  misc_feature (917)..(938): n is a, c, g, or t
  misc_feature (940)..(941): n is a, c, g, or t
  misc_feature (944)..(952): n is a, c, g, or t
  misc_feature (955)..(963): n is a, c, g, or t
  misc_feature (967)..(976): n is a, c, g, or t
  misc_feature (978)..(980): n is a, c, g, or t
  misc_feature (982)..(986): n is a, c, g, or t
  misc_feature (988)..(988): n is a, c, g, or t
  misc_feature (994)..(1006): n is a, c, g, or t
  misc_feature (1022)..(1030): n is a, c, g, or t
  misc_feature (1051)..(1051): n is a, c, g, or t
  misc_feature (1053)..(1055): n is a, c, g, or t
  misc_feature (1057)..(1058): n is a, c, g, or t
  misc_feature (1062)..(1062): n is a, c, g, or t
  misc_feature (1064)..(1067): n is a, c, g, or t
  misc_feature (1070)..(1081): n is a, c, g, or t
ggatcagcggatgcaagtcaggactctaactnnnggtaagaaaaattggggcactggaaatgatgctggccaagactctggttggggcaaaaaaggatcgacagatgcaagtcaggattcaagctggggtaagaaaagttggggtactggaaatgattctggccaagactctggttggggcaaaaaaggtggttggaaccctagttccagtagtgcaggcgaagattcgggttgggataagaaaagcaactggaattcaggatctggggatgcaaaccaggaatctggttggaagccaaaaagcgattggagttctggaagtggaaatgaagaccaaaaggagccttttagtaatagaggtggtggaagttggaggggaggttttggtggtagagatggctcagataggggctttagaggtagaggagatacagacagaggaggttttcggggtagaggtagatcggatagaggacggggcagatctgacagaggaggttttggtggcagaggtggtgatggtggaggctacggaggcagaggcagtgatggtggaggctacggaggtagaggcggtgatggtggaggctacggaggtagaggcggtgatggtggaggctacggaggtagaggtggtgacagaggtganncnnnnnnnnnnacncnnnnnnnnctctcnnncttcnnnnncnnntcctnnnnnnnnnnnnnnnnnnattnnnnnntntannnnnnnnnnnnannnnntnnnnnnnnnnnnnttaatnnnnnannnnnnntannnnnnntnaantcnnnnncnnannnnnnannnnntnnnnnctnnnnntnnnnnnnnnaananncaannnnnnnccnnnnnnnnnncatnnnnnnnnnnnnnnnctantcannnnctacnnnnntannnnnntttnnnnnnnnnnnnnnnnnnnnnncnnatnnnnnnnnnctnnnnnnnnnatannnnnnnnnntnnntnnnnncnctccannnnnnnnnnnnnattaccattatttatnnnnnnnnncacttacctcttccacactanannntnnctcnannnnaannnnnnnnnnnncctcctc

SEQ ID NO: 2810 - DNA, 588 bp, Gossypium hirsutum
  misc_feature (50)..(51): n is a, c, g, or t
  misc_feature (532)..(533): n is a, c, g, or t
actgctttggcttttggctgtggccattaagttggtgtgaaattgaaggnnacttatggatacaaagtttttcctagattcttgcggttaatattcactgtttgatttctgttcattccttgtgcatattgtggttgattgcaagttttaaatagaggaagcagaagccaaggctcgtgacttgaatgttatgtttattgaaattagtgccaaggctggcttcaatatcaaggtaaaccattggtaccctattatcaacattcctagaagcattagtatagacagtatgctagattccaatgaaattattgtgaactcaatgttatgttggcataatattaaggagttacactaatcatctaatcacacaaagtctgatcggttgtttatttgtcacttctgcatcatttcctttctatttaatggacgcaacatttgataaaaaaatgtataatttcatcttcagtcctgcatgatgattaatgcagcattggttgatgttatctccttcacatgagtgtccttttcctcnnacattactgagcaatctgttagagctctcactatctgtctgatctgttaaaggct

SEQ ID NO: 2811 - DNA, 615 bp, Gossypium hirsutum
tttaatgatggcattttcttagccattgttgtaatctggagtacaaactacattcaattaagacaaaacccagtaatcctttacagaaggataatacaaaaacatttgtcttacagctaagtaagagctgataaagatggaccaccgaataaagaccccaatcagtggtgtaaatagtgtcgagccaaatctgtgaacgatgaaattgtctcataaaaacagttaaatagacatttaatcgaacaactatatcaagtacatgcttgatcaaccggaaactagattggtgtcacaaaatactagactggaattacaaaccaggattcttcagatagttaagagaaagccaattaactaatgttagtgggtttcaatcatggaaccaaagggtacgcaatttattacgaaaagtactttgaacaggcatatttgctagtcgaaatggaaaagttgcttactccttgaaaagctttttaatttcattttgaacttcaaccaccgacagggaattcacatcctacagaaaaataggtagatttgttaaatttttattcctactatcataaaagaaacaaaaacatccatggattgataacttgctccaagagtatgcac

SEQ ID NO: 2812 - DNA, 654 bp, Gossypium hirsutum
cttctttgttgcaagagataatcttgaaaatccttgaatatactgcaaaagtagtgaattgcgctcctaaacaagaaatgtcgtctctatgttgcctattacatcaaccagttacgtcagttaaagctcaccctcctttcaatttttgtaaggttcctatcatttgatcagcaatacaacaaagtcctaagagaagtaggtatgctgtaagtcttgttggatggtttgaaacaacacaagttacttttaaggtaaaaaatatcatgatggtaaagccgatcagttggagagaaaatccggttctaacaggttcaagcaacacttcaacagtgaaagtgttgttattgcttcacccaagttcatggaatctggttcggggaagtttcttatttttgaagcaaaggatattggcattgattctgaactacagtgtatctacaagacattcactagaacttagtcaggttcacagagtgatttgggtttgcagggggtcaaaattgaacatatttcccattatgaagctgatagaactattcttgtattcctcatagtttgggaggacacttctaagctccgtgacaagattaaaagcaaacaactttaaaggaaatcttagcaagctttctaatttttcctctacattgttccctg

SEQ ID NO: 2813 - DNA, 637 bp, Gossypium hirsutum
gcattgtatcatgatacatacacacatggctaatcacctctttttcttttcctgcaagaaaagctagcctgtgccccatgaacattcattaatagtagatgagagaagggcaaagacaagttaaagaaaaagtttttgaaccatataaatgggttttcaaatttgaactctttctttaacttgccctagcctttccctgctaactatatcaacctccggcctgcctacatgcattctcatcaaactttttcaacaccttatttgacaaagtatttcagacaaaggcaaaggcaagttaaaggaaatcttgtccccttcaatacagtatatatatagcaagcttcaaaattttcattaacttgcctttgcctttctctgaatccttgtgcttacaattgtattctatataccttttggattttgttttgctctctctatatatgcatggtgattggttgatacgaaactaacccgaaattgtatatatatatatatataaccaacagtttcttcctacttcgatacgcgcttaagccttaaattaattttattttaaattaaaaataaaatgttgaagtaaactcctgtaaaatatgtcatacaagaagaaacctgcgtgaaataatgacgaaacttc

SEQ ID NO: 2814 - DNA, 627 bp, Gossypium hirsutum
tggctgggcagataaaagtgacagaagctggtgaagatattcaagaaacaatggacattttagttgaaactggcctggatcctctttcagaagaatatgcttttattaaatataacctcctttatggtggtaattgtcagaggtaatcatttgcttttgagtttctttgtggctgttgtttcaactctttcctagcatatggtcgattaacatttatttctttttgtcttctgatatagatgcaatgaatggtgccgtctaccaattgttaccccatgtaggcatcttttgtgccttgattgtgttggtttggacagtaaaatgtgtactttacctggctgtggtcacttatatgagatgcagactcctgaaacattagcgcgcccggaaaatccaaatcccaagtggcctgtcccaaaagatcttatcgaattacaaccttcatataaacaggtgggttgattcttgatttaatcattttattttgtagtttttatgctatatgaattcttacaaatagacatttacttttggttattaggatgactggaatcctgattggcaatcaacctctagcagtaaagttgcttatcttgtggagaggctgaagggattgcaagaaggtta

SEQ ID NO: 2815 - DNA, 659 bp, Gossypium hirsutum
ttaaattgtagagatgaaagagtaagtgatatgcaggcgtgaagggatattgagactcttacattgtcctgatcaacttctccgatcatttcatccaagtggatttcctcaataccgaattcttgacaagctttttgaagctcatcttgagtgatgtagccactgccatctttgtcgaaatacgagaaggctgccatgagattatcttccctctcaatcttgtttagatgcaatgttgcagctacgaattcctcgtagtcaattgtaccattattattaacgtccgcctgcaattcccaattgaatagaaagaatcaaaggatgttaattagatcaggagtcgtgtacaagtggcctataatacatggattccagaataagtttcgaatatgggtatgctcatcatatccacttacatataagtctcggaaatttagtatttcatgaaaaatgaaagcatgatattaatcactgaaatgaaacttaccgcctgcattagagcacggaattctgactcatcttggtctgcaccaaatcttttcaatccatctttgagttcatcatatgtgatttgaccactgttatctgtgtctatgatcttgaacatttccttcaaacctgctatttcttcttcagaaagtctctgagcaatgacctga

SEQ ID NO: 2816 - DNA, 638 bp, Gossypium hirsutum
ataataactagattatatcatatcaacaatttgggcgaaaaatatatgaaataatttttttaaaaaaaattaatatataatgaaatataattttgattaaaatgataaagtcaaaatattaaaaaattataatattttaggtttaaatttctattttcacaatatctaaaaagtataaaatagattgctttaattaagtttaaaaagattattgcttgttagaaacatattttaaataatttaaccctcttaaaaacttaatttttttaactatctaaaataaattttaaatttataaataaaaaattttgaagcaaattttttaaacaagtggcatcaataagatctgtgattatgaattttacttttactttttttacagaactataaaatttattctataataatttacaataaattcttatttattcgcaaataaaaaaattacaatgaaattgaatcaatagattcttattttcaaaggaaaaaaacttataaatcctccaagtctaactccatagatgttgtcgatcacgtacatacggaatcgagacagtaaacaatttagtcaatcaacaaattcatgatgaaactgtttttcagacaagagtatggaattgaagtacttcactagctca

SEQ ID NO: 2817 - DNA, 654 bp, Gossypium hirsutum
  misc_feature (624)..(629): n is a, c, g, or t
  misc_feature (640)..(641): n is a, c, g, or t
  misc_feature (649)..(649): n is a, c, g, or t
ttgcttgggaggagcagcagatgcatgccggtcggttttaactttcttattgtagccttgttaagaacttaaattggtattcagctttatcttttgggaaaattttcccttttgaggacattgttttcactatgctagagttgcatgctatattttagtatctgttataatttggagatagtaactacctatctgtattaattagattagaagctcattatgatttactaattacaaaaatgatgatcacgggttttgttttggatgttatatcacgttgcacgtctattttagcccagtatctgttcttattctagctcggccctttataataaggcgctgatgacagtaatggtatgaacaagaaatattaatatttggaagatatccttatcatcacaatagaatctctttttatttacctggacattttgtttttgctagaaaggaagtccaatggtatttcgttctttctctctctaatttagaagttcgctgaaaaagacaagcacttgcatttcttgttttagtcaaacgatactggttattactggcttgcgtatggctacagaaaaatgaattttggttgcctctgcttggaaattttctctcaaacaactgatnnnnnngctttccgtanncgacaagnacacg

SEQ ID NO: 2818 - DNA, 625 bp, Gossypium hirsutum
ggtactcaattttgtatgtttccgaaagcaaagtcggcaggctgtagtcctggcaatgctcctgtctaccttaatgtgtatgacttaacaaatgtcaatggttatgtctattgggcaggtcttggtatctttcacactggggttgaaggttagctttgtttctttgttcatcagttttcttggttatttatttggcttgaaactgttataatggtatctaaaagtcttcgaatgcaaaagatgtcagtcattatctttcttttaatttgcaaaagcgcaagaacgtaatgcaactcaagtaactagttattgcttttgctactatgcgatagcattggcaccggggaagcataaggttgttgtctattgttaggccgggaaggagggaccaaacagtgaattggtgcagatttattatatcagaaacttagcatttgccctctaattgttcaccgataaatgctctgctgggtccttaataatttctgatgtctgaactcatcttctttagactaactatgatatgacaagtaaaaaccttcattttctccttgcttcataaattcctagatgtattctcaaggtttctttggttatctataaacaagcacagaagtgtatctga

SEQ ID NO: 2819 - DNA, 621 bp, Gossypium hirsutum
tgtgtcataatacctttgtaatttgtcaatacaaaggttaaaagcatccatgtgtattttgatgcaagtaccgcatgcctcacaacagagacctcaactgtaaaatgtaattctgttcctacttcatgaaagtgagatattttgtttaatgatgttcctcaacctttgtatggcctgtttatgaaatctggattttttgaccatttatcttattgagaagaatttactgcctgtatcactcaagggaaaaatgccaacatattataaaccttgagtctgaactctgaggtgtttttatcttcaagaaagtcttgtttgatggtttgagggtaagacatctattgacttttgctagccatatgtactaaattggttattctaaaattactcatttttctgttggtggattggtttgattaaacatgtttcctgcttttcttttcttttcttttctttttccccctgccagttggctttctgcttttgaattctcatcatgccataagttttaggttatctgttgtttcatagcattctgactgcaatctttgactcctcttgacttgtatctgttgtttgtaggcagcattgtgctcgatacggatcaataaagaaaaaaaa

SEQ ID NO: 2820 - DNA, 605 bp, Gossypium hirsutum
agatctgatgacttctaatcctccccaatccatgtcataaaatacggaactgattaaaggattagaatcattagattataagtaatcaccaataatcaaaacccaatttccgtatccaatgtaattactcagtagctaaacataaaaatcccttttaaaaaaatttcttgaaaatcacgatcaagaaggtttaaaacagaccaacattctgaatcatttcaaataatattcttcccctctgcaattccatcaattaacatgggccaactcaaagaagatgcaatggcaactataaaaccccaaaacactacctcatggaattatgagctgaaccaaatgctcgaagttgaaattatcaaagcgggtcaaaagagtaaaaatgaaaagaatcaaaagggcgtatatatttattatcaagaaagtcgaactcagaaagaaatacagtaaaagggaaaactcacagctttctcacgatccccaagttcaacatgaaatgctcgtgttggcacagccatggaagcctgtgtcttctgctttaatcagaggacaattttcatagaccgaattagatagagctatgaacaaatcaagcaaagacccaacaa

SEQ ID NO: 2821 - DNA, 364 bp, Gossypium hirsutum
  misc_feature (353)..(355): n is a, c, g, or t
  misc_feature (358)..(361): n is a, c, g, or t
gttgctacagtagtagaagactaacatctaaaaaaggaaaagaattccaaaatttaggatgtattgaaaaccaaatccaccatcttttaaactgtcctaagaaaatgtcggggacaaatctaacaaaagccattaactttcttctcaatttctttctacttctctaatcattttaatttttttaaaaaaaaaaacccaaatttagggggtttttttttctttgcaatttgttagggtttacaattttccttctaaaatattttttttaaaaaaaaaaaattttttttttttcccggggagttttttaattcaaaaagaaacccaacccaaaataaaaaaaaacattggcccgnnntcnnnnggg

SEQ ID NO: 2822 - DNA, 514 bp, Gossypium hirsutum
cttaatgccactgtaaagagaatccagcataaattacaaatgataagaggaagagaatgctagtacaggaacatacttgactggtagccacagggccgccatcgaaaagttcaccatatgatctaagaccatagaaagatatgtaatcatgagttttaggaccaagtcgatcatgaagattatgcaatattgaattatgtcctctgcgaatggttcgatactgccaatgcattatggctctcacagatgccgcaccagcatcatcaaggcctccctgttaaatttaaatatgagttcaatcataatgcgatgatttgaaatacaagttaaaaagtttgatggccagaacctggaaaccaggaagtaggggtatgataatgataaccctgaaacacttgttttcactgtatgctcgtaaaatacgccggtataatgcctccaagacacgattccgaatattttcatctcctgagaggcctgatatgaaaaattggttctggcaaggttgtgaaag

SEQ ID NO: 2823 - DNA, 438 bp, Gossypium hirsutum
acaatgggctctctagagcattttctactggagcttggtcgcatccttacaaaaagatggaaaggatatcaggtgtagtggcaaatctcggacgagcaaatccattgcagacaatggttgatttgagaaagacacgacagcaggttcagtacactggaaaggttggagatgcgagatacccgtaagttttgttagactcgtatcttgtaaattgtaacccattgctgcaaaagatgcaatatttgtttcacttcatagcaatctatttttacattcagaactttgtgatatcaacaatatgagtttcatatcttttgttggtttggtaactttgatagtttgattatgcaattgcatggacatgaatctttgcaaactgtgtatctcttatactttatctgaaaatcatttttttcacatcacgaacagttgggatta

SEQ ID NO: 2824 - DNA, 625 bp, Gossypium hirsutum
gctgtgtttaggctttattgttgttgttatttcaatgtatttttgttttcattaggattgtagctttgaggagagaaaacaataacatcttagcaaagcttaccaattttgaagggatctctaccatttgaatttaatggcattttaaatctttatattgcttggtttaggcattttgatttgtttttttccgtggcctattaacacggtccgttgattcctcgattattgttcttcagcaaaagttcaaacgacatccaaaatccaaacaaagaaaagacattatatgattgattgccttttatttcacaccaaaaagaatcccaaatttacaataatatctaatacatgaaacaacaaaaaatcacctacaacaatttgaataaatacatacattgtaatcgtacttaatgaaaaaatgacaaaaaagaaaaagaatcctgtgatttagcttcttctgtgtatgtaagggtgagaatgaataactcaaatcaacaaattttcaggaaaaaaaatactaaatgactcatagggttctgcttcttacacagagcttgggcctggatcaaggccgagattagacctccctttgacagagtttatcttctccagcttctaaccagcc

SEQ ID NO: 2825 - DNA, 604 bp, Gossypium hirsutum
tcctgtcgaggatatgaacctagtcgtattcgtgacaaatgttccatttaaacccttgaaatctacaacagaagtcacactaagaggaacaatgtcatactgcaaaagcttcccttcggtctttgccctcttactatctaaccatagatgcaaattggcatcaatataccatacattcaaagcatttgtaacactaaagcttagcttatggggtttcccatttaacagattccccaaaaatggggtaatttcaatatcataagtcgggagatcaaatgaaccaatggcactaatgggtctccacaggagaggattgattccacctgtgtaaaccacagtaaaaggccaaacagcaccaataacttcaccatccaaactaaccacaacttctctaaaaggtccattccctgcaacatctgtaagattattggcagcaatatactcattcggaagatttccataccagaactcatcattctcatgaaaagacacatatacttccaatacagccctataaacattctgaggaattacaaattccttcactttgacatcagtggcattctcaatctcataccacaaaccatcattcagcggcatgtcc

SEQ ID NO: 2826 - DNA, 612 bp, Gossypium hirsutum
attatgtttaccgaagcagcagctgatgcagttcacagaagacagtccatgaagatgaaggcaacttcactggagcagaatgcttggaaccataacttgagggtaagagtagatcattcattagcagggacatcagaaaatgaagaaaaaacctctttgaaaacatataatggtattgcatctgaacaatggatgtcaagttccaaacatagagacagatcaagatccagcagaaccaagcggggcggtggccatgacaatgacttaaaattttcaagtggaaggaagtcaaatccttctgttagaaaattatcatggttgatggtgtcggaacaggaagagggttatcgttatatacctcagctgggcgatgaagttgtatatttcagacaggtatgacatgcttgctctgttgttgtttttccctcatgttttttagtagaaacttgacaattagtatttcacaagacttgaatattggttctgttattttgcaggggcatcaagagtgcattgaagaaggtttcatgaaggggactggtccatggagctcaaggggacacctgagtgcggtggaaatttgcagggttgtagaccttgcttattcccacg

SEQ ID NO: 2827 - DNA, 632 bp, Gossypium hirsutum
tcgaatctcattgtatgtgttgaagtaggaggctgatgtcatgagaatatttgtggtgaccacaaacattctgttgacagtcattgtatttctattataagcccacgagtcagatggtatagtttgcaagctccatgtttaatcagaatagtgatgctttgatcttgtaattgacctatattgagcaaattattgcataaatcaggtataaaatacacatcacttactgtttggacttttcttccaacttccagcttgatgtctcatttccctttcaccatcagtttagaatcgttctcaagttttaccgaatgcttgatcattcaccaagtcttgtaaaccattctttgttttcaaacatgtggtttgaacacccagaaccgagaaaccatatcgcttcccttttgttttgcttcagatctacttgtgccatcggcagcatctcgtcttcatcatcaatttctgcataataagttttcttttcccaattgggactttcatactgataatgccccaaattgtgacacttgtagcattctacagttgctttatctacactttttttgccacgacctctgcctcttcctcaacctctagtccagcctctgcctcttccacctcaatcttcattt

SEQ ID NO: 2828 - DNA, 638 bp, Gossypium hirsutum
gaaaacttttcagtgcatgcacgcagttactggtttgatccagcataaaagtattatttactttatttcaggagacctgaccttagcgaaggattaagaaaactatattgccgttcgctaatatttgttgtggagaactcaccgttccattctgaggctcttcacatgacatcgaaattagatagaagatacagtgccctagtggaggtaagcaaacaatctattgcctaacctgttataataccttacacatccaactttcaaaatcataatgtccatacggcagtgaactaacaaccttgaaatggtggtggaatctacaggttcaggcatgcgggtcaatggtgacagaggagcaaccccatgccatgttgataccaatagagtactttctaatgggatacggtttataccgaccaactctaagcattagccctagaagccctttgagtccatcttgcatctctccggagcttctttcaccggaaagcatgggattgaagctgaaaccgattagaacccggatttctttgtaagctgcggagttaaagatgaaagagaaagggcaacatcacctttttgtaatctatctatatatataaggtgtttgtaacatcttttgatcggctggggagggt

SEQ ID NO: 2829 - DNA, 642 bp, Gossypium hirsutum
cagagagaaacctatgactaactgttcaaactcaaagaacaatacagaaaagaggtcggtactttgatcttctccaaatagtgaaagcctgtatggtaacgttctcctagcttttctgagcactagatgctacttaagaaaacaatcatccttatcacagtgctattacattcaaatgtgaggaaaattaaagagccccaaactgaacgcaattttttttatttatggattttctgtaacataaaggaattaggagcatatgtccatttccatgtgacaccaattacaaaataacaacaaagaacattgtatccctcaatcaacagttgatgcctcaatgattagttacgaacacggacgcagagaaaatggtgtcagttggataactaagttcattccaaattgtcatgttaaccatttcaaattacaatgtctagtttgtatcatggtgcaaggacactacaccaaaagaaaattaactggcactagaattaaaccagaagtattttccaactgaacgaagaataccttatagagatcaacaggcctttcaacattttcagctacaatttcaatttcctcttcagctgcttcaattgtcttttgagcgccagtttgagcagcaggaacgtctctatttgt

SEQ ID NO: 2830 - DNA, 529 bp, Gossypium hirsutum
atttaccttgtaaacaggaccatatccaccttctccaagcttattctcatttgaaaagttattagtggcagctttaatggtagcgaaagtgaaagcttggagattaggatcaccattttcatgttttctttcacctgatattttggttcttatcaaagataccgacattttcaacgcacccaaaagccctgcaatcaaaatcttgtggaatcaacgtacgattatcgtctcgaatcatttcagattctcacatgtccaaataatttaccttgtgatttgaatattttgtgttgcaggtaatagacgagagccgtaatcaggagaaccattgcagaaactgtaaccaaaacaatcaccaataactgatgtttcttcggctgagttgtgcctattgcataagctgcggaacattaatacaagctcattacattgtttatagtataatgttttctaatggtttcaggttcactgttaaaggtttgggttcaaatttttaaatttaactttcagtgttcaaggttatggtgtg

SEQ ID NO: 2831 - DNA, 605 bp, Gossypium hirsutum
tattggaaagaaactttgaccagttacaggttagacttcttggataatttctgtccttgttaggtcagagctttcatttccctttttgtattgtttcccaagaaaagtaggatttaatgtctcctttaaaaaaggtgtaggtatgtatggtcctggattgtctactattgcatttggtgctttaggtttttatactgcgtcataaatcattgtttgcagcacacctacccatctccctccctccctcaatcttatattgatcttaatatgcttgcaggttgcagttgatattactgaaggttacattattttgggtggaagagaatttcttagcatgcatgcttccagtgtagctagacttctggatctcattgttggaaatgtcaatgatagagggctactttcaactcttcctgtcattgacatcctaatacaggtattatatagtagattttcagcacagtggcatcacataaaaataggccaagtttcgacgaagccagtagcagtatgtgtatattgaattttctcctcacataatatccattgaaaaagttttaataatgaatacagacatgaccacaagcataccattgtgtatgtat

SEQ ID NO: 2832 - DNA, 609 bp, Gossypium hirsutum
cttgcggacttagcctcttgaccctttttgacatttcttcttcagaaacagggtaaaatatcctttgattcttcgtttttcttgatgtacttgtgtctgatgtatattgggaccataatgtttgaggatatgttcatatgatcatctaaaagcgctctaatacatggatatactcatgtctgatactcacatcccgtgtttgagttacatagatgcctatattatcgatttctagtttttataaatagttttgggatgcattagatgtgattccaatgtttaccaacttcattagttccattactagcatctgaaagttgtcatttactagcgtagtttgttcatagagggctaatatcatctttcatcttttttcagtcgattcatgttggaacttacgggacttcgatgcgggatgttggggttgctctgcttgatatttttgttcctccctgtttcaaggggttcgcttcttcttcgtcttatagacatcccttttgagcatgctacaagatatcatgtatggttgggacatcttaccatgatgctctttacactacatggattgttctatgtaattggatgggcaatgaatggaactcttgtgaa

SEQ ID NO: 2833 - DNA, 563 bp, Gossypium hirsutum
tgtatttagacaaattttttaagcttagattttatctgaaaaatgagtttttttttgtccaaaattaacccaaattaagaaaagtaattttggaccctacttggcccacctatatttgatgttttagattaatttttatttaattttttaaaatataatacataaaatgtaataaaaacattaaaataaaagttttttaacacattaaaaattatttatattaaaaaacactaccataatattttattatattaaaaaacacaaataaatataataaatatttagtgtattaaatataatttttaaaattttatattttgggttgggttattaagttttttttttaagttttgggtaatgagtttaattgttatctgattagtgatttaatataaatatatataattaatataatattgtcttataacataatattcaggtcgagttgggtcagactcgagccaaaaaatcttgaacaatgctcgattcatatagaaacgggccttaagctttactcaagttattttttaggcctcgtattttatccaaatctttctatattt

SEQ ID NO: 2834 - DNA, 347 bp, Gossypium hirsutum
atcggacaattagtcccagaaacaccatcttgccaagaatttttcctatgttgtataccattcctacattacaataagcaatttacaaatattaagacagatattacccttttcgatattgatctcttttattcaatccttcataccatgtaaacagaagtggctcgtcaagatcgttcttcacattgacaagtacgttccaatttgtagtgacgttgaggatcggtccaggaaactgtccattgatcccaatcacctggaataatggcattacatatatataggtcataactcgtgacatgattcgaggtcctgaacaggcaagactcagaagactaacatgccga

SEQ ID NO: 2835 - DNA, 634 bp, Gossypium hirsutum
ccttagaaattaactattactacttgatagtgccaaaaattcatataattggttcctagtacctccaaacaattgataagatctttaaaagagatggattgacattatggaaatccgggattcttattcgaagattcttgggatttaatagactacatgtagctaattgattcttgttatagcttatttttttgtgtatataaggctggataataaggctgcaaaattcagaatactaagaaaatttcttcatctcatttcctcttagaaatcttcaaaattctcttagaatttctacggtcctgtattcattgatcacaacagtacttactgaatttatggaatggctctaacaacataccacactaaatttagttatacattctctatgaagctttaaggagttattaggtggtaaggaaagaagcagcacatatgaggagaaaacatgacctagcaaagggtgttgaaaccaatgaaccaggacaaagccacaaaggataggttcaagaataataatagtctaccgaccaattttctgaccatattttattatttgaatcataacatcagacaactagattatcataaaactaaaaggggtataaatacctggaatttcttcatatgatgt

SEQ ID NO: 2836 - DNA, 628 bp, Gossypium hirsutum
ctgtcttactttttatcttttgattggtgaatgaattaaattaatataaagacgggtgattaagaggaggccaaaaaacaaagatggttgattaagaatgatttgttaatgactaaaggatatggtggttgcagcaacgttctatgcatccttcttgcttgtcagtaatttgatttgttcagtttcttgagttacctctaaaattgcaacaaaatgtagtcgaatggcttgtgtcagttgcatttgtagaaactctgataaacctttattaaaacatggaactttatcagtctgtgttgctttcctgtaataccagacacaacaaactacttgaaggatcaaacatcattttgtcactttgatttattttatggcatactcagatgtatacatgaacaaagtattcatatactaatttctactagttagcttcgtatttataattattatataggattatgtttggtattcttatgatattcagatttagggaataacttaaatatttattttagtttctaggagtttttgaatttgagatgttgggattatagataatggagattttcatatgtgggttgtcagagttggatttttttttcttctttatttctcgctaaggtcatct

SEQ ID NO: 2837 - DNA, 622 bp, Gossypium hirsutum
tgtgagcttatgacttcttgtagttttgattgtcatatttgttcttttccaggaaaaggaattgcttgagattctgcagttgctattgccaattgtttatggagttttagaaacagttattttatgtcagacatatgtacgtaatcttgtggctatagctattcgctttatccgtgagccttcacctggtggagctgatttggttgataattcccggagagcgtatacagtatctgcactggttgagatgcttcgctatttgatacaggctgtgccagatacatttgttgctttagattgctttcctttaccaacttgtgtagtttcacatgcatttagtgatggtggttttttgtcgaagtcatcagatgatgcagggaaaataaaaagcaattcagcatatgcttatgttgtcaaagttaaaaggtttgattcccaataccagtccttgtcattcgatcatgttgtttccaccatccacaagtgtgctgataatcttgctaaaggtgcaagtgctggatatccttgccaaagtatggcaaaagctgtgcagactctggacaaagctcttttgcatggagatctaatagaggcttataaacatatctttgatgatctttgt

SEQ ID NO: 2838 - DNA, 616 bp, Gossypium hirsutum
atttgtatttttttaatgaattccatggtctgaggcagcaattaagtggaccttaattcgcaggatctacaagatcagcaatttcagagcgccaacacttttggtggtttacaagtcccttatgcctctgcatatagtggtagtttttattttttaattattagctggatccttttgacacactgctttataaaatcagttaaagagaaaacattttagtttgcttttctgataatgaataagttcctttttgtgtatgaaggggttgaaggagaaccagctcagaggtgtaaagctagaatggagagatatcaacgaacggctgagcgtgcggtatgatttcttctttcacaaaatttctaatgcttatatatgcatagcagaataacatgaagtttttctaattgcaggcaaaagctcttgaagaaaagagtatgcgtgatcttcttgctcaaagagagcaagcagaaagaaatgtattttccgttgtccaggcctgtgatatatctcatgattacagatctttgcattgtccactgtcttgtttaacttttgcactttgcagcgattagcagaaattctggatgctgatgtcaagaggtggtctagtgggaaa

SEQ ID NO: 2839 - DNA, 460 bp, Gossypium hirsutum
gtcatttttatttttactaatcataatgattgtggaatcttctaacgcgacattttgtattcgtggtgttttatgcagtgataagcctggcaaccacaatttcgagctcctgaagaagctggtccttcctgatggatcagttctccgcacccaattgcctggcaggcctaccgttgactgtcttttcgctgatccggctagagacgggattaggtctgtagcatcctttctcattgcttgctgcacatcataatcttttatcgtgcagttttacccacagagaatcctattttgcagcttactcaagatttggaatgtaaacaagtgttccggtgtggttggtgcttttaactgccaaggtgctggttggtgcaaggtcaccaagaaaacccgaattcatgatgcatcacctggtacacttacaggttctgtttgtgccaacgatgttgattcgatcgct

SEQ ID NO: 2840 - DNA, 632 bp, Gossypium hirsutum
tcgagtcagcatgaatgcggaaagttcgggaaagtttcatttcgatctgcttcagaagatgaacaactgttaagaacaactgaccttaaatcattagaaatatttgtaatgccactagtgctcagtgctccagttcttatagcttccttcttccgctcaactttttcaaaagcccttgattttgctggggtttatgcaaactgtttcctctttggcatccttccccctgcaatggcatatatacagcagtcaaggaagaagctcaggtatttgcctaaatataccaatgtactgcatatacccgacagaacaaagataaatatgtgcactgcattttccccatttcttgattaacatcttcaatttgacaggttctcgatcctcccgggaggagacgtggcgcttgcactactttttggcgtcgcagttgttttggggatatggcattagatgactaacaggtagttctgacagaaaaaaagattgtcttttcagactgacatgaaagatatcttctatgtagttaagatcgattcattagttgaaatgaattctaatattgaaagtctttcagatagcaatattgtattatttaaactgcaaacaatgaatataaatcatattaaactgaa

SEQ ID NO: 2841 - DNA, 628 bp, Gossypium hirsutum
  misc_feature (616)..(619): n is a, c, g, or t
ttttctgagaagtgtttgattctacatgctgtgccaattattgagttcatctttgttataagccatagattgctaaaactttttgcgatttgaatccaggaaattgaattattcttaggataaatcaaatactgtctcttgcaaagatttcaaaattttcatgcaacgtttgcattctgcacaatctaatcctttagttctgctgtcctgcagattgtgaagactgtttatgcatctcccagccgagtaaattttcatttggactcaaaaaaggcaagcttatcattttagcaatcttggtgatattgagcttttcttcaatttcatgacattctcactaatttggatctaggaagtagagacaacacctgcctatccagacatctgtttcgccatagatgattttgactccacttttgatgcagtggtaaatgctttcttttcctttataaattcactcatctgtgtgtttatgatagtgtattgcactaatgcacataatatattaattttcttcaatttaattgatttataatgaaacttccaatgaagtaaactactgctctttgtttgccttaaaataagtttagatgtggtaaatgggggttcaacttgnnnnaaaattacg

SEQ ID NO: 2842 - DNA, 644 bp, Gossypium hirsutum
tttgaaagagttaggctgtcattgttaagaaggtagggttgaattttgtgaagaaatgattcagatgtcaaatttcataatgtggtgtcattctcattaataatttccccgcggttaatgcttttattttattcaaacgtgcatagcactaatgtggagtatagaatgaaaacttttaaaagaaaaaaatatgtcaccagatcttcactatccatcattcataaataaatcattttccaccaagtattgataaaattgaggttggagttttatattgagttaattttaattttaatttaagaattatagtgggtaaaatatttacatttatctaagtattattatctaaattcgaattaaatattattatttaaataaaattttttaaaatttccaatcattttttgaatatctaaatctgttaaaatctaatttcgaatatgctaaaattcttatacataatcaaattaataaacattttgtaacaagtggattcgaatatctaaattcacactagttatctgaataagcaatgtgtaaattcagataatgaatatttaagtttctattagtatcttttttaaatggtaattttagaaatcgattttaaatattatctaaacgaattgccatcccattctagc

SEQ ID NO: 2843 - DNA, 451 bp, Gossypium hirsutum
  misc_feature (182)..(187): n is a, c, g, or t
  misc_feature (223)..(225): n is a, c, g, or t
  misc_feature (242)..(242): n is a, c, g, or t
  misc_feature (256)..(256): n is a, c, g, or t
  misc_feature (286)..(286): n is a, c, g, or t
  misc_feature (354)..(355): n is a, c, g, or t
  misc_feature (386)..(391): n is a, c, g, or t
  misc_feature (400)..(404): n is a, c, g, or t
  misc_feature (410)..(414): n is a, c, g, or t
  misc_feature (417)..(418): n is a, c, g, or t
  misc_feature (423)..(426): n is a, c, g, or t
  misc_feature (439)..(441): n is a, c, g, or t
ggcctcctgaggaggtatttttgtgatagaaaactaaatttttgtcttagtgtgtatgaagcaatttcattttgtatgttactagaaaatgtttcagtaagatctaagctacaagaccttaagtttttcttaagttgctgtgctcgttcatgccaaggaaacatgctctacattttggctannnnnngatccatgcaaaaaagacccataataagttattatnnntattcgcgcatatgaancactgtaaaatttntatgtgaataccgctaacataagcttctgntcttgtgaactttaaacacacactttttatactacttgtcgtgagctcatacgactttcactttacannccattactattgaacggaaatgacttaaatnnnnnnactctatannnnntgctannnnnganngaggnnnnacatatccaagannngagcatgatt

SEQ ID NO: 2844 - DNA, 572 bp, Gossypium hirsutum
agcagaaggcatataaaactacagaaactgaaggtcgtattacctgcacaattcttttttcctcctcaagttccgtgattttcttctgaaagtgctgctttagtgcttcagtatcagttcctccaacaagtttcatctcagactgcacaggaagtaatgcactgaattagttcacgagaagatcaatgtagttcctgccagtaatctaccagaaacatataagtctatttagaagataggaaaatgttttttagaaatgcatgttagtgcctttccaaagctttttgagcaggacaaatgcttcttaaaaaattattcaaaagacagaatatgaagatctcttttgaactctagcacgaggcctagagcatgaaaaaagaaatctacctaggagatatcaacatttatttccttgtcaaacatgaatctcaattggaataataaacatgctctttcaagactacagtccattcattggtaatttatatgtctgcaagaaaaaacaagaagcataaaggaaacctctttctgctccaagcgcttgttcaactcattcaattctctatccatgt

SEQ ID NO: 2845 - DNA, 453 bp, Gossypium hirsutum
gctgaaaacatattaaggtggattaatctcttttttctcccttacaaaatctcatacttgagaaattatggttttagttaccaaacgacttgtgtcgttgaagcttgggttgctttgctcacagccagtggcagcagctaggcctagcatgtccagcattatatcgtatatggacggtgttgcttcattgcccgatgacttgagctctgttatcaaagctcgagaattccctgcagcataaaaaaagtgactcttcgattaaggtaccgctacctatcaatcttcggaaagatagtgaatggcttggagttgcttgttgctgcatttttgtcaataatgatgcttcatgctatgacgagaaaatccgttgtggagcatttatctattgtggaaattctgaacaagccagtcttaatggatctacttttcgaggtagacatcgtcgacaggttg

SEQ ID NO: 2846 - DNA, 591 bp, Gossypium hirsutum
cccttttctgttatgctgcatactggatctagtttaataaggtttttagtcgtctttgtgtctttattatgagtattgattttgcccacttatatttgtttgtataaatgggcgttctccaattcccattatttggtgtattttgatacgttgttgcttattatatatggggtatttatatattgatgttctgtccatgaagtaattaattactgttataccattgttaacatgagtttggctaattaagaaaagaatcaaacgataaatgcagtcaaaatagtgagcagccgtacatcgagaagatgccactgttaatataatgattcctgcttcattatatcttccaagttatccatttacatacgattactttcctctttcaatatatttccaagataatattttatatgaatgtcaaattatgtattaaattaaggtgctcggtttcgtacagatttcggttatattaatttgtgtgcactgtattaattttataccgaaatattaatatttttaaaattagatcgataattaaattaatcaattaattaatttttgatctcacaggttcaaccaccgatacaatta

SEQ ID NO: 2847 - DNA, 574 bp, Gossypium hirsutum
  misc_feature (517)..(518): n is a, c, g, or t
ttgacggttgaggagggcggtcggggaaatccgcggtatatactcccttgatgttgattaatgagcttgcagaagcccaatatgtggcataacaaaggtaatgttgttcaaggatgcactgagtcgtgttccgttcaagcaggttggacatgggttaattcctaatccgatagtgtagaaaagacgcctgtcaactttaagaggcacatttgcagggtataatggagagttcaggctcctaagtttggcattgtagctcaatgcaaaggcagtgtcattgggtaatggcagcttaggaaggattgggaggatggtgttgggaatgcctttgtattgaagtatagccgttgcggttttattgtctaccgtcaatggtgcatccataaaaggcctagcagccatgaaatatctaccaggtgcttggttagcttgaacaaggacatttgtggtctgccctggtgcaattaaaattgcttgtgtggtaaatggtttggtataaactgcatctatttcgacnnactgtcatattatggcctgcgactgcaaagaaaagttcgtcgttgagtgccagcca

SEQ ID NO: 2848 - DNA, 627 bp, Gossypium hirsutum
gtgtgcttgtgtaggtgaaaaatgaaggaatgtgaggagagagaagaaaagtgaaaagaaaattaatttctgagtatgtttcctagaaaacactagtgacaagaaagaaattaagaaaggttgatcattttctatcctaatttataaaaatcaatcattttaaattgaaatgataagagaaaaaaatgagagagaaatacatcttagtacaaattatgcatttttcaatttttttttttacaactcttaccaaataatagaaggaaataataattttcttcttatttttccatctttcctatcaagcacatctatgaaaaaaaatttatattttccatcattttattttctcaccccttcaattttccatcattctaattttctttccactctatcaaacaacgcagtattctctcttttgctaagctatacagcgaaaacaagttgctgaaacaataaaatctacaacaattactatttactgctggaaaaagaaaaaagaaaatagaaaataggggaaacaaagtgaaagaaacttgtatttatcatgttgctataatctcgttctttcatataaatacaactccgaatggtaacaaataaacatttaaaattaatagaacagaa

SEQ ID NO: 2849 - DNA, 612 bp, Gossypium hirsutum
attttttttaactccaataaaagtggacatgataattgtgcttttaagttaatagggttccagttcatttttctcaccctactaggatagtgtagtcttctgagtttctaaaaagactattctcacacggcatgtgttgtgcttgcatgtcagttatgtaaacaaaaaacggcatctaaataggtcttaaactagacaaagaaaggggctagcatataccttgaacatgcgactcagctgctccacacactctgaaaccaaatgttggtggcccaaaaccttcctactcttcattatgcgtacaattgcagcatcaatagcataacgcctatctttatcaacatcttcaactactttcttcctttcatccactggagggagaggaacctagcacaaagatagattcacaaagttcaaatctttctcatcccaatagatacataatactaaaagtgaaaacaacattagaaaaaagacagcggtaaaactgtcccagaccttaattctcctcaacttgtcggtaaacttagagttgaactcaaagtagtcgctctgggagatggtttttgtgtttggctctttacttaaaatcttatacttggcacatgacag

SEQ ID NO: 2850 - DNA, 600 bp, Gossypium hirsutum
aacgaacttgccccatcatgcatgagttgaaaccatactgcacctgttacaaaaatggaacaagaaaggttgtttacttactgactatatggaaaaaaatggcatgtaacgttgttagggacattgtgttttacccatatccaggcgaagaaggccatttcgaatgaattttggaagaggatgatgtgaatgaggcggaggacgaggcgcggccttttgaaccagaaatggttatctgaaggttgaaccaccaattcacctgtcaccaccatgtgtctctcagctacctcttgagctaattgtgtgattatatgttccaacttggtgccaacagcaagtaaaagctgccaaaggttaaaaagggaaccattgtcacatatatgctaacatgcctgcctagcttattcaacatgtaagtacttcaacttacaatgaagggaatgaatgctatccaaaaatacgtgtgccaacctgcgaaaccaagttcgattttaagtcaatattaggaactcaagacgtgtggcgaaaatacaaacgaattcagcatcttaccaacaaaattcagcaagaggaaaatgactacaaatgcccaaagatacc

SEQ ID NO: 2851 - DNA, 613 bp, Gossypium hirsutum
gtgtgaattccgtgcgctggggcgcgctaactttctgggcaagggtcgagtgtagtgggggggtagggagattttcagtactaatttcagaaattgtaactgaatatattacaatttcgcaaaagagttactttgatttaattcaagtaattttttcgtaaatataataatcttatttcaaattcacgtaaatataataatcttatttcaaattagttaaataaattcagaattagtttttattttatattcaaattgagtatttttgtttatttttaaattagaaaaataaaaatttagggaggatcatccttgcaaataaaagatgcagctgactattctatgataaaagcatagacttgtttgtattcaatctctttttctgaatgataaattgggtaatgattattttaatcaattaagtatataactaaatgaattacataagtgttgatatagtgattatgtatataggataaacacaaatttaaattttgaagacaatattattaacaacagcaattaccaactttaaacataaaccttaaaaaaacaaagttggctgttggtagaagcattgaagtccaagttaacagccattgcatggagtaaa

SEQ ID NO: 2852 - DNA, 610 bp, Gossypium hirsutum
attttcgatgacctagaaatattagatgattgagacatacttttatttgtcccaccctttttagaagtggctgcacttagtttttgatctgcatgatccaacaaattcttggaaggcccttttgtccgaggcctttcaacaggttgatcccgtgacccattgataatcgtggacagggaagatcctaccttcttatgaaccaactttttctttcggtaatacgtacatgtaccagtcactaaagatatatctgaggagcctgaactgagagacttccttgacccgtccctgggcttatcacgtgaggcagaaaaaccagcaagattttttctatcttcactaaatgtctttgcctgaggcaaattaaaagtgtgaacaaaatattaaacccaatatcaaaacctgggggtgagttgttggaatagaaagtacaaaggagtgaacaatacctctttgccatcagccttgcagtgtttcttcgaactagaccatgatataagaaactgataaagactagcatcaccagcaaatgatgatttccactctcttagtacatcatcatggagcttctgccgacacattgccatggcaacatattctccaatcttag

SEQ ID NO: 2853 - DNA, 558 bp, Gossypium hirsutum
agcagtaggaagcaaatacagacaattaccacattttcagtcgtcgtagctataaacttagttactgaattcataaatcgtgcctgccatttgcagcccaaatacacacacacacatatatatatatttaaaaaaagcagcactttatagtgttggttgcaaccaaagaaattcaaacataccatcaaaaccctccaagatgcaagggttgccagaatcttcagtggccttcaaaatttctgctcgagctgccagtaagccatagtgcaaataactgtacacaagaaagccataagtatataactaaaatataaagattatacaaatgactgaatagagacctatctgataagactgcttaaggaatcacaagccattaagatttctctttatattcaatttcaaatcattaacagaatcctattttgttaaaatggagggtacctgtgtacatagaggtaatattttgatcctttgagatacatttcatttacataattgtcttgtccagctggtaaacttggagctcttgaagtagcattcttggagatggcatac

SEQ ID NO: 2854 - DNA, 616 bp, Gossypium hirsutum
cttttctggccatatctctccaatatatcagccaaatcaaataaccccacttcccttaatttcttgccaacctcctcaaacatcattacaccttcctcatttgagtagtaatgtaaaaatttattgtaatcaaatctaggcacttccattccttttttcattgttctctccacatacttggtagcctctactgtctttccagccttaatcaagcccccaacaaatattgagtcaaaattcaccaatggatcatgtcctttcctccctttcttccccaaatgaccttgcagtaacatgatatatgtatgcattataggctcacaccctctctttatcatctctctaaacacttgtgttgcttcccctgccttcctcaacctcaaaagcgcctttattagtccatggtaaatgctgatatccggaatctcaattccttccacaatcctataagcctctctaatccttccccttgctaaaagcccgtaaataatcgaagccaaggtcaaattatcagcttggatccctctttggcacatttcttcaaacatcccattggcttgctcgatcttgcctctcttacacatccacttgatcacaagcctataacttgaaagcc

SEQ ID NO: 2855 - DNA, 649 bp, Gossypium hirsutum
aaaaaatcccagaaacttgtaattcatggcgcaatccgtgccctacacgatttgtagtctgtgtatcattaaattccatttaagcactaattattaatttattgatttttcctgaaaatgatttgttgatagtataatcttatggggacatccatgatacagtgttccctaagtgtattgtttccaatttgtttactgctattgttaattatttctccctcgccaacatgcattttctaagcttttttcattttttactctccttttatgctacgtgatgtaatagttaaaacttaaaagtaggtcattttgaaaatctaatttattaatctataaaaagaaataggaagtcccttgtaattgtaggtgacagaggaaaataaaaatttattagtcttatccaccaagtggtgattaaaaaatctattagggtaaagttgtgggtcataaatcaccatcaattatcaaccttatccattttttcccatttctcaagaaaatgccatgtatatgaataaaataaataagatataccataactagtactggatggaactggaactaaaattaataaaaagtaaaaacccatacctcagttcctggcgtgtcattgtcactattctttagtttcactttctgctgcccttta

SEQ ID NO: 2856 - DNA, 652 bp, Gossypium hirsutum
tctctggaggactactgattcattttttagagctttgcaaccttttagagtattagaattggctttgacagcatcataagttttgtcagctttattatacccatcttttctagcattgccagaaatgacatccagaacacttgtcttttgttcctccaaaaccttttgagctgaactagcacttagattctcccagcctatctcttgggcaagtaatggctctactgacttctccatgtctacatcatggacacctttgtttcgtgtcgtacccttattttttaccttgtcagaggcagaagatgaattagataaaagaggaagcttcaatgttttagaaacaagctcctcacaagccaataagtcaatatctgcttccttttttggcatgagaccactaccgttcattatttccctgttaatgccactcgttctttcagccagagaattctttttctccattgactttgctttcttatgtcttgatagcattccatcacactttctagaatcagatctattctctttcaattttttttcctttacaatcaagttaagtagatgatcgggaagaggagatagtagcgcctcctccggtacagagaaggaagtcataagctactcaaaaaatccagggattaaatctgatcag

SEQ ID NO: 2857 - DNA, 667 bp, Gossypium hirsutum
aaattttttgaggtccgcaatgtacgggtttgttaactgaatattctttattttctttgttgccgttttgtgtcggcaaagattaggtgattttcttccataattctgtatagaaaaggaagaaaagagtacagaatttgtttttaagggaaaatctcatagcgtaggaattgtgatgttaactgactttgtacatacaccttcttcaggttcagtatcctgtggaatcatagaattctttcacaatgttctaaagctttgttcttagaaagaaaagaacaaaaatccagagatttgaaattcaagtacccaggatttatgttatttctcttgtgtttgtcaggtatatgataaaaagacaatttaaatattaaactggggacagatcatcttttatacttgttccgttaggaaggtgatactactaatatattaaagcattataaaagaaaaggtaatcataaaatttataaaattttttttgctaattttatttatcacattaactaatctgaattcgttcgacggaacatgatgaaattgattgatttgaaatcgtctaggaaaagaagatttatgaaggaatcaaattccattccatgtatttggatcttatccgataatgctgtcgccatcgagcacacgtaaacatatcctggcaccatta

SEQ ID NO: 2858 - DNA, 540 bp, Gossypium hirsutum
ttctttactctttcatcatttatgccccaaggttgttagatataaccaaaatatatatatcaattaacaagacttttcaatattaagaaaaaaaaatgacaatttgtttttatataagacttttcaatatttatttacttttacaaagtctaaaattcaaatttagacttatggggaattttcaaaggaaaaaacaattatatagatcaagtaaattaatttataatttaatgtatatttttctttatttttttacgtgcttaaagaggaaatcaaattaattttctcaagaaaagataatataaaaacaaataaaatttggattaaaaaaaggattaatttcactagatgtcctcaaactatcacttaaattttaaactggttcatacatttcaaaatattttaattggattcactaagtatcagtattgtatcaattcggtctttccttcgaccgagtcatcaaatttgattttaatgttagttcagatccgacatgaagcatttttaaaactcgtctattaaagtaaacaaacattg

SEQ ID NO: 2859 - DNA, 596 bp, Gossypium hirsutum
tggtcattgctgatgaagcttacgacaatctcacatttggaagcactccatatgtgccaatgcgagtgtttgggttaaccttgcctattctcaccatggggtctatatcaaagagatgggttgttcctggttggcgcctatggtggcttgtcacaagtgatcccaatggccttcttcaaaaatctggggttggctcctaatttatttttctcttgtttaagatatgtggtgctaattaaagaagctacatgcaatgcagatttaaaagtagaaatatatgattatgttgagttaattatctcattgactcttatcaggtaattgattcgatcacaggattcctcaatatctcttctgatcccgctacatttatccaggtctggtaatcaacatacttttgctaagacacatgctcaaattggaaaaatgcaattgccactttcttgccaaaagccagttgatgtactataggcaatgaagtgtattatattttttcccataaagttctgtaaagttttactttgaatcattctcctatcctatcctctggatgaactggtgtaatttggttttatgaaacaggcagcgattcctca

SEQ ID NO: 2860 - DNA, 429 bp, Gossypium hirsutum
tctttcggcttcttaacagaggatctgccaaagctcttgataaagttgtagagttagatggtattgacatcattgctgtcctttactttttatgcttccataattctgaaagtatgctatgtttttgaattttatagaaacaaggcaggaggtcttgatagtcaaaactacaattcatgacattatgaaccagatgattctggttagtatattccatctagtttctttctttgattatgatatttctcttaatatatgtctatcgacctgtgatttaacttcattaatggctcagaaatagttgtttcttagggctatgggcatgttgcctatcatttttgtttccaaaatgatacaaaagaatatcttgttgttcctgctaaaacttgtgaagtttgttatgaaatatggactgcttaaccacatcca

SEQ ID NO: 2861 - DNA, 615 bp, Gossypium hirsutum
aaactagttacacaagataatatgactatgattttcaagaaacaagccaattaacaaagaaaacataaagaaaaaagtccaataaagaatacaatgaagggttttcggtaaattttatagaatatattatctgaaatcaccaaagagataaatgcagtgaagttaataattttggaaccaaagttaaaacagataactttttaaagataaagtaaaatcactaccaaagcagttatctatatgagcatgcaaatcagtaaaatctacatctagaatgagaagtatcaagaaagttaagacgtaattcaagatgatatgaatagtgtagtaaccttcttgtccagagcacggttcaactcagacataacttgtatatcagcttccctcccttggatatgggccatggtaaggggtagaccatttgctgtttgatgtgcagcaacaacactaggaacagatgtcttagcattcaaaatattacggcttgcatccacctggacaagacccaagtatattgtgttggttactatttagtatttaacattaagggaacagaaatactaatctagaacccattatagctccagaatatttgatcaaaggagataatttggg

SEQ ID NO: 2862 - DNA, 529 bp, Gossypium hirsutum
tttagcgagggtaaaataaaattcttcaagtaccgaattagtaatcagtgaagaaagaaaaaaatagaaatcaacaaatttccctacataagtctagaatagaatacacccttaataagtattctatcgaaccaaataattatttgcgtgagcctacaagataaacttataatgattatccataacattgaactaaacattccccttcccttaagagttttgtttgttcaagtagtagttacaaaaatctttattttttttcagtttgtttggcgtagaacatctttgatcaatgcaagtgattttctccattaatttgtcattgttgattaattctatccttattaattaacttattcttatttactcaagaataaagtgaagtagtacaggctttcattcatgcataactttaaggtttatttgcaaacttctagctgctaccaaaccaattttcaaatccttattttagcaaaaagaaattacgaataggtccaaggtatgctctgttgaattattatcttatttt

SEQ ID NO: 2863 - DNA, 536 bp, Gossypium hirsutum
cagacttccaaacaagctgaaccatttctgtttagtgtttctaaagtcttcggtccatcctctggggatttgagctcatcatttatttccatagaacttggacgatttgttgtagtttcattgaaatcactagcagaaggctctgctaaaggggaagatgtacactctcctgatgaattagaaatatgctttggtactttggtgacaatcgataatgggggtgttgtgggcctctcaaaaatggtatttgcacctgctgttctcaagtcaacagcatcagctctattgtttggtcctgtacccttcttcacttcatccactatcccagacttaagccggtaaaccgatgaactcaaagaatgagaacccaggggacgagcagggactggtgtaggttttctaacaagactgttacctttacgaatgtaagtcggcatctgccttcgcataggattggcacttaaggaaggtttgtttcctgataaaggataggcagaagaattatcagttcgatgccatgtccggggctttgtgat

SEQ ID NO: 2864 - DNA, 618 bp, Gossypium hirsutum
catctcagctatgcctgcttcctgtgaatcacacacaactttttcagtctctctgcttatggttaaatacacatgtgcatctaatgtctgtttctgtgaaagaacgagggggacatgactagtcaacattcaagagaattgaacattcttaccgccgttttatcccagttcttcaacttaggatttgttagcatgtaattatcacgcaatggtgcccaagcaggttcttcctcgttcctaggatcagaagatgtattaccctgcatgccataaaactcataataaacatttcgagcaaaagttagctcagacaagataataaacatattttttatgcagttagcttagacaagataataaacatacactaagttttagtagatcaccaacaatctccaaaagtgcttgccaaaaagagaggaggataaatggaatggtatagcagaatgcaataaaacctgtaaaatagttaagaggtaaccaaccttactggaagagtcgtgtgacgtcttgcctagttctgaaaagaaggcttccttccttcgcctccttatcactagcagggtgcacaaaatacaaaatcagatggcggcaacgggaggaggatttacattagat

SEQ ID NO: 2865 - DNA, 563 bp, Gossypium hirsutum
aaagaacttaaattgaatatgatattatatcaattatccaacaaaaagaaaaagatattatatcaatgatggtacgaaacgaagcatgcatagtttatacatttacaggccaagagcagtacttaacaaaatataactcacctctccaacatggattattttgaccctccagaactccataaatatgttccatgtcgtttcatcaatgcctgtaacgtgcaagtaaatctcagaatgtattaatctataaaggataatattcaaaaaaagagcagataagagaaagagcaatattgcatgaatgaaattgaaaagtgaaccgatcaaattttcggttttcattttaatcagttcaaccaaatttgttttttaatgtttaaacatgaacttaatgtaaaataactatcatgtaattgttggactaaacataacattggttccctttcaaccagttcggtaccatttatccttgcgaaagaaattcagcatgactagctatttatagaagtgatatacctgaaatgaagttcaaatgcgacgaggcacccgctgcaactccgaga

SEQ ID NO: 2866 - DNA, 653 bp, Gossypium hirsutum
gaattcaaattggagaaacttggagggatttcaccattcaactgattcatcgacaaatcaagagattccatcaattccatgttgccaattttgtctggtatatttcctgttaggagattccctgacaaatttaatgatcgtagctcaacgagaattccaatttcttttgggatctctccagtgagactattagctgaaaggtccatgttggtaacaagtcctagtatgctactatattcatcctctcgtcctttcaacaccaataatgcactcaaataaatgagagtagtggtacctccccaatcataactatagttattgtcgtagcttctattggccatagcactcaaattactaaaacattttggaatagctcctaaaatgttgttacgagaaaggtccaaattctgaagatattgaagatcacaaattttatgaggaatctggccgtcaaaattatttgatcgaaggcttagaatcataagtgttgagagcttgtcaccaatccatgtcggaatatttccactgaaatgattttcactaagatcaagaatgcgcaaattcgttaaattttgcaatgtggatggtaattctccaaacatgctattatttcgaaggtttagccagtcaagacctgtacgtcccaaagaaag

SEQ ID NO: 2867 - DNA, 625 bp, Gossypium hirsutum
tgttcttctaatgttaatatttttattttaggttgtccttgttggtgatcattgccaacttggtcctgttataatgtgcaagaaagcagctcgtgctgggctggcgcaatctctttttgaacgtctagttttacttggtgttaaacctattagattgcaggtgatgtccttgtatgtttgctggttttgcccttcatttcgatgtgatttgtaatagaaaacgagcatttatctgatgggtaaattttctgttctattttaggttcaataccgtatgcacccatgtttgtcagagtttccttctaacagtttctatgaaggcacattgcaaaatggagtgacaatcaatgaaaggcaatcatcaggcattgatttcccttggcctgtgcctaatcgtcccatgtttttctatgtacaggtattggatctttaagtaacaatgtaacaatcaacatacaattttttttcatcccccattcatattcttctttatccatcactctgtggcgctgagggtgggtgcaaatgggaagaacatcatatattataaattttgctaatagtttatttatttcatggttatgttttgtaattaaatagttttgttttagatgggacaagagga

SEQ ID NO: 2868 - DNA, 452 bp, Gossypium hirsutum
attgatagtcttcctctttcgcctgttacttttttatgactttattgtgtgctttgaagaaggtgggtttgccttcatgtatcctcatgaaaattagaacttgcacaatggcagcttttaaatgatatttttgttagagcttagacaggtaaatattcaacgttgattaaatgtacttttgaagcaaggggtcatgcattgaaaaataatgaggggctcaattaaaattttgaataccacctttttaataagagtagggaagtattttgttggtatctgcaaattttattttggaagaggcaaagagagagtcatctatttatggtcttttgatttcctctctgttgtcttatctggtttactatattgttccatacctcttggctgcttttacgaggtttgctgggtttttgtcttatgcgggcatgataccttgctgttgcatatcagaa

SEQ ID NO: 2869 - DNA, 730 bp, Gossypium hirsutum
  misc_feature (659)..(670): n is a, c, g, or t
  misc_feature (672)..(675): n is a, c, g, or t
  misc_feature (677)..(682): n is a, c, g, or t
  misc_feature (688)..(697): n is a, c, g, or t
  misc_feature (699)..(705): n is a, c, g, or t
  misc_feature (710)..(720): n is a, c, g, or t
  misc_feature (724)..(727): n is a, c, g, or t
ttatttcacattttcttagatgggaaaattttgctgtttgtgtatcactatatcaatgtcctactactgcatttctttccatcttgctttcagtctcattctattttgtttctctatggtaaataggaagcatggaacaagttcaattcagaggagcttttctgagttcaaatcgttgattatatagctaaagaaattcgtcatttgacaaactaggcattggagttgaatgaaaacacgactgtccagcagctataattcgcttagctgctgctgttgcctgctttggtttgatgattcattaagtcagctgttaaagagtggcacatgatgctagctctcgcttcaaaggcttgtgaggtacgtatgtgaagagtgaagtacactcttcttttgttctgatgtatgtacattaaaaaatcttcatccagctaatgcgcgtggaaatttggaatcaccgggttagtgtagattaatattcatcaaattggtcagaatgatatgcacaagttgaggggatttttgtgttaattcttttttataatattgttttgtttgtgtttccgtttcccccattccccaccttttgtggcaaatacagtatgtccttttcatataaaaagaatagtacaagatatgtatgattgttgagagatggnnnnnnnnnnnncnnnnannnnnngaaaannnnnnnnnnannnnnnngaaannnnnnnnnnnaagnnnnaaa

SEQ ID NO: 2870 - DNA, 620 bp, Gossypium hirsutum
tcatcatttaatccataattaaataatctaaattgaatgttactttatgtaaaatattttattttttttccaattacagttcatataaaaaaatcatttacaaaatcataaaagctttaaaaaatattaactctgttaaataatatataatatttttgcaaacaacaaatattaactcatttgcaatttgaacttatttgattctttttagtagtgcttgagagattaatttgatatagtccctataatacttgggtctcctagatactttcacctctatctatctatcaatttatctatctatctatctatctatctatctatctatctagggcatatttaaactattttattgagttgatatcactaatcaactcgacaagaattcaataaaaaatttacctaaaattcctcttttaattaaggcttgaatgttaatatgttgatatttttttacttttactatttttatatgaaatgttttaaataaaacaactaaaaatgtaatatctaagaattgaactattttactagttcacttataactcaattattgttttttttatacatacaattttaattgaaagtgtgacaaaatttagtgtagttgactgaattcg

SEQ ID NO: 2871 - DNA, 560 bp, Gossypium hirsutum
gagatttgaggaagatcaaactattatgatgcccttctggctgctgaatcccgtgctatttctgggaagaagggaattcattctgcgaaggatcctccagtcatgcacattcaagaccttacaatggttggtgatctccttttattttgattattttcttgctgttatatttctatttcttatctgaattccaatttccatttcttgtctactactaggcatcagccaagaaagctagggatttcctgccattcctgaatcgtggcaggattccagctattgtggaatatgtcctaagtggtcatcgtttcaagttgttgatcccaaaggaaacttgtagcattgccttttcattttctggtgtcagatgtcctggtcgcgaggagccctactcagatgaagccatagctctgatgagacgaaagatcatgcagagagatgtggtggtatgggtctctctctgtgaactgcttgtctgccatttttgtatttgtttttgtttttaattagtttatgtttttctacacaggttgaagtggaaactgtcgatagaactggaa

SEQ ID NO: 2872 - DNA, 616 bp, Gossypium hirsutum
  misc_feature (584)..(586): n is a, c, g, or t
catctattttccagctggggcaccaactgttgaaaaaatatgccaaagaatgtatagtttcttgtatgatcttgactatggctctgttgtatggtcaacggtgcataacagccatatttttaacgatcaagacaaatatgagtaacccttgtacacaaaatcatgttttcaattgtcccagcagcttacctccagatgaatgagctaggtagttgggctcttgtgggattgatggactgatttgtacttcattgttaacaagggttcatgtaggttttatgaccacaaaccatttcaagttgggtctgtagcttgtttggctagacatttgtgttatggttcaagttacattagacattaaatttttttgtctatcaaatctctaatgtttgagatggattaagtcccgttatggatatgttacatgcattgctttatgggttttctgattatgcatgcttgtatgttcatttataatcagattgtattgcttgcttttctagattattatattttttttttcttttcgtattatacatctcatttcttatagccatttatatcactgttctgttatgttctgnnncgtccatcctgcttaaacctagcttacaag

SEQ ID NO: 2873 - DNA, 599 bp, Gossypium hirsutum
gaagatcctccactggcactttgtactggacttctacctcgatttgggatcttaacaatgaacttatgactattagactcagccacaggagcatccacagccttttcacacgttaaaccagactgtaatactttttctgaatcaagatttctgtgcaaagaatttttgcctgatccagtttccctttgaactccagatgaccctggtaaaccgttattggatttccggtgccgggaagaatttcccgagatcttagtcactgatccagaaccagctgcagaacttcttgcatcctccttcacagaaactccaccagtctttgcatggtcactagaacaagattgactattgttgtgggactgactcgaactgctgcttttctcatcctttgctgttgttggaggatcagaggtgccaacaacagttgcacctcgtgcctgcacatcttttaaatttgcactggcagaagcaggcgatattgctgccttcgtagatcccaccgatgcagaagcagacttggttgcagtctctccttgagtaagcttaaccgaaacagttttagaggcagaaagctgagtggctgaactcttcacagcacc

SEQ ID NO: 2874 - DNA, 661 bp, Gossypium hirsutum
  misc_feature (59)..(61): n is a, c, g, or t
tgtcgaagctttggctactaaaatctttttagcaatgatttgaccatcaaaaagtgctnnntgatagcttgaagcattgctaaacaagcacttgttttccttccaaagtgggtcaatgaagaagcattagactttagagatgttagtgggaaattatgaaggaagatttaagagcagaattcccaatgtacataaagattttgttccaattgatgggtagtctgagtcttgagtgacaagtctttttcctctggaaacagttacacaaagagctaatgaaatcaaatttggagacccttactggagaaaacgaatcactaaagaaagagaatcaatccttaaaagcggctaatgcttccatgaaccaaaccttgacggatcaagcaaaagagattgatcagttgaggagtgatcttttgcagctgaagaaagaccatgagaagcaaaatattcttttggaaacactttcagggcttctagtaagtctcttttgtctctctcttcatatacatgtagtttttccttccttttttgcttgaagaaaataatggatagactcctaattggttataatagtgagaaaggaaattggcttaaaatgcttgtatggttgctacaacttttcattcttaatcaagtactttgtgcaacacatatcggg

SEQ ID NO: 2875 - DNA, 601 bp, Gossypium hirsutum
tgaagggttcatggcgacttggttcttggccgcatctccaatgagccgctcggtgtcagtaaaggctacgtaagaaggagtggtacggttgccttgatcgttggctattatctccacccgatcgttctgccacaccccaacacaactgtacgtggtcccgagatcaatcccaatcgcctttccttcagctttggcagccattatcgataaacaaagagtaggttacaagaagaaactaaactgaaaggatttgagagtttttttaatcaactttggtttgccgaattttctggttgaagagctaatgggaatgagggtggtatttatacattaaaaaatgggaataagcaagaaattggcagagaaatgtagaaagtaaaagagatttgaagaagaaacgaaagggggcaggccaggtcatggtgatgagcaacctggagaattctggaattagaagaacccaccaagacacttgtttagttcaaatttaggaaaattacacattagttactaaattatagttaaattttattttagtcaattaactaaaaaaaaattataatttggtcattaaattattcgaaacttttcatttaggtca

SEQ ID NO: 2876 - DNA, 782 bp, Gossypium hirsutum
  misc_feature (630)..(636): n is a, c, g, or t
  misc_feature (640)..(640): n is a, c, g, or t
  misc_feature (642)..(652): n is a, c, g, or t
  misc_feature (654)..(666): n is a, c, g, or t
  misc_feature (669)..(671): n is a, c, g, or t
  misc_feature (676)..(678): n is a, c, g, or t
  misc_feature (680)..(684): n is a, c, g, or t
  misc_feature (687)..(687): n is a, c, g, or t
  misc_feature (692)..(694): n is a, c, g, or t
  misc_feature (701)..(704): n is a, c, g, or t
  misc_feature (709)..(719): n is a, c, g, or t
  misc_feature (724)..(724): n is a, c, g, or t
  misc_feature (728)..(739): n is a, c, g, or t
  misc_feature (743)..(745): n is a, c, g, or t
  misc_feature (748)..(749): n is a, c, g, or t
  misc_feature (754)..(764): n is a, c, g, or t
  misc_feature (766)..(771): n is a, c, g, or t
  misc_feature (773)..(776): n is a, c, g, or t
  misc_feature (778)..(778): n is a, c, g, or t
tggcctggtttcttccgcgagtcatgacaagtttattaaattgtggaagtcatacaattgttaaagtagtagctgatgaaaatacacattagtttttgtttgctttgtaatcagctacaatcactggtttgtggctgttgtgggtgttgttcaatgtgttgattttgttgtggtttaaccctagtagctaaccttgtctgttgtatgcattgcatgatatgttgtaaccttgtatgtttaacttggacattcttgattaacttcttttgacttttgtttctccttttatgttttatgggtttagatcttcctccctgtggctgggataggtttaatcacatcattaaacttgaagatttaaggtcatgggtggaaataagtaggtcaactttgcaatgcagaaactgttagagaaggttctctccgaagcatttttttattttcaacctgaaagtagtcaagccaacccatgagcattgtggtagggatagttggaaaaattggttagaaaagtgttttatttggcaaggcgaatttatttatttatcaaaaatggaattttattgtgatatttatagcaataaattgaggtgttgaaatctaggctttgggaaggtgtttggatttatnnnnnnncccncnnnnnnnnnnntnnnnnnnnnnnnntcnnnttttnnncnnnnnctnccttnnnccccccnnnnccctnnnnnnnnnnnttctnttcnnnnnnnnnnnnttcnnnatnnaccannnnnnnnnnncnnnnnncnnnntntttc

SEQ ID NO: 2877 - DNA, 609 bp, Gossypium hirsutum
gctgctagtttgagagacagggttataaacttagaatctagtttcaaagctgtagcattaggaaatgaaattcgtgaactttgcttggataaaggaatggatccttttcaagttctgtgtctgattgagccttggaaagccgaggatgaggctgcttcggtgctaatttctcatctttcaagtggggatgaagatgagcttgcttggccaagtcaggttctctgctcaattgtgcttcccaagttcttggttctagaagagccagcctcacgtctgctactgacttcaacgattgactacagcaagctccatcagagggctgcggtgcacgcattattgtttccacttgtactacgaaaggaaggtatcaataaccccatctgtgatgtgattactaggattctgagggaatgcctgcacccggctcatgtttctgccttctgccagacacttctttgcggaggagaggaggagaggagattcattttactcccatgtcatgaataccttgtctcgaaggaattggtatggacggattcattgtttaacctcttacacaacattttaaatcataatgttcatttaactcaggattcagttgatcgtctt

SEQ ID NO: 2878 - DNA, 617 bp, Gossypium hirsutum
caagtttcagaatagagagatgaatacagttagcagtaggaagcaaatacagacaattgccacattttcagtcgtcgtagctataaacttagttactgaattcataaatcgtgcctgccatttgcagcccaaatgcacacacacacatatatatatttaaaaaaagcagcactttatagtgttgattgcaaccaaagaaattcaaacataccatcaaaaccctccaagatgcaagggttgccagaatctttagtggccttcaaaatttttgctcgagttggcccctttctaaggaaatattaagcttttggtttcttccaaacaaatttctatgagaatatgcaaagctgcacataggacataacaaatgagacaagataaatagcataaaacattgcatcagatatatatagaagactcaaattcctctccctttagtctcaagaacaataggacagaaatcaagcaatgctaaaggctcaaagcgacataaacaggtcagtgagatgaaacataacggtcctgcagtagcagcagtctccaagactgcactatgctgctacaaccctgagaatttgaatcagacttgtaatagccagaagaaacatagtaacagt

SEQ ID NO: 2879 - DNA, 628 bp, Gossypium hirsutum
actgagaggagaaataactgattctaagtttttaactcaatagttttaaactaataatgattacattagagcaagataggatcagtaagtgcataaaaagaatcttacccgacaggtaggggaattgcaattggcccggaaaacacaccagcatctacaaccttcaagtttgacccaaaaactatattgcactcgctaagaaatgatacagtgcagaatggtctaacaaaatcatggttgtcaatgtgaggaggtatgcagtcaccttcttcatatatattaacaatacaactgtcaggcacacaggtcggaggaagcacatgccatctgactagccttctaattattaccttgaagagatcaggtataggatctacaacttcattttgaagaataccaggtgggttaccatttttgtcctgccatcagaaagaaaacacaataaagcttttcagccaccagttaccgcttcttgtgactacagtgtctccagacacttgactaatcttcacagcaatacatggatgcataaaagcttaccattgcataattgtaacagcaaccaaattggatggttatgcgccctttacccctcatccatttgtgaggtgctgtatatgtgcgttct

SEQ ID NO: 2880 - DNA, 545 bp, Gossypium hirsutum
attgacccacgttgacttctccatattctatttttattctactttagttattagtaggtatgaacaaaatttaatttgattaaaaaagaaattaattttaaaaaataaaaaatattaacttttaaattattcaaatcaactcaaataaataattaaaataaaattttgtaattctaactcaaaataatttaactaaaaaattgatgtaaacactttttcgttcttatcaatttttaaaatgaacaaattaatctctcaataaaaattataaaaaatttcaaatattcataaaattttcaaattttacatttttaaaaaattataaaaaatttaaattcaagtaacatactaaaatatctttttttttattattctactgtaaatttttttaaatatatataattttaaatttacaagataacaaaaaattaattatactgtaataatattttaatttgaaatatttaatttttaatttaattcaaaaaatttcactttattcaatgactttaaatttcatttcactttattcaacttaacactta

SEQ ID NO: 2881 - DNA, 429 bp, Gossypium hirsutum
actattacaataaccaaaatgacgtaggtttaagcacatttagacatatttttttctatttaaacattatataaaaaaataaaattctagctgatattgttttgagctgtgttcataattctttggcagagagaagatcaaaccagtgtcaaagtttaaaatgaattttctaactatgatagcaaagaaaacgatgatgaaaggtcacttaaaaaaaagtgactacatgttcgtatatatgtctatcaaatatgttatgaaaaggtgtcattctctctaaaaggccaacctcgtaatcttacacacaagcttcgtactttgtttagtgttgggcccatagccctatgcaatatgagtaacaatactactaacacacgtaaaaccatgaaaaaaatggaaagttaaaaatgaaaaagggcaaaaaaaaaa

SEQ ID NO: 2882 - DNA, 760 bp, Gossypium hirsutum
  misc_feature (625)..(656): n is a, c, g, or t
  misc_feature (660)..(673): n is a, c, g, or t
  misc_feature (676)..(680): n is a, c, g, or t
  misc_feature (683)..(683): n is a, c, g, or t
  misc_feature (687)..(689): n is a, c, g, or t
  misc_feature (691)..(699): n is a, c, g, or t
  misc_feature (701)..(703): n is a, c, g, or t
  misc_feature (706)..(706): n is a, c, g, or t
  misc_feature (708)..(709): n is a, c, g, or t
  misc_feature (711)..(711): n is a, c, g, or t
  misc_feature (714)..(716): n is a, c, g, or t
  misc_feature (723)..(729): n is a, c, g, or t
  misc_feature (731)..(742): n is a, c, g, or t
  misc_feature (746)..(755): n is a, c, g, or t
catcttcccctgtgttaccatattcatcaacggctggctttcctttcttcagctctctcattcttctcaactcttccccccactgctttttctggaggagcttcacccgataatcatactcctcaaaatatgccttcctttgctccttgtcaagcttggcaagttgtgctttccttaaagctttaaatggtgggagcttatcatactcatcctcgtcttcttcttgatcagaatcagataaatcatccacatcaatatctgagtcaccattctcaccaccctgatcagcagagagtttgggatggctacgagactgcaacagccacgatagcaagtatggaagaggaggagatcggacacgaaaaccaaaaagcttccgatggtcaaatggatcttgaggtttggagagagaacttgcttcagataggactttgatagagtagcataacaacaatagctgaggtctccaagtttgaccgttaggaagcaccttgtggccatctctattctttcggcatgatggatgattttcaacaagacaaacaggattcatcaaacttggattcatcatgcgtaaatcaccaacagcctgagcaatagactgctgaaacacatgagaacgttnnnnnnnnnnnnnnnnnnnnnnnnnnnnnnnnttcnnnnnnnnnnnnnnctnnnnntcnctcnnncnnnnnnnnntnnnctntnntnctnnnctttttnnnnnnntnnnnnnnnnnnncccnnnnnnnnnntcctc

SEQ ID NO: 2883 - DNA, 610 bp, Gossypium hirsutum
ctttactttaatgtgaagttgttgacataaaatgtgctcatttactttgtattttcttttaaagtacttgtttgctttgttactttgtttatttaatggtcatgtatagcaccttgtaggcagatcagcctatattgtagctgtttgccctcccctgctggagttcttttttatctgctccatttgcatcgaatgatatgcatatttgctataagctaagaggaaatgttttgggagtgttgaatgggtgaatctagttgacttttgttggccttgacaaaataatgagagcagaaaatctcattttctgtggagagcaatagagattgaccatggtgctaagactttccttttttttttttaacacgggggtttaaaaaggaagtgggctttttcttttttttcgggggaaaagaagacctttttggtttttttttttttttaaaaaaacaaaatttcccgggaaaaaaaaatccccttttcttttttggggtttttttttttacaaccaaaccaaccctaaaaaggcccccaaccccctttttttagaaaaaaaagaaaaccggccttctgaaacaattttttgtttaaacaaaattttggaaggggg

SEQ ID NO: 2884 - DNA, 612 bp, Gossypium hirsutum
ataattctagcccatttataggtatagccctatccaaaaaataggtctaaatttttgtccaagttcgacccggataaaaatattaaaacttgggttcgacctgattcgtttgtattaattttttatataaaacaattttaaaaatataattcattagaaacactagaaatattacttaaataacattaacataggtacaatttaataagcaaatgtgtctaaaaataaaacaagagttgtataatatctaaataaaatcaacaaaatagtagcaatataatagtaaaatgacagcaaaacagtgggaaaatagtaaaaaaataactaaactgtggaaaaacaggagcaaaatagtaggttttttttgtgtaaaatatctttcgccaaactctacaatcttgaaaccaagtaaagcaatatccacgttccatttacaccccagttttctgatcttccttttgtttttatttttcattcacaccacagttattattgaagttatgttttctttctgctaagcaaaagcatctaaaaacatatccatcagtaaaatatttatcagtttatagttcatcaaatacttgctaaaaacataaacaacagtttcgacaa

SEQ ID NO: 2885 - DNA, 619 bp, Gossypium hirsutum
acttgctctgtccaaattgaatacaaagtgactcctgcaagtaggttaacaagaaattcaaattaataacctatgggcaacagataataaaaacaaattactcagaagtaaattcaatatacatccaaacctctcctcgataaacatagcaaagaatacccagtatcaaattaagggtaccatcctcctcctgcaaaatggacacactgcaataaataagaaattcggtgtaaccttacaagctactttcatatatgcattaaagtagtcacctgaagactaatttcataagatgcaataaatgcagaaataaaagttctcaagacacttcgataacctgcaacaggtccctgaaaaaacaaggggggaaatccttattcaattaaaaaagcttcccagaaggggaccaaaaattccaacagttgctatgaattccactgggaaaaaacaaaaaaggatgggctaaagtggaatatgagacttccagtagatctatactatgagaagataaattgttacttacatctgattccttcaagatgccactttgaaggatttcaaggaaataactcaaagatgaagcttcaaaagcttggcgaacatacccaacatgatcaat

SEQ ID NO: 2886 - DNA, 520 bp, Gossypium hirsutum
tttaaattattttgatttcttattgcaacataatgatgcttcactgtgttcttgaacatttttatgaagccctatcaaatgcatttaacaggcaaaaaacaatcatcaccatttatggaagagaaaaaaccagttagggacaccacatttgcagtatacaacacaattcaaccttttaatttttagatagattgtaacaaaatttgcaggtgaagtaacgcagatgccagtctactcccagaagcctaaatttatggctaaagcatacatataggccggtggagtgcatttcaatgaactgtcaaaatctgcaatatcacatatcttttgtcatctctcgaataggccctttacataaaccatgcctttttcactgagcttgagttcttttctcatttgatctacttgctggtcatccccttgaacaacaatctcattcacagtcccatcatcagtaaccagtattttaactttgatctgctcctttctcgatgcccgcttccagtaataagctcctctg

SEQ ID NO: 2887 - DNA, 651 bp, Gossypium hirsutum
ttttcctgattaattttacatgatggaaaaatcactgttccagaatttggctagagagctttcaatctccccaaatattcaatccattccatcaactgcttcaatgagtggtacaagtgcaaatgttccacttctggcccgtgtgtatcttaaacttggagcttggcaatggacactctcatcacctggattggatgatgattctatacaaggtagctaataataagaacttgatatcttattcatttgcagctttttccctcttttaaataaaatattttgttattgtataaaaagaagatgtctattatggactcttaaatgctgaagttgttattgatttctttttcttgttaaatggtcctttttttttcagagatcctttcagcgtttaggaatgccactcagtttgcgacgaaatgggcaaaagcatggcatgcatgggcattgttcaatacagctgtcatgtctcattatgccagaggctttcaaaccatcgcctctcagtttgttgtttcagctgtcaatggatatttccattcgatagcatgtgcagcaaatgcaaaaggtgttgatgacagcctacaggtatattaactaaatatacaatatcatttttaagcttggtaatagcacaaaacctttaatgac

SEQ ID NO: 2888 - DNA, 571 bp, Gossypium hirsutum
gacagtttgacatggaatgcaaggattgagcttatttttcaaactcttggtcaaacatagcaacaaagtcaaatccaaggctaattacaggtaaggattgggttgtgacagccatgagcaagcataacctagatcctttttttcacaagaatacatcatccttgtctgacaagaaaactaaccggaagaaatgagaagaggaggaaagggtgtacggaagtaaagatctgagcgaataactggaaaagggaatcatcactgtctcagacatgcgagaacctaagagctaccaactatgatttgtattaagctttataggaaatagatcattttaatttgaaccacggaatatacggtactattatttcaggtattaataagtgcctctttgcaattaacaaagactgattgcagtcactgcacggatattattgcatcctatgttgctttgactcttcatttgttgaaaagtaatcatgtcagaacacatatcatacgcctcaaagagggcagggactgagctctagaatataactcaaatcttacaaaaacttacagcgactgtcttcca

SEQ ID NO: 2889 - DNA, 564 bp, Gossypium hirsutum
acttttatatattttacttgcacttcaatgacttaagacttcaggagaaaggcaaaaggaaattatacctctcaaccatccggaggccaaggatctgaatttcaggacgaaactggagtgcatgaaaagcaaccctgcatctaagcctctgaaactcggacatactaggtggaagaattgactgaaagacacatggttactactttaatatttaatcttatagtttgactttgagttaaaagtatgctatcacaagaaacactaaactattttcaatcaggctcagtttaattcactgcaaatgatttctagaaatttttctaaaaaaatcctaaaagatagattcatgaaaaaaaattgttctctgttgtttggaaggtcttagagaaaatcaatttctggcgtttactgttcatttaaaatgaaaacacccaacatcttcctctttcttccctttcgcagttacctctctctaacccaaaacaccaccggattctagctccagtcaaacaagtttgtcaaaatccaacactaagtcaaacaataaatagaaacagatgcata

SEQ ID NO: 2890 - DNA, 564 bp, Gossypium hirsutum
tgggccaactcacctatgtgaagtcttagggtagaagaaatcagattccgacaaatttcataggcattattcgatgcgagtaagatttaaatgtaggagccaccctaatccatccatctttgcttgattctcaagacatatcctccagaccgaaacacaagcggatgggtcagaatggctgagctgactgatttcagaagggccacctattatgaagaaaagaagatccttctgatgcactgatgatggatggatgacaacgttggtcttctcatctgtaggacgatgctaaggtggatgcaaagaaagatgtcatcttcttctcaggtgcatgatgaacaaaaagaatggttggctgtgcaactactacttcatggtgaaagaggaactttcttcgaggttattatgaagcagcggaggaaggatgatgttgtctgctgtactagctgtattgctggcattcttccattattggatgccaccacattagttgatgatgctcctatagttgtaaaactgctgctagaatattccccatggctgctatcatctcggggtgcagca

SEQ ID NO: 2891 - DNA, 436 bp, Gossypium hirsutum
ctgcaaataagaaaagcatgacagaaggcaactgatgaatagtccaacttgtttgcagtatatgaacgtggaaaaatgaaataaagtatttcacagaagcctaaacgacatccgtagaatatctttaactaagaactggatggaatcagtgagagaacatacataataaccatcaacctaattccgagccagtagagtggcccataattacataacatcaaatatgatcccctagatggacctgttcagggacctaataaccttctcaggtcagcaagccagaccagcttcaggctgggtttcaataagatttccgtaagtccaaggtggagttatgatcttactaaatgaatacggagctttaaactcgattcctaaatttattttaaagtgttaaaatatcaatatatattttggggaaggaaatgtgggaggc

SEQ ID NO: 2892 - DNA, 626 bp, Gossypium hirsutum
tatctgtgtccgtacattgaatggctatggcttatacaatgtcggcaatgaggtacaaacaatgcctttaggtcatcttcaaaaatcgatcaaccttggaagaaaaacacaacatctcactggtataaaaaagctaaagaaattaaaaataaaggtgaattcaatttgctgataatcaagaagtttttctactgctagactgttaagggccaaacttgatcatcaagaagctaagtttcttcctacttatgattctacagatctgaatccagtggttttgcatcaattctacttctggttttcttccctagcctagtcttaaaagttgtatagcctaataatatcattattacttagaaatatgcaaaaatatgaagaagcaccatgttgtccttacgcttgtctgatgggaaacaaagaaataattgaattatgtcgaatacatgggaccgtataagatagggtatggttttggttctaaaatgacaggagataagaatttcttgatttatctacaccatcatattcccaactttttgcatcacttatcttgtcacctatctctatccatgtttgcagaatctgagtgtaaaataggaaaaccacgatgtagttccactggatgt

SEQ ID NO: 2893 - DNA, 609 bp, Gossypium hirsutum
tatttctgcatcaatgacagtatcatctgaagcactgtgtaaatatggatctaccagctttaaagcaaaccttcttggaggttttctgaacccaccacggacgacaaaagtccccaaatcattagcaacaacccaaatgctaaatggttctgtacaaaacttcacatctgatgtgtcccaaacactttcttccaaaaactgatctccacttaccatatcactccgcatgcatcttaatctgcaaaaatcttgttgctttggtgggcccttacatgcaatacaacccacagaaacataacctggaggagcttgaggcaaccaaaaagaaatattctccattcctctctgtttcttaatctgtccaacacgctggaatcctacaggagctttgaaaagctcatcatctccagtatcatgaagaacagtgcatgtatttggaggctcatacctgacactcagaaaattaacaatatcaacttttattgaattaaatcaagatatatcaaaaagaaatccattcttaagtgtcacgtacccttgaacagcaatatcaccaaaatacaccattcctagggggaccactggacgccatatggatagttgcttcct

SEQ ID NO: 2894 - DNA, 480 bp, Gossypium hirsutum
catccagtatggatagaggggttgaagagtatgatccgtataggattccgtctgctgtattttctgtaagtaaatcatcagcacctatggattggagtcttgcttctaatgactcattgtttagcattaaagtagggagcactagtttcgccagagatctaattcaaaacaaggaaactgcccgtggtgtggaaaagccaggtgaagttaaggcattaattccattccctgctgttgctccaacgtacacagagaattttgaatttgacataaggaaggaaactgtggtttcagatgatgctgttaaggataaaacagcccttactgctgaagaaccaattgttgacaagtcaatgtcaattgcgccctggaatcagcccaatatttctgaaagtggaatcggtcaatgctcctttgactttccagtgtaagttgatagcgttcttttatctgcaaaattatcctatatacttgtggatt

SEQ ID NO: 2895 - DNA, 637 bp, Gossypium hirsutum
tatttggaaccagaaaacattcatcatcttctagactcctgttattccctgatgtaaagctccttgcttgttctggtgcctgaaatttgaacaaattcagagtaatgataatagcaaatcaaggctgacaataagatttgactcaaattaacaaaaccaaattaaatacatatggttgctgaaggttgagacatccttgtggggatggcttatcatgctcctcaatacaaggattgtttataaaatcagttaaatcctttattttcataaaatgttgattacagttaaatccttaacgttgttaaggaccagccttaaattgatgatgtggaaggttaggcgatgacatcccatgccatctagaaaattttggcccacaatacacttcaaatggcaatctaacgagccttagtgtgtgtgtttttcccatctcaacacactaaaaaagtagttaattgtaattaaagggtattcaagtagaagaaaaaaatcataactattagcatgcaatgtttttaaagaaattaaaaaaatttaaataaaacccaacaaacagaaaattgagagaaatcaagcaggggaaggttatgccacataagtcttccttttgttgacgagattgacttcaatatgaggg

SEQ ID NO: 2896 - DNA, 619 bp, Gossypium hirsutum
gatcctcagtaccccaaactgcaagtgcaaaattcatgggactatgaaagttcaatcatggcaagacatgctttggctgttggtcttaggtccagccctccagatagacaaagctatagttctgaagagagcttcctccagcttcctgacttcaaactgaatataccgcgtcatagttcttccccatggttgtcacctaaaattcctaattttgttgcaattaatcatcgcttggaggagaatgatgaccatgtcgatgaaaactcggaggcagtttgcaaggaagtccgttgcattgactcgggaagatcaagtacgaatacatattcaaactcaaatttatcggtgtctagcccaaagatttatcaaaattataatatgtcatctccaagggaaagctcagctatttcaggattgattgatgtaggcaatgaagctacattaaagagagaatccagttcactgcactggaaaaacagtagcaaccatctggatgttgctattccatctcctgaaaaaccatgcttatggcgtcagcaagaagaaatatctagccatagaagcttgcaattaactaggagtagaagttgtaaagcacgtctcatgactgatttgacct

SEQ ID NO: 2897 - DNA, 633 bp, Gossypium hirsutum
gtgaatgcaatttgagcagaatgatgcagctgttcgtgttattgaagcagtgagccaagaaagtagtggtagtggggccactttaggggaaagccttcgaagcctagatgttgaaattggaagtgcagatggccatgatgatggtggagaaaggcaaggttcttcagacagaatatctgatccacaggctgcacgtgcaagaagaacaaatgtggctttagggaattcaacagctgttggtgggagagatgtacctcttcatagtgttactgaggtttcagagaattctagtcgagaagcagagcaagatagtaccactgctgagcagcagatgaatagtgatggtggttctggatcaattgatcctgcatttttagatgctctcccagaggagttgcgtactgaagttctttccgctcagcagggtccagcggctcagtcttcaaatgctgaagaacagaattctggggatatcgacccagaatttcttgctgctcttccgccagacatccgagctgaagtccttgcacaacagcaagctcaaaggcttcatcaatctcaagaacttgaaggtcaaccagttgaaatggacacggtttcgataattgccacgtttccttctgattttacgag

SEQ ID NO: 2898 - DNA, 870 bp, Gossypium hirsutum
  misc_feature (618)..(619): n is a, c, g, or t
  misc_feature (622)..(630): n is a, c, g, or t
  misc_feature (633)..(639): n is a, c, g, or t
  misc_feature (641)..(641): n is a, c, g, or t
  misc_feature (702)..(704): n is a, c, g, or t
  misc_feature (707)..(708): n is a, c, g, or t
  misc_feature (722)..(724): n is a, c, g, or t
  misc_feature (726)..(727): n is a, c, g, or t
  misc_feature (742)..(742): n is a, c, g, or t
  misc_feature (745)..(745): n is a, c, g, or t
  misc_feature (752)..(753): n is a, c, g, or t
  misc_feature (777)..(777): n is a, c, g, or t
  misc_feature (779)..(779): n is a, c, g, or t
  misc_feature (802)..(805): n is a, c, g, or t
  misc_feature (812)..(814): n is a, c, g, or t
  misc_feature (837)..(840): n is a, c, g, or t
tggtagctcaatctcaacaccgggacgatatcagcatcttcctcatcatgtaaactccataggtttccatttagtatattctcccattcatctctttcttcaaaattcagaaggccaccaataaccatagtttccaatggtgagccttacatttcttaataacgttttagtgaacccgtccaaattttgactagtgtcaaaatctgtgtttggaagtgcataatctacaaacaaagaccaaaaatcatcatctattagaggattcagcttcaaatatttaggggctcccattatcacaccaacatttcagtctcgtgtaatcacaatggccttatttcctggtgctccaaacataaatgcaaacttcaggcctttccaatgatcaacaatatttattgctttgggcatttccaagaacaagaaaaaatcttttttgagagaactcttttcttaaagtaagttgagcattgagctgatattccttgaaataccactttcgcatgttcaatagagtttcattagctacatcaaggtcatcatatgattgatcaacccagacttttggatcaaaacctttgcatgccccatcattgtaaataaggtgagtaaatgttgtcnntgnnnnnnnnnaannnnnnntnactcaccttatttaacatgatggggcatgcaaaggttttgatccaaagtctgggttgatcnnnctnngatgacttgatgtnnntnngaaactctattgaantgngaagtgnnatttcagggaatatcactcatgcncncttactttaagaaaagagttctnnnnaaaagannntttcttgttcttggaaatgccannnnataaatattgttgatcattggaaaaggctg

SEQ ID NO: 2899 - DNA, 642 bp, Gossypium hirsutum
atatcttccggctcttcattttcgttggaagattgcagaaacccagtcgccatccacaacaaggtcaactgcaagctattgaattcgaagtcttttggaaaaactgaacagaaagcaaaacattgctttaaatgccaaggcaaatgatcataacttagtttcagagcaggcaaaatatcattttccttctgttctagcttccatatctcactatcccttacaagctcccaatcatattccaccctagttgaacaaagcaaactacctaatgtcttcacagccaaagcaacccctttgcattttctgacaattccttccccaattcttacaagattcttgtgttgcacctcttcaccctctttgaaagcaagcctaagaaacaaagacaatgaattctcataagagagatgctctaaatcgtactgtggaactgtgcttgtgatagcagccactttgtggctacgagtggtgcagattattttgcacccttggcctccgatagttaacaaatcctttagctcgatccattttctcttgtcctcgttccatacatcatccaacacgatcaaaaaccttttagccttcaaaccgtctcgtaaaaccttatgcaattcctccttgttcatgtccttgcacatcgta

SEQ ID NO: 2900 - DNA, 909 bp, Gossypium hirsutum
  misc_feature (246)..(246): n is a, c, g, or t
  misc_feature (264)..(264): n is a, c, g, or t
  misc_feature (267)..(267): n is a, c, g, or t
  misc_feature (311)..(311): n is a, c, g, or t
  misc_feature (320)..(320): n is a, c, g, or t
  misc_feature (431)..(431): n is a, c, g, or t
  misc_feature (572)..(572): n is a, c, g, or t
  misc_feature (635)..(635): n is a, c, g, or t
  misc_feature (659)..(659): n is a, c, g, or t
  misc_feature (675)..(675): n is a, c, g, or t
  misc_feature (714)..(714): n is a, c, g, or t
  misc_feature (716)..(718): n is a, c, g, or t
  misc_feature (721)..(721): n is a, c, g, or t
  misc_feature (795)..(795): n is a, c, g, or t
  misc_feature (797)..(797): n is a, c, g, or t
ttggcaacgtggaagcaccttgccctgacgcatctaaccacaaatgtcgaacatttccggtcgaacaatgattgaatgaattcacctcattttgtaccaccgataatgcaagatcatgtactagatcatgcatcttgaaggtggaataaaagaccccttcttcaacttgttggaagaacgatcttgaccataactcatgtatgtaccggttcccaatatcttccggctcttcattttcgttggaanattgcagaaacccagtcnccntccacaacaaggtcaactgcaagctattgaattcgaagtctttnggaaaaacngaacagaaagcaaaacattgctttaaatgccaaggcaaatgatcataacttagtttcagagcaggcaaaatatcattttccttctgttctagcttccatatctcactatcncttacaagctcccaatcatattccaccctagttgaacaaagcaaactacctaatgtcttcacagccaaagcaacccctttgcattttctgacaattccttccccaattcttacaagattcttgtgttgcacctcttcaccntctttgaaagcaagcctaagaaacaaagacaatgaattctcataagagagatgctctaaatcntactgtggaactgtgcttgtgatngcagccactttgtggntacgagtggtgcagattattttgcacccttggcctccgntnnntancaaatcctttagctcgatccattttctcttgtcctcgttccatacatcatccaacacgatcaaaaaccttttancnttcaaaccgtctcgtaaaaccttatgcaattcctccttgttcatgtccttgcacatcgtagtaccagttgcgaatttaatgatctttatcatcagttgctttgacatcaaat

SEQ ID NO: 2901 - DNA, 646 bp, Gossypium hirsutum
tttgcttctatccggtggccaggtatcatcatctatctccattttttttattaatctcttttataatccagattcagagatttattacatacaatagttaatgatatgagttttcattttgcttcttcttgatctaatatattttatgcctcacctagaaagatttaatgatgctgttatcaccggttcttggccgaggagtcatgtctttccataattttggaatgatgttacttttgaatggttccctcattacgtattagacattctttttttctgataaccaatatgcacatttattaatgtaaaaagctgggcccatgaactcttaaagtggataattgctgtttactaaaggttggtatgatgttgctttattggatgtctagtaatgataattagtgataaagttaggttaacttagaaagtggatgcttcaatattttcctgcaaataataattgtttagttaaaaagatgctttactaaattctatactctttcattgctgaaaaagggatctaaatctgctttataaattacccaaattatccaaataaataaataagataccctgtcaagtaaccctgtattatttcctttttttttatcttgtgttttatctccttgtgattgaaatgtgctgt

SEQ ID NO: 2902 - DNA, 580 bp, Gossypium hirsutum
gcctccttcaccgctcccaattcgccgaatgcattggtacgtattttcatgacccaaatatcacataaggaccatcaattctaaagctttacaaaactttcttcgtctttcaaacacagggatgaaccagtctaaagaatttgccggtgcgctgtttcaagcactagctcggaggcacaatgtaactggtgactccatcaataaaatacaactcaaacagttctgggaccagatttctgacgaaagctttgattctagactccaaacgttctttgacatgtaaagctaattttctccattttttcaaaaacgaattgaatttttaccacatgaatttgttcttaaatgtaatttgtaattatgcagggtggacaaagatgctgacggaaggatcaccgaagcggaagtcaaggaggtaggtgtctacgtacttggtcatgccgacctcattcaactaactagaaatgacaatttttgttcacattaagttactttttgaatattttgtcattttaaaaagacaaattctaactgtatgcacttcatattgtagattatcagtctcagtgcttctgcaaac

SEQ ID NO: 2903 - DNA, 614 bp, Gossypium hirsutum
gttgtggttgcgatatgtgcaagccgcgactattgatttaattaaggtcgtggtctcccatgttaaaacccatcgcattttggttgatctattgctgaatgctcgatggaaacgtacatgtttttcttttaaggacaagaaaaaatcatggttcattaaaccgaatatctttagaacgtatataccattgaacaatggtccatccatattcatttcgtatagatgcccgtatacacaatataatttccgatgcatccccaagacatttgggtctaattcatcgtattcaaaccatgtattattcaatattattgactcattttagttacacatgtatatacaataagcgatattgcttatcattggtaatcatcacttgataagtaaagcaaatatatttaggtatttaacgaattcaaattatgagagcacaaattaaattagctatttgttaacagttttgttttccgacatcctagtttcgtttttagttacgtatgaaaaatttagatacgagaaaatctattagatatataatttagacacaggaatgtaataattaagcatgaattcactttatttattttagtccctaatagctccgaatccaagat

SEQ ID NO: 2904 - DNA, 621 bp, Gossypium hirsutum
gaaaaaaaagataattgcaaatagcaaaataaccctagattaaaattctaaagataacttgtattcctagccatccatccatatgtctagtaattaatcaataagactactataataaaattgcatgatagaagtagctcctaggcacaagcatcaaaatcaaaagttaaattgaaaaaagaaggaaatgaaatagtagaaagttctcttgatatactgggtatgcatattttgttttaaatcttggtcatatacattacaaacatgatgacgttaatgattttttttcccttttgcatgttattatctgtatgtatttcctttagagattcttttcttactctattggtgatttttctcctcatttctcatgattgttaagttctagttatggactagtttcttcaactgttttgtatttaacattcattgatgacagttttaccgggttcaagttggcattcaatcaccagaaggcgtcactaccacccgggaaatattacgaagatttagtgatttcttgaagctactatctgaagtacgtttttgtacctaattttatcatctgagaaagtttactatcttctttgtatctcatgctctttcggccataatgttctc

SEQ ID NO: 2905 - DNA, 563 bp, Gossypium hirsutum
gcattgatcttaccttgcttacacgatcacatctttctcgatccttcgataccacagcacctcccaaaccataactaagtaaatattagaaaggaattagttgaattctgtgatcaaaacagtaagtggcttttctagtctggggagtggaggtcagaattggttaaaaggatagaggaaggacaaaataaattactaaatcacactccattctcattatcgatatggaaggatcaactcattggattgtatatgttaacttactgggtatcatttgccaattcaatggcttcttctttggtggtaaatgttttgacacaaagaacaggtccaaaaacttcttctctccatatttgcatggaggttgttacgtcagtgatgatggttggttcaacaaagaatcctttctttaaatgctggcaagcatttatgaataagaaatggtgaaagattttaaaaggagaataatgtctataattaaaaagcagacaattataccttaggacaattcccaccatacaaaatatttgctccctcacccttagcagctccctcacccttag

SEQ ID NO: 2906 - DNA, 633 bp, Gossypium hirsutum
gctttaaaagaaattaaataaaaatagctcaatgattgtagaaattttcgaaaatgacaaaaacatgtccgtgagatttacatatgccatcaagggttcatactaaaaattcacattagaagctcaatactttgtggccaaaagaaaaagtatctcatacttttagtgaaaggttagttttaagaaagatacactgcgtctcattagaaactcaatatcaagaatttaaataagtaatagaagtcatgccaaataaaattcccaaagaactagtacctcgaagacgataggccacacttaaattctgcataaatggataaaccaaaaggcgttctgtcggtgttgtgcaaaagccaatcaaccgtaagagattcctgtgaacagctacacctatcatctcaacttcacgttgaaaagctgcatctcctcccggactttcaaaatcagttaatctcttaaccgcaacttttgtgttatctgaaagcacacctttataaacctttccgaaacctccctgtccaaggatattcttttcactgaagttggcagtagccaactgcaattccctccaagcaaaccttttcaattgaccaaaagcaattcttcggtcaacttcacctgaccatgcaggtt

SEQ ID NO: 2907 - DNA, 614 bp, Gossypium hirsutum
gagcactggcagaactagttgccgcacatggtgctgtagtaccacttgttggccttttatatggtaacaactacatgcttcatgaagctatctcaagaactcttgtaaagttagggaaagacaggcctgcttgtaagatggaaatggtcaaacttggagtaattgacagcatacttgatatctttcatgaagcaccagatttcctgtgtgctgcttttgcagaattgctacgaatactgacaaataatgctaccatcactaaaggaccatctgctgcgaagctagttgaacccctttttcagttgctgtctgtacccgaatttggacctgatggacagcatagcgctttacaagtccttgtaaatgttctggagcatccacagtgtcgtgctggttatacactgacctctcaccaagctatagagccacttatcccacttcttgattctccagctccagcagttcagcagttggcagcggagcttctatcacatctgctcttggaagaacatcttcagaaggatgcagtgacacagcaagtaatcggtccccttataagaattcttggttctggtatacataccttgcaacagagagctgtgaaggcacttgtt

SEQ ID NO: 2908 - DNA, 411 bp, Gossypium hirsutum
  misc_feature (391)..(394): n is a, c, g, or t
  misc_feature (396)..(401): n is a, c, g, or t
  misc_feature (403)..(405): n is a, c, g, or t
ggtatattctctcaaatctcaggtggtaactgcgcatcacaataagcagacctgcaaaccaaggtcaacattgaatcataaacattagccaggggcaagaagggataaaatgctagtaaagttaagcgcatggccttcaacctctccgcgtgtgcaagaaagaaaaagaatctagatttctaacagaaactacttagaaaattatggcaaaaatattcaattccttgatatctacagtctaatttaaaatatactaggacataaagctagaggatgggcaaccaaaccataaatgcttccaacatatttaacaacccatatattgtgacgcaagcagaggcaaaaaactgaaaataaaaatgaaaaaaaaaagatctattttcgggagacnnnncnnnnnncnnntcacta

SEQ ID NO: 2909 - DNA, 657 bp, Gossypium hirsutum
attccgtgaaatgcatacgaagtcgtttcaaataattaaaccaaatacagttcgttgttttctagcagaaaagaaacacactcaaatatctagcgattatcctggaattatcggaaactacacaactcgagttcatcctaatgaaattgatcattcaaagactggtgtaaggtgtaattcttgaaatcacaacgtcgtcgtaccatccctcattatcataacctcccaaatttgagcaaatcctacagataagtgtcgttccatgattaaatgtcatcaatcgctttatactgaaatttcttatgatacccatgaccatgaatagtaaaaggtcgactggataaaataagtatcaatcacctgcaaatcgtacaattcagcgcttgccacgatgcccgccacctgaccttgcaccaggatagcgagcaaattgcaaccttagttttaccaagtcatggtcatgctcatcgaatatataacctgcaaaatcgaacttaactatttatatcgcacaacttaccgcgctttgaaagtgtaagagggcttcatgacccacatgcgataggacgtgaaccgttcaatgaaaaaattccatcgataaaggtttactttctcagaatcctaacgatgacacagtgttccagcacatccctgtat

SEQ ID NO: 2910 - DNA, 614 bp, Gossypium hirsutum
ggactataaatattcaaaggtgataatattaaacatttaactaattttagtaaatttttatgtttgctggacaagctagtaagccacttttattctatgttaatcagactccagtttataagtatttattcccctttttccctttttaattttttcagaaaaagctcgaggaaaccattgaatgccagatagaataccctagctttgaggtatgaaatggtttatgcttgttgcaagcaatgatttgtgttgataactacacctaaaggcattttcttataatcaaccttagtacatattgtgccatgctgcaccatatgctatgattttatcatgtaatgatgtgccatctgaaccgtgtacattcttttccactgcaggaagccatttcggtaccttggagagcacttccgaggagagtgtcaaagctttactttgctatgagaggtatgctaaatccgttcttgctttttactcgagtaaatggcagagttgaaatcaagcaactaaaatttgaatttgttgattttaggcataacatagtatcctttttttgcattcatgctggcatgcctcttgatgaaccattttactgtaccgatgttaaacttggg

SEQ ID NO: 2911 - DNA, 624 bp, Gossypium hirsutum
gctgagaagtctccattatcatcctgtcacaatgtagcagttcatattattagtaaattactccaaagtagcaacattaaagactagaagccatttataaatgtaaaatattaaaccatagaaacagtcaagatcgataaggcctccattttgatagaatcaaactcaccattggcaatttttctaatttagaagacataaaaggtgcagccacaaataatgggcaaggtcaagttcgtggtagtaccaaatatattatagttgtaaaacaaaataatatgatgcacttcacaagcactttaatcctcttaatttatcatctagccaacatggaccaacagcttttgagatctgatccaagtttgaggcatttttcgtactcttttattttggggctttacttgttccaagtgcagtaaggctttgaactacaatatgaagaatgagaatcattaaatacctgccaatttttgcacatcgcaatgatcctgtcaaaatctgtatttatggcgcggagaaagtgatcagaaggactttgcattattgggcaagggaatccagcatttgagaagtgcttcattgagaaaagggagataaattagaataaacagacgcccacagcag

SEQ ID NO: 2912 - DNA, 589 bp, Gossypium hirsutum
  misc_feature (448)..(448): n is a, c, g, or t
  misc_feature (450)..(450): n is a, c, g, or t
  misc_feature (522)..(522): n is a, c, g, or t
  misc_feature (555)..(556): n is a, c, g, or t
tgaaatgaagcctatgaacggtacattcagcaagactgtgctcttgcctcatggttgcttttactgtaagtcccatctcttatctcagttggtaggatcagatacttcaaaagatatctggagcacactgttacgcttgttttctactatgtctacaaccaaaatatgtgatactcttgctgctagtggtaactctctttctgaaattgaatatgtggccactatccttaatggtttacctgttgagtatgatccatttattgccgttatagctgctagtagagagcctgtttcacttgaaggagcttgttctattcttgttgatgcagagacaaggaacttaattctacaaggtagcctataagtgttcatgtgacacagtattctgactatcgagctcaacctgtgaacggttttaaacctaactgttttttgtctgctggaatgnanctgtgtggcagatttggtggtggatcacacccacaataccaactttgtggcaaggtgggacattttgttgantgatgcttccatcggtttgatcattcctttccnnggtgtctcctcgagcagttatagaccaccacga

SEQ ID NO: 2913 - DNA, 629 bp, Gossypium hirsutum
tctttaaaggccaaaaacttgtttttttatcatgcattgaagttcctagatttgtggacactcatccacatgcatcatttgttaaggtcctcatgatttaaaactgtacccacctcatggatgctcttcagcaatgcttactttctttaaagccaattacatatagtattttgcagcaagccatacagttaaagaatggagaatcctgtcctgtcccaccgtgacgaaggaacatgtgcggtcctttgccgttcacaggctcactcgctcgttggatggcactatctgaaaagagcagcaacgctatgcatgaagtgagacaatgcctatctgtgtgctcacatgtgggaagaatcatacaagttggtggggcgcaatacaaagatctacagccaccgaaagccatcacgttcgcgatcccattcgcaatctttctgcaaataggattcaaaggagacgattgtgagaatctggtcttaattgactagcaagcctcagaatattttctactttcgttaaatcttgattggaattagaaagtattggaagtccatgaaatctacaaacaaaaggtaaaatacttggttagtaggctaaacacgtagattgctaaatcaggttgacgtaag

SEQ ID NO: 2914 - DNA, 637 bp, Gossypium hirsutum
actttcaataattgttgcttcgttcattatttcctcgtgtgtttaggtgaggttgactctttcaaaagaagtctttcgaaataagggtgggtttggatgggcgattgggtgcagtgcgttgcgtttagcttactttttgtctcacgctacagtatctaatcttaccgccaccgctgtttttacactaaccgcagataaacgcaccgcccatccaaactcaccctaagtctttgaaatgtagtctatctgaagtcgatagacttttcaacacgtccaatattgtccttggtgggttttgtgctctgccttcgatgagagcctgaggttgtctaaagaggtgatgggttcaacaaagtaagatcgttttatcgagcgtgaaccatgtgccgtgcgcggtcatttaccaagaaagtatgaacttttgcgcttggtaagatttgagcgcgtgccctacagctagggtatttatgggcaattatgctacgacttgagttagtcagttgtagcatagttagccacaagtgtcaggggttcaaattctattaagtgcaaacactcacattcccgatgaggcgcactcactttgttgaatctaccgtctcttcatgcagccttcggtactcaggcacttcacaga

SEQ ID NO: 2915 - DNA, 567 bp, Gossypium hirsutum
tcattctttcagtcaagtctgacaaaatatagatctgcattgaactttggcccatgcagtgtctcaagtacaaacaaaaagatagctgtcttggcaatgggtaaataattgcaagttttggaggattggcattccggacaaagtaaattaattggagtccatagaattaagagttcttgcaacttaaacaccctttcatcttctctactgaggtgtaaattaagaagtaagaggatcatgattgaaccattgttttctttatgatttaccatcattttgttattagtttattctttagatagtcaacaaataactataggaaacgatgaagattccacacccttgttttgctacctagaaagaattaaaaatatcaatctctgttaatttacttttatgaggacaaataaattggctactgttaggacagattatccatatctagggaggattgttgagcagtatcttgaagtgaaaagaatggtctgtatggaccccattgatggctaacccagattactatgcctgaattttggtttggaaaccttgccttaagttgacatgttg

SEQ ID NO: 2916 - DNA, 623 bp, Gossypium hirsutum
tctttattctggagctttagttcttgtttatgacacttgcaacctttgccatcatcagcaaaccttcccttgcggttgcggttccggttttccaatcaagcccttgggctgctgcccatgccaccttttatggcgatgaatctgcctctcaaacaatgggtacttttcaatttttttatattatatatccgtttcatctttaaaatgatatattgcagatttaaaattcgaatatcaatatctgcaattatcttcaatcatctttttctattattactgagcttataggaggagcttgtgggtatggggatttgttcagcaatggttatggtacagactctgctgcactgagcacaacattgttcaacgatggctttgcttgtgggacttgttaccaaataaagtgtgttgactcaccttggtgctactctggggttccatccaccacagtgacagcaaccaacatttgccctccaaattgggcccaagaatccaacaatggcggctggtgcaaccctcctcgagcccatttcgacatgtccaagcctgctttcatgaaaatcgcaacatggaaagctggcattgtccccgtcatgtaccgaaggtacacaacatcttcgatc

SEQ ID NO: 2917 - DNA, 600 bp, Gossypium hirsutum
aaaaaatgatttaaaaagtgaatactatcaatctcatacttattcattgcaatccaaaagggtaaaattcaaattagtgacaaaagaacattttttccagttaacataataatatcaccctggttatttgtcaataatgcatttaaaaacctcaactactcgcatcaagtaacaatttagatcatcaattacctttttggttatttataatgagaacagctgatgcatgagctgcttgtgcattatttgccttggttgtgaatttgcagtggcctcggtccaccataataaaatcattagcaagctaacgaaaccaaagttatgcattggttaatagtatctaaaatatgctatacttgcttgttgtgatgaccatacatgaatgcatgagtatatcaataccaaataaacaaaccttattctttgggtggctacaacaatcacaagggtcagaaagaatgaggcatctttggtttgcattcttctcctttgacactatcgtagtgccaaatctggcacctacaccaacatactcagaatcctctatgcaattaacctaagtttgaactttaacctaaaaaaatccgtgatgattgacag

SEQ ID NO: 2918 - DNA, 618 bp, Gossypium hirsutum
aaattagttaaatcagtaaccaaataaaatttgtactacaacacattcaaataaacaaaatgatgaagagaaacaactatgaaaatttcataaggtctctttccattcactttcgaaggacatcttgtcaaatatcatagcagtagtcatcacaatcaatttaatcaaaccttcagatgaatgttggcataggtaagttcaagaacctgtgatgcatgtatcctacatgattgtgtattagatgcttacaccaagttcaacatccacctacactggctcatttggtagcaagcaaagaacagggatgccacttgttatgtagctcaaccattagattaaaaactttttccttccttaatcctttctaaccttcctaccataccttacagtggttcaagaaactataatgcccactaaataattgcgtgcctgtcacaacagtagttccttgactgaaagaatgaaactgtgagagccaactggtgaacatcatgtaaggggagaagctctaaagacatactcttatgccttttagtccttaattctaaaagtctgctagatcacaagtctaagctaacaaaatggccgctggacagctttccagtcctgtatccttta

SEQ ID NO: 2919 - DNA, 605 bp, Gossypium hirsutum
aaatagggtactgtaagatgcttacttggttgtgttagtggcaatgggaactagccactgcaatgttttctccatttcagctttgatttgtgggacagtcagctgaaaagaaattggagaatttgtcagtcgcatattaggagtaaatatttccaacaataagcaacagggtaacggaatcttcgaaccaacgttagtgtgaacaatagatgaacaagtaggtaagtaatatatcatgcatcaagattatccaaattagcacctcttcttttatctgaaatgactgcagtctggaccacaaagcagactttactgtaggcggtagaccttggtataatgaatccctcgtattagggggcacagaacttgaccgagacacctgagtacattgaaaaattaacttatcaaaatccccctcttattattgaatataagaataaatgtacctcaaaatttttcctatgatttgagaggaaggaatggaaaaggggttgcctaaaactccagtatatccctatttgacaagattatcaggttctttataaagttccacaagaaaatcccacaaaactggtttagaagaaacaaagaacatagggactctg

SEQ ID NO: 2920 - DNA, 526 bp, Gossypium hirsutum
attttccccaactgtataatcacaaaaaagatgctgttaaacaatgttatttggatttgggtgagtgtcagatacaggtatgcgctggacacgagcatgttcaactttttccacatattgagagagtccttgacgagtcatatctgccatgctcatgtccagataagcatccgtagctattagatatgaagctacaaactggcagagcaatatttcaaagttcatggaggtagacactcttgacaacaaatgattctgaaattttagcaagccatgttctcggttttttggtttatgtatgttccttcatgttcacagctagcagagcatataataacgtgggttgacaataaaataatgagacacatgaggctaatgagataacgcatcacctggaaaagcccgccttgcacaagtgcaaaaaatagaccagaagtgactgcatttgcagcctgattcggtccacccatgccactgactaaagaaaacatggccccagaaccaaaagctgccgccatgctgcaag

SEQ ID NO: 2921 - DNA, 658 bp, Gossypium hirsutum
ttcttcatcttcagctgaactgctgacccaaattaggctctctctcacttgttccagtcttttgtttagatccataaccttcgcttcatttgcttttgcaagtctttgccatgactcgctttccatttccagttttcttaagcaggcttcaagctccatctttttctttgttgctcgtgccaactcttcttcttttcgcttcatcaaatacaaggcctttgattccatactctttagcagaatgatttgttgttgcttcctttgctctcgtaatacatatcttagcctctcattctgagttttccaagcccagatatatgacacgaaaaataagaattttcagtgaaactgaaaccctgaataaaacagttaaacacaaaagatgtgatagatttcttacccgtaactgaagaaagcaatcaatttcctgcctttgaatctccagttgagcatctataggttgagaaactgccatgggaaccaagttctgagcgttttgttgcggatgaaaaggaacgtcttgaagactagaaccggcttggaatggagcagcagcaggtgcagggtttaccatccaatcctgaaggccacacatgggcaagggcacacccatcttttcacgacacaactgcgcttgaacagccataataactatcgc

SEQ ID NO: 2922 - DNA, 650 bp, Gossypium hirsutum
ttgacaccgatactatttctaatgatgataaagatggcaccaagcaggacctaccgcgtaaagaagagaatggccccgctacttttacttgcaaagttgatggaaaaggaataacacatcgttctaattcggaacagggatctaatgttcaatcaaaggaaacaaaaaccatcaaaagcatagggaaagtaatagaaaatggttccccaatgagaggcaacagcacaaaaactgtggatggattgactcaaaaaagtaatgtggatgcatctcccaaagttctcaaaccaccttcttgcacttcaaaggccaatgcagattcaccaactgttccctcggcaaagttacctctagatgctgcaaaaaggatgccaagttcaaaccatttgaagcaccaggtataaatgccacttagtaaatttgttttaatttaatttgttattggtatcgtcacttattttgcaagattcttctctctagttacctttaactgaatcctccccgaagactaaacctagacatgaagggcttcctccgcctgcacctgggaagcattttgctgaagatggacaaatttctaagccgaggcaaagaactcttcccactgttgcaagaagatcaactattacaggaagaatgaagcacgccta

SEQ ID NO: 2923 - DNA, 613 bp, Gossypium hirsutum
cataattgactttcagcggacagctgatggacacctaattaccaaaagtaagtttctttcttgttctatttaatcccttctccaacagtaacaactacttcaatgagataattatctcaggtagtttgtttcatggaaaatgagttagacaaagttggtattttcattttgggaaaatattgtattaagtatatatattacattcatcttatagtgaaaaatatatatttgtgcagtcggaggtaaccagattggagcagtccatagcaaggatttatgcagtaagtaaacacttagaagtgtgttgattagcatttttctctacactacaattaactgcaaaaggtgggggttctaatattagctatatgccaggggctttctttgacatgtacatcggcgatttcccagtgtcggagcaaacaaaagaagacattggccagaacgtggcaaacattataaggagatgctgaagtggcttgttttccgtcgccattttctcaaattttaaatgagcaaatggctagtggcatgaggaactcaaaatcttttatggatgtttatacgggtactttagaggaagtggctgatgaacacaagcaaatgggacaac

SEQ ID NO: 2924 - DNA, 440 bp, Gossypium hirsutum
tcacgggaaagtagttgttagatgattggattccttggggtgttttactcatcactatcttatggggtttatggaaaaatagaaacaaaagagttttctaaggtatagcgccacaagcttcttctgttttagctgtgcgcataaatttacaaaagagattggtgatttattgaatttattggatcaccgaattgctaaaggaccaacatggatgcaatggtcgaagcctccagtaggttgtttcattttgaattctaatccagggtagtcgaggatttgcggtagctggtgggtcaatccaaaatgaagatcagggttagagatagtttacaagctgaactttggagtgttcgacaaggcttaatcttgggcaaagagcttggaatacgaagattgattgtagaaattgacgctttgctggtggtgaattatcttaataa

SEQ ID NO: 2925 - DNA, 653 bp, Gossypium hirsutum
gtgcaagtttctaatttcttttgatatttacatcataaaaattgctagttttgattgtttttatgttgttcattaatttttccttagctattatatatcacttctacataatactttatgctgattcatgaaattttaaatgcagcatgttgcttcacttctttatttatacaagatatccttcttcactgtgaatgttcatgggggtttatgaatggttgttgaaattggtatctcttcatagtaaagatggtgaagacgatagcaagaggatatgttatcaacacagctctacatttaaatggaaatagattctaaaccttgttgatgtcttgattttccaatggactagttggaaccgaggaagctgtgcctgtattttttgtctgtcctaatttctttttatgtgtttggatctctggctatagacatacgtaggagctatcagtgacttctgaattttattttttttcgataaaaaatactatttatagactgttctcttgacatgcaaagtagtagagatgttaacttcacctcaaggacagaaacagaaccccccaaaatctgtgcgaaaagtctcacctagtgaatcacataaagatttgtggcttgctctgcaagaagggtccttgcctgatgtagattcagca

SEQ ID NO: 2926 - DNA, 472 bp, Gossypium hirsutum
gggagatgatcctccaaatacaagagaattttgaaaaaaaaaaaatgagcataccccttcttagatccattcccaagtttggcatcgtaacatagcctagtggtatgttcctacactttgtacaaccttatcgcattttgcagatagtaatacagttcaaatgcttctataagtgggcacctcaagattctgaggacaagcacgaaacatcatgagaaaatgccttttgttgaaggtttcgaagatgctacggtggagtgccatattccctttggagatgttagcattgcattttttgaagatctcaaactttctaagtcactgaagagggatcatatgacatgatggtgcgcatgtatgtgtgcgcgcttttggcaaaaaaaaagaaaaaaaaagggaggggttcttattgagggggtattattatgattgggggaagaataaaaatcccaacttcttttcgttcccccca

SEQ ID NO: 2927 - DNA, 602 bp, Gossypium hirsutum
tgtcattttctggtcctcttccaccctcataaactctgatgtggtttccatttcattgccaacatttgaaactttgaattggtgtacatttttgttttcttttaccctaagacaagatccccattgtcagctgatacatacccatcttatttacgttttttcacataattatattatatttgtattaggtttcatagcttacatttttttaattatgaagtgtcaaatctaccatcaacacaacccatgctttcattttaagcacactattttattttattttctttcattccattctataaccgaccacattgatttttttttataatttcttgcagcccaaacaactaattataatgtttgtactttttccaagtccaacacactcttttgataatacctaaaaaggttggtaacattgcttcaagtcaatccctgggttcagtttgttggaactcaaatgtataaaattactttgggttaaaattttagaccaatttcatcaaaataatatggtggaagattccaacacaaatcttggaacaagaaatcagacatcatgataaaatacagagacaaaaagataagacaaacccttctgc

SEQ ID NO: 2928 - DNA, 660 bp, Gossypium hirsutum
atgatagatgccggctgcaagacctaatcagatttttttaaaaaaattaggctgtcagtggtttataataataataacaataaagaaaagcttactaaaataatcactaaaatatggtacaactatgcagccatcagaagctgatacaagcagacaaagcttaaaatgccagatgtaaacatactagatatgtcaagtgccaacagtaaatcttgttttcaagttttaaacaagtactagtctcctttttagtttttatggaatccctcgttttcttccttcttttgggaggcagagaaaccctttaacactagcaatggtttcatggtagcaaccttgttttggctgtaaacatcgtcttcccggtcacctcttctcgacttagaagaaaatgacaacacaccagtatgtccattaacccttatattacttggaaatgatgatccatgaggtctcacatactacgatataaaaactcaaatcatgaattaacacaaatctagaaaaaaaaaagtataccctcctttgatacaataaaaatcaaaattaaaagcacaaatggttgtaatttacatcaaggaaagaaatgttctttttctccattaaaaaaaaagctaaaacaatactaacttatccaaaaccaaaacaaaacgaaacaaa

SEQ ID NO: 2929 - DNA, 558 bp, Gossypium hirsutum
gagaaatctctttctcttacctgccgctccagacaggcagcatttgaacattggggatttggcttcattgtcattgttgggaagaagtctttaagagaactgtacccctacaatcaagcaacgaagcaaaaatctatcataaaccaaaggcgatttcaagaagtcattaataatctggtaagaacacctcacataaagcaaagaattaaacaacagacactgtatacagaaatgggaggaagagctaatgtaggatttaccaagtagggagaaacgtgtccaaatcccaacaagaactttagcgtattttggactagaagcccagcaacaactccctgataagttagttcatatactggatgttaggaaaagcactgaaaaaattattttaggtaccaaacagtaatattgacaaattaatgattattgctgatacatatgctaaattcaatttaatgatttaggtaccaaatggataaacaaagtacatttgcagcacatatccatgcatggcataaaaaagtacacaggcatgcacatattgacatgcatgcctcg

SEQ ID NO: 2930 - DNA, 616 bp, Gossypium hirsutum
tgctggggccactaattattctgctaacatgccaattctttcaggtttctgtgtccaaggcccgtgcaattgttgtccttgctgatgacggaaatgctgaccaggtctttgcaaacgtgttaatctgatgtatctctgatgttggttagatgatggatgctgactcttgttcatggtgtaatgcagagtgatgctcgtgctttgagaacagttttaagtttgactggagtaaaagaaggtctaagaggacatattgtagtggaactaagtgatcttgacaatgaggttctggtgaaacttgttggtggagaacttgttgaaacagttgtagctcatgatgttattgggcgcttgatgattcaatgtgcaaggcaacctggacttgcacaggttagcttctccaatttatagtgtgacatttcttgctgatctttttggactatatttagcatcctatcagttatacctttagtaatattggagtgataatgacagatatgggaggatatccttgggtttgaaaattgtgagttctacataaaaagatggccgcaattggatggcatgcaatttgaggatgtgttgattagttttcctgatgctattccttgtgaag

SEQ ID NO: 2931 - DNA, 1055 bp, Gossypium hirsutum
  misc_feature (546)..(579): n is a, c, g, or t
  misc_feature (585)..(591): n is a, c, g, or t
  misc_feature (606)..(607): n is a, c, g, or t
  misc_feature (609)..(609): n is a, c, g, or t
  misc_feature (611)..(614): n is a, c, g, or t
  misc_feature (616)..(616): n is a, c, g, or t
  misc_feature (618)..(618): n is a, c, g, or t
  misc_feature (620)..(620): n is a, c, g, or t
  misc_feature (622)..(628): n is a, c, g, or t
  misc_feature (631)..(637): n is a, c, g, or t
  misc_feature (640)..(642): n is a, c, g, or t
  misc_feature (645)..(646): n is a, c, g, or t
  misc_feature (650)..(670): n is a, c, g, or t
  misc_feature (676)..(678): n is a, c, g, or t
  misc_feature (680)..(683): n is a, c, g, or t
  misc_feature (686)..(686): n is a, c, g, or t
  misc_feature (691)..(691): n is a, c, g, or t
  misc_feature (699)..(711): n is a, c, g, or t
  misc_feature (715)..(720): n is a, c, g, or t
  misc_feature (722)..(726): n is a, c, g, or t
  misc_feature (732)..(738): n is a, c, g, or t
  misc_feature (740)..(745): n is a, c, g, or t
  misc_feature (748)..(771): n is a, c, g, or t
  misc_feature (778)..(780): n is a, c, g, or t
  misc_feature (782)..(785): n is a, c, g, or t
  misc_feature (788)..(795): n is a, c, g, or t
  misc_feature (798)..(821): n is a, c, g, or t
  misc_feature (825)..(832): n is a, c, g, or t
  misc_feature (834)..(839): n is a, c, g, or t
  misc_feature (842)..(848): n is a, c, g, or t
  misc_feature (852)..(857): n is a, c, g, or t
  misc_feature (859)..(864): n is a, c, g, or t
  misc_feature (868)..(878): n is a, c, g, or t
  misc_feature (880)..(881): n is a, c, g, or t
  misc_feature (883)..(887): n is a, c, g, or t
  misc_feature (891)..(892): n is a, c, g, or t
  misc_feature (898)..(905): n is a, c, g, or t
  misc_feature (908)..(916): n is a, c, g, or t
  misc_feature (918)..(919): n is a, c, g, or t
  misc_feature (921)..(923): n is a, c, g, or t
  misc_feature (928)..(930): n is a, c, g, or t
  misc_feature (932)..(934): n is a, c, g, or t
  misc_feature (937)..(967): n is a, c, g, or t
  misc_feature (969)..(976): n is a, c, g, or t
  misc_feature (978)..(990): n is a, c, g, or t
  misc_feature (993)..(1001): n is a, c, g, or t
  misc_feature (1003)..(1004): n is a, c, g, or t
  misc_feature (1010)..(1016): n is a, c, g, or t
  misc_feature (1021)..(1027): n is a, c, g, or t
  misc_feature (1034)..(1051): n is a, c, g, or t
cggtgctttggaatttttgtgttgtgtttagaaagataaacaattatttctatgcagaagctgatattcttagtcatgaagttgagaacagttaaaaactgcataaggtgacattcgttttgaatctaggatttccctgtattcccttacattctatatgacataaaacagatgaggaattgttgaccagtgtcccatataacagatataggttcatctttcaggttaattgctgcaatggtacttgtatttgtaaattgatgtttaatttggttacttgcactgagcattttctacgcaaggtttgaacttttactttctgtttaatttgctaacttaactcacctttggtcatggatgatggtgcggttttctatctataatattgcaacacttatcagcttaagtggaaaatgtgtttgataacctggacgttgttccagcattttaacttattttctttaaaatttattggctttagttttcttttttcttttccttattcattctttctccagtttttctagaaaattcaccatcctccgnnnnnnnnnnnnnnnnnnnnnnnnnnnnnnnnnngggatnnnnnnnacttaatcattcctnnangnnnncnanangnnnnnnntgnnnnnnnacnnnccnnaatnnnnnnnnnnnnnnnnnnnnnaattannntnnnnatngtganatcccgcnnnnnnnnnnnnnaatnnnnnncnnnnncaagannnnnnncnnnnnngtnnnnnnnnnnnnnnnnnnnnnnnnttattgnnngnnnnttnnnnnnnnttnnnnnnnnnnnnnnnnnnnnnnnnaggnnnnnnnntnnnnnntgnnnnnnnaaannnnnncnnnnnnattnnnnnnnnnnnanntnnnnnttannaattcnnnnnnnnttnnnnnnnnntnnannntaaannntnnntcnnnnnnnnnnnnnnnnnnnnnnnnnnnnnnntnnnnnnnntnnnnnnnnnnnnnttnnnnnnnnnanntaaatnnnnnnngagannnnnnnggggatnnnnnnnnnnnnnnnnnnattt

SEQ ID NO: 2932 - DNA, 626 bp, Gossypium hirsutum
aaagaactaatgcaactagaaatggcacgcttgtttccatcactaatcgataactttgataacaaacaagctgaaatctgttgcaaaatcaagttcccgtgcttaataaactcgcccaattggataatgaaggccgtcgaagatgataaaatccgtgaaacggaatctaaaaccgaaagcgaactgatcgtgcggagaagatgctcgactgtatctgaacttgataaatcttgaagtagatgcattaatcttggcaatcccttttcttgtataatcaatgcacgaaaatattcgcccgaagaagcgagtatcgaaatgcaattggctgctttttcttgggcagcgctggtacccgagattaacagctggaataaaacaggaaccgcaccttcttcacccaaagccattctaatatcttccacggaagccacgtttcgaagagcgccaaccgcgtgggtttgtgtcggttgggagccagatcggcaggcttctattaataccgaaactccgccgtatgctgaaattgcccaggtgttttcgggatcggcggtgattgcttcaacagcaatcgcggccttttcttttaaagcaatggaacctgtttcaaggattctcagtaaaggcca

SEQ ID NO: 2933 - DNA, 515 bp, Gossypium hirsutum
gggccctatgatggactatatgaatacagatgattagagatgctatgcactagacctgaattgtggaaccgtgataacaaagaaatgaagcctcccactttcgaagacttgcaccaaaaacgaaataatgtttcagttcatgatcttgataaaaatcggaattgaagtagttgcttctgttttcacttagctggaagcttgtgccttggtagtgctactgttgttgccactgccgaaagaactctgacttgcttgttgttcaattgaatgatgaaccagtccacctttagaaaaaatagaaccaactgattcactagatgcgctcactgatgatgacattatgggtggagcagattccttgttggacctggaaagttgttccggtcgcaagtccgaagatgaggatgatggagctagagtaccacctgttgatccaataggataaggagcaacaggcatatcggtaagggaagaggcagatggactgtaactcagtgttcccatatgatgatcaa

SEQ ID NO: 2934 - DNA, 634 bp, Gossypium hirsutum
  misc_feature (630)..(630): n is a, c, g, or t
ggagcttggatagttcttctacaccaacagcaagtttgatgccgcttcccctccttccatgccctccctcagtacctgtcgttgccaactatgcgacaatacttgaattgaattgcatggaaccttgtggaggagaaaagttaatagatttgaacacaattgttgaaattcctgaagagaaagatctattgaagcagctccaaggtcctccagcgagcaacattatagcacctcaaccgattcgaccagtgggctccattatctatgttgggtgcatcaaagagaatccaatcctaaccccacgaatgcaagtcctgaagaaaggagaggaggttgaagaattggttgagtccgatgccttaccggcagtgatttccgactcaaacaacaaggttagattggcaaattctgcttacaaagagatggtgggtcaaccagaatgtccatggttggactctgtggtgacaggtgaaggaagagccctaggcaactcatgcaagaaaatctgtggggaagtagtactccatttatcagaatctgattcgaggttgacagttagatcaaagggtttttcatgttgggcgaggattgagtggggaagtaaagggaagaagagatcagtcaaagcgntctg

SEQ ID NO: 2935 - DNA, 622 bp, Gossypium hirsutum
ctctttgttatgttgagtgataaaagtttagtattcattaggttaagttgaagttcaagttttgtgggcgaaaaaaagatatcttgaggaagcttgctcctgtctaaactcaagtctagatttagtctaaatcgatataattattgtatattaaatatttcagaaaaagaaaaaaagtagcatggaatggaaataaactttcttttaatcacgtgcttcttgatatgatgaacataaatattttccttctttttccattggagagagagagagaagttgattagttgatatttcaattttcaatttccaacaattaaaagaaaagtggtcccgatatgaagcaaaaaggttcgaaaggccccattgtcttattccaagctggaacccaacagccaatggggagaatgtatagggggaatggaccaatagaaagaggataaggtggcacgtaggataaaaagagaacggaatagtagatgtttaattgaaacaggggtgcataataaataaaaagggagtaaaagtagagtagagggacaagagcaaaactaagatggggtacaattcaatgttaaagacccccaagaaggaagaacacaagttccagatgcgagtacagcaa

SEQ ID NO: 2936 - DNA, 565 bp, Gossypium hirsutum
ttataaattttggaactatttcttatttaggtatgtaggacaaataaacaatcaaactcttaatcattaaagtatttctatactagtattcatcatatcaattcaaattttagtttgtacataaagaggttcattttattttcttacactttctagagtttgacactaatgttcatagacctacaagtttatggttgattaatttagaatgttttcaccccaaattctcatatatgattagttcccaactcatttatgatgccatatgttatgaatacaatgaaaaattgaaaggaaaggtaatatgttcatcaaggttaagatcatcttatacttaaaacaaaaatgagaggtaaagatcatactcatcatgagtgcaaaaacatagaaaatggtatgcagagtttaatttattcctctagatagaaaaataattaataggaaatacttttatatatatagtaagtgtcatgatatgatcaatctatgaggtctctcaaaattatcgtttagtgtgcctctattgaatatatattaatttatttacttgatgacgtggatttga

SEQ ID NO: 2937 - DNA, 614 bp, Gossypium hirsutum
tcaactgctcatgcaaagttgaagttaagcagaaaggtatttgggattcctgacatgttcctagtagatttgtttccctaaaccttatattactctttgaatataatctaattctttgggatcaactgtgaccaaaattgttacagagatttcatttttatgccttaaaatttcatgtttggtccttgcttgttactgcttcattatatttcctttttcatgcattttattcatacttctgttgcatgacgatttatcatggcaggttacaaaagttgatgttgaagctgctctgaaagttctaaattttgcaatttatcataaagaattgacagagatggaggatcgtgaacaagaacggcaaagagaagaagcaaggacacacagagcggatcgtcaagggtgagcatgggatgtgccttcaaacaacttgcggattttaagtgcctattgcttataatttaaaaataaatattgcttataaacaattgatttgtctttataatatagatgcttatctttctatataaactttatcagaaaattactgaatgatcaaatttattctaatgtttttgaccttctcttttgctttaactaggctaacggccact

SEQ ID NO: 2938 - DNA, 605 bp, Gossypium hirsutum
  misc_feature (495)..(496): n is a, c, g, or t
  misc_feature (500)..(501): n is a, c, g, or t
  misc_feature (507)..(509): n is a, c, g, or t
  misc_feature (529)..(533): n is a, c, g, or t
  misc_feature (548)..(549): n is a, c, g, or t
  misc_feature (561)..(562): n is a, c, g, or t
  misc_feature (564)..(566): n is a, c, g, or t
  misc_feature (569)..(570): n is a, c, g, or t
  misc_feature (595)..(596): n is a, c, g, or t
  misc_feature (598)..(600): n is a, c, g, or t
aaggctgtctcgttgactaaatggagtggcaaaaatatttgaattcaagttttttgttgacatcagctttgggtttgattcctagataattctttaccctcaccctttatatattaaggttgtctccctctttacagaaataacttgtttgaaaagagcttccctaaaccaaacattcttccttgtatataaggaccttggcaaaagtgttatggaggttcctatactatgaatcagattatattttgttctttctactaaaaaaatgaataaattaatctttatatattaggtcaaagtgcaaattggttctttctattaaaattttcatctatttgtattgttaaaaattggcgtgattgacagaataaccggacaaagacattttactaataacatgtatctaatgccaacgttcatgaaccaatttgtaataacaaaaatggaagaaaattttaacaaaatgactagtttgctttttgaattttacctcanntttnnaaaaannnaaggcatccgaattttatannnnnaaaaatttaacgagnncacatagacacnnannngcnncccgtgctcctaactgtataatgcnntnnnctgat

SEQ ID NO: 2939 - DNA, 658 bp, Gossypium hirsutum
  misc_feature (189)..(189): n is a, c, g, or t
ggatgcttcattacgttcctggtttttcttatctgtttcaaccacatatttgttccctctggaaagaatactagcggtcatcactcttcaaaactggccgtgtcttccaaaatgaaggctcctaaagaaaacagcccctcttgggttgccgacatacttatcatatcctcattcatcatatcattagcntgccccagcttggtagctattgttttgagatggagacggctgaagaaggaagaagtaccacttgtctcctcaaaggaagaaaaagtacagcaactaagttcgattgagacgaaaggtgtggtagaggaggaacatgaagtccattttggaggaaggcctaatttgaaaggtactctcatacatacacatataatatgcccttcattcttatagaacctacactggtcttaagtgtgtttatgttagtatcagatattgttgtgattaattttctaacacattgaaatgatggaatctcatcagatgaattctccaaattcctgaatgaaactaatggatctgatattggagtgttggtgtccggaccagaaacaatgaaagaggcagtggcatcattgtgccagcagaaatctggatgctttcatattggaaataaggaaaagaaatcatacttgagtttccatgccct

SEQ ID NO: 2940 - DNA, 518 bp, Gossypium hirsutum
  misc_feature (459)..(466): n is a, c, g, or t
  misc_feature (472)..(475): n is a, c, g, or t
  misc_feature (487)..(491): n is a, c, g, or t
  misc_feature (499)..(500): n is a, c, g, or t
  misc_feature (505)..(505): n is a, c, g, or t
  misc_feature (507)..(509): n is a, c, g, or t
  misc_feature (511)..(514): n is a, c, g, or t
atcgtgtgaggcttgaatctgctgtaccactggatgggtgaacgtttttcacatcttccctgcctgtctttaagcatcttgcgctccaaggttgccatcactacgagtaaccttcagttttaaatatttcctgtggtatagcgcaaggcttatttgatgagttggcttccaatttttagtgcatatttttatcccaaattgtgtatcttttaagtatgtagtttccttgttttatacatgaacaagatcaatttttcctttgaaaacatgaacaatatatatatttgagaatattatatattcatttgtacaaaagacttcccacatacttttgggactcctttcaagggccgttgggcttattgtaatcttttaatccaaaatagtttgctacaatttttttgttgagagtgagtctactatatatatttggatctgaactggtgttcattttgcctnnnnnnnncggtcnnnnataatgttccgnnnnnaggggganngtcangnnntnnnnaaag

SEQ ID NO: 2941 - DNA, 363 bp, Gossypium hirsutum
tgagcttatcctacagtctgtccagaagggagtacccgctcctggtggacacaatggctgcaccaatgttcctggcaggaatgacccgccatgcatcaaccagaggggcttcgcaggccatgttatggctcctccacggctgcaaccggaccaaatggttccgtttaatgcagcagcctaatgtcaaaagaatccattcttctcgtctttatctatttagccataaataatatgtgatcatgaaattaaataaagggaaaatcaccaaatcccaattcctgttctgtcttttttttcgctataataaatctttctctttgttttgatgtgtaaagcattttcgaaacacaagatggattgtca

SEQ ID NO: 2942 - DNA, 609 bp, Gossypium hirsutum
aagacctttctggatcatcaatttcttcctcagcaatattaggcttcacatgtgaccctgatgcaccaacaccatccacttgctgagattcatcaacaacgtaagcatccctggatatcgcactgctctccctcgacatctgaataccaagatctgaagcctgggagcaaaagaatttctctctattttccaaatttcgattttgggagtctccatgggaaccaaattcattgttctgagatgatcttgcttcacccacgacttttacctccaactcagcattgcgtgcctcattattgacaaccacatcctgaatgtgcacctcgccctcactctttccctcattgacattagtagtttcagaagatgttgcagccatcaatatctcagatggggtcacaagatgagttggatgcttgaaaatgataggcggattatatgcaccagatttgtcatctgataccattttcttgtcatcattccttgaaccatcttctgatgaatgcataccagacaaattcgatcgaacagtgtccatttgtctgtcaactggataatcctcatagttatgaaaaccagagggtttcctagataacctaggactggagg

SEQ ID NO: 2943 - DNA, 647 bp, Gossypium hirsutum
actgtaaaagttgaaccacataagatatagacagcttaatgaattgatagattccaatgtttttatataatatattaaatagttattacatgtttgtaataagatgattttactgagaatttaatgttaaatacagggagttgctgggctttctcgactattgctgctgtggaagggataaaccagattgttacaggcgaactcctttcactatctgagcaggagttggtggattgtgatacatcttacaatgaaggttgcaatgggggtctcatggattatgcctttgaattcatcatcaaaaatggtggcattgacaccgaagaagattacccttacactgctcatgacggtacatgtgacccataccgggtaggtttcttatttttagagttgggaaaggaacaaagatagaatttcaatttccttgctgaatcttggtgtttttaatcaccttgcagaaaaatgctaaagttgtttcgatcaatgattatgaggatgttccggtaaatgacgagaaagcattgaaaaaggcagtcgcgaatcaaccggtgagcgttgccattgaggcaggaggaaggagtttccagttatatcaatcagtaagattctgcatccatcaaaattactagttgctgcaagaccac

SEQ ID NO: 2944 - DNA, 737 bp, Gossypium hirsutum
  misc_feature (644)..(650): n is a, c, g, or t
  misc_feature (656)..(666): n is a, c, g, or t
  misc_feature (668)..(670): n is a, c, g, or t
  misc_feature (672)..(673): n is a, c, g, or t
  misc_feature (687)..(689): n is a, c, g, or t
  misc_feature (691)..(691): n is a, c, g, or t
  misc_feature (693)..(702): n is a, c, g, or t
  misc_feature (705)..(709): n is a, c, g, or t
  misc_feature (712)..(718): n is a, c, g, or t
  misc_feature (720)..(725): n is a, c, g, or t
gttaaaatggaaattatatgacgtatattaaacaaaaaaaccatatataccatgcttaggttcttaaactgcaatatgtttttcagtgcatagtaaatagtactaagctgcacgcagttgcctctaaatatcataatagataacatggtctgttttcaataatgtcaaggccaacaaacccgagacttactaggaattccagtcctaactcaaaatactcatccttgaagttaaattatatgttagcgattccatatataacattcatccttgattcataattgccatcttgaacttttcttcataagtctgagagtctattcctctccatcacccctaacatacaattatctgttttgatgcacattatgcgctttataaatgtcatatatcatcaaatttttaaacagaaacatagatattgatggatgaaagatgcatgtctatatccaattcatattacaataaacaataataatatctggcaagttgcaagtctgatatattagctgtgcctacattttgccctaataaaagataacttgtacctaaaaatagtcttcttgttcaacatggttagaaaaccttttttgtcattggcttgaaaaattgtataaaactcaatgcatgcagacaaacccacnnnnnnntatgcnnnnnnnnnnntnnntnnttaaaaccattttnnnangnnnnnnnnnnaannnnnttnnnnnnntnnnnnnaaaaaaaaattt

SEQ ID NO: 2945 - DNA, 657 bp, Gossypium hirsutum
ctttttgttctaaacctatgatttcagtaataaattatcataattttattcattctactgttaaaacaaaatatgacttttaatccagtttcaaaccattcacaaaaattgatagctttttctattaaaatatgatcaactaatttacattgtacaggaagagagactgacctgaaccaaacaccccttgggaacaaaccaacaaggtgaaccaatggcccccaaacctccgaatccccctcccccccacctaatcctggcgaaactggccggtggaaaaaaaaaccattaatttcccaaaatccgcccccccaaacccaggataacctggcccccggccttgggcacccaaaaaccggaaaaaaacccccctaaccagaaccccaccaaaaccacctcctaaccctcctttccctccaaaaacaatccttttgaaaccggtgggttccgcctttttttccaaaaaccaaaatgaaactttccccaacctccaattatggccaataacttaacccctaaccatggaaaaaattaaaaggaaattttacttttctattttaatttgtttaaaaaattaaccccagaaaaaacttttttttttctttacctatattttgttctaggaaagttttaacgcctttgtttctgcacaaaaaa

SEQ ID NO: 2946 - DNA, 606 bp, Gossypium hirsutum
catcattcaacaaagcgtttgataaagagtacgaaacagagcagctcgtcgagatcgtcaagagagggaagaaacttgtcacgaagtgctgtaaaattcgcaggtgggacatcatcaaaaagccttattactcgcacaaacttcttggattgaagaaatcgcttgagagattctgtcagattgttatgcaaacacatcaagcgagggacatcaaagaggtgttgtttgaaactaaagagattagtgtgggaattagaaaattaagtttgaaagaggggagtagcaacgggaatggtatatgtaatcaggtggctgttatgggtccatgcagagttcctgagcctcgagggaaagttcttggattcgatgagcccttgaaagagctaaaggtgaagcttttgaaagatggggtttcagtcattattgtgtctgctcctggaggatcgggaaagacgacattggttaaacagctatgtcaagatgaagaggtcaaaggtatctttcattccagagcttagatttttctacgcttgactttagcttctgcttcttggctggtctgattgttgaattccaattcttaggtgaaggcatggaccaactaaa

SEQ ID NO: 2947 - DNA, 633 bp, Gossypium hirsutum
ctaagttcaataagtctatgtaagaaagagcctctttaatttaaaaaaaccatcaaaattagttgcagagatgaaataaggtcgggtgccttaagtttgcatgctttggcttgatctatcaccacgctttctcaattttgttaagatgtatgccattgcaactttagcacccaggccacagtgaccgcgagacaggcagatcacacccccaataacaagcaaactttttgctacaaactttttcgacggttttcttgatagccttttctccctgggttcatcattaactggttcaaaagtggccatcgaggcagaggctgctggaagtgcatcaccgtttatcatatctaattcaggtggaacctaaatgcagacatgttaataatcatcagttcaagagttgctctgaagataatatcaccagaaaaagctttttctcttttttagtaagaagcagcagaagttcaattatgtgtttccataaccatagcttatttcaataattattttgacaatgtaaggactaaactggatacagcctcagtaaaaagactagttcataaaggtagattattaaggcaaaatcacttgatagtgcaatagaagagagccaaaaatgcagaggatctggat

SEQ ID NO: 2948 - DNA, 691 bp, Gossypium hirsutum
  misc_feature (682)..(688): n is a, c, g, or t
gagtttgtacgataaattgccaactcacttgaaaaacctaacataatgaaaataaaacacaattattttagtaaatttcaatcaactaactcaatatttgcttttccatatttcaatttaaccaaccactacccattcccgtggcagttaatcacgtccaagtttctattagggaaaattaacgagttaaatagatatttgaggtctggatttgacaactttcttttacctttttttgtgtctaagttaggcactttggggtttggagtaggcaattgttctaatattagagtttgaacttattttttgtccaaacgcttactgaatttgtcaattgtttctaaattggagcttgaacttggtaattctcatattgaggcttaaactttatggttttcaaggattaacatgaacagaagaaaagttcaaaccctaatgtgagaaacattaccaaattcaaagtctaacttggataaaaaaaatttcaaagttcaatataagaattgtcaagtttaaggcttaacttgaaaaaaaaaaatcaaaccctaatataaaaaaaattaatataaccaaaaataagttgtctgcaaatatcccttatttgcattcaatttaaatcttttcattggatttttgacaattaataaataatcgtttacattaaaaagatgggaaacaccannnnnnngaa

SEQ ID NO: 2949 - DNA, 572 bp, Gossypium hirsutum
gaattacttcattgtccttagtgacatttcatttttcttctgctttcttgtgatatgtttttctctttctcgatttccgtaacagtatcttacgtttgcttaccgtctgagacaatgggtgagttgccaacacaaagcacatctgccttagccttgcctctcttacagctaaaccggggatcaacaacggcaacatctggtccagaatcaaagccaaagaagaaaatttgctgtgcttgccccgagacaaagaagctgagagatgaatgcattgtggagcatggtgaagaagcttgtgcaaaatggatagaggctcatcgtatatgccttcgtgcagagggcttcaatgtttgagattggtatttgaagttcatagaatgaaaacaatttgaggtacaaactagttattagaggattaaacagatatgatttgacaaaaaagaatccagaaataaaaagaaagctttatcgtaaactgttcatttttgtttttttatttttcttttttaagaggttatttacctctattgaatgaattgaaacatctggaatgcttatatgaatcatgatag

SEQ ID NO: 2950 - DNA, 621 bp, Gossypium hirsutum
gtcttaatagccctcgcttatttctcaattcctctagagcttatctattttgttaaaaaatctgcattcttcccatatcgatgggtgcttatgcaatttggtgcttttatcattctttgtggagcaacccactttataaacttgtggacattcactatgcacactaaagctgttgctgtggtgatgactgttgcgaaggttgcatgtgctattgtatcatgtgcaactgctttgatgcttgtgcacattattcctgatttgttgagtgttaaaactcgcgaattatttctgaggaacaaggctgaacagcttgacagggaaatgggccttattctcactcaagaagaaactggaaggcatgtaaggatgctaacacatgaaattagaagcacgcttgacaggcatacgatattaaagactacccttgttgaattaggtaggaccttgggcctggaggaatgtgcattgtggatgccatcgaggaccggtatgaatctgcaactttcccatactctaaactaccaaatacaagttggatctactgtgcaaataaatcttcctatcgtcaacgaagtcttcaatagttctcgagcagtgcatataccctatacctgccctcta

SEQ ID NO: 2951 - DNA, 553 bp, Gossypium hirsutum
  misc_feature (462)..(466): n is a, c, g, or t
  misc_feature (474)..(481): n is a, c, g, or t
  misc_feature (490)..(491): n is a, c, g, or t
  misc_feature (494)..(495): n is a, c, g, or t
  misc_feature (503)..(505): n is a, c, g, or t
  misc_feature (507)..(509): n is a, c, g, or t
  misc_feature (512)..(517): n is a, c, g, or t
  misc_feature (519)..(524): n is a, c, g, or t
  misc_feature (527)..(527): n is a, c, g, or t
  misc_feature (534)..(543): n is a, c, g, or t
  misc_feature (545)..(548): n is a, c, g, or t
cgcttcttccatgctgaaggagctcagagaatgattgtaaattcacactaacatcttcatcatattcaattcccagttcctcctgcaaatacaagccaatgtcagataaattttatggtgcaaaatgtggattactgctaaaagaatggagctttggaaccttgaattcctttagatccttaggtgagttctccgtgatagcatcccatagatccttgaacatgcttttccgtcttctccacaggcttattttctcagaatacatggcttcaactgcctttttttcctctggcctaaccagagttactcctccacgcaatttaactaatttgtcctccatttccttaacctgatgcataacaaacaatgtcaaaaatatttctcacttacttcggcagaaacatctgcaaccagttttgataaagaggaatgaaaagctcctatattggtaaattagtcttnnnnntttcctcnnnnnnnnttccttgtnntgnntctgttcnnnannnagnnnnnncnnnnnnctnttaattnnnnnnnnnncnnnntatac

SEQ ID NO: 2952 - DNA, 620 bp, Gossypium hirsutum
cggtagacacccttaactagaatcggcaatgatgtgatcgtttgaagccacttcacatcctgtttgattggcaagaaagaaaacttgagaaaatttcctatgttttacggtccggaagatgcaaaatatgacacaaatatcttactttccagctgagtgactgatcaatttggttggcagcatatgaagctagtccggagtcatcagtctgcaaagataatctcaccattagatggacaaaagtaaatggataactaaaacttatgttttccgattattttcataagtatcggtgttcggtgtttgtgtcctacatatactcagatataagtacggagatatgatatgtgtcaagcatatactcatctctggcggatacacccaaatccgagtaacatagactaaccttatcgattttgccaaggtccaaaccctcaaagtttttcaatgtcaaatatggtggcaaattaaatctgcaagtgagtccatgcagcataattgtcatattctttacaggggacaatattacttcgattcttcatttttcttaaaccattcatatccgagacatattaggacatgggtattgaatataacctccaagaatcctctaaatgcat

SEQ ID NO: 2953 - DNA, 466 bp, Gossypium hirsutum
gagatggattgtgtaagccgaaatcgatttacaaaagggctagtatacctgatcccgtgacttggaccacaagtaacaccttcaatgtgcacatccaagcatcctggaccgatcgaaatgcaatcatctcctatttaaaatcatgagacttggatcattgcaaggaataatacataaacagtacaatgtaggataaactgttcaatagagtatgatagacacaagttccattttccttaccgttgcttatcattgaattgtatataccaacagattttgtgtttccaatgtggattccatcggtgttcgggctaagtttaggggttgatatcaatagtttttctatcaaaaccccttcgcacccatcgaatttcatatgaaactgaggactgttttggatctttatgccactgactactaaattggagctcataaagaacctgatcatcctgaatcaacaaaggac

SEQ ID NO: 2954 - DNA, 649 bp, Gossypium hirsutum
ccaaaatttttcaattggataaggtgtgtaattttaaaagcttcaaacataaaagcatgtgggacaagagaaataagcttgttaacagtccaggactcatttcatttcaaactaaactttcaactctttcgatgcagataagatagaatagtacctttccggtattctgtcatttgtaagtttgctcatctcaaaagttaaaagattaaccagtacgcttgctaaaccaagtttcatcaaaggcgacagaagaatatgctcaacttccttctgactttctaacatggacaatagaagtccaacactctgttagaaaaactttctttagattccatcacaaaaaatacaggaatttacaaagaaaaaagtaacaaaactccaaaatgacatatgaacttgaattagtatatgcttagcaaacttaaccctcttcattttcaaacataagagcattattcatgactctattaggtactaactaaagcaccacgcagtaatagaatccaaaatatccaaaaattcaatggtctcttgaacataccggaaacccaacaattctctatcaagtttgtacttaacatcctcagataatcaccctttacaaaataaaaactataaaatgtatagatcagtcactcatggttgctac

SEQ ID NO: 2955 - DNA, 632 bp, Gossypium hirsutum
  misc_feature (608)..(610): n is a, c, g, or t
  misc_feature (614)..(621): n is a, c, g, or t
ggatttcttttttgttggatctgattgtagattatgaacattaattggttccagaagcaaccaaaggggagtgatgaggtaatgtaccgtttcttttccgctgttcattatttatgtaggtggctaattcatgaaagctccttaggtctcgatttgacggtcatttatgcaaaatgcactgcaaagagttaatgttctttccctctgctagttaaattacgttctgaataacaactgtttgattatgaatgttttatcccctttcctgttaatatgttcattgaatcaatattcctttattttttccgtggtttggccttcatcccacattatttttagttaaccactgttggtttttgttcaatccaattaaatgtttttgacttatataggtcagcttaacgatgaatatatcagctgatttgcagtcattgtttacatggaacacaaaacaggtttgttacttcatacatcttttatattcttttgtcagaactttatgtctttgcatcttctgattgtagtatgcattataagtgcatgggatattatatgtgatatgcatctctatgttgctcgaatccaagtgggatggattaaaatacgannngtgnnnnnnnngtatgtgaccg

SEQ ID NO: 2956 - DNA, 599 bp, Gossypium hirsutum
atggcgtaaaggtcattggtcgaaatgaaatggaaagacaggagaggaactgcaaatatggcgacgaaccgattgattcccaagcactagtcgggagagaatatcttccaccaacggacggaaccatacgctaagatcatagccacgtatagtggaatcacagccgttaaaacggtgtaaagatcgccccagctggtcatcttttaagatattgttcttatgagtaggactgtagaagatctagtggagagacttctaaggaaggttgagaagtgagatatgattgtcaaggaagggcaaattggggataatgaaaaataccgttgcttaaagaggataaaatctcatatctgtgtttctttcacaactacctactattgtttcagacttgtttcatacactgcaatttttttttcttttttccgatttaatatatttaaaagatgtttggaaagaaagaaagaaagaaagaaagaaaacgagtgaaaaaactacagtataatttactagagagatatggctttagagcatatataaaatatacatatacgactatacataaggaggagaattatattaagcgcatggagagaaccgga

SEQ ID NO: 2957 - DNA, 389 bp, Gossypium hirsutum
gattatcattcctcaaacataacttagaactacaaatgattaaattcttcaaattttttttttatcattttttttcttgaatccgcatgaaatcaaacttacgctttgaataagtaagagccaaggtgaatgcagtgttaacaagaaaccacattcccatcaaagctgcaactgatatccagtagaagtgttcaccaaagtttagcccacgttttagtagagtctgatgccccaaagtctcatttgaagatgaaagctgaaagggaacaacacgaccagaaaacatggaataataagtgctgatgttttgacctttaattagatacaaccatgggtaattttaccttttttaccatttgccacctcggagacagaaattcattcactga

SEQ ID NO: 2958 - DNA, 489 bp, Gossypium hirsutum
  misc_feature (139)..(139): n is a, c, g, or t
cttcttttcttttcagataagagaaccttttatgagaaacaatagcttgagatgtccgagtcccttgtgctgcacgaattatcattcctcaaacataacttagaactacaaatgattaaattcttcaaatttttttttnatcattttttttcttgaatccgcatgaaatcaaacttacgctttgaataagtaagagccaaggtgaatgcagtgttaacaagaaaccacattcccatcaaagctgcaactgatatccagtagaagtgttcaccaaagtttagcccacgttttagtagagtctgatgccccaaagtctcatttgaagatgaaagctgaaagggaacaacacgaccagaaaacatggaataataagtgctgatgttttgacctttaattagatacaaccatgggtaattttaccttttttaccatttgccacctcggagacagaaattcattcactgagattcctatttctgtatatgagac

SEQ ID NO: 2959 - DNA, 614 bp, Gossypium hirsutum
agaatttctatactacaacttcttgaaattaatattcgtgagatgagccatcatcaggttaagcatagtttatttcacaaatgagttacgaattttccacaagttttactttttttaaaatatatatatatattaaattatggtatatatcactttgttaatttcatttgtgaaattagaaaattttattaataatgaataccatatttgaagacttagcttgtattgacaccatgcttggttgagtgtaatcccataactattgcttgtctattcggtgggtttaggttattactttggttggttatttgtcttttcggtgggtttaggttattattttgtttagttaggggagttggcgaactggcctgtaatggaaatggatgctattagggatgggtcgtgatagtcattccatgacatgggctaagaatagggattctatttccaatggaatgaaagtgaaatcgaaattagggttggatcaaaatattccctcttcatatcgttttctcgctcgcttttcccaattgctttctccacattgaaatttacgtttgaaattggtgacttgcagaggttttgttcgctcgctttcagttgttcatcctaaa

SEQ ID NO: 2960 - DNA, 650 bp, Gossypium hirsutum
attaattccatcttgttgtcacaccagaataagactcaataagatatgatactagcatgcaatgctgtatatttgcatttttaaaaattaattaatgtataaacattaaaatatcatctcaaaataaataaattatttgtgctaaaaatgtggtatataatagattcggatatttgtgaatttgaataacaaatatcaaaattagaatccattatttgaatttgaaaacaaaaaaataaatgacgtgtaaaccacatacttcgaaaaacagaaaaacagattatgtttactaaacccacttacaatgaatagggaacaggcaaaaccccttctgttttagttcatacattaacgatctccaaaatctaagataagtgtaacaagcatagaattaaatcctgttatcagcacattcaccctcccagaactatacatgcgactcttcttttttcttgaaatattggcacgaatgactgagttgttaagtttagaagagtaaaagaaatgtggagggataacataaaggggaataataaatattgtgcagagttaccagaatgaaaacaactatttttcatcctttctgcctgccaatttcatgttgacttgatcaaaagtgcagaccatttccgagcgcatgttcgctatct

SEQ ID NO: 2961 - DNA, 601 bp, Gossypium hirsutum
atggagcttctctgggatgcatttggtatgggctgactatttgctttaagaaaagattgtaaatttgaaagaagtaattaaaatctattgagtcttatgtgctattgcattcctttttctctcttgaatggctcttgatacaggaatcattgtaatactggagaaatgatgatgattatgatggaaataattatagtaatagcttagccctatgtagtacttgattttatggtgacacttaaagtgagcataaatcactagtcgaaatttcaaattctagagcagataatgcttaagctgttgggtataattagatcatcaatatgtagctatcatgcctatattattcatttattctagttctttcttctaatttagtaatgctggacacattaaataccttgaactgacaatggcttttaattagtagtaggtcctccgaaataccgagaaaagaataaagaaaaactgagcatatatttgttgaacatgagcacatattggacaccggtattaagtctgggccacataaatataacattgagcgcttttatgttttactcgattttccaaatttaccccttaactgacactcgatatt

SEQ ID NO: 2962 - DNA, 612 bp, Gossypium hirsutum
tggaaatattacataaaaaccctgctcttgcattgcctgtcattttaactcgcctgaagcagaagcaagaagagtggacaaagtgccgttctgactttaacaaagtttgggctgaaatttattcaaaaaaccattataaatcacttgatcatcgcagcttctatttcaagcagcaggattcaaagaacttgagtgtaaaatgtaagaggactttccatatcaacgatgcaaaatgctgcattttcctatgttgcaaaatttaccattgatgaaaccattaattatgtctttaataatgtgatttcaaatgttgcgatatcctgctgaagggttgagggaaaattttcatttgtaacaaagccgcaagtttgatagattttaaaagtattgttgcatgctattccatggtctcttgagggtgtttctatcttctatattcttattacttagcttatttaatcccatcatattgatccttatttccaattacagctttagtggctgaaatcaaggagttgaaagagaagaaccagaaagaggatgacgttcttgtggctagtgttgctggtcacagacaacccttagctccacacctcaactatgaatatttgg

SEQ ID NO: 2963 - DNA, 625 bp, Gossypium hirsutum
ccaaattcattctgttaaaataataataatatttttagaattaaacactagatggaaaatagagttagaatgtaaaattacaaaagagatcactgtcaatgtaagtcaaaaacttagacagcatgccttaaatacaagtatctgctgataaaattaactgtgatatagacaagactgagaatttttacttcattgcaaaagctttgataaggtttatcttcttaacttttccatttggagcttcgaattataccaactctacctaattaggcgaagtatttacatttagatttgaaattaggctaagtattttgaaaaaatcaagcttaattaagttttaacttcatcatgatcatgacataagatataatggactcgtgaaaagatgacaaagcagattctttactacactttctgtcgagtaatccatcaacggtagaacagttcatcgagacatggaaaatatcaattaataagtaatggacaggtgacatttgttcttacagaagaaagcataacatacccggttcataatatcagcattagggttccaattgttaaaatctcctatcagtgctgctgactgaaaaagaaaatgcaatacaataatcacgacaattgagaa

SEQ ID NO: 2964 - DNA, 650 bp, Gossypium hirsutum
cataaggtattgtaaagtatttctgggaaataaatcaaatatccaccaatgccgctcttctacattcaactttaatgtcaccatctcctatgagttagatgcagttcctaaagtgtgatgaaaactattaactctatgtgttaggtagctaatgagatattaacaaattcattttcagggtaaaacatcactcagaactgctgcccactagattattgaaactaaaacatttattgaagacttctacttgagaaatacaaccaatagcgtgcatggaatccatcaattcagttttcttgaagtatccatgtccgataccatgttctaacgcatatccaaacaagggtatagaatatgaccttccaaggatccttaaaatatatggagggaaaaaaacaaacataataaaaagtagaactcttctagcatcaaatatgtcatcagtttctctagagaaaacctgcaataccagttatacactagaagcaggtttgattgatcaatttccatagaaaccaccccaaaataagctttaaacctcattctcaatgtgaaaaacaattttatttgcagcacaaattatatatgattaatacaaatggttcattttgatatgcaaaataatcctcattcaccatcaacagccactg

SEQ ID NO: 2965 - DNA, 621 bp, Gossypium hirsutum
  misc_feature (56)..(57): n is a, c, g, or t
tttgttacctgagattcattgttgcgaaccggcagaaggcggaaacaaactaaacnntatatcttgggggtgacaacctggtcaaatgaattaaaacatgtgatccatcactaacgttgcttttttgtttcatattaattaaccaacttttgcatggaaaatgaaaaatcaatgacataaactcactacgctgaaggacaaggcttatattaaacatgcaaaaagagaaaaaaggacaccaagatatcatgccaaaataaacttaaaactagtttctaatttcagcattatatacagggttatcagatcagattggcagtttccagaaagcattgggaagcattttgtcagtctcagtcagactaatagcatcactagacatctgagctcacattgtcagcctaattataatattcatgagcttcgtgtctaatgaagaggcaataatttgcaagcatcaacaattgtgaacagagccatctgtacatccagttaaccaattctttagggtgattttattttcagtatctgctcattattaatattatgaagatctatctttaaaaataggggatagagccatgctacaaagcacatgctttgacacgctggtttagataa

SEQ ID NO: 2966 - DNA, 577 bp, Gossypium hirsutum
gcttttgatgtaatcttaaatttggaacgccgtaagagatatgagtaagttgttccttctatgttccttgattttatattcccagtatgcaagtttggtttctcaactaatgatcttcacaggtgggatatgttgactgctgacttggagctgatagattcttatgatggacactatgatgttgtctatggaacatatgatccaaaatatcttactcggtaagttttgcagaagggactactactttctgaagcaccattttcccacaatgtgtagtgcacatgtagtaaccatatcaagtgtactttatcaagcaaatccagagtttgtacatatgattgatttgatgtatcctcaatttttttcttttcctctaaaacagatagtgataattaagatttaaatgatatttagttttctttttataacagtcagtggtaattagaggttgaacaatattaacttcctcatttaatcatcaactaatcaaattggcatgaatcttgtctcttctgtcattggcttgcatttatttgtcatattgcatgttttctagatggcaatccaagagagattt

SEQ ID NO: 2967 - DNA, 620 bp, Gossypium hirsutum
ctatgtttgttcctttgcatccatttgttggtatgtatgtgctacatactcttttacctttgattcaaatgcgtagattactgtatattggaagcattttaaaactcattaagcattgatcaatacagaccttaatgaacaagaagttgaacaaattgactctgatgcatcgccagcagaacgagttcaacgggcaatgaattgtcttcctttgaccttagagaagtcagtagatgattcaaattccagcagcttccgacgctggacaatagcggattattcaagagcctatagttctggagaaataactccccggaaggcatcattcttggctatttagtttatgacatatagttgatttcccatttacatgaatgattacatttccacctgaaagaatttgaggctttctagatatttgatacagttaacttttagtttatcatggtcatgaaaatcgatttttgatattacaggttgcggagcaatttataaatgccgtgcatgaatcttcccgtgctgctttgccaatgtccttcttcattaactatgatgctgaagatatcctgaaacaagctacagaatcaactcttcggtacgaaagaggtaactgtttagcg

SEQ ID NO: 2968 - DNA, 617 bp, Gossypium hirsutum
cccctgaactattaaaatatgtctaatgtggaacttgattaaaaaatgcatagttaggtacctaactttcaatttgtacatcaatctccccatggccttacactgttaacaaaatgtcaataatgtactagccagccaacaaaaatttgacgtgcaaatattgcacacgcggataacatgggactgcctcataatattgacaagcagcagatagcattaaaatttggagaaaaggaaagaagagaaaatcaaacttctgagaaattccaaaaaagaaattatttcctttttcataaatattaagatttgattatggaaaaataaagaatataaaattttacctttttggaagtacaaaatcataatttaaaaacaacttattttaagtaatttttcacaattttaaaattttattgattgatttattgcaatatctgcatgtgtcaaaatcttattgattgattgccaagccatttaatggtgttaggccattgagcagattgatacatggattggaagttgaggaaagtaccgtatcaaacattttctaattccaagtaccatcttagacagtatctaaccagccaggggccaggccatacaagacattatcccat

SEQ ID NO: 2969 - DNA, 613 bp, Gossypium hirsutum
tagggtaccactttacttctcatcaaagatgaaacttatagcattttttttcaaatgattctcaaaaataagttcatcgcaaaatatttctgtatgatgttttagtacatttctgcatttctgcattttcatagaaaacaaaaaaagaagtctagttacagacggacaatacataatgagatcaaaatgtagctaattcaacaagttgtctataggaacgaaatggcaacttaagctgtgctcaagattatctgaaatcaatcttctctatattgtttatgtagctcaaatatgcctataagaatgttaagtgttcccttaacacttaggtcttgctccctaatcataaaatagaccattatactgatgttatcacttaggaggaggattattcatgaagctctcgattgaaaaaattatgcataattattttaacagaaactttggactataaagtgtcatgatataatgtcataatatttaaggaattcaaagtgtcatacattgataagcctcactgcagtgtcagcaccaattacaaaagcactacccggaaaaagttcagctttcttatagaaataaggctgattggaaattattactggccttcctg

SEQ ID NO: 2970 - DNA, 634 bp, Gossypium hirsutum
  misc_feature (465)..(466): n is a, c, g, or t
  misc_feature (479)..(479): n is a, c, g, or t
  misc_feature (487)..(490): n is a, c, g, or t
  misc_feature (512)..(512): n is a, c, g, or t
  misc_feature (552)..(552): n is a, c, g, or t
  misc_feature (609)..(618): n is a, c, g, or t
cgatggggtagtctcttgaccaggactatcaggagctcttaatgaatgaccttgttgtggcccaccctgctttcctgcaaaggcgttgtcaggctctggagggggacgagcatccttacttaagcgtgccagcctagccttccggttgttgagcctgatggcagtaaaataattagtaccaatagcttatgaaaatgtgcaaaataactgttaatcaacttaatctattgactaataaaaacgaattataccaatctctgtttttgaagcaacacaatatgtgtttcttaccgtataactcttaacataccacttgctacttactttctgaatttctgttttttccccacattcttttttttgaatttctgttatttcccctcttattttcttataactttcaagaactcttggcatgaaaaaaaaaaaaataggtgacttccttaccagttccatcacctgtgnncgtgtaacccctnacccctgnnnnactgaaaaaatgtaaccttttnaccctggaaaacaaaaaaaacttgttatttaaaatgaatnaccaaaatttttttacatcaaaaaaaaatgtttttaaccactttatgtattgaagannnnnnnnnntcagcccatgattgta

SEQ ID NO: 2971 - DNA, 564 bp, Gossypium hirsutum
aaagcaactcaaagactaagagagcatctagaagtaagccctttaagagctctcattttctatatgtattgcctcagattcaacctcattgacaagtacatgcacttgcagatgccgtggcggttcgtaattatcaagagaaaggaatgcttcttccttttacaccactatcagtttccttcgagaacatcacgtattcggttgatatgccaaaggtaattaatcaacatacaatgcttgagatgttcttgaaatcctatcacatgacatgaagttaccatttttttagggaatgagatcccaaggcgtgttggatgacagattggtgcttttaaatcaagtgagtggagcattcagaccaggtgttttaacagctttaatgggtgttagtggagctggtaagactacactgcttgatgtgttagcagggaggaaaaacagtggatatacagaaggaaacatcactgtttcaggctatcaaaagaaacaagatacttttgctcgagttaccggttattgcgaacaaaacgacattcattctcctcttgtaactgtcgacgaatc

SEQ ID NO: 2972 - DNA, 571 bp, Gossypium hirsutum
atcaactttaatcatcagaaaatattgaaaattcccttatcatttaatgtctgcaagaaatctgacaaaaggcttcagctatttcactaaattattagatggttgcataacgcttctttttacaacatcaaaggcagagaggtatgcacataaagctaataatatggacaatagcgagaaaagctagtgctaacagcgacaaaactcgtaataactaaagaaaagcttcacttattaaaaaactttgattcattcactcacatttccctttgccagagaagcaacaacttttgacgaagttacatcccaaatcctacaaaggccacttcccagtgagacaagaaattttccatcacagctgcaatacaaacagtcaagatgtcagcaacaagttgattactaaggagatgaagtttcctctgctttgacaacccttccctttaaagcttaagcatggcaaacgaggtttgcaggttcagaaatatgtatatatatttgttaatataacaggcacaaacctaaaatccaagttcttaacagaagaatgagcctgggcttcgttgagaactat

SEQ ID NO: 2973 - DNA, 671 bp, Gossypium hirsutum
attgttgtctttcattacttcttacctcaaagtatctgataagatatttagaatggtgtcctagtggccccacatagatctcctgtcctccacgtttcataaggaatagctacattgcagttttatattagttaggccatacataaatgaaaaaaggacagtataaaagatagatattatctatttttaatagttttatgcatataaggattttcattctcaattttaaaatttcaatttggaattgatttttttagaataaaaatgttgatgtgacataacactattaaaaaatagattgagatgatgtgatatcattatttcatataatccttccaaaaaaaacaaccaacaaaaaatgaagccactccttttgaaatttaactttttatgttcttcacctcgtcaaacgcttcaaatatgtcaatacttggttgatggatggtacacacaactgttcttccagtgtccactgtattcctaactgttctcataacaattgcagcagcccttgcatcaagccctgaagttggctcatccatgaaaatgatagaagggtttgccacaagctcaactgcaatcgtaagcctctttcgctgctctgttgataaaccgtttacaccgggtaaaccaactagggcatgccttaacgaatccagttcccacaagct

SEQ ID NO: 2974 - DNA, 569 bp, Gossypium hirsutum
tctaatttaaaataatagtttataaactaattatttttttataattatatattaatttaataaaccatttacaatttttttcacatattaaagtctttattaaaataagtttttcccaattgataattactttttttcaaattaaatattaagtagttgttgtgtttatatatgggttgatgcattccacttttttttatatttaattttttttaatatatctcacatctcacccttttaatcgtgtttgtagagtttttaaactttgctataaacatgtttttgttatgaacatattttttaaaacaaaaatttccaaattgattataagtagaaaaggaataaatttttaatgaatataagtcaaacacacacaaaacaaaaactatatttactttgacaataatcgaaatatgaagatataagtaaagataagaaataaaatgtgagaggaaaaaagtgttgatatgatattatatagataatcatgaatgtggtagtgatgaaatatttgggtaataacaaggatatgcattttgtaaccattgataggctttgacatagtgaaa

SEQ ID NO: 2975 - DNA, 625 bp, Gossypium hirsutum
catattgtagaaagtagtatagaaatcaacatggtaaattatgtgtaaacagcaaataatcattgattgagaacacatttacaaaattcccaaagatgcataaacatccaacagaatcgcaaagcttataaacaaagttacactaagaatcaagaattttttggcagatcttcatctaaatacaataaaaggtttacctaatcaaataagtgatatcatcacattcatccttttgcaggtctctgatggcattcatagacacctctagaattcaaatgttatacacaaagatcatgaatcctatgataagatgctgcctttggaagataagaggcttgcacgaaaagtacccagaagaacctaaggcattgcctactatctttttcctacagtgaccaacaagaagaggggataccctgtttctgaaaccattcaggcatgcggaacctatcataaagaactggtctcacatctttttcctgagaaaggtgcttgagaagtggaaggagaacaccgagaagcttttcaacataaaccagatttagaagtagtaagtaaacaaacatcaaagacaaactgatatcatataagggtaacagatttagcttaatgcaaatcgtgacgg

SEQ ID NO: 2976 - DNA, 643 bp, Gossypium hirsutum
  misc_feature (586)..(587): n is a, c, g, or t
tagctttgggttataagaatgctttgaaagctgaggaatggaatttttattatacttttgagtgtcatgtatttactggaaaagcataggagttttatgaacctgaattttagatagcagtataagggtgctcagatatgcagaccaactctgaacactagaaatacatggtgagcattttgttctttgggtcatttaaatacttgtatagattgtgcctactgtatgcgtaatgaattatttcctcttaatgtaagtaatgagaccgcctagtgctacaagtatgttattgtattaagcttcttccttttatcccttgaatgtacacgtacatattcgctattacattaccctacatgttatttatcatcagcttatgatctgttctgttgtagtctaaccattttatctttaccttaattctttggtagttgttacagctcttgctagaacaagctgtgtttcacgttaaaacagctacgtccatagcattctaatggaactattttaccacaaccacgccctcgggagcttctcgttatttacttaataatgttttgtttggttattaaatgttcttctagtnnagattactgctgtggcgtgaaatttgccgtcagctaagctccaacttaagcgatgc

SEQ ID NO: 2977 - DNA, 622 bp, Gossypium hirsutum
cacttgaagttaatgttgatactcgaccgttctagtttgtttcaagttaactagttcacttaaagggttactgtgtagtgatgggccaaacctcaaagtgcagcattccttgaatatctcccatatgagatccgtttcctcctggtccatttgatggtaccataattgcgcctcaccctacatgtcaaaagtcgcaaacttaccttttctatttccactatccgctgattggaaaagaatttcttgcatcggtgtagccaaattaacagattctcctacccatcaaaggttggaaaattaagctttatttagcctgataacactccagatcctattggcattcaattgaatgttctgtaatggttactgctgcccatactccgtcggacgtttttttcctccctgcaattctagttgaaatcagcaagaagttcctacaattgtagcaacagtagtagcaactgattccccattttttttacctgatttgtgtgacacttgttgccatttgtgactcagcttctaccattgttgtttcgtgtttggctttgataccaatttgttatgttcatgggctatggattgagtgaccgtgcatctctcgggaaaacttgcttcgatg

SEQ ID NO: 2978 - DNA, 576 bp, Gossypium hirsutum
  misc_feature (569)..(569): n is a, c, g, or t
  misc_feature (571)..(573): n is a, c, g, or t
tccatggctttctagtgctagaatcatctccaagcatcctcaatttcagtgagtatctatctcttgcacaacacaaatctattctatgcctctccacagaatttatgtcctctttaataaagtgaagatctgtttgtacctacagaaagggaaaagaatattttttttattaaaagaaaattggatcaaaatacttttcaaccagtgtagttatttgcaccaatatgtgcacagaactgttaaactaagattagaggaaactaattgctgaagcaagggaatatcatagagctactgaggaacaaatgccacatctgatgcaacatataagaaaaagacatccagcaatgatcagtccaactgaagaaaaaattgggtgtattaatggaacaaaaattagctaaccaaaataaatagtggtttaacgtacacgagaaccaacctcattcagttcattaactttttgcttctgtaagtgattcaagaaatccagcagtatttgcatatttctctcagcttcatcttgttccatttttctcttcttctctgcaaggagggacagaaggttntnnnagt

SEQ ID NO: 2979 - DNA, 592 bp, Gossypium hirsutum
atttgatgagtcagtcttaagattgttgcacaagtgttagtaaaataatagtaatataaaactttttatatcaatcacaaggtcaaacaagagcaatattaatacatatatataactggaaaaacaaaaaaaaattaaattcaaatactatactcgtggttgaggcctgtttagatagtctccttaagatagattaggccgctcctctgggtgctggagaaacgtcggtcagttgtctcttaggatacaacaacaagatgaacacaacaatagcacggctgcaatgatcaacgaacaatgggcttgcttttgtctatcaccggaaaacagattgaataatatgcagggaatgatatcatgaaaaagttggaaaatatttcagtgtgtatcttctctgtcagattatttggcttttaaaataaattcaaagggagaatttttttgaaatatttgactaattgagccaaaacatgtccgtgaatcaaggagaatttaaaccttaaataaaggcattaactccttttgattccaaaaaaaagataagctctgttgagaaaaattaaggatacatattgggataaaatatccgtaa

SEQ ID NO: 2980 - DNA, 571 bp, Gossypium hirsutum
  misc_feature (510)..(510): n is a, c, g, or t
  misc_feature (512)..(512): n is a, c, g, or t
  misc_feature (556)..(558): n is a, c, g, or t
  misc_feature (563)..(566): n is a, c, g, or t
cggagagacgcatgtttgagtgatagaaattcggataattaataatttattactacatttttatatgcaacccaaaatctttatatatttttatcaatttggtcattatttttgtttttaaagttaatttgatcattaatctttaaaaaagaattaattttttaaaaaatagaaatgctaaccaaaaacattaatattttaacaagacttaatccacaaattaatacctaaaatatgtcctttttccatcttgttagctaaactttttttttgttacaagtagtacttaaactacattttctccccaagttgatagcaaaccattgagtctatttaaaaaaaaaaaacttaactcacaaattagtatctaaacaatactttttttatcaagttaaaacctatttttttttggtcacaagtgatacttaaactattattcctttacccattttacacaaaaatgttatatttgctaaaaaaaattcagccaataataggctgtcacaacananaaactttaaaaaatatttttagttcttttattttattttacatnnntcccnnnnattta

SEQ ID NO: 2981 - DNA, 631 bp, Gossypium hirsutum
tctgattctttactgttttgatgatcaatgaattctgattctttctggcaaaagaaaatcaacttaaattttaattctgaatcttgatattttatgtcgatattcagtactcccatttgcggagataaattagaatacaatgcaaaatttgaaggaaataaaagaatacgatgataaattggaattttgttatgataatataacagatttccacggaggggatgaaatctgttaggtgggccgccccatcatccgttgggcatctaaacctcggttgtaataagaaaaggattacagggacagtctagacaattgacttgcctcagaaacaagcgcattacgcaccatgcatacgataatactttctaatacgttgcaattttggcgtttccagttccaagaagcccacaacaagacatagatttcccttttcccgcttcttttccacatttgcagaaatttactcgaaaactgaccatttttccccctctcaccctacgagtattactctgccagtccacttttctcttcgcttctttcaactgtcgttcaaagtcgccgagcaaaatcgaaaatccagtgcactgtaattatccgctgaaaagtgagccgttagaattacttctctctc

SEQ ID NO: 2982 - DNA, 598 bp, Gossypium hirsutum
cgattcagctgttgctggtggtgttgaggatatgtatggtgaggatattgccaccatgggtcagcctgttaccccttggaccgtctctgttgctaggtgatgctctatgttttataatataatattcagtttgaattacttgttataatttgttgttcaatgttcatacattaattatagatctaaagaaatctaaatgttgttcatctgaatactaaatagttgaaagatcatagctttatcgatctttgcagatgatgacaaaagttaaatcttctactatatttctcattattggtatattttctacaggattgcaaattgcatcatacaatttgggagcttaataaaattttcataaatttttggattttaatgagagttctttaaaaaattttggggttctagttaaaatttttgtaagatcaatgagaatttttcaaaaattttggggtttaattaatattttctaaaaatttcaagagaaaaataaaaaaatttcagaattttcttttggagggggaaggcggcctaggccaccataatggtccgcctctggcatcgtatatgacgtatagaacacaatatctgtcattgt

SEQ ID NO: 2983 - DNA, 640 bp, Gossypium hirsutum
aaagtgggaaaataccacaagattggatttcacgtaagtaggacacctaggtgattagaatttggggttgtattctgatatgaaaacttgaggaaatggagataataaataaagaataaatatttacatgtaaagcaatccccttgcttcaacctaggtttccttagaagtaacaaccaaaggtcaattgcatcatacacagaaaagattcttggaattcaccgataataactccctccctccctctatctctgcatgcagacacagataaagacacacacacacacacaaatgcacacaaatacatatatccatttctagtcccctaagaacaagcagtatgagtccaacaaggacttagacacattctacaagtttgaggagggaacgagcaaacttaaacaacacgatattttgcatttgatcgagaaacatgcaaacatgcagaattggtagtcaaataccaatatctagactctttaagaactagcgctccttggacagttcagtaatcaagaaacatgcaaaattgtcatagtgttggcataaatgcaaacatagattgggatgtggcaaaatatcaaatcaccaaagaaaaacattcttatcagattatttacagtgatgcttgagacagttc

SEQ ID NO: 2984 - DNA, 622 bp, Gossypium hirsutum
ctttgagaatttggatttcatttatcatataaatggtaagaatgaaatgcatatcttatggacaaattagttgagattcaatataatatatatttaaaaaggcataaaaacaaggatttgtcaactccaaaaatattttaagaacttcaagttcattaccaaatagacatctaacaaatccatggatttgagaaattatcatgaatgttacatttctaaatagtttactactcaatttacactatttttgaaatccacatccaaattctaaaatcctagctcccaaacgctaccttagaaaattggtacaatttaagcacatcatataaataacaatagcaattgacaggacatttctaaaatttcaaggagttccatcaacaagctaaatagagcataaattttatcattttttagaacagttcagcatcttgtttagaatgtagtaaaccatagaactggttgctacataaattatgaaattccatgagaaactatgcctttcctttctgtctagtaccagcatgcataaatgtgagcaaacaacaaatatacaggttaatatccccaacataaatacaaggtagatttgacaaaccttctggcactccttgacctatta

SEQ ID NO: 2985 - DNA, 512 bp, Gossypium hirsutum
  misc_feature (374)..(374): n is a, c, g, or t
  misc_feature (378)..(378): n is a, c, g, or t
  misc_feature (397)..(397): n is a, c, g, or t
  misc_feature (400)..(400): n is a, c, g, or t
  misc_feature (412)..(412): n is a, c, g, or t
gatcagaacttcatcagaaacagggaatgactcaccatatctgaaacagtatgattatatgagagcaatgtcagacattaaaactctaactgaacactggaccagtagagtggcaacgctcaatacataattcaatcacattttattaattcacttacaacaactcgttttcaaggaaaacaactggatcaggatctctaatagcagctttgaggagtccacgagcatcttcagaattatatggtgacaatactttcaacccaggacaagaagcataccatgctgcataacactggatattaaccaaaaagacaagtaattaaaacaagcttcttattatattaaaggccacttccccttctttaaaagggaanaaancaatgggaaatgagaaatnaancattttttaaantccttttgctcccctgaacgcactatcatggagagaggaaaggtgtgtaggtgaccgtcccagagcccgtgtcatagtgggaatccattcctgagagagc

SEQ ID NO: 2986 - DNA, 883 bp, Gossypium hirsutum
  misc_feature (601)..(609): n is a, c, g, or t
  misc_feature (614)..(614): n is a, c, g, or t
  misc_feature (628)..(634): n is a, c, g, or t
  misc_feature (636)..(638): n is a, c, g, or t
  misc_feature (640)..(644): n is a, c, g, or t
  misc_feature (653)..(655): n is a, c, g, or t
  misc_feature (662)..(666): n is a, c, g, or t
  misc_feature (670)..(679): n is a, c, g, or t
  misc_feature (681)..(693): n is a, c, g, or t
  misc_feature (695)..(709): n is a, c, g, or t
  misc_feature (714)..(718): n is a, c, g, or t
  misc_feature (722)..(725): n is a, c, g, or t
  misc_feature (727)..(730): n is a, c, g, or t
  misc_feature (737)..(746): n is a, c, g, or t
  misc_feature (748)..(748): n is a, c, g, or t
  misc_feature (750)..(755): n is a, c, g, or t
  misc_feature (758)..(766): n is a, c, g, or t
  misc_feature (771)..(776): n is a, c, g, or t
  misc_feature (778)..(804): n is a, c, g, or t
  misc_feature (812)..(812): n is a, c, g, or t
  misc_feature (814)..(821): n is a, c, g, or t
  misc_feature (826)..(827): n is a, c, g, or t
  misc_feature (830)..(846): n is a, c, g, or t
  misc_feature (860)..(864): n is a, c, g, or t
  misc_feature (870)..(880): n is a, c, g, or t
tactgctgatgctacagttaagtgctcaacttgacctactttccttgcaatgcacgtgatctttcctaacagccaatttaatttctgaggttgattagtcttttgtgtttatgattttcatccctctaaactttatatgaatttctttggaagtgattaccatctgttttaaatgtttccattttcatttcatgccaggccaatccaacagatcccaggatgtttccctttatgttgcttggaaacaaaatagatattgatggtggtaatagtcgagtggtaagggtatatggtttttatatgaccaaattttcttttatcctcacaccttagcctaatgggtggcatcttgagcccatgtaggtctccgagaagaaagcaaaagattggtgtgcttcaaaaggaaacataccttactttgaaacatcagcaaaagaagatatcaatgttgatgctgcattactttctattgccaaatctgctctagcaaaagagcgcgagcaggacatgtaagtttaccttgaagcatattctttttttttttcagggaaattgggattaaaattaatttttttcccaccagggggtggtgggcccaaannnnnnnnnttttngaaaaaaccatttnnnnnnngnnncnnnnnaagtggttnnnttgggcnnnnnttcnnnnnnnnnnannnnnnnnnnnnntnnnnnnnnnnnnnnnttttnnnnngggnnnnannnnctttttnnnnnnnnnnantnnnnnnccnnnnnnnnnaaaannnnnnannnnnnnnnnnnnnnnnnnnnnnnnnnttttttanannnnnnnngtttnntannnnnnnnnnnnnnnnngagcatcccacctnnnnncttggnnnnnnnnnnnttt

SEQ ID NO: 2987 - DNA, 667 bp, Gossypium hirsutum
gggttttgaaacagatgattcctttagctcagcttcatcgatcttggaaaattgcagcctggcagcatcaacggtggtttccactattgttccagagcagaaaacttaccagatagacaacgatagtgaccatccggaaataccttcctcaccagcttcggaaactgatagtacaagcagctatgcaaccggtgcttcaagccttgtaggggtttctttcttggaatgcctttttccactgcttccacctaatgctggattccttgaaaaggtcaggttccctgacgaggagcctcaaacagctcaaaacaatttcgatcgtgagagtaataacactgtaatcataaggaagccaccaacacttggagagttgataatgatgagcagaaggagaagttatcaaagaaaagctgctcaaataagagagaagaatatatctatggtaattctagccattacttattgtctaaaactctaaaacagaactgttctttcattataaaggaaaaaaggagcaaaatttatgcatttcttttgtccaaataccacataatcactttttgtcaatagtttagaaataaagaagttgtaattctaactagctgctaacttgctaaagatctgcaaattgacattctactcttgcctgaatgaaacactaatgaca

SEQ ID NO: 2988 - DNA, 629 bp, Gossypium hirsutum
agcatcattgagtccagggagtgattttgctgtaaaaaagatcaatgtagcaaagcataaaggaggaaaccgaagcatggttcgagagatcgaaactattgggaaagttaagcatcgaaacctggtgagattagaagatttttggttgagaaaagattatggattactcttatacaggtacatgcaaaatgggagcctacatgatgttttacataataataatgatcatacaacaaatgaggcacaaatcctgaaatggagtgctcggtatagaatagcactaggaacggctcatgggttggaatatctccattatgattgtgatcccggtatagttcatcgagacatcaagccggaaaacatcctcctcgactccgatatggaaccgcatatctccgattttggaagtgctaagctcctcgacgagtctgtggcttcagaaccgtcgatggtagttgcgggcacggttggatatatagctccaggtatgcatagtaactttgaccttgattcaatttcattaaaagtgttgattgcaccaaacattctcaaactattgtttagattataaattggtccttaaacttaaaatgttttaattgcattaaatgtgaatttgggtttaacat

SEQ ID NO: 2989 - DNA, 560 bp, Gossypium hirsutum
  misc_feature (196)..(196): n is a, c, g, or t
cgtttcattctgacctgaaaatattacagaagaaatggcttgtaatcagtggcattacacagattccaatgcaccacaacaagctcattgataatgtccaaaacagcaagttgtaaagattaagaatcgatttctctaattatatatgaaattcaattatagaaacaaattcagcaccagaaagggaaaaatagtntcaagagttgggggagagcatatgtcggttttggttcactcagttttctccattaaattggtttgtctcgattatgatggttctccgtcagtcagttatcgtttattaaaattcataactgaactaaccgacttaatacatattaattattttaaatatatgataaaaaataaaaaaggaattaaaaaaagtcggttaactgacttaaccaaccgatgttaagtctatttggttatagtagcaggatggtcactttaactaaaagtataaaaaacagactgaatatataggcatcatttcaaacttcattacaataacacagccatatagctagaacagaacatgtttcctaccaagcaaacta

SEQ ID NO: 2990 - DNA, 630 bp, Gossypium hirsutum
cgtactgataattccagttgagcatatgccaaatactctttctctaccagcagatagtgaaactgaacttggcaaattccagaacagtctgaagttgtattataaaaaccagggaaaagaagcagtgttctttgaatggatatcaatacgtggcacccatgccaaccttcaggtaaaagagatttctcatggaggtagactttacaaagtcaaagaacagaattgctcagtacagctttacctgattataaagtctctaatcttaagtatatattatattgtggaacatggcaaacacttgcagataaagtattgttgccactcccaaactaaataagcaattgccttaatcatttttagttattcaagagtaaatttataagttacacataaagcataaggttacatggtttctctccataattgtttccttgttgttgacttttctttatagttaagtatatgttttgacatctaattgtatattctgttccttttgcataggctgtacctgttccatcatccaaagcagctgttcttaaagacatttttactttggcagctgaaaagttgggttttgaatttgttacaaaaaaatgtaagtttatcacatttgagtgagtggtgcaa

SEQ ID NO: 2991 - DNA, 637 bp, Gossypium hirsutum
tcactcagagcttccttggcttgaaccaggagtcaatctgttgcctactctcaaaggcttccttgacaagcaaagagttaagagactttagattttggatcttctccttaggatcttccatggaagattggcggctcaaagggttggaagctttagaaaaggttgaatctttggcagtatcatggatttcctgagacgggtttcgttgtttggggtcattgggccgatgggtaactttctttttcaccatttttgggagtattgagatgagatttggacttcgaaggctagggtttttatggtggtgcagaaatgagatatggtggtgatagactgataaaatagtacataagaagaaaaaaaggagggatttttgaaggcagagtaaggctagttttgagatttaaattttgggcccaaatttcaaggtgtttgtgaggaaattaaaaaagttaataaaatatttatgagatttagggtttcgtcaacatgtgggtgctctttaaagcttccgcaacaccttaatattttatttgatatatttgttttaacttcaatattaaatttagggtgagtttggatggacggtgcgtttacctgcggttagtgtaaaaatagcggtggcggtaaaattata

SEQ ID NO: 2992 - DNA, 610 bp, Gossypium hirsutum
tacgtttggcagccacatccttcaatccttcttttaactttgcttcgtgatatttcttttcctccaatgtactaaccagtctgtctaggaatctgaaacttaaaacaacaaagttggtttgttgtatataattatagctcactatcaatatttatccccaaaaaagaaaactttctaaagctggaaatacgaagcaatacacaaaaaggttggctaatgagggcagagatgtagttaaagcaaagacctgaagagggcaacccaaatctacataacacttttgagacggagactgataataggacaaaatgctaaggcatttaagagaaacctgaaaagcatgatcatatctccaataactatcattctgcaaactattctgtaatctgataatgtatccttgtgatgctcgaacaaaacatagctgccattttatggcttgattgaaaccagtagtggaattgacattaatctgtaccaatctatcaatttactacaacattttgcgatttccctatcgtgagattgaagattagtaatctaaaacttcttcaaagcagaaaggaatatcactattcactagcaacattactattatcgcgtaattgtt

SEQ ID NO: 2993 - DNA, 606 bp, Gossypium hirsutum
gggaataaatgcgtaatcaatctttgcagataaattatagcaaaaaaaaatcacttgtagaactaatgcaaaaaacaggaatctaaccttattggcaatgaccccagaaccacaccactacagttgagagcagcaattgcactttcagcctgcaagtgaataatagaatattacagattcattcattcatgaacagtcaagcaacccattctcaagatggtccaaaagcagctacatatcactttatttgaaaactaggacatcgtctctgataagccaacatcggtttactaaccaaagagggcagacaatcgagaaataattcacaaaatcacttgccatcccaatccaaaccacttcaaataattccttttcaagtaacaaacacatcatattttgataataagtattcctttgcttctaatgcaaggcaaagctacagtaattagcaagttgctactatacaaatgaaacattttgtaatttaacaagcaaaaatgcaatgctatggaaatgcaaatacctagaatactctagaatataactaaatactagtatttgaggtaccctctggatttcaatcagcacaaactaaaccaaagttcc

SEQ ID NO: 2994 - DNA, 603 bp, Gossypium hirsutum
agaagaactgtattcagtgccttgagactttaggtgaatatgttgaagtcctcgggcctgtactgcacgaaaagggcgtagatgtctgtctagccctgttgcaacgaagttccaagattgaagaagcatcaaaggctacttctctcttacctgatgtgatgaagctgatttgcgctttagcagcccatcggaagtttgctgcattgtttgttgatcggggtggcatgcaaaaactgctcgctgttccaagagtggctcaaaattgttttggtctttcttcttgcttatttaccataggttccctacaggtagtacatgtaaacttgaattttgcaatttatgacatcttatttagatatcagttgagtatacattacaatgtaagggaccactaacatattttcttaatgttcctctagggaataatggaacgtgtctgtgcacttccttctgatgttgttcaccaagtggttgagctagctatccaacttcttgaatgtccgcaggatcaagttaggaaaaatgcagcactattttttgctgctgcatttgtcttcagagcggtgcttgatgcttttgatgctcaggatggcttgcagaaat

SEQ ID NO: 2995 - DNA, 596 bp, Gossypium hirsutum
ttaaatcctggagattttcatgaatgaacagtgatgttagttgctctgctcggcgattttcgtcggagcggtttttgtcatctcttttacctgttttgcttgatctttcaccttgtgagtcccattgctgttgctgttctgtccactgacctggatcttgcttttgaccatatttgcagtagtggatcgttgcacttcgttacctaagctgtggcggtgagttcgggagcaagcttttgccttttcaacttgagtggcagggactaagtcaccacagctcattctccgggtaagatttggtgactttggccgagtcagtggcagctgaaatgaagtgaaagtaagaatgaaagatgcatgaaacatataaaagctttcaaacaaaaaggtactaaagccgaaattcaattccttttcacttcaaggatacgccgagaagcatggacagaagattcaaaagaataccttcttgagttcgacctttggtggaggtccttcgtagtagaaactaggtactggatttgctttgacaaccatgctctttctaagctccttgagggcttctgcttgctcttcctgcaagaaagcatggagag

SEQ ID NO: 2996 - DNA, 450 bp, Gossypium hirsutum
cgctgctctaattgtgtccagctcaaccacaacaatatgatttgagctgtcaccgttgtttgattgattgaaaagaccaagatactggctgggaagagctccaggaattctattattaggcgagattaaaaaggctaatccatggccagacaaagtagggtattcctccggtacaattgcaaaaaagaatgtggtcgaaaaagagaaaacactaccatttgtggagttcttgaattggattggattcttgtagaagatgtgacctgttgattggattgtagaattagtcagttttaagagcccacttgaatctacgcctgcaactccatcaacattcaagtaaccattgaaactgaactgaccctgattgatatctgaagatgcaaggttcaggaggaaaagcaacacaagcatgatcaagcaagacatcattacacacacaaaaaaaaa

SEQ ID NO: 2997 - DNA, 565 bp, Gossypium hirsutum
atataatttttctgtctttgttttttagttactaagttgaaatgttaattgttctgatttatattggaatcaaattcaataattttcaagtcttccgatttaagtgagcctaattgctcatttgattatcctatctttgctgtggctcacttccattgctctctccctccactgatccctgcctcaagtttctttttttcaattaactacttgctagtggaatacaggcttagatagtttacggactcaaccttactgggttaacttgctttcaagaccggttatagcttagagtgctggctggttgcttagaacctacctgactctctgctttgaatatcctcatgttggaaatggattttgaaatgttaaatagttttgttttatgtatggcaaatgactggatataaaatagtgagggctctccctccctccctcgcgctctctctctctaattttgttttatggtttgaagaatgaccattatttgtaaataaagttgccttagcaacttttttagtctataggctgtagcttgtgtctatgttacttagacttgggtgtg

SEQ ID NO: 2998 - DNA, 620 bp, Gossypium hirsutum
aaaaatagtttcattcaaaaaccactgcaaccacacaatggcgaaaaaagccataaaccaaattttgctacatttatcggcaggtaaatatattgccaagcaatgaagaaagatagtggatccttcagtaagaatgatgccaaatttttaacacaggtgaagaataggtggtgaattggttccaactccaaaccacacaaacatcaagtggcaaaatcagagggaacaatacctcatttggccaactcagtcttcgtagggaacctgcacctaatgagttgccagaaatacttcgaccttcaggggagcaatgagacaaacatgcttccaaccagtttccctaacctcgacatgggtgaaaaaaagcacaaaaaagatatccagtatactatccgctagtagaagcactcaaataacataatcagcaataggagggctaggaggtagattgttgagagtttattggaaagcattcagtttgctcaagttcctaatcaaaatgatttcttctcaaaattacattccaactccacttactattgatgacagttccaaaatcagacaacttaccctccttttaacaacaaaagcataaacccggggaaaacactcattgagag

SEQ ID NO: 2999 - DNA, 760 bp, Gossypium hirsutum
  misc_feature (650)..(653): n is a, c, g, or t
  misc_feature (655)..(658): n is a, c, g, or t
  misc_feature (674)..(674): n is a, c, g, or t
  misc_feature (679)..(680): n is a, c, g, or t
  misc_feature (718)..(720): n is a, c, g, or t
  misc_feature (732)..(733): n is a, c, g, or t
  misc_feature (735)..(744): n is a, c, g, or t
  misc_feature (746)..(747): n is a, c, g, or t
ctttcttctaatctgatgtaaatgtggatgttttggcatccattttgatatactctagaattatattagtaacttccattttgttttctttcttaactttttagtcagtttcattgaacctttatctgttgacataggttgttgcatgtccatgtgccctgggtttagccacccctacagctatgctggtaatccttgtttcaccattttacaccatgttagactagtgacatagttgaagttatagttgatattgttttattgcctatatttggtattttcaggtcggaacttcattaggggcaacaagaggattgcttttgcgtggtggaaatattttagagaaattttctatggtgaatgtaattatatttgacaaaacgggaacccttactattggcagacctgttgtgacaaaggttgtaactccaagtggcatggatcatagtgattccaggttgagtggtttctgaaactttaacattaaatggctcatattgaactttctggagtagaactatcagtgatcgagtgtatttaatctaaaactatctttacgtaaatttttgtctcttttttcttcatgaactgcctatgttgctatccaaatatatattttcttgtggactgattcttattctgctcatgannnngnnnngaaaaaagagacaatntttanntaaagatagttttagattaaatacactcgaataatgannnttctactccagnnannnnnnnnnnannatttaatgttaaa

SEQ ID NO: 3000 - DNA, 608 bp, Gossypium hirsutum
caaactgcccttcgcttcactgtattattaatggataggtgactcatcagctaactactccattacaatttagaacataattttgcagcacataacagaaaaaaggacatacctgatagcaaaatgttctgcttgctgatcagtgagagatgtagactggacactaactgaagctgcattgccaaatttgaaatccaaaggatttccaccctgacagcaatgtgttttattgtgaatattgatcaataagaaataagaaatagcaacaggagataaaatgcatactttctcaaggaactccagttctcttcttctttcctcgcgaacatcatactcctgcctgttatagacaagtaaaaatgataattaaaatggaatatttgcatgttgctagagatgtgaaccaagtgcacttttcaagataactaaaagaatttgtttaagcaatggactgcaagtataacctaagctctgcttgagccttctcaatagctactctgcgcggagaggtcttgacaccaatcccaactccaccatcaacaacacctcccatggaatcaacctcagcatttactaagagagcagagcctgagttacatccatgcatc

SEQ ID NO: 3001 - DNA, 617 bp, Gossypium hirsutum
atgctaattatatggtaagcatgttcagttgcactctttggtttgacccatagctcctttaaagatatatctctttcatgaatctgtatcttggtttatcaaagaggctaacagttctgaaactatgcagtattttgtctttcaagtattactgttattaagtaagcattttgtttctattctgtttacctttgagaagcttagtcattagaaaaaggcgccttgatgtggaccttagtagattttataatgttctttagtagttttggcatccatgcaaattgccttttaggtttttatgtccctgctttcttgttgccaaaattttttcaatataataagtacttatgttgctcgggcttggatatgaataccggattttggcatgtcaaatgtgttaactccactcgtcaattgccatgaacttaagagatggacatatggaataaaagagtccaagataaggatatgtctgcaggcagctatgtaagagactagctggttatgatattttatcttttcataatttggaaatttaaccagtagcttgatttttgttggttcaacaccatgttacctggacttgtgatgtgaatctatgggaaacgggtatgtgt

SEQ ID NO: 3002 - DNA, 649 bp, Gossypium hirsutum
gggtaggaagctcttctttcactttgaatttccggaacggctcgttttcatccataacttcaatgaattagaacaacataaatcaaccggtaacataccttataaagaaagtaatcgagttcatcaagcttactaggttcaacttcttgttttatagtgtatcgtagtgtttcgtttgagaaacacggtccaccttcatctccgatactcgtaagctcaaccccattaaactgaatgcctttgtcttgagtagattgaaacgttgctcgtaaatcatgcaactcgttttcctgatgcaggcatgcagagatcttatatttcttcttctcgtgatctagactttcgtcgacatctttatcgaccaaaaagtacgaactagaacccgtaatctcagcaaaatcaccaggttctcgagaattattcgacagatagttgatctccgaagatttcagattatacacatgaacaccaaaatgcgaattcccttcgtatttaaagaccacgaagtacccgatgcagatggaatagtattcaacaaacgagttccaaccattatccagccatattcttttgttatcttccctcaattccactagccattgacaaccacccgggacggtgagcgtagcaaccgaagagagttcattac

SEQ ID NO: 3003 - DNA, 642 bp, Gossypium hirsutum
tggtagtcaggatttcctatggcacgagtaatatctttcaaggtaagtgcgctctctctctccctaggggtgagtgttcgattgaatcgagtcaaattgaataaaaaaattttagttaattgagttgacgagttctattttatcatcttaatttgatttgaaatttttttgaatcgagtctagtgaaatgaaatttgagtcgagtcgaatcgaatcaagtgaaattgttcaagttaaattaaaagaattaaacatgtcaaattaaaatcttgttacaaaataactacttccatgttagagacaattttgaaaacatatatatttgaaaacttttttaaagtaaaatcataaaaaaataacttatttaggtcccaaaataattattttagaaaatttttaaaattttaactttatatattctttagatatttttaaaagtttttaattttttttttaaaaatataaattttgaaattttataaatattttgaattattttgtagtttttgttgagagagactgatatgttattttcaaaattgataaggaccaaaaaagtatttataccaattcgttattcgaattatttaaattattcgagttattcgaattgtaaaattaaactcaactccaactcggaaa

SEQ ID NO: 3004 - DNA, 524 bp, Gossypium hirsutum
acttgtacattccttgttttaaatatgctctatctcataactaaattgacatttaatgtctaaattgatagttagattgatataatactaatactttaaggatgaaattagaacgttttaaaatttagagatcaaattagaatctagacaatagtttagggacatttagttaaattaatccaaaattagtttcttaccacattctctcgtagcattcatggaagtagagcataggcacatcatgacaccagtctcggtatcataaccacaagcaccgccggaccgagtacacctcccacaaccggtgtccggcacggcgtaagacaatttcatcccgtaaacccaatccgccggtccaatccccttcaaaccgtcaacattaataaaactagtataatgcgagcaatccaatatattcatgctcatatacttcaccgtatcgtaccccgtgaaacaacacggcggcgaactattagtaaacgaacggaacaccctaaaagcattacacccacccgtaagctcat

SEQ ID NO: 3005 - DNA, 291 bp, Gossypium hirsutum
gattgttatcatatgatataaagtgggtgaaaataatccaggcattaccttcttcgagactgacgttgaaggcctgaatactcctttatttttatacctaaatcaccaaaaaggttcagcaacatacaaaggcggtgagttgactcagtggatgaggtgaaaacaatacacttctcttctcctaattcttgaagaagggcaaccaaatacagtggcctcaggttcgattcacaaatctgtagaatacatagaaatttaataaaaccaggaaaaaaaaaaggcacctgcaat

SEQ ID NO: 3006 - DNA, 621 bp, Gossypium hirsutum
tcggaaaccccaaaaaatttcttcctccataccttccaagcttttcatggcacattacgacaacacccagttccactctttccctcaaacagtgtagtgctgttggatggtgtcaatgtcgagtcctttgagtttaactacagattcaacgtgccctttgagtgtatgaagttccctcaaccttgctacttcggcacgcttccttgcttgttcagcaatctctgacagttctctatagttggtctcctcgttgtagagctgtgtcatttcaggtggtgtcaagccatgaagggtgcgttgtgccattgcccattgtgcttccctctctccttttccataatccttctttgttgtgaaggcagtctatatagattgatatcaaacatcaatacttatttgaacgaggaaaaaaccttgttttgaaaggagtgatttgattagagttgattagataccttgctttgaagtaaattatcccaagcctttccactcaaagaatagcgaatcaagaacttgagtacgtcaagtgggacgtagaagactagactgtagagccagataacgccagcccaaccccagccaatgcctttgattctggcaaagccccagtttgcataaaca

SEQ ID NO: 3007 - DNA, 541 bp, Gossypium hirsutum
gtggaacttgtcctgataagaaattctcatagagtgacagcatggtcaaggttgttgactctgcaatagcaccagggatttctcctgtaagactgttgttgtaaagttgaaggacttgaagtttggggagtcgacatagagattctggaatgcttccactcaaccgattgacagacatgtccaagtctacgagctctgtaaggtttcccagttcctcaggtattgagccagataagtgctggttgtagtataactcgagctgctgcaagtttttcagcaatccaagctcctttggaatctgacctgaaaggaaattaccactcaactcgagatcaacaagagatgtcatgttcccaatcgatgccgggattgaaccgtacaacatgcaagacgtgaagaccataactctgagttttgtgagcctagaaatgttccccggaagttgccataagttcaagccatcattttcattgaagtagatcacctcgagatcggtgagattggttatcgacatggggaagtcacctgtgaagaggttgta

SEQ ID NO: 3008 - DNA, 618 bp, Gossypium hirsutum
atgttaataaacccaagtactgacttattaaacataacatgaaagtccagtcagtcttgagacgttttaggaataatttagtacaaagttgtaagtccagccagtcttgagacattttaggattatgtaaagtccctccctcctaaaccctaggttcccctttccctcctttataattccgggttctatgagcacaataatattatccttggcatgcattattgcatctgtatcttgcctttccctctgacataaaagcatattcactactccatagcaacaatctgaacaggtagtttcctactcgtaaaacattatgatcaggagaatgatagaaacagaaactgcacaatcagcttcccttcttaggtgaatccacccacctagtaaaatgaatgtggcttgtggacaagtgcatagtgcactcagctgctattaactagatcaggtcatttttcttctttcaataagactcccggcctttttcttcaatatatgcctaatgtcatacatactcagccctcaatcaactttaaatgtgccagtcaactgggttctatgagaaagaagtccttcatccttcttttaaatatgaaacgtgctcaatacttgctcttg

SEQ ID NO: 3009 - DNA, 644 bp, Gossypium hirsutum
gcgggtctctttctgagttgtggaccggtacttgtttctttctcatgtttaatacaaaaatttctgtttatccgacttagtactggtggattacccctctaaaataacttcctgttattctggtacaaaaggttgttgattgtcgtatatgcggtgatactaattctgttctccgctttgcttttgtcgagttttataaagaaggtattatggaagtcttatgcgttttgtaagcattgatatctaccctccatttacagcattgaccattcgatgttcttgtagaggatgcgagagctgctttgaatttgtctggaaccatgcttggttattatcctgtaagagtgctgccttcaaggactgcaattgcaccagttaacccaacttttctaccgagggtaaagcctatatataatgaatgaacttttacagacttgtttgtaagttatagaagctaaatcatagttaagctgatatttgttatcccttttaaatacttggcttcaacttttctgtgttcttcagtctgaggatgagcgagaaatgtgcacaaggaccatttactgtacaaacatagacaagaaggtagtttttcttgtccatattttgttttcttgaatgctagtgtgatactgtgataaaaa

SEQ ID NO: 3010 - DNA, 633 bp, Gossypium hirsutum
tgcaatgcaccgcgcttcattggagcaacgacgatcaaaggcaacccaaggtttgtttatttcaatgtagttcaggagtggtaagcacatgttattcgacactaattactaactttctcagatgatgcaacaacgacagagaatgacaacaattgtcttcttacttcggctgtagaagcacatggttcagacctgccaaaattaggttactaaagcttttgtactattcaattatagtcctttgttgttaattcttattagtgacttgttttgtttttgatattttgaatgcaaatatagcaaaacctgtgcaacctaaaaaagcagcaacactttgttccgatctagctgataaagagaattgttcagagaagcagaggtactgaatttgcacgctaataccaaattttggaattggttatggacttttaaacattatcatgtagttcttggcagtaaaatttgaattaattttctctcatgaattgaatctttagaatgctttatgtttttattcatcatcataaaaaaatatacctttttttatgcacttttagttcttttcttttcttttcttttttggcttaatacacgtttagtttttacttgactattatgatattcactctcgag

SEQ ID NO: 3011 - DNA, 617 bp, Gossypium hirsutum
tttcgatcttcgtcgaaaaccaatggcgtaacgtggcattaagttgggagtgtctaattgaaattttcaaaaattttgaagagcttaacgcgaaggggtcaactttggcccctcttacaacaaggaaattttaaatacaacagataattacaccagatatctttaaactatgactaaaatattcaaatttattccaaaacattctaattaagcttttaaaagtatcgaatctcaattaagttattagcttgagcattaaatactaactcgaactttatatggaatatatttaaaacaaatgaatcaaattgtaaaaacgtgatttgatttgacatatcaaaaaaataaaagaaactataagtatatataaatttaatccacatattctaaatataaaccaacctcatatttaaatccacatttaatgtctaaattcgcaactaaatttacagaatgacctaatcattacaatactaaaactttgaagacataattagaacttttgaaatttacaaccaatttaaaatacagacgatagtttcgggacatttaatgaaattaaacctaaaaatgtatgaaaaattaaatatatatgcaaagttttcagaaacgaacca

SEQ ID NO: 3012 - DNA, 467 bp, Gossypium hirsutum
tcttctattctgctgtagttctagtagtgttggctgagggaagtttcattgatccccaaaaagtggattgcaaaagacagatatttgtctgcattaaggacatggttgcattatctaaatttcacatatactattggataaaggcttgcttgattatgtagggtttataatttgaaaatcacccatgttttaagcacataagcaatcagcttccctttagatccccttattccgtgaatagctagctgaccctattttttccagaacttgaaatcaatccgtctgtttggctctgtatgttgtggcctgctttcattccatctacttttttctcaagaaaaaaacatagaaacttagaagcactaaacaatggctgaggatttccccattattattctgttaaagtgatactgttgcttggttttcacttatggagtacagttacctacgaattctcgaagaaccca

SEQ ID NO: 3013 - DNA, 525 bp, Gossypium hirsutum
catatccgtgacatgagaaggaactttttatagcatccgcaattttttttcgctctaccatattcaaacttttcatcttcttggtatattccaggttactgggaaaaaagtttcaccactcagtatttgcctctctggacttaacttttggtctatttaagcttatggaaggaaagcagtaaatttcattggatttggttcatttgaaattacatgtagaggaactgcttagacaagatggcaagaaattgtaaactaaatcaaattcaattgcatgtctggcatcttcttgggttgtgactacaagagacagttcacttattcaacatttctttcactgaaaacccaaaatagttatcgaaaaagtttgggggctcaaatatgaagcaagagatcacatctctaagagtaattacacctgtaacttcattctcatctactatatagattctgtgcacccttttggtggcaaggcactggatcacactaccaagagttgaatctaccttgcatgttattggtgtg

SEQ ID NO: 3014 - DNA, 634 bp, Gossypium hirsutum
tgcgccgattaaaaagggatgtcgaaaagcagcttccaatgaaacatgagcatgtcatatattgtaggctctcaagacggcagcgtaacttgtatgaagacttcattgccagctctgagacacaagccactcttgctagtgccaatttttttgggatgatcagtgttatcatgcaactgcgaaaagtctgtaatcatcccgacttatttgagggacgaccaattgtgagttcttttgatatgggtggtattaatatccagttgagtagttctgtatgttcaattgtttcacctggtccattttcaactgtagatcttaagggtttgggaattttatttactgatatcgattttagcatgacatcttgggagagtgatgaagtagaagctctggttactccaaaaagtttaatagaagaacgtgttgaccaggataatcttgaggaaattaggcccttgtctagacataaggggaacttgcacgggacaaatatatttgaagagattagaaaggctttaagagaagagaggctaagagaagcaaaagaacgagcagcagcaattgcttggtggaattctttgagatgccggaaaaaaccagtttactcgacaacattatgtgaactggtatctgg

SEQ ID NO: 3015 - DNA, 643 bp, Gossypium hirsutum
attttccatgttacattacatatgaaatgctcatttgctatatatttcattgatttttttttcagaggttttcttgtttgcttgaaatatgttcttgaaattagcttcaggatagataatgagcctttcaaggtaaaagactaatatgtatgtatgtatgtatgtttttcataaagcaatggcaaaattcaccatttaaattttcttcaccatttttttcttcagctttgatgatgatgatgataatgatggtaatgggtaaaggaagagatggcgtggtggttgaaagcaatgagcaaaggaggaagaagaagaagaaaaatggtggaagcaggtggtatgaaggggaagaagatgatcaacagtagtgaataaaaaaaatagtcaacaattactgcttatgtggacatggtgtgtaacaccacatcagatccagttagtaagttattggttgagggactaaaatagttaatattttaacggtagtgattaaattataatattttttatttaagtgatcaaaataaaaatacttgaaaattaagtgatcaatcagataattaccctaaaagaaataattaagtttattacagtttatttaatctaaccttgttcaagttcaacctctgctgaattaccaaac

SEQ ID NO: 3016 - DNA, 616 bp, Gossypium hirsutum
gcagaaacccaaatggagattccaaaaagtgcccacaaccagtttgacaaactcgaaggtagtcttgctgataaatctggttttcgtgatgaagaaagcccctttcatgatgttggacctgcacatcgtgaagtacgaggtggattggaggagcggttggtgtatgcccttggattaagcaagggtggaatcaatattgaagttgctggttttcatggcaagatacatgtggaagagcaagattataatatgttagaacctatctatgatgaatatcctgaacaaattgaagatgtacttccagttcagggagagcccttgattgttcataaggtgaagaagagtctagtgccatggcagatgcacttgaccaacgattttcactacaaaaggcgttgagtgctcatgtgaaggattttgaacaagttagggatcaatgtgagactgacctgtatttcaatcccatcatgttcgagggcctcaatatgttcaacatgatccatgagatctatgaaggtgaattgatgaggaagatcaaacacaatgataatgagatcaaatcaggtagtgaaatagatgttcccttaagtggtgataaggagattagcgtgcattc

SEQ ID NO: 3017 - DNA, 620 bp, Gossypium hirsutum
atcaatggcatacacacatcttagaactcatgattcgtacatcacaattacaattagtggaattcgaacttcagtacttaagaactcaaaacctctgctttaatcaacaatgccatggcctcgttgacaaaaatcaacatgtttggttggactaaatgcctatatcccattcaaccccaattccctataataactattcagagtcttcccatcaaaatggttattccttcctacccaaccaagaacaaacaaaaattctctccaaaatgcccttaaagatcagcccaaatgaccacctatattttgactgaactcccatcacacggctattaattcacttaggtgtcttcagcctttgcaaatctaacaataacagttccattcatctttgtcggagcaacaaaccacagcgaagacagcatgttgagacagaaaacatcaaggaaaaaacaatagcaaccaacagaacacaagaacaaaaaagaaaaaggagagagaagacttctccctctagattatgatagtttcagacagcttttgggtttcaaaagtagtaaggatgaagaacaaagtgtgagcaataacatacttaaaaagcagaaagtttagggcaaccagag

SEQ ID NO: 3018 - DNA, 564 bp, Gossypium hirsutum
atagttgttatgggtaacatatgagcttttaactgttaactaattgcaaacctaatcttagttacccacatttttattcattcatgtaagagagagagagagagaagagatactatatcccccccccctttgggcctctttgaattggtgatcaaacattcatcaatggtgaacaaacctactaaatgcaggctgagtttgttgtggtaggagggttacctttagtagatttggtgcatcaaaaaaaaaaatcccttgagaatagattcaaagtatattttaggattctatccaatccataacgtatctgcacctaaagctgttacccactttgcccaactttatgcaaagaaccacttcatcattctgtcatatgttcttctgattcaaaataaaatggtaaagcagttgcaactgctcacgtgtaatcagcattttttttattcaaactggaactcaattgcaatggaacattgatgaaaactaggtcaaaagtggaaaaaataaagtggtctgtcctaaagagaaaaaaaaaaaaggggaaaaaaaaattttagggccttt

SEQ ID NO: 3019 - DNA, 575 bp, Gossypium hirsutum
atcgttccggggttggggacccccccttctggcgggccttctttcctctgcttccttgtgcttctgagatcgctagaaagttgccattgactgattcaccaagccaagcattggagcaagcgaggaagaccgctttttccatcaaaaaagtatgggaataggaccccaacttcgaaatcaattccaacctttcgcccggtcgctaacctatctttttgagtccctttgttcgcccttctttcctgccagtagtgtaggcggaggactttatttacgctatttcgtcaaatgataagtttgcaggcaaggacaaaaagacgttctttcctacttactataggtagctgcgtcccctagaagatcttggcatcaaagatccttttcccgaagaaaaaaaagaccccaccgtggtggagcagaaggtgagagtactgccggactattttcctacgtgtgattggtccggattcattttccttaccaaccccggctcaacctagcacgaccagtacaaatgccctagttcgactcaggtctcgctatcgctttatggtggcgccatgcaaagggttaga

SEQ ID NO: 3020 - DNA, 888 bp, Gossypium hirsutum
  misc_feature (609)..(628): n is a, c, g, or t
  misc_feature (633)..(636): n is a, c, g, or t
  misc_feature (639)..(639): n is a, c, g, or t
  misc_feature (652)..(659): n is a, c, g, or t
  misc_feature (661)..(663): n is a, c, g, or t
  misc_feature (667)..(671): n is a, c, g, or t
  misc_feature (679)..(683): n is a, c, g, or t
  misc_feature (711)..(721): n is a, c, g, or t
  misc_feature (738)..(738): n is a, c, g, or t
  misc_feature (745)..(754): n is a, c, g, or t
  misc_feature (756)..(760): n is a, c, g, or t
  misc_feature (762)..(764): n is a, c, g, or t
  misc_feature (766)..(768): n is a, c, g, or t
  misc_feature (772)..(780): n is a, c, g, or t
  misc_feature (782)..(793): n is a, c, g, or t
  misc_feature (797)..(813): n is a, c, g, or t
  misc_feature (815)..(817): n is a, c, g, or t
  misc_feature (828)..(842): n is a, c, g, or t
  misc_feature (852)..(852): n is a, c, g, or t
  misc_feature (857)..(880): n is a, c, g, or t
  misc_feature (882)..(883): n is a, c, g, or t
ctgtcagtgttcttcaaccaatgatagacagcaaagtccacaggagtgctgggttaggagatgacatcagtcagtctgctgccacagtattgaatgctaatgccttggagacaatgtcaactaaggctaatatggttaaagaacagcagcaaaagtctgttaaacccttgttgaatatctccaagagtcaaaaccaaggctcttttgccccgcaaaactgtatcaatggtgctacagcacttgcagattgtttggacacatcatcttctacaacttcagtttgcctttctcaaagtgatgctcatttgcaccaaaacacactgtcttacaaccctcaaacaatgttgttgagagatacaagtcaagagggagaagttcaggcatatccaaggaataatgtttcatatggcaataatatggatagccaaattgagatgcccatgaattctgacactttgtctgcgaaaggcatgatgggactggggaaggatttttcaaatcacctctcttcggaagggatactcgccagctatgaaaaccctaaagatgctcagcaagaactttcttcgtcaatggtttcccagccatatagagttccagatatggcgnnnnnnnnnnnnnnnnnnnnggaannnntanatggatggggaannnnnnnnannnaaannnnncttggctnnnnntctttaagggttttcataatttgggaannnnnnnnnnncaaaaaagggtgatttngaaaaannnnnnnnnncnnnnntnnntnnntttnnnnnnnnnannnnnnnnnnnntttnnnnnnnnnnnnnnnnntnnnctattcctaannnnnnnnnnnnnnnaaacattaantcttnnnnnnnnnnnnnnnnnnnnnnnntnnaattg

SEQ ID NO: 3021 - DNA, 614 bp, Gossypium hirsutum
  misc_feature (540)..(542): n is a, c, g, or t
  misc_feature (552)..(552): n is a, c, g, or t
  misc_feature (557)..(557): n is a, c, g, or t
accacatagcttgatgtgtattacatttctgttttgttcttaaacaaatagactggcttggttgcagatgtgatgtgtacagttttggtgtgatattatgggagttggttactttacgcattccctggaaaggtttgaatcctatgcaagttgttggagctgttggattccaaaataggcgtctagaaattcccgaagatgttgatccgatggttgcccagattatacgtgaatgttggcaaacgtgagttctaaacatctctgttttatctatgcaaggagaatgattaaatataatgctttcaggtggtctttgcacctactcaatctcatttgaatgtttagtcgatctttcctggactctgcactgatataaaacagaccagaaatcatgttaagcttttcttttcctaacgtgaaataaattaagatgatatcataatgaagatgctatgctatcatattgaattggaaagaacagataagattataatatcattccaatccaacttgtcttgcaagtcttgtcttgttatattnnncggcgcgtancttantttgttttgctcttaccctactctttctttttttatttgcagggacccccatcacca

SEQ ID NO: 3022 - DNA, 534 bp, Gossypium hirsutum
aaataattttgattttaaatttcattgtctacttactttgcttgatgagataaaaaaaaattattacatcaattttcaaaattaaaccaattaaattaagaaatgggaaccaatcgaaatattgatctagagatagagaatgaattgattaactcgctaacgaatacacactgattgcaagctaaaaaatccaactgaagcattttctatatttttaaatatttatattaagatgagaaaagaaggtataatttatagctatgtttactagcacccatcttgaggtgccatttggtgattaagcccacttcatattatggcattcatatttatattaggcccgcctgcagcacctaaaaaaaataggttaactacaatattattcatcccactattaatatatttctgcttcggtcacaaaattataaaaaagttaatttccatcattaatgttttaaattgtttttttttatcactctacgcaatatttttttaactagtataataatacgctttagttctcaatactcacac

SEQ ID NO: 3023 - DNA, 568 bp, Gossypium hirsutum
agtcctctgcatactcttttatttcgtcataactcttctgttttaagcgagatgcaaactccttccagtcaaaatccccgaccccaaacctgaaaataaattactccaagcaaaacaccacaatgagactcagaatagtgaacccatcaaagcttcaacttgcaatcataaccgtaaagtaaaaaggctagtaaatgacattcacaaacccaaagagagggaagggagaagttcacaattcatcaaatagaacccaaaacattattagagaaagactgacctcatcaatatctgtacaaatgcggccctttgactctgattgaaaccaagcaccctgaatgattttccttcaccttccattagagggaggggctccgtattatccactacaaaagtcgttggaaatcagaaaattgatcaaaatataatagatgaacttttcttactgacattgacatcttatgaggacaggcaaaacataccacgaattctcttcttgtaaggtttcctcccaggttgatttacagctgaaatatcaccatcggttacttcagctttcaagtcctca

SEQ ID NO: 3024 - DNA, 425 bp, Gossypium hirsutum
aagcgatctggtgctgtcatgtccttggaaaacattaacaacactgcaagcgggtaaatttgccgtttaatgtattgattgccatttcttggccttaaaaacattttgagaggtcgtaatttatatacttgtgcagtgtttttgttccccctacgaaaatcacaaacagatttgttgcgagttagaagcactattattcgaaactattagtgagaaatatacatgcttttacattctttggttctgttttttttcccctttaaaaagtgaaatttgttcatacaattcacacttaaaatattttaggttaagttttggaagtcaagatagcccttgtaggattctcgtcagcagacctgttaagaggtgtgtcagttctgaaagaaaatctctcataggagtcaacttctaacatgggtcaaaaa

SEQ ID NO: 3025 - DNA, 607 bp, Gossypium hirsutum
catatgtttcttactctctaataaactatcatttcaataacaaatatcaaagaaataacatatcagcttatttgagttcaggtcaatatcatattatcttcctattgaatggcccttaatgcctgtctagagagcgataaaacttcaacaggtaatcatacaagctggttcatctaaagttactacactcaccaaaaagttcagctctgttcgctcatatgggtacactctataatttctaaccctagcttaccatgttcgaaaaattcaagacttacaattaaaaccgtacttctcagtttatcttaagaaacagatattcatgtttaaaggagcatcgtacggctaacttgcctgaatgagatccttctcttctatgagtcccttcacagttccacctttggctagaagctcagatagtatctgtgatgttttagagaaatcgttaaaactaatagaaccatataacactaccaaagaatgagtccccccgtcttttgttctgttctcaagtccctgaacttatgaagcctcgtttctgtagtgggccaatttgttaacataccaccgagccattttttattaacataatgacaccgagccctta

SEQ ID NO: 3026 - DNA, 654 bp, Gossypium hirsutum
tggtgcataatactcagttttcttcccacttagtctatcattgtgtgcactgttaattgatgatgtgtttttttcagtctcatgagcttccttcagctgatcttcagaatgaatttccaatgagcttgttcggttctcttcctgttcagattctccaatatcaccaagaatatctctatacctatcttcagccttttgaaacggcctttctaattttttgtttcccgattctcttttgtttgtataattgttcaagttaacagtctgcttatgtttaataatcgaagaagaatcaaccctcgagctttctttttgcacctctgtagttagactgtcatgaccctgaccgcctgttggttttctttttccaccagaagaggcatgctccttggtgggaggtaacttcatattatcttgctcatgcgatgtagctcccaggcagatcttctgcttgggaggatccaccaattcgctatttagagctttgccaccttttacagtattagagtcagctttgacagaatcacaagttttgtctgctttatcatacccatctttcctagcatagcctgaaatatcatctagaacacttgtcttttgttcctccaaaacctttcgagctgaaccagcccttggattctcccactcaatctc

SEQ ID NO: 3027 - DNA, 625 bp, Gossypium hirsutum
ggatctctctttttccatttctcaccttctcatctctctctatatttatatacatatacacatacacattcgcatcacgtttctccttatttaccttgatcccccctccttttttctcttattttaggcccaaatgatacattttcgtttgcgttgttgctaaccaaattgtaaataattttattttgcttattgtggtgattagattttccattattgctgagagaacgaaattttgtgcaattcacttttccttctctctctctctctctctctttttttattatacattttcccatcaatcttattataaaggaaaatgaactttttaaaaaaaaatactttttaaattcatttctatactaatcgaagtgatttttctttttgtttgtaaattcggctttgtccccagtgtatctaaaattgagctaaacagttggtactgatagtggtccattcactcatttaagttttcaaaagagggggaaagataaatagatcaaaaaaatgattgaaccttttaagatatgtaacaatttatattttcaaaattttctttggtgtaatttgaatcttaaagtactaaataaattaacttggatggcagggatgagggtcctcttgg

SEQ ID NO: 3028 - DNA, 640 bp, Gossypium hirsutum
  misc_feature (635)..(635): n is a, c, g, or t
ctttgcacaattttgtttcccgtaacccatcctcttcttctttaatctcgctctcttctgttgtgcgtgtgtgtgtgtgtgtgtgtgctttttacagcaatgaacaaaggaacgggagtgggaactggaccgacggcggcggctgcagcggcggcggcacagaagcagaaaactatgatgcagcgagtggaaaccgacatcgccgtcatcgtcgacaacttcacccagcttgttaatgttgcccgggtaaatctctctttacttcaaagcaattactacaaattcttcgagtttaaagagtctgatgtcaagattcttaaactcccctaaaccggtttttcatttcgtttctgattttgaatttacaagttagaggtgggaaattggaaccttttcacttttaggataagctttcactttatttgccctgtaaaatgttggaaagcttttacttttactcatttacaaaattccattttgtgaagatatatccctttttttggttgtacaatgtgttatagttgaatatggatgattcttgtatatttggaaatgaatttatgtaacacccgaagaaaataatttaggtttctggggggagctagtgtaaaataggttaccttgggtattgaacntgaat

SEQ ID NO: 3029 - DNA, 604 bp, Gossypium hirsutum
agaataatttctttctatttgaattgttttttatggattaagattttgttatagtatttactttatttcaatgagattgattttagtttatttgagttaagatggatcagttttatttatggcacttgataaatctaggacaacagtattttattattgaactctcatttgaagatgacagaattctcccttattttatccttgtgggttcacatttattatcgtcatatgtatatgtgttctgtattgttcctgaggtcttgatgcaacttagaaagggggaaagaagaaaaagcctgaaaagctatacatcttgatttacagaaggaactatatatctcaaagctctcaaagaaatctccttagctttttaatgaacttagcttcaattatgatataaaaggaaagggaaaggaaaagcttgaaaagctacaaattgtttactttgtgattatttgtgggccagatttcattaccatgcttccaatgccattacagaattgtcattgctttgcagtcttcaccaatgcacttcagcattaaaaagttggttattgattttataataaattgcttctgttagtactataagtggcttggagag

SEQ ID NO: 3030 - DNA, 653 bp, Gossypium hirsutum
tatgctcgaaactgaagttataattcatctcagtgaaagaatagttttataaaagcaagtcaatgtcaacagccaacatgttaaaaatttctccataaaagaacaaataaaggaagacgtcctagaagaacaagaatcttacaatcaggtcatccggagatacagatgctccttgctgcttctcatctgcagcagcatcttcacttccacgagttggccgccgattgtgcccaggattttcaacctcagagaggctttcagtggctttctccaacagcaccccttgtaaagacttcatagactccctagcatcactcgtgaaaaatggatttaaaatggtctcgaaatattcaagctgcaaaagacgcatctcacagaaatcaaccatgtagatcttaagacttgaagttttctagttcatttctaacaaaaaagaaatcacaaatacaggtaattgtaaaaatatatatatttttcaatcaatcaattgatgctaagcaaaaatggataaatcacttcccttgaaacatttcatttcaacatcgggtgtggaaaaggagaaaatgaaagacagggtggaatatgtgcattttcctagaagactacacagtcatccatgaaaagaaaagaacctagtgcttacaaaccataac

SEQ ID NO: 3031 - DNA, 618 bp, Gossypium hirsutum
tgtactccttttttttactaaaattagtttagctaataatttgtaacttgaatttgttctctaggtaaagcaagatctattgttcttcttgagacaaaatattctgtattcgtctaatcaaacctttttagttttaatttgtgaattctgatttattagtacagtaaataaacaaattgcaatatgatttaatcacaataaattctatgaataaagttaaacaaagaaaacatgtcatgaaattaacaattttagtttcagaaaatatttaaatatgttttaatacacacacacatagacacatacccgtccctccctccctgagttctgttactcttttcagaaggatcaatgagtatgaagatgaaaatgttacatatttgcaggacaatgtgtttgtgcaattgctttgctcgattcagtacagagtggtgaaggcacatgctgatgatgcattttacgagctgcaaaatcccgatgaacagatccgggcctatgtgtttgatggtaattttctttgctcttcttttctcatatcagcttataaatatattatgctattcatttgtaatttatccttccccgttctctcccttctatttatttctgtgactaaac

SEQ ID NO: 3032 - DNA, 610 bp, Gossypium hirsutum
ggtggtgcagtggtggttgctggggttggagagggtggtggtggtgaagcctcatcagctgccctcacaacaagccttgaagtgttgttggtcttggatgggaaaaacaccatgttgttgttgttggtggtcttagaagtccctgcagaaacattgggtgttagcaagaaacctgaagcagccgatgccatgttgcagcagctagccatgtctccacgctctgatcttttctgtgtctgtaacaaagggatagtgtggcagaaaaattgtagaagggaaatttggattttcccaggattatctcatcttgagaaagtggactaaatcgtttcctccactagggagctgccacctatgcaccatatctcttttgcttgtacattgtctttagaagtcatcctcacaacctgataaatatttgatgaacaaaaaaaaagataaacaaataaacatttgataaaattatgcaaatcttcattgttcgtaatgatatatttgaatatttagtctttttttctaattttttaatttatatttagtttttggattttttggcactcttttttttttttaatttaaaaaaaaaaaaaaaaaatttttttaatttaac

SEQ ID NO: 3033 - DNA, 568 bp, Gossypium hirsutum
gatggaacaattcacacgtagaacggaaatatgaaaattttgcgttgaattattctgtgacatacatcttagaaactagagaaaggaagtgatttatctggccatgttgaatttttgaggtaagcttcatgactgatatctccttaatgcaccattgtagtatttttcagtttgcaagttaatctgtcaatatagatggttgggttagttttgattgaggtcaatttggatctcatcaattaggattttaaaatttttagttattttgagtcaagtatttttaactttgggttatttggattcggattattttgtgttgttttcgctttaagttcaagttaattgtttgggtcatttggttagtgtcaattcaaatatgaattcagattctggattttttttagggagaatgtaatttttggctcttgaacttggcgagtaggtcctcattgaccccttaactttttttgattcactttaacccctaaacttgaaaattgttattcatttaagcctattttgttaatgattggaaaaagaaatggggataatgtaactttgcccccta

SEQ ID NO: 3034 - DNA, 405 bp, Gossypium hirsutum
aggttattttgtactttgctcacttactatgttgtctattgttgttttagctggcagtctgtcgatccttatgtttacatgttgaagatgcaaacttttcagagaaagatttttctgatctacttcctgtttgctgggattcatgttttaagttggtcaaagaagttcaagagtttgattcaaaggtatattatgctgctgttgttaatgttcactgtttactaaggcattctttcttccctatctgcttttcaagagaaggtgatatgtgtattttattgcattgtggaaattttctggaatctacagtctgagctttaaaaaaattctttcatgcttgtaaagcttctgatgataaagttgaatagatggtggatgttacttgaaaactacagatttttgctt

SEQ ID NO: 3035 - DNA, 613 bp, Gossypium hirsutum
gtaggggagaaaattaagaacggctttgctgccatctgtaaatttcctttttaattctgtcaaatgatcacttaaactgcaatagcaagaacatgtagcaacaggtctacagttctatttagaattgtaaatgtcgtcaacataagttaaaaaaacacaaacaagagtcagtattttcactaccggggttgtcattaaaccactctaagctaaggaaaaatagagatattttacaaactaactattatgtatttatgtagcctaataacaactggacgatgtcactctgaaagtaataacagcagcatccctccacctttgactaataaatgctttacgaagctgcgactttggttcttaattaaacttaccccatgtcaattctttggagtgagcgagaacaatgcagataaacataacctttgaagattccttgtgggtccgtgaaactcactgcaatgccaaaattaatcagaaaggggagagagagagagagaagcctaagggaatatgtgcctgatctacatgagtttcttgctataatcaaaatcagaaatagcaaattgtttatagcacgaaaggctagagaaactggacaacccctaatcatgca

SEQ ID NO: 3036 - DNA, 600 bp, Gossypium hirsutum
tacatcaggaatgcggatgtttgaataactgtttctttgtgttcttctgagaaggggtagtagttaggttgcgtggagattgtagtgttagtgtgtttttgtaaacatgcaccttctatctgaaactgcctcccacatgttttcttcaaaaacctctggacttcttaagatttaagcttaagagttttctgtagtgcaaacatttgatattcttaaagcaaatatgtaatacctgttactgctatggaaaaagctaggattttagaatatcatgaaaaggaaagaaataatattttggggtcttttgaaattcaaactagtgtcacaggccaaagtggatctagccccgtgacactaggacatacatttggaactgaagtgtctatcaaatgcaaatgcaattgcgattgcaaaagtctatgttagtgcgcaaaatattaacattgattaaaatatgtgcttggtaatatggtaactgacaaaggtatcatgtaaatgaataccggatatgtctagttgctaattggtataagtgtccaaatgatatagttttcttcttatttttctagcaattatcttgtatttccttcttaggtacta

SEQ ID NO: 3037 - DNA, 622 bp, Gossypium hirsutum
ggtttcagtaaaatctgattctatttctactgattctgtctcaaataatgaaaagattgaattaaaggataatatacttgctgataatgtcaaattagacctagatgttgtaaagccagagatggtggaaccatcatccagcaatgttgtcccaattagtggtgaatcacatccaatggatgttgaagatccgcctgagaacaaggcacctgttgatgagagagatgacaagaatgttacaaatgtagacatcggtaataaaaatgacagtgctgagatggcatactcagaaaaattaaatttggatagaagttctggtgatgactctatggaggaggatgtgcttgagagtaaacaaattgattcaaaatgtagtactgatgaaatgggagataagagtgagaagaatagagcacctattgtcaaggagaaaagtcctgttggtgttttaagagatgatttatctatagataaaaaggacaccttggttgagaataagagccggtcttttgttcctgctgagaaaagaaagcttcatggtaagtgaaaatggcctgcaattgttactgtctttctttgcatgtgtgcatacttttaccttactgataacattctgaagcta

SEQ ID NO: 3038 - DNA, 643 bp, Gossypium hirsutum
  misc_feature (538)..(538): n is a, c, g, or t
  misc_feature (540)..(544): n is a, c, g, or t
  misc_feature (550)..(550): n is a, c, g, or t
  misc_feature (560)..(563): n is a, c, g, or t
  misc_feature (569)..(572): n is a, c, g, or t
  misc_feature (592)..(595): n is a, c, g, or t
  misc_feature (598)..(598): n is a, c, g, or t
  misc_feature (608)..(618): n is a, c, g, or t
  misc_feature (622)..(622): n is a, c, g, or t
  misc_feature (627)..(627): n is a, c, g, or t
  misc_feature (630)..(630): n is a, c, g, or t
aaaacaaatttgtgctactacaccataaataaaagttggaagcaatcgttattcctactcaactccccgatagttttgattaaaatccagctttggggttgcctgaggcagctgctacaactcccatcccaccaccacctgctgctgtaccaccatcctcacctgtttccttaaaagcaactctgtcaccattcatctcttgcaccagttcatccatcttccgaaactgatatggccatcttgcattgtaaaggaactgacgcagatcgaacctattatcctctggcgaataactctgcaacacggaatgcaccaagattaccaggcttttaatcgggaccatagattattgacgccttttaatgtttacatacctcggcatgatatgaaggtgtcaatacagtcattttgtgtcggttgatggaatagtatttgaagaaatgttttactttatcagccactctgatggaatgatttattctgattgatgatttaggacctaatgttaatttagagtgtcttgttttagtcatctccnannnnnctactnttgccttatnnnnctaacnnnntatttattgttgtgattcannnnaanttatttaacnnnnnnnnnnngcanccttnaanttctgctattgac

SEQ ID NO: 3039 - DNA, 630 bp, Gossypium hirsutum
taataactactgtatactaggacgttaagtatctagcaaacattcacaggtttaattatattcatatttttcttttactatccaatcaaactgatcacttgtaaactttctttctaacaaattcttttctgaataaaaaaaaatttataggaaaaccactcggttctgtcaaaggtgcaaaaacataaaacacttgcctgagcgaactaaagcttaagatgtacacatgcttatttgtaattgatgtcatacatagattaagatacaaaattacaataataaactttaaaaaggtgatccatcttatcaggaaaaagaaatgcaagagtttattgttcttttgttggccaccattcatgatttcctttggtcccatgtcagttgttgaatactcaaatactgaaaagtagagagtatgatcttatcctttttattacaaggctatagttgatgaaagaaattaaagacaacttcaattaggctcccttttttgcacttatcgcattgcaaaaaaaagtgtatctaggagaatcaggcatgcatttgatcaaattggcctcgcccgaagaggtttgaagtgcttttattgtttgatgctaaggcacaatgcctaggcacacaccttaataa

SEQ ID NO: 3040 - DNA, 638 bp, Gossypium hirsutum
aaggaagtttggtagtaatttagttttgtcccttatataaaaaaaattactatggatttattttacttaattaaaaacaaaataatagtataataattaataaatcaaaatgtctagttatttgatataattttcaagaaatatttcaatcatatttatttattattttataggactaatatttcgtttattattacattttgactattataatttgctcgaaatattacttttatatcaattttatcttcttctttttttatcattttgataattttattaacagaaataatattacatttcgtaaaacagatgtgttaaaaagtaaatcacacacattttgtgaatcaaacggcctaaaaagtaaataatttatttgattacattacaaaagtttcaaaaaaatcaataaataaattctattttttgctgatatcaaggcattcacacccacgtgtgttaacccaaatattcaaagaagtaaataattgattatgaaatatctccaaatctcaatagaatttcattcttctaaataagaattgaacctttactacattaggtacaaattcattaattctttaatcttaaactaaaatttttaaacatatagctttacatgacggtagattgatgcc

SEQ ID NO: 3041 - DNA, 628 bp, Gossypium hirsutum
gggatgggatggtttgttgttgtgttggagaatttattcattcatgtttttatagtggtgcaaagtgtccagtagagaggagtgaggtgtccaatagggaatggacacgtaggatacttgtgtatggaaacgaaagcaggaaatcacgaggaaagagtgtagcatcaggggcttgaattgatagatatgattgagctgtgggacgcgatttgtgcaatagacatacacgccatttccaccttagggaagatccgacggctggtaacgcaatctaagttggatggatgatgactgtaacgcggagaaagtaatgaaatatgggttttttgacagaatgatgacagtgagcttcatatttgtggtttagttgactaaatgagtagtcaaaatattcatacataccttcccaataatattcaattttttatatgtaaagtcgagtatttcactcaatattaccaaaatgaatttgctgtatttgattaaaataatgagttgaagattagaataggaaaatatatgattggaatgtggaacatggtttcatcgttttgtcatttaaaaatgattagtggagacatttgcttaaacaaatctaaatctcaggctttgtatccatcttcacaca

SEQ ID NO: 3042 - DNA, 631 bp, Gossypium hirsutum
agctatggggtcttttaagaacccttttccaagcaattaccattttttggaagatgtcagatgaaatcaaatacaaagaaaaaagtaaggagctaaatataaccttatatgctgagacagctcactaccgggaataagcatttcagccacacttacattgtaatcaggaacaaagacaacctaacaaaagaacaacattaagcttaaaagcataatttgcaaataggtatgaaaaacaataaagcttatatagttacaaacaacatatatgaccaaaatgcaaaagcaattaactcaaataaaaaaagagttcaccatataagatacctttagaagatctcctatttcaggatcatggttcacagtagctccaacatctgtgatgaacttcactatccttttggcttgtacatatgtagcaaaagcttttcctccaaatatgcatacccgaggagcaaagcttgcttttctttcctcatggctcatttctttcattttcttatagcggtaaactatccccataatgttcaataactgccgcttgtattcatggatgcgctttacctgcaattacatcccttaggtctactattaattcataacttatgaagataagccacaactgtttatt

SEQ ID NO: 3043 - DNA, 591 bp, Gossypium hirsutum
  misc_feature (75)..(75): n is a, c, g, or t
  misc_feature (573)..(573): n is a, c, g, or t
  misc_feature (575)..(577): n is a, c, g, or t
ccgacatgaaaagaacccattgaaccacatcagctgtgacatggaaaccatttaggcttatggacccgccacgcnctagttggcatcaattttagtggaaatagcatggtaataaaataacctttgctttaaagacaacttgcagttcctgttctattgaccataagtcatacaaatgaagttacaggtgtaaaagttgtttaatgataccaatattttatgttctaatctcttcctttcattaagaagaaagaaacatgcatagtgttgtttccttgcactgcacccagtactctatatatatatatgtacgtatagtgttagacatatgaatggtcttgtggtgatatcttgttggttcctaaaactggtattacttttaggtaaatgcaaagggcaaaaaaaaagaatttttcttattggtacttgttagattctcccacatttcagtttcatgctaaagtttgtaaaaagcaatcagtcagttgaagcgaaagcaacaactctggaagtgctccacttacttttatgtattccccgtttgatttctagcttttgttgttatctcactangnnnatgacatacccaaa

SEQ ID NO: 3044 - DNA, 630 bp, Gossypium hirsutum
gctgcataaactttggggacactttttctgggaatggagtttgggactgttgtggatactcgtgaggtgtgacaccatgttcaaacagatcactgttttatgattatatgtcatatctagcttgataatggtgcaagtcaaggtttgaattggagataaatagcaaatagaacctgtccatcattatatgcttttcagccttataagttttatgtgcctaaattcttatgctacattgctgggaattgtggtagactcttgttatggtcatggattatgaatctagttacctggcgattcaggggaaagtccgctttaatttgatgaagcctttcccttgttgtggtttctgtcacatgaataatttatgaataatacatggaacttgtcgaagggagctcctaaccttgaaactggtcgaagggagcttctaatctcagattcgtaaggaagagagtcttaacctctataaattggaatagtttgtctttccatgtttggtgcctttgacctgtcttgtccacaaaggcaacggtaacaaattttgaggtttggattcccattctatttaatgaagttttatgcaaagtttagacaatcttactgctgattgattgtctatgcttcaac

SEQ ID NO: 3045 - DNA, 607 bp, Gossypium hirsutum
tccccattgcctgcatcccatgcaaagattgcccggttggatttcctgcatgaaactgagacccttgtaccaagccagctttctgcctcggctacatagaaaacctcagatgttttaagaaaagaaaaattatatctaaaatatgaaattagacaggagtggtacacatcaagccctataaagtaatcagttctgcaatgatcaggttattactaccattaagaaaataattacaatgaattcaatatgaaacaaggactatctcaagaaaccattaatatcgtataactttagacgaaaactagagcatgatttaaattgctttgtagcaagaaaggatatcagaaaaaagcacactgcttagtaactctaaagtgcttattgggtagaaacaatgcaattattactttcaaaaagcaaggaatgcaatcaaaagcacgaattatatttgactttaaggcactcgccaacagaaaccatcaactacgtcacgtttaatcttttggataaaaaaaacatcagcaatcatcaataattccaactttagctaacagcaagatctccagtacaaatttactaggtaacggttatctttggaataaaagaa

SEQ ID NO: 3046 - DNA, 566 bp, Gossypium hirsutum
  misc_feature (430)..(430): n is a, c, g, or t
  misc_feature (433)..(433): n is a, c, g, or t
  misc_feature (475)..(475): n is a, c, g, or t
  misc_feature (484)..(485): n is a, c, g, or t
  misc_feature (497)..(499): n is a, c, g, or t
  misc_feature (510)..(512): n is a, c, g, or t
  misc_feature (514)..(514): n is a, c, g, or t
  misc_feature (522)..(523): n is a, c, g, or t
  misc_feature (533)..(534): n is a, c, g, or t
  misc_feature (549)..(550): n is a, c, g, or t
  misc_feature (558)..(561): n is a, c, g, or t
gtcttttactgagttttactagtttttatttttttctggtgtaaaaaggttaagatctttctctcctgtgataattgctgtatccatttcctacaggttcctaatcttgcttcagctgcggagtacttcttcaaaattggggctgaaggaaagaggtttcgtcccacggtaataacagtagttgctcaaggctaatgccaaaagtttgtcttttctttgattgtagatagtttttgggtgtcatgaataagataatagtaacctaaggtccttcccatgaaaaccagtcctttgatcacacccttgctttttgggacttgtcttatgcacacaagatgaataacatagcccaatttagatgtgcaactgtcgcaaaaaaaaaaaaaaaaacccctttccccttggtttttttttttttttttttttaagntcnaaagctttttttttgggggggttttttttggaaaaaaccccngcggggttnnaaaaacctttcnnntttttttaaannngnggtttttnnccaaatggannttttttttttttttnncgggtttnnnntttaa

SEQ ID NO: 3047 - DNA, 531 bp, Gossypium hirsutum
atttttctaatttcctgtacagtataaagaacaacattattcatcccctttgtctagataccaagaaagtaaaatcttgtaatcatgataacattctaataatcttttatttcataatccaggcccaaatatttaattgaagacataacgactgtcaagacaattaataggcctataaagcaacgtactgataaataggcgtataaaaatgagaggaacattcttgacagtataaaactggattaaattgcacctcatcatttaaagcagcaaaaaccgcactcaggctattagcctgtgctaaaaaatcatcaaaacctctatttccatggagagaggaaaatattgaatggcgaacagtaacatcagcatctgcaacagctgcaatgagaagcttctccacaagctgttgaaaacccaatataatttataagcaagcataacgtatcataaagattccaacacaggtaaaacataatacattaacataaacagtattgtaactactatagcacagacggacaaacctcc

SEQ ID NO: 3048 - DNA, 461 bp, Gossypium hirsutum
ctgacgttccatccagcagcagcttggcaacttatgactataatcatctaaatcttccatcaatgactggaaccagcttgcaagggtacctcctcaacaatccatctccaaacatgaacacttgcattcagcacaggaataagaatagccaattatgaatacatgcacaccaaaatatggtaaatctgttgaaggtcaccttcatgattaaaccaactgctctgctttccgtaattaggtggatgtagaatgtaatccaaacaaacttacgtgttttaaattcatatttctcttcaaaaggcaagtagtaacaataacaataattggacagctaaacccagttttttcccagcatgttctaacaatgaagttaaaaaaaaaaggcacgtttttatcttccaccttgtaccatcatatcatatgatatctacaggctttcggggttagtacttacttgccca

SEQ ID NO: 3049 - DNA, 646 bp, Gossypium hirsutum
atcagagacaacgacaagatttgttgtggttcaacgatgcacgaagttggatttcccgacttctaatgggaagagaaccctctaatttggttgcactaatgcggaaagttctttgcgaatcaaaagatagtcgaaatagacaaagtgagtctagccgcttttcacttgataggaaaggcttgagatattatcaaatagggtaggaaaagcctaatcgtttgtggaaggcattcgaaggatactaaactctatggtttggaccatagatgtgcgagaaccctttgggggaattagcaaaattgaaccaaagaggattggtggaagaccatttttgccaatttcaagaactgttagccggtgtacattccataagactggaccaacaaattaatttgtttattatctgaatagatgtggagatgcaaaaacctaaaaacttggttcaggctatgaatctagcgtgaacttttgggacaaaagatcaaccaactcaagttgccgacctgcgtattgggaatcagcaagagactctagtgctaacaagaaagatcctccttttattaaaaagttaactcatgtagagataacaaaacgaagagacaagagtctttgttacaattgtgatgaaccatagccctttcaacac

SEQ ID NO: 3050 - DNA, 411 bp, Gossypium hirsutum
gtggaagagtttggaaggtgaaaattgaaagagtagaaaaatagaaagatggaaaatatattgtttttcttcccattgctgtgcttggtagtataaggtggattgaaagaaaataattttctttctattcattatttggtagagttgaaaaatgagaggaaagaaaatgaaatttttgaaaaatgcataattttaaactaacgcgcatccctctctcattttctctccttttatttgtgtttatgcaataggacggaaaatagcctatttttatactttttcactcaaccaaacacactctaagggtcttgaatgttgtggccctaacgcacttcttattacttggattcattatgattgtttctatgatcctcaatctatctgcgaaggaaatatcctctcttttttttt

SEQ ID NO: 3051 - DNA, 635 bp, Gossypium hirsutum
tggtagaactgttgattttcgagaggtatcatcttcagttccattaagtaagttgagcacctttttatttggcctgggttgctttattttatctctatgatgagttatagatgcagcttcaggtacactagactggtcatcagcttcaattgtagttctatcctctttcagtttgacagaagattctaggcaaacatggtaacaaaaaaaggaataagaaaatgaatccttctagcatgcattaagtaaatggagtagaaaaaagaaacatataatgagcaactaaaacaagtgtctgggaacctgataacatatggtacactgaagaagaaaaaagttgaaatataagcaactgacacctaccagattccgttattgatgttggcaccacagaagacaaattggccaatgccagcagagcatctagggcacagctttgatctacatacaggagaagaattaaaatcagatgttgagcttgtatgtgctatgaaatccaaaagtaatacagttacaagaaaccattatacattaaacaatgtaacaacgttaaattcctctttgattttcctgttctttttctattgttacttttttgccttgattaagtagaactatgacatcatgcaatccca

SEQ ID NO: 3052 - DNA, 598 bp, Gossypium hirsutum
  misc_feature (595)..(595): n is a, c, g, or t
gcatcaaggagtaccaactcatggtggacgctatgttctgtacaacgtttatggtaaccgcttcgaagtttccagaaaatacgcccctcctattcgccccgtcggccgtggtgcttatggtattgtctggtaagatcttttttccccttctaactttgtttcggtttaagttcctagttcgattcacttcctgtttatttcaatttctgggtttgttttagtcttagagcttcagcatgatagtttttcaacaggtcaatatgtgatcatttttcttttgttagattccagtttcttgattaattagttagttactagtatgatcaaacaggctaggtagtccccccccccttttaaattacaattttaggtttagtgcactgtaatcaaacttgagtatgttacccggactgagtgttagacaagggtatgtggctaatacaagtatttcgaggaccataattttatagccatgtccaaatatattttgtatatggatacttgaggaaaatgaaaactctgggtaatacggtttataaaaggtatttgacagtgtgatcgcttttgatgaaattaagctgccaaattcttgggnccc

SEQ ID NO: 3053 - DNA, 629 bp, Gossypium hirsutum
ccccatttctgcataacaagctataccttaagaaacagactaccagcacaacctcagcacatttgcctgcaatgacacaggcaaatggacatatacgagcaaaaaaagaaaggtaaccattcctctatcgatgacaaacctggttggggagcgccatcagtctctgcaaatattcatctctcttatggggatcagattcagcttgaatcatatgcccaacctgaaatttaaattaaaatagaaaaaggaaaaattagctcatccagcgacggaatggacatgcaaggatctgaacagtagtggcatttaaaagaggcatacagattcataaaaggtatggatctgatgaggctctagatcagcaactgttgttgcaagagcagatagaagttcagatacaaatggttcattttctccaacctgaaattaacaatatagaattcatcaatataacaggcttcaacacaggtgtgcaaaaacatacaagcaatatgtacgaaataataaccgtagagtttaaatgccaaagtagatgatacctgaacaatcacaaattttcgcttgcatttctgaacaattttcaagaatgtgtcacaggccatatcctgaaaagcgcggcatgttatatt

SEQ ID NO: 3054 - DNA, 597 bp, Gossypium hirsutum
  misc_feature (40)..(41): n is a, c, g, or t
  misc_feature (585)..(589): n is a, c, g, or t
tcttggctagctgctgcttgagcttgctcacgagctaacnnggaattaaacatttaaaaataatgtcagataggcaaaatgccagcctaccaggtaaagatacagtaacaataaatcacaaggatgaaccttcaactcctcaggtattgtccacttagactcctttgtaaccttgttgtggtaataccttcaaaagcaatctcttgatcacatattgctcatgcaaataaaattttaacagacaagaaaaaggtggatacaatagggcatctaacaatattctgtggggggaaaatgtgaatgataaataaaagcgtaaaacagagctcaaacatactttctcccctctggagttgtaaattccttccaaacagtggatgcatcagctctctgttacagaaaaatcaataattaagtaaagaagtgaaagtagtaatgaaaataatttcaggaaaacatcatgattataccaaggagtggtattatatcagtcaatgtaagctcaccaaggaagttgccaacaatgcatccaagcatatgaagatggaacaaatatatatatacttgaccttgttatcaatgatnnnnnttttcatc

SEQ ID NO: 3055 - DNA, 764 bp, Gossypium hirsutum
tatttgctatcactaatcactcaaactacactgctggatattggtgtatgttttcagattcgtttatatctggtagtcaggagttttactctgtgaaaactgttagtattgaaggcttaaaacttgcaggagtctgcttctaggcattcttttaagtgctaacatcatgctgtttatttgggagagagaaaatcaggcagagtatgtatcttttattgaggtggaagggaggtcccgggtgatgcttaggaatggcagaacaataagagttggagagtgaaactaaagcagatgtactttgtgaaagttttcaagagagcatttaataaaactgttctgtattttattaactaaagaactgaatttaaatagagaaaagagtcataacctaattgggaaaataattcccttattctaataaactactaaaagataaagggaaaataattcccttattctaataaactactaaaagataaaataaaataatcctagaatatctcaaatgatttattctaagatttatctacctaaataactttaaaatatatccccaaaatatatgggtttcacatatttcaacactttgtatctatagtctaaaccttactagcccaggaaagtgaatcagcgttattcaattgtgaaaactggtgacaaccaacacatttctggaaaatattttttattagcagcataattttccctttcagcaattacaattagattttagagtctacctatagggttaaggtacatgccgt

SEQ ID NO: 3056 - DNA, 576 bp, Gossypium hirsutum
tgtacgccgtcgatccatggcgatccttcgcgtcgacgttcagtccttgtttcaatagttcttgcatcaccgtcaggtcgttccttttggcggcagtgcataggagatcgccggcggtgaacggatcggaaatggaggcgaaatggtatagtatcctgaatattgaatggtgcttcgaggatatagcatcccacagtgcagtgttgccgtttgtatctgcaacatttgattaattcggagattaattaattggtcaaattctagtcttaatccctttattatactcaaatttgatatttaatccttatactttaaattttacataattttgtccctttactttaataacaatccatgtccataatagacaaaaattgatgaatttaaaaagcattacaatgtcttatttttacctcgtaaatgcacactgcaagcatgcttaaggagtaccaacacacaatcttcatgcccttttgatgctgctatgtgctgaaaaataaaacaatagtttaggatagttcgggtttattatgattgtaatgtatgttacttttcgactcttcagtctctcaaata

SEQ ID NO: 3057 - DNA, 590 bp, Gossypium hirsutum
  misc_feature (557)..(557): n is a, c, g, or t
  misc_feature (569)..(570): n is a, c, g, or t
  misc_feature (586)..(586): n is a, c, g, or t
tcatatatatgccactaatagtcttacagattcaggaagtgaagtcaaatttccaatcaacgtgtacctgcccaatgatgtcaatggtactccatggcgaacggacaagaaaattaagaattttgggaccaataacccacttcaggaaaggcaataaaactccagccatgtcaagaatagatgtgaaagtgttttctaatatcaatgcagcaacctggaatgtaaaggcaaaccaagaaatgacatacttaatataacctaaaacagataatatatattaggagcagaaataataaaatatttgtagctgagtctagcaaacaaatgcacaaattgattgtagaaatgccttctaccatgaaagatgaaccgtacaaattagagcaacatgatcacatgagtggaagaaatccacgccacgcagcatgaaacaaataaacaatagtaatcaacttgggaatataacagtccaaatagatgaaaattaaatgctaatttagtgaactaagatatctgtaacgcatctgcacagcccagaaaaacagtagtctcattcnatgcgttacgcnnctgcatttttccagtnctct

SEQ ID NO: 3058 - DNA, 646 bp, Gossypium hirsutum
caaaatctcaacatttgtcaataaaagggtatccaggaatccatcttccaagctggataaagactccttcactgcctgttttaactaaaatagtgttgatgaactgcaaaagatgtgaacatctccctgctttaggtcaacttccagtactagagatcatccatatgcatggaatggattgcgtgaagaatataggcagagagttctacggggaaaacaagaagaaattgtttgcatcattaaaggagttatccctcatagacttccctgatctggaattctggtggggtataagtggaggtgaagaattcccctcccttgtcaaattaatcatcaataaatgtcctaagttgatgaacatgccgcgatttgcggcgcttaggcatttagagttgcagagttgcaatgaatctatattaatgtcagcaggaaatataacctcgctatctgtgctcatcattggtggctttactggacaattaattctattggataacttgcttcggagcaatgttcatctcttgtctctaactatcagctcttgtcccaacctttgctgcatcccacagagtttggggagccttgtgtccctaacatctttgacaattcgttggtgtgacgagctctcatctttgccacaacaatt

SEQ ID NO: 3059 - DNA, 629 bp, Gossypium hirsutum
tcatctttacccggattctctttgctgttgctcatcttttgtaggagaacatgtcagtccatgaaatagaggccgctattcacacagactcaaggcatgctgacaggcttcgatcagcatactgtagcaaagagacaatagaacatggatatacggttttcaaacgaatagatttcctaggaagtcgtaaaagctttgaaatgctgaagcgtgttagcggagataatgacagtaatgtatatgaactcttgattagagcttaaacatgccatttgcattagatgccttcatataccactaccgaagatggcttcgaatcttcagttagcagcatcaacatttcaacgaaaaaaaatagttacacatcgtattatgacatgatccttgtttagttatagtgtgtccggtgtgaaaggaagagtgaatgagcgaacttaaaactttgtttgtcatagctctatatttaacatgatgaagatcagcttcgtcctaaaatactgtgaagaaatatgaaggaaaatggccgactgccggataatacaacattctctattgatatattgaaacaaaaagatggtaggacccaaacatgagattcccctcccttaaaagttgataaagcttaaagg

SEQ ID NO: 3060 - DNA, 744 bp, Gossypium hirsutum
  misc_feature (470)..(470): n is a, c, g, or t
  misc_feature (645)..(645): n is a, c, g, or t
atatgctttttatcaggtatgacttgtatacgcctctagcttattgtgttaatggaacctgttcaactattgcagttgtcctgaaagcaatcaatctttacccggattctctttgctgttgctcatcttttgtaggagaacatgtcagtccatgaaatagaggccgctattcacacagactcaaggcatgctgacaggcttcgatcagcatactgtagcaaagagacaatagaacatggatatacggttttcaaacgaatagatttcctaggaagtcgtaaaagctttgaaatgctgaagcgtgttagcggagataatgacagtaatgtatatgaactcttgattagagcttaaacatgccatttgcattagatgccttcatataccactaccgaagatggcttcgaatcttcagttagcagcatcaacatttcaacgaaaaaaaatagttacacatcgtattatgacangatccttgtttagttatagtgtgtccggtgtgaaaggaagagtgaatgagcgaacttaaaactttgtttgtcatagctctatatttaacatgatgaagatcagcttcgtcctaaaatactgtgaagaaatatgaaggaaaatggccgactgccggataatacaacattctctatngatatattgaaacaaaaagatggtaggacccaaacatgagattcccctcccttaaaagttgataaagcttaaagggtgttgcagtgtcccaacaacttt

SEQ ID NO: 3061 - DNA, 479 bp, Gossypium hirsutum
  misc_feature (468)..(468): n is a, c, g, or t
cttttgcttactagaagtttcatagtttttttatcttcatcctggaaagctgtaaacttttagatgagttttcaaaactattatatcctagcttagactagttaccaagttttcccatgattaaccttttatgtctattaggaatgtacagttatactggcctcaaatatatatattcaatctggagatttcgtgtttaaatcttttgaggagacagattttgagatttgtgggatgtcagactggtacctcctcaaggtggagctccaatggtttatttttctaggtaacagagaaagaaaaaaaaagacaactttagaatatgaatatatgttggttggatatatacatatatttgacacccattccaatccttgtaacatagggtttctgctttcaatgcaagtagggacatgccttttgaagtttgaaaaaaaaacttgtttgcccaactgaatcattaaaagngacatgaaatg

SEQ ID NO: 3062 - DNA, 585 bp, Gossypium hirsutum
ttgtttgatttgaatctccttttagtacgtgatttggtcgattacaggttgttataatataagattatgaaaggaacattgggtgggaagacagaggtcagtgctggccagttagaccctggcactatttcatattacatcacgtgatatgaaaatacaaacaataatatatcaaagtttttataatacaacttgttaatttaccaaaatatatttttaaaaattaaatattgaatttattatatatcatgctggataaaattttaaatcaacccgatatttttattttattgatctaaaattatctatattaatatatatttttaagaattaaaagtgtttttaaaattataaaattcaattattaaaaaaaacaaattaaaaagatataagcctaaatgatttgaaagaaaaacaaaagagctaaagtgagggtgccagcttgtataggtacaaatttttgggcattccagttatcctaaaagggactagggacgaggctgataacccctaccaaccaagccaacatttggaataaaatacacgtgatgactggtatgccatgcgatgatgtggatattatca

SEQ ID NO: 3063 - DNA, 607 bp, Gossypium hirsutum
ggggttctaggggtccatatatcaaagagacttcaagatcataccgtcataggttgtgatgcttgcattgttaggtaaaaaaccaaatattctttttatttagctgagtttcaaaaagacatgtagaaatttataaaatttagtattctacatgtatagaaaatgagatttcctaaaagtgtcaaaaaagcccattttacttgttctatgtaaagtaagctcacataatgcttggtaacacccattttgacaccaatttccatgtgcaaaataataattagaagagctgttgcatatagttacttgcctctggagcaagattgcccacataaacagtagtatattgaggattattctcgggagcctcattattggtggtctctttaccatcctctgcatgtcaaggtaacagatgtaagtttatttcccatttggcacaaatttgaagatccataaaaggtaaaacaaaaatactaataatttgagttattgaacaaagtagctattgatgtgaatgtttttagagaatcttgctacaacaaacatacctgatgaaccattggtaagttcaacgacacttttcgcatcagagctttgcttgtcatca

SEQ ID NO: 3064 - DNA, 591 bp, Gossypium hirsutum
  misc_feature (559)..(562): n is a, c, g, or t
  misc_feature (564)..(566): n is a, c, g, or t
  misc_feature (569)..(571): n is a, c, g, or t
  misc_feature (575)..(579): n is a, c, g, or t
  misc_feature (584)..(587): n is a, c, g, or t
aatcgtggagatcttactgaaagttctgctgttaattttaaatatcgagagcagcagcagcacttttttaaggctcaagcaatctatgcagatgtaaaattggataattgtgagagttttaccctcttcaattggatggcctaatttggtctcaatcaaattgataatggcctctgtgcgaataacaaatagagatgttcaaaacaagtataaataattctatggttcaatagctgccatggaaattttgatgaacgtttataatgtgtacatttcatcttttccttgaaacttgtttgtagataatgattttgcagaagctgatgttttgggtgtatgatatgtatttatatatatattcctgctgagatcatcagctttgccagcttttttttaaattctttaggctggttttttagctcatgaaagatttcaaagacctggactgaatgatgatctgtcatttcacatgctcaacaatgatgcttcttttttaggtgaaaaaggtcatataatgtataagataaaatgaactgtgaacttttgtcacaactgtacnnnntnnnatnnnagtnnnnngctannnngatg

SEQ ID NO: 3065 - DNA, 597 bp, Gossypium hirsutum
ttgctgtgatgaagaagaaccacttatacagacagctgaatgccgtatctgccaggaggaggactgcattaagaatttggagactccttgtgcttgtaatggtagcctgaaggtattcattgtcttggcatattttgagacttactccctgaagcttcctatttcaatttattcagtaaaacggtctggtctgctgacaaaattttgttatgcagtttgctcacaggaaatgtgttcagcattggtgtaatgagaaaggtgatataacttgtgagatctgtcatcaggtaaacatcagttcttgaaatggttccaccttcattattagttcatctaggaggaatcaatctgctaccttttgcattttcattcaccaacatcagtttgcatgttcatgaaaataaacaagtatctggttttagagggtaacaattttaatttagtttcattttgttgatgaatcaatttaataacaatggtgtaaagctgcacatctttgatcttcctagttgaatgatgctttttctcatgcacttaagcgggaaaagacctttctattctggcaacttttaatttcaaacaagaacagacatacta

SEQ ID NO: 3066 - DNA, 638 bp, Gossypium hirsutum
gcacattatgctaaagtgaaatataatacacacaattactgaaatggaggttaaagaagcagagaggatagtcatagctaaaccagtagcttcaaggcctacttgctccagttttaagtctttctcggagctccttgctggggctatcaatgcctcaccccctaatgcttgctccgaaaacatagtgcctgcgataaggccaaagacggtgaggttcaagccagtagtcaatcgtgctccatctgctatgatttcttctcaggttttctcttacttcaactggatagctttctcattgcaggatctttctacctctcatcttttacttgtttcacgatttcaggcagagcagtccggaataggtatttctatctcatctgataaggtttcaaaatccgatgtcaagcctaccgtagtgtacaaaccgcaggcaaagcttgtatcaaagacaactgtttctctgttagcaaacatggtataaatattaacaatcaatgtctagcattttcttttgctttcttgactatttgattgctcagttctgtcccatcaaatgctcatgccgtactcatggagatgattggattttctttacagggaaacttcagtgctagcaaccaacaaagactgcaatcaag

SEQ ID NO: 3067 - DNA, 637 bp, Gossypium hirsutum
cttggagacagaaatacaaccttcttccatagtcaggcaacgcaaaggaagaaaatgaatgtgataatcagactacagaataaaaacggtcaggaaacgaatgatagccaggagatgaagcatattgcacaatcatattttgaagaattgttctcgtcagaaaatcaaacaaattatgagcgtatactgtccggaattgatcggtgtaactcggatgatgataacaggaaactcaatgcaaaatacacaaaagaagaagggaggctttatttgaaatgcaccccacgaaggaacctggggaagacgattttcctgctcttttttatcaaaaatgtaggcattttataggagaagaagtggctggtttttgtctacactttcttaatggcgaaatggaggtcagtcaaataaacttaactcatattgttcttatcccaaaaatcaaaaacccctccaatatgacccattttaggcccctattagtttatgcaatgttatttataaaatcatggcaaaagcgatagcaaacagatttagaggagttattgataaatgtattgacagcgcacaaagtactatcttaccaggcagactaatttctgataatattcctgataatattctgttggcctatgag

SEQ ID NO: 3068 - DNA, 643 bp, Gossypium hirsutum
  misc_feature (7)..(8): n is a, c, g, or t
  misc_feature (631)..(640): n is a, c, g, or t
aaccctnnaatcatcaaacggataagtgctcggaatgtacacaatagagcagtctggtaattcgttttttacttaatgtttagaaggtatgaggaatgcttgtaggataaactaaaagctaaggcgtcattgccctaggaagcctaaggtataacatacaaaaccgaacacactagtgacagaaacatatccgtatctgatattcgcacctgaatcctataggagagttggtaagaagctgtaatttacctgtatccacgagcttcatccggaaaacctctacttgttccaccatggcgagctcgaacactttggattcgtaaaagggtgacgggtaggttctgaacctcttgcttgcacacatcgcatgtcttgttgcctttgatggtaaaccatttaacggcacagtctttgtgagccaacgcaagctcgcctttgcagctgcattccatcttaaatgtttcgcctccttcgcatagttcaaccatacaaattctacaaacagcctcttcttccagtatgtcctcaccatcagggtctctgttttctgaaaaaaaaatgagattttcataagacgttgctgacagaagttcgaggccgaatacctttatatgctttgaacttctggcgnnnnnnnnnnaaa

SEQ ID NO: 3069 - DNA, 539 bp, Gossypium hirsutum
aactcaaagcatttcttttaatggatgcataagacaatctaccatttaatttgaaattagtattattttttttgcagggttatggggcactatacttggtcacagcttttccagttatcatcggtatatctgtagtgttaatattattttataattcactccagtaggaaggttggacacacccttttccttttgacttgaatcaataatgtataacctctttttaaatatggttttcatgttattacctttttgttttcctatgttgaattgtgcaatacaattagtgatgcaccaacatccactgcaacatccaaggaagaagtgaattttgcagagcctcgttatctgtctttggatgaatgccgcaatgcttctttgcttagttaaccatttgattttctgcaaatttatatatatttattgtatataaaaataggtatcaagaggcacattttgctctttctctctctatatagatggtaaaacacgagtcatttgataaattttgtattagaccttaggaaagctttcgactc

SEQ ID NO: 3070 - DNA, 622 bp, Gossypium hirsutum
ggtattatcattgacataaaagaaaagaaagaaagcaaaaggaagagcaggcttttctcgaacccaaaaacatgggagatttgattggataacaactgctccttgccagcggacatgataaatggccagagttggagtttaaagcacccactacaaaatgttgtctgcaagtattacggaatctcaaatatatatgcccatttctcatgaaaatttactatggggaagaagatataaccaggttggtaggcgatgagagatatgcgaacacatgcagcaaagacagagataggtagaaatcttcaaaccataccaaccaaccaaccaaccaacagtgaaactacaaaaggatttactgccgctctatctgaattgttatgtgactgatattgtattctctcctgatgtaatctataaccttgttcaataccatgtcagcattagcttcacgcttaattaagacgtggcaagctaataacaccttaccaacagttatggcccaaatgtgcagttcatgtatggcaacaacctcgtccatctcacataaacccttctccagcctcgtggcatcaatttctcggggcgtgctctccatcagaacttccaaaatgtttcgcagcat

SEQ ID NO: 3071 - DNA, 611 bp, Gossypium hirsutum
ctacatgccaaagtgatcacactgaactacaaagtaccaaggaaaatttttactgaaacctacttaaacatgttcatttaggttacttgttcgctgatctgttgagggaactcttatgctcataaatgatcatcctttctcttactacagttcaacaaaaagatacaagaagtttaagccaaccaacatttgtccaaaagctaaaaaaggtatcaaagattttatctgagcatagaagtaaaccaccatggcacaagtaattctaaaaaattcaggaaataaatgataccataccaagcaccaaaatgagccaacatagcatcttagtaattctgaaaagctcaggaaaaagagggaccatctcaacccatctaccattcttagtcaagttcttaagagggcaaaaattcaaagagggccagaccatgaaatttttaatatgacgtaagaaaagaaatgttgaagaaacaaagtggctgacaaatgatactaaggaacataaagtcatggtaaaatagtatgagaaaagaattgaggaaattactttaaaggaaagaggaaaaaaaaaacaaaccttggtatgaggccaaagttgatcaggaaacacatgc

SEQ ID NO: 3072 - DNA, 645 bp, Gossypium hirsutum
aaatgtgtgtgtatatatatgcaggggtaaagagcatgttgagtgggtatgagagcttggtagagacaacagcaatgatgtccaagaaatttaatacaaaaacgcaacaggagcttgtcattcaagttcttgacaccgccatccccaagctcattctaaacatggcaagttttattcatttctttttgtcatgctaaatgcattacaacatgcaactcatatgagttcttttaccaaacaatggcgtccaaggataaacctagaaaagtgatgtttgcatgataatttacgtgttcatacgttatatatccttgtctagggtgtttttttaatgaagggtaaatggtatattgataaaagtatcatgaatgctttgtactagaagttaaattgcatattgccctttctattaaaaaattaggcaaattaatccctctacattagatcaaagagcaaattgatcttttttgctaaaattttcatccatttgtattgttaaaaattgacatgattaacgaaataattagatagtgacacgtggtgtcttacgtgtatctcatattgatatacaaaaatcagtttactttttgacctaatgtacatagattaacttatctattttttagtagggtgcaaactgcaatc

SEQ ID NO: 3073 - DNA, 786 bp, Gossypium hirsutum
  misc_feature (667)..(668): n is a, c, g, or t
  misc_feature (675)..(689): n is a, c, g, or t
  misc_feature (691)..(693): n is a, c, g, or t
  misc_feature (697)..(704): n is a, c, g, or t
tgatggataaaataaaaatagaacaaaaaatatttgatattatgttatttagctgattaaattcaataaatatggttgggtgaaataatattatacagtagagataaaataacaatattttatttagaatttttttaatatattgtaaattttaaaagcattacatttattaataaaataaacttataataaattatatttacattttcgttatagtattcaacagttatataaatagttgtattcgatttattaaacatatatttaatgtagtgattttttttctttgttttaatcatttttaacgttcttttctctctaattacccccacgccccaagttctctccgtctctctgtattaaaagcatgaacactcgtaagaaagtgcatcctttccagaatccgacagtcctcctccgtaacagctgccgcctgccaccgtccatcgatgtctttgttcataagaaaaatcctttggagaacaatcttaatcccttctctctgtttctctaattaattttctctgaatcagcccatgtaatcgtagatctacactttaaattagtaaaaaataatttaggaatcctttttgccatcgtttttctttgagctgggttggagatgtgtttctctctccaacccagctcaaagaaaaacgatggcganngggattnnnnnnnnnnnnnnntnnngtannnnnnnnaagtgtagatctacgattacatgggctgattcagagaaaattaattagagaaacagagagaagggattaagattgttctcca

SEQ ID NO: 3074 - DNA, 622 bp, Gossypium hirsutum
tttctgatatgcattgcagaaagatactgccagtgtgatttctacaatgctgctagtttctggcattagtacaattctgcactcctactttggctcccggcttccattagttcaaggaagttcattcatctatctggcaccagcgctagttatcatcaatgctcgggattatagaaatctcgcagaacatgtaagcagaggaaaatgagtgctttaccttctgctgtcaatatcttttcttttttatatagttttaacttatccgtaaatggctttgatcctctaaattctgatcaaattaatgaacgtgatctctttattttcataaaaaatttcctctatctgtaagaacattgagcgcatctctagttcatgtcttgcaagcttaaaccagtgtttcttgcaatactatctttttctagactctagttccaataatacatttttttttcttttaatgcagaaattcaggcacataatgagagagctgcaaggagctattattgttggttcaatattccaaagtatcttaggattcagtggattgatgtctcttttactgaggtaattctatcagaatttttgttcatggatatcattagaaattgccatgtcaactatc

SEQ ID NO: 3075 - DNA, 649 bp, Gossypium hirsutum
  misc_feature (642)..(642): n is a, c, g, or t
  misc_feature (644)..(644): n is a, c, g, or t
gttgagactatataagcaaagtgtttgaagtagtgtaacctagtcatgtaaatttgccatgtaagatgttgtaattgtgtttaatgttatgttagttgaagttgatgtatagcatgcaaattggataaaaagctcaatttgtgagttatgcataggttcgagggaatcgagagtgtttcgagaagttaagcaacagagcttcagggttctaacctaatattttacttttgttaggactttttgttaagttttgggcatgtatgtaggcataagaggttaagttgcatgtcggtttcttatcttacgttgtagccaaggaagcaattatggaagcattcaagaacaacaaagagaaatacaaataagtattcaaaatcatttatacaaggataggcacgggcattgaccctaaaatttagaaattgcaattctaactctctataaatgatcaaattataaattaacataagggaaaattatgctctggcccccaaaaagtgaaatacattctatttagtcccttcaaaaatgataaaatcataaattaacacatgattaaatctatatttgacatctcaaaaatttgtaattcaattttgaccacttaaaaaaaattctagattcacccctgatgctagtaancnaatgc

SEQ ID NO: 3076 - DNA, 620 bp, Gossypium hirsutum
ttatctaggtatgcagactggttcttttaagtcttctaaaatctggttcagttgaatgtctagattgtctagttgaaatttgacccaacagagaggcagaagaaaagcaaggttaagagagaggtatttctatcgtagctggtttttttggtttgcttggatttgtacttagctgcatgttgactttatatttgcaaatatctaccaatgatattttgtaaatatttgtccacaatcccctgaaattgcaaaaatcaatctattggtcacttggtattttagctggctgactggtagatgtcatcttggttagacaagtgtattggtatttccattgtcttccctgttcacttattataacttagtagttttctcatgctttatgattttctcacaggaattggttgtgatgcgaaggttgctttggacattcacaacttgcgagaggagaatcctgagaagttttataatcaggttgttatcatcttcttggaacgtgctttgtgaagtaccatgcaaaataaatatgatgattgatggaataactatttggtttgttcaactgaaaatgattttttattttggcctacttgattatgatggctttgaactttctggtg

SEQ ID NO: 3077 - DNA, 629 bp, Gossypium hirsutum
tacctgtaatcaaatcctacatggattatgtgtatttctttgagccattctagtttggcaccattctattttttatgcaaactactcttggctgccatcctttatggttccaatttttaaattttcagaggctggctgctggagaatggtttacagctcgagtttcagcctgtgggctgtttcacattgcttatccaagtgcccctgagacgttgaaaacagaattacggtctatatacggtcaactatgtcaagatgacatgcccatggtaagaaggtctgctgcgtcaaatctgtggaaatttgctggaacagttgaatctgctcacttgaaggctgacatcatgcaaatgtttgaggatcttacacaagatggtaatttgaatggtttagacatgcttggttgaggaaaatctctgtagtttttagcttacattatttatctttccacacgtggattctggttctgtgcttcctctactgccgcctgatttttagtgattgacttcgtttccttactgaggttttgtcaagtattctttaggccatcttgctcaaaaacaaaattgatttttgttttccatattgaatgtacttgactagtttgttaattacttggtaataggcta

SEQ ID NO: 3078 - DNA, 647 bp, Gossypium hirsutum
  misc_feature (64)..(66): n is a, c, g, or t
tctgttcccttcgatgtggcttcctatgcatatatcaccacgaccatgccatgtaccgtcttgnnnttgttcatctctagtgttctggattcctgctccatgtccaaacaaaaatgaagctaattgaatgaaacttataagcaaaaagttcaaacacagtttggtaggaacaagaacctgtgataatgtacaacaagggcacattagatggtagatgcaatcatctaacaagttatcagtaccctgcaaacaagcatttccgacaacagtacgatatcagtaaaaccataatcgatgtctatgctgctattcgcactaccgtgtgattatgttgttatgtaaagtaccatgtaacatgttacaaattttatgcaaaacaggctttgtatcaatctagttggtctttcagacacctagttgaaacatttatgtcaatccctaagaatcaagcatgatgataagtaaaatttcttaccataatattgaattttcttttgatttgcatacggaagaaccccgaatacacaccgagagatacggcgaaagcaacggctaaatacaggaagcaattccggtcggtgaccataaaggcaaggatgttgagaaacacactaacaacaaaaatgaaataaacagttcctgaaaaa

SEQ ID NO: 3079 - DNA, 612 bp, Gossypium hirsutum
gtctttgattcaggttctggttgaaaccaccatcaacttgaagctgcaataagaatcaaaacgacccatgaaatgctaaaagttttagtacaattaaaaggaacaaaacatacaacaaaactccaaaacccttttgagcatgctagatattgtgagccgaaaacaaaaacctaagaagatataacttcaaaaaggaataacaaaaagtgaagaaaatcacataaggaaatctacccctctaccaggccacaggatatcatgaactagagtcaacatacaagactatggtcgaattgagtcacctcaaaacatccacgaaatccatggtgtccacagcagattcccaacatcccataagtaccacatgagaagaaaaatgataagcaattgcagtgtaaaaataaaggaatgtggaaaacttctaaaagagttccacatacagactttaaatataaaccattcctttagtgttcagcaactttctagcaaatgataatcataaaataatatattaagcaaaaaaataagataaccataaaataatatatatccacatataatttgaagatataataactctgcatcactacataaacgaaggacagatgcaag

SEQ ID NO: 3080 - DNA, 575 bp, Gossypium hirsutum
tctttggggaagagcaacctccaaactattggtggtttttgaagggagttgaaggtataacaggtattataatggtggtgctaatggccatagctttcacacttgccactccatggttcaggcgcagcaagctcaaccttcccaagttccttaagaagctcactggattcaatgcattttggtattctcatcacctttttgttattgtctactctctcctcattgttcatggtatttacctttacctcaccaagaaatggtatcagaaaacggtatgctttttcttctttgttcttcttctcatttcgattcccttcattagtacatgcattgacagtggtcaatctttgtaccttaattacagacatggatgtatctagcagtgccaaccacactttatgcttgcgaaaggttgattcgagctttcagatccagtatcaaggcggttaaaattctgaaggtataaaagcctatactatatgcttcaagtatccaacatttgcagccaattgcactgaaagtgtccacatttcttttgaaacatactgatatgctgttttgttttcttgacaaat

SEQ ID NO: 3081 - DNA, 652 bp, Gossypium hirsutum
  misc_feature (432)..(432): n is a, c, g, or t
  misc_feature (488)..(489): n is a, c, g, or t
  misc_feature (498)..(508): n is a, c, g, or t
  misc_feature (511)..(515): n is a, c, g, or t
  misc_feature (538)..(541): n is a, c, g, or t
  misc_feature (550)..(552): n is a, c, g, or t
  misc_feature (573)..(580): n is a, c, g, or t
  misc_feature (592)..(593): n is a, c, g, or t
  misc_feature (605)..(607): n is a, c, g, or t
  misc_feature (611)..(614): n is a, c, g, or t
  misc_feature (616)..(622): n is a, c, g, or t
  misc_feature (626)..(631): n is a, c, g, or t
  misc_feature (638)..(638): n is a, c, g, or t
  misc_feature (640)..(641): n is a, c, g, or t
cagcgatgaagaaatctatgcagtcctcaatgagtgttttatggatcctaatgaaactgcccaaaagcttctttatctcggtaccgaatgaaggtttcattgtttcttttctgttttcacggggtttcatgctccttttttagtgttttgctatgtctgagagttagcttggtttatgatctgtttatttttttcctctctgcggcttttgtattttttgttgaagagttcaagaattgggatttttgagagatggggtcttgggcactttcatatgttttatgtcaatagaaagtggattgtgcaatgtttagtgttggcagagtgaagaaagttgggattttgagaagtgggattggcttgtttttatgcgtgtagctaatagaaagtaaagtttgcactgtcttgttgcttgagatttaatctatacangatttcctcttcccttcatatcaaacttgatctttgtctattccttatgaagttanncctgctgannnnnnnnnnncannnnnatcttgctctgagatatataaannnnatgatatgnnngagttaaggatttacacaagnnnnnnnngttgccattgcnntttgcatttctnnnattnnnngnnnnnnngatnnnnnnaatatgngnntattccaggca

SEQ ID NO: 3082 - DNA, 516 bp, Gossypium hirsutum
cagcttttcagtgcatcttttccaccctcctcaaaaccttgtcacgagcagccaatagtacaacaagaacagcttcacttgctgtgccctgtatcactccaccaccttgtcctgcaacacaattaccaacctcattccataaactttagagatatgttactctttcattcttattaagcaagaaaaagactgaaacattgtgatgctagaaataattcaatgaaaatcccctggacccaccattgcattctatatcagtgttttttttttaaagaatctgaagtccttacctgctgaaaggaagtcttcaggtagcttaagcatcttagctagccaatccaaaacaatcatttcaagctctgtagcagcaggagatgtaatccaactgaaaccaacaatattgagaccagcactcagcatttctcccacaaatccagcaacgctgctattgaaaggataggatgcaatgagggggggtccaggggattttcattgaattatttctagcatcacaat

SEQ ID NO: 3083 - DNA, 546 bp, Gossypium hirsutum
  misc_feature (528)..(530): n is a, c, g, or t
  misc_feature (539)..(540): n is a, c, g, or t
tttttactaaacccagaaaaagcaactttgtttgatctgtttagccttctattctcgcctcagttggagacaagaggattcatagattgtcctgggagccaacatcaaagctttcttcttcgatggcccatcttcgtctccgttgttcttcaaatactcctcatttgggtaaagaaacctatggcctttatgggggatgccatcgagatgtggctcaaccttttatctgccaacggtggcctctttcgtctcctactaaatcttccaacaggtaaactactagctgcatgtcctccacaatttggctgactgacttctcttttgcctatgttgtttgtttgcaatcattattttcatcatcatacctacctttcatggtgcagggaaaacagaatggcccaggcgagcatccgcgaagtttacatcgatggtagggaacaccgacactcgccttgaattagacgaaaacattaagccagctgaccaaaaatacaaagcctcgctgtctatgatggcttccaaattatnnntatgagaannaagcct

SEQ ID NO: 3084 - DNA, 572 bp, Gossypium hirsutum
ttttcctttttaaattttgaattagtattggaaaatcgcagttcaaacttgaaagtagtcagagtttaagattaagcatgagaatcaatctatctctgtttttttttgttttttttaataagtaaataagcttaatcaagcctagcagaatgtgttcaagtaactcaagttttatctcagataaagctcaaattttaaaagtaaggcttgattgagcttgagccgtgcttcatgctttgagtttctgagttaaaactcaagctttggtcaataacaccccattccaacaccaaatcacacatctaagcctctatttcctcaccaaacctacttaccaccatttcaataccataattaaaaccttcttatagatccccaatttagtggaatcggacacaacagataaaataatattaaaagctttttatatattcctccctagaggtgtgcatgggtcgagccgagccatgcccaactaaaaatttaagcccgtttgctaacccaagcccggcctagcccaaaaaatggacctaaaattttacctgagcccgacccggctcgcccatattaat

SEQ ID NO: 3085 - DNA, 629 bp, Gossypium hirsutum
agactgcaagagagtgatcaatatacaggatttatgatgtgatcaagttgggaaagttaatgcagtctcagttctataaagttcatttaatacaacatttactccaacttcaaagtaccaattggagtaacttctagccataaattctacacttcaaactcccaagaagaacccaatgttcatttaattctagcattggaaaatgttttgtatactgaaaaaatggaatagtttgatagcgagatcatcaatactacttttatatccaagtaggtcttgcttggtctcaactatcaagctagatccaggcttactttaaagagtaaggatcttagattagttttcatttagatgatagtttttttaaaggaaaaataaagctcttaaactaaagcagattagcttgctcaagtgttaccatatcccctaattggtggcctatatgccataggtcaggggttcaaaccccaccaagagtgaagacactcacattcccttggtgggtggccatgtgaccatgtatggtctgttgccttgaggcgctcctctccatgaaccgtacatgtctctcaatggaggtgggagacaaaaccccggcacgagctggggacaataccttatatcattgg

SEQ ID NO: 3086 - DNA, 663 bp, Gossypium hirsutum
  misc_feature (656)..(659): n is a, c, g, or t
gtgatatctcataatttcaagaggtaaaaccttttttcgcaatcaaatctacttatgttatcctttttgtccatttgtctcaggccatgaaagaaaggatgagcgatcttgcgcaaagcttaggaatgccacaaggtctcggtgagggattaaagcaacaatgatctcccaactggtccccgatgtgagcttagcaagggattaaacgatggtcaatctccaccagtcaacacctggatgagctttcaatttttgcgtacaaatcaatgcagaaaatgctcatttatatgctttttaccatgaaactgtgttgtggttttagttttctgatggaactcacactatttattctaaaatgccttgatgacttaacaatatctgttcaacttaaagggcgtattgcacattccaaaatggaaatatgatggtacggtgcatgcctccttccatggatttgtaagtttaaacagtatgttacttaacaatatgctaagtagaaacactatatatgttacttaaaaccctaggtccaatgtatcaaaaatgctatgttgcataacaatgtcgaatgtttccaaaacttataaagacataatttgtacttgttcaactgatgttataactgacattgaatcaacaactactttcacttgctnnnntgtc

SEQ ID NO: 3087 - DNA, 662 bp, Gossypium hirsutum
agtttagaatattattttcattacaaatctttattaaaatcttgatatcggcataatcttattttggttaatcaaaggaattcaacattaaataagaactgaatcttacatattttcctttgaattcagtatccatgaagggacttttccagtaaaattatttccatttaagaacctaacaaaaagaaatcatcaagtttttctttttatttccatttgttccaaaggagtgtatacataaaagaaaaggaaatctacactaaaattaaaaaccatatccttacaaataattcaagttatcaagagtagaaagattttctgaaatttctcccccgagtctgttgaaactgagatctctacaagaaattatataaaaatgatattaaaaccacatgttatctcataaaaaaaattcaaattaaaccctgacctctcaaaacactagattatacttacaatatctttatggatgtgaatgtcccaaaagaagcaggtatctctccaatgagattgcaactccttgacatcctgtaattcaatcacaaaataattccattgtttttgtttttggaactcttcaataactcataactctaatatatctttgcctgatttcatatttctgcttacagtctttccaatttaagcaaactggcatcgat

SEQ ID NO: 3088 - DNA, 856 bp, Gossypium hirsutum
  misc_feature (198)..(198): n is a, c, g, or t
  misc_feature (219)..(219): n is a, c, g, or t
acaaatattatatatatatatatatatataaccatttacaacaaagatccactaatgatgttagatgagaaacttgtcatacatgatattactttgttgacagcctgttacacctgtgtctgtgaagttgttgtatgaaagatcgctgcaaatagaatagtttagaatattattttcattacaaatcttgattaaaancttgatatcggcataatcttnttttggttaatcaaaggaattcaacattaaataagaactgaatcttacatattttcctttgaattcagtatccatgaagggacttttccagtaaaattatttccatttaagaacctaacaaaaagaaatcatcaagtttttctttttatttccatttgttccaaaggagtgtatacataaaagaaaaggaaatctacactaaaattaaaaaccatatccttacaaataattcaagttatcaagagtagaaagattttctgaaatttctcccccgagtctgttgaaactgagatctctacaagaaattatataaaaatgatattaaaaccacatgttatctcataaaaaaaattcaaattaaaccctgacctctcaaaacactagattatacttacaatatctttatggatgtgaatgtcccaaaagaagcaggtatctctccaatgagattgcaactccttgacatcctgtaattcaatcacaaaataattccattgtttttgtttttggaactcttcaataactcataactctaatatatctttgcctgatttcatatttctgcttacagtctttccaatttaagcaaactggcatcgatgagtgcttgtgtaaaattgtttcatctccattcaag

SEQ ID NO: 3089 - DNA, 797 bp, Gossypium hirsutum
  misc_feature (622)..(624): n is a, c, g, or t
  misc_feature (679)..(681): n is a, c, g, or t
  misc_feature (683)..(688): n is a, c, g, or t
  misc_feature (690)..(690): n is a, c, g, or t
  misc_feature (698)..(699): n is a, c, g, or t
  misc_feature (701)..(701): n is a, c, g, or t
  misc_feature (709)..(713): n is a, c, g, or t
  misc_feature (715)..(716): n is a, c, g, or t
  misc_feature (722)..(725): n is a, c, g, or t
  misc_feature (727)..(727): n is a, c, g, or t
  misc_feature (737)..(744): n is a, c, g, or t
  misc_feature (746)..(746): n is a, c, g, or t
  misc_feature (750)..(751): n is a, c, g, or t
  misc_feature (753)..(755): n is a, c, g, or t
  misc_feature (761)..(762): n is a, c, g, or t
  misc_feature (764)..(767): n is a, c, g, or t
  misc_feature (772)..(772): n is a, c, g, or t
  misc_feature (776)..(779): n is a, c, g, or t
  misc_feature (782)..(782): n is a, c, g, or t
  misc_feature (786)..(790): n is a, c, g, or t
  misc_feature (792)..(794): n is a, c, g, or t
ttgacgagataagttatattttaggtgaaagttactaacttgtagtgcctggatagagtacaatttggagtctactgataccttttaatctttatctatctctagtataatcctaaccgaaaacttttaaatgaacaggatacgcatttcactggatgctaaaaagtagcttcaagtccaacctacatcctgaattatttaatttccttataacatgctggtacacaactatagttccggttgtaactgtctttcctagagttaataaaataatggtcataatgcagtataagttgataagagacaataaatgaaagacaggctgcaagagtaccttttttcacctcaatgccttgaattgcttgcataacctttgcaagaaaaagaataataatatcaaacaccatacaacttgattaataaaatgaatcatcaacaaactactccataaaaataatggaaagattttgtttataatctaagggcataaatatcggcataactgtacaattaaagatgttttgacaagctccatgtaagcttcatcttccactattaacatacctggtcttgttcacaaccaaaaatagctggtcttggtaaagcatcattaattgtacannnatgccgatatttatgcccttagattataaacaaaatctttccattgtttttatgnnntnnnnnnantttgtggnngnttcttttnnnnnannaagttnnnngntgtttgaatnnnnnnnntntttnntnnngcaaanntnnnnccaanaatnnnnggncttnnnnngnnnaaa

SEQ ID NO: 3090 - DNA, 616 bp, Gossypium hirsutum
ccttgggatgggtgggctcattttgaacctaccttagttgagaagggtgcctggatgtatcctagattgttttgggaaactggagttcttggccaggtgctgtaccttgaagcacatgctgttggcatatctgcaactggaattggttgcttctttgatgatcctggtatgtcttttcattttcaccattattctaaacttgtattccgaatcaacagtgattatatatggtatcctagtcttcaaataaaattcttcatcaaatataggttagacatctcatctaaatgatactgcttccttgtcagtagtttcataaggtagtctcatctttggtgagggtgtttaaggcagtctcattgcaatttgtacattgatataagattatttgcaatgaactgaggaaataatacccttaaggagcatacccctttttcaggagtaacacaaaaatccgaagcctgcccttgcctcaacttccccttataactacaaagttggacccatcatttcccaaagatcaaacattaatgacgtcttttttttttctttttatactttgcagggcatgaacttcttgggtttaaagaatcaaagtttcaaattctgtatcttt

SEQ ID NO: 3091 - DNA, 620 bp, Gossypium hirsutum
gcgaatactattgtagagtaaacacaacataaatctttaaaatagagagagagagtacataccagctcttgttctctccgttgacgcttgtagatgcgacgccagccatttaggagtacctgtataaccatatatcaggtatcaaagcataatcatatatagcatattcatgactacaatgacgttcaagaaacagaagattttatgaatctgaggcatcaaaaagcatggatatcaagttccggtgaactttaaattactaaattttaaattcagtaaaagtaagcctcaatcagaactggtttttgataagaaatagattcagtattgaatgttaaaaaataacagccatcaataatagccatcatcatgccgctctagtattgcaccttgaaggagggagacaccagcaacaaattaatcacaactgaggccatgtgtctaaactacaaagtcctatttcgttctttacaggccgagtattatgacttggtttagttcacttgttttattagattagtaaagtagaatttattgctcagagatgtccttcagataacttcttgaagttccatgtaaaagtaagactttttttcggcataatccatcaagcttgtatc

SEQ ID NO: 3092 - DNA, 594 bp, Gossypium hirsutum
aattattgctaaggtgttggtcttacggatgagtgatatgctggggacttgcattaatgaatctcaaggggcgtttattccaggtaggccaatttctgacaatgtgttggtagcttatgagattcttcactcgtcaaaaatgaagaagaagggtaagaaaggccactttgcgcttaagctcgatatgagtaaagcatatgatcgagtggaatgagatttttttgcggggatgatgaagcatttgggttttcatacggattggattgttcttatcatgcattgtgtttgctcggtttcatactctgttagcctcaatggttctaatagtgagtggttttctccttccagaggtttacgacaaggggatcctttaattccttacttgttcttgatttgtgctgaaggattttctctgcttattcaggacgcaaaggataaagggaagatgttgggggcacctataggtagagagaaattttcagtcagtcatttattttttgctgatgattgcatattatttggggatgcttcatgtgaaggggctgaggtgattcaggatgttatcaaagagtatgaaatggtttcggggcagca

SEQ ID NO: 3093 - DNA, 630 bp, Gossypium hirsutum
atcaaaggaacatttaggggtttgttctcagctttctgaacttccaccgtgaaagtttccaacaattccttgaacccaaaatttgatgaagaagaagtaacaggggccttcattgaattcttgacatacagattggaaagggggagctggaatttgaggggttcatggggttttgaggaatttaaaggggatttaccgaaaaaagaaagggcgaattgagataacatttcctggggttttgttttgagagacttggattggtttgaggacttcagcagccaccataaccattgcagatgattactgttccaaaagggttttgtttgatcaacatggtaaaagtagttgaaatgaactgcttattttaaattgaacttgtcagtttccatgagtttggacttggatggatacatgtgtttggacagttctcgccggccacctcctcacttttcttgttctaatcaaatatacgttagctaaaaatattacctcccctgattttcaattttcatttttaaccaactaattctattaactaaaaacattattttaatgatttattacgcatttttcgaataaaaaaatacaaaattcgaacctatattgcttctcttcctaaattttgttctg

SEQ ID NO: 3094 - DNA, 654 bp, Gossypium hirsutum
aaggtgattactgatgcagttgtgggagttggctctttgttgttgcagtggggggagtggtcgaggacaataagggatattgattttgggggttctcctgtaagctaggggtttggccggtgctagaagttgagttatagtggggggcttttgagggagttaaactcgcataagaaaagggagttaagaagattgtcctagagacgaattttatagaggcaattaacttgttgagttgtcagactcgagatcaaaacttattaaggtaaaagtgggggagtttcgtgtcatatatgtatcaagacagaagaacatagtagtaaatgatatgaccaaatttgtcatgagaatgaatgtgaaatgaaaagtctttgacgaatcttactaggagatgcatgatattgtagtggttaaaactcctaatctaataacaaaataagataaacaattaagaatggttttagtgaaatttaaaattcaatcattaaacttaggctattcataaaatttaaaatgcttttgagatgctatatatgggaaatgagacgaaaatatacaacctttttagtggtaaaatgagggaaataaaataacaaaaagttaccatttgaaatcaacatcatctaatttattaccttaccatttcaacgaaag

SEQ ID NO: 3095 - DNA, 635 bp, Gossypium hirsutum
tcaatgacgagattaattatttccatttagatcattggattcaaaccaaggcaaacaatgtagctagtaatggaagcacgatcatttagatcgttggcccagtcaccttgtgcataagttcaaagattgatctctttgttcttattaatatgcaaatcatatcgagttgtgttcttgggacaaagtagagtttagcttttgcttattattcttagaacttgaataatgttgggaaaaattcaaccagtcaaatcgattttgacatcactatttttaactctctacattaaacatattttttaattttttttcaattaactacaattttctagatggataaatttgagtattgcatcaatgaacttgaaactcataaaagacggtctctgaatgggtagcttgttaacacttacgtctttgtagtataattaaattaggtttgaattataacagaattattaaaaagattctaaagttatatttgcagtaatgactctatatgtattcgtgtaaataaatttatttatatgatacactagctgagcgtaaaattataaattatttttggtggtattatggaatcatttacgttgggtttaattctcgcgcttcacggtggtcgtaagtaggcaggc

SEQ ID NO: 3096 - DNA, 613 bp, Gossypium hirsutum
atgtggagatggcaagactaaaaaaggtaatatgtttatttatcatacgctacatgctaaatacatgcataaaattcattatataatatatatcttcaataataattgtttcacatacgttacccatttgatgtgtcacaattttgtgctgtcatttttgcttatttcataatttgcagtaattcaaatgatagaaatatggattctgatttgcctgattgaatttagggggaccgtgtttgctacatgtgtggttcacctggtcatttgaggagagattgcccggctgtttctagtcctcatcctatgcttcaaagaggtaagttccaaatgttttggattcattacgaatttttcttatttaatgtgcaagggttaattttttgttcatgtttattgggtttgtaggaaatgccgtctttccaggagcactgcctggttatgtatcaccatattggaatgggccgtactatccccctataaggccttttgcaaacccatatgacccatctggaatgatgtcctttaacacaacagtgattcctgctgctccgtttcatgttcccacgtatatgccatctatgtttggtgcatcacgtgcatctgggtaagt

SEQ ID NO: 3097 - DNA, 640 bp, Gossypium hirsutum
attttattcaaaaataaaattttgattaaattaggctatagtgaacttggttaacaataaatatattatagtttttaatagttatgtattgtttatttgacattaaaaattttgggtattaaatattttgtgaaaatttactagatttatgtaatggagataatttgcatttgtaaatagtatatattttattagaaaacttgaaaataggttaatgttaaaaaaaatctgaaaagttcagacattggtactggtaccgtaacgaaatctgaaaacagtatgcccagtggtatattacaatctaccttgcttctgcttgaacttctttatgtaattcttggttactgataactggaggttgggggatggctggaaatggaaattgcttacaagatataaccagaagatttaccttttcttttaagactcatctcaagttgatgattctgtgaagattgaatgctttggaatgtcttgagtttgtttgaagacttcctcacaagattatgagtgctgtctgaaaacctgtattcagtgttctgattttttaaattagcagctacatgctaagtattgcagaaaacttttactggtagcttacccggagaaaataattgtgcagttcttgagtctctttgga

SEQ ID NO: 3098 - DNA, 646 bp, Gossypium hirsutum
accgccgttggaaaaaacaaagaagctttaaaagaaataaaaatgaaatgagattcctatagttccaattttttccccttcttttcccctctcccggactgttcagagagataataaaatagaagaggatttcgtgttctttcaatcatatacaaaaagactctccaatgtcttctactttgcctctccccttcttcggcggcacttgcactaaggctgcattttctttctcactcaaatcatcttctcctttggttccgtttcagcgtctccagctttttcgatctacttccagaacaacaacaaggattcgctcttccttgtttcactcattgaaagctaaagcaacggccgagctagttcaagataaggaatcaggtgtagttgccaccgggaagccggtggtcgagcattcccgtacctttattgaagctcgctccgagcaaggtccagtttcctttcagctctttttcttttcttcattcatttttcaaaagaaactttttttgtgttaattgtttaaacaaatgcgctttcgaataaaatattgtaaatgttactgtatgatgcctttttctgtttaactactaagcgttaaaacagttattataaatattatgttgttttctttcttcttcttcttctt

SEQ ID NO: 3099 - DNA, 660 bp, Gossypium hirsutum
attatacaattggtttgcttatgatatggtattcttgtgttctattttctggttttataccttccaatgcacccttgcttgtcaaacattgacttagatgatatatgtaattgtcttttgctaggataattgttattctatttgcccattaggaatttagctttttttccattcgacgtgatataggatttgattggttctgggcttttcaggagctagactttttgatagaggcaaagaacagcgtcaaatgtttggaaaattttcggaagctgtctcctcatattgcagattatgtttatgcaccagaggtgcattggtctttgagtacctcaaagcttttaataatggaattcatggacggtgcatatgtgaatgatgttattaccattcaaaaacttggaatccatcctagtgatgttgcaagattggtaagttcttggcttattatcatctgcctattgtttttagcatttagaagctgtattaactcctggaaaaatcattaaaggatatatatttgtgcagttatgtgattgtcataaatatgtaatctgattctatgcaggttagtcaaacttttgctgagatgatgtttaaacatggatttgttcattgtgatccacatgctgctaatttattagttcggccgttaccttc

SEQ ID NO: 3100 - DNA, 461 bp, Gossypium hirsutum
tttctttcttttaatatatatattttcacgatgagtcctcaaattatggtttttattttaaattaatcctcaaactattttaattacatctttaaaccatcagtgttatatctattaaattttttaactattaaaatcgttaacttaaccactatatttggaagttaaatctgacatcacatttaccaattaacttaatgattttagtaatgaaaaggccttattgatataatcttgatagttaaaatatagggactagtttagaatgtcctaacttaattttttttaaaaaatcagtatttagtataattacatattattaattaaattatttaaataattaaaataatacctacagcaaatgggcctggcctcccactcacacaaacatagcgccaataaaagggcacgagggttcttttcaaagccgtgcttcgtctttcctctcctctccataaaaa

SEQ ID NO: 3101 - DNA, 607 bp, Gossypium hirsutum
cactgtgctgcatccctgcatgtggactcatatgtggcattggtccagcaggaacccctccaagatatggaagaggtgtttgtgcccgcgggagccttagaaaaccaaagttacctccttggacaggccgaaaacctgcaacagcaccataaccaagatcaagccgcagatcccttccagggccaaaagaaccaggtggtctaatccatctgtcatcatcaacaattccactagcacggcgatctactcgagatccactagattgcctatccaattttcttccaggactagggtatgaatcatgatcaacagcatgagatgcattgacatttgatgccatcaaggccgctgcaatatcagaagcaatctcaaatccctgtggaagatcagtatattgtcctgcaaacttaagaagaaaatctctggaatacttcttctttatattcccacttccatcttcctcatgacttgctaatcccccatgagcctgttcgtcagtgtctgaagtttccatgtttggtgcagatatgtcagcagcatcttcccaatcatcgagttcagctttactctgtgtaattttctcactttctatggcatccacctgaag

SEQ ID NO: 3102 - DNA, 600 bp, Gossypium hirsutum
  misc_feature (165)..(165): n is a, c, g, or t
cctccttatcttcagagttctggaataaaagaagagtcacttttactcgtgcataaagtatgaagtaattttaagtttaaacagaaatagaagtaatatcctttaccccctccggtgaaaactccgaagctagaaccccatatgtagtgattacaacatcattcngggcaagaagttttgcatcctttggcccaatttgaccataatgaacatataaagacaaagatccaggctgcacatgagtttcaatctctgcctgacaatacccaaatgtttagagccacatccaataacaaatattgaagaattaatcagataaaacatagatattaatagaactgctaagttccaaaaaggcagatgctactataagcaaaaccatgaactgagtctacttcaaaactgaaaagacaaaccttccattggccaagaagagtcatgggacatataatcagattgccaccattagcaagtttgttcctttgctttgacaacttatcaaagccgggaaacttcgttgcagttttcacagaatttggtgattggctgaatacatcaatggcttcaccaccttgatcagaaggctgatctgaggatgac

SEQ ID NO: 3103 - DNA, 629 bp, Gossypium hirsutum
tgtcagcttctaaggattctaccctttcgcggtaagcagagaagtccctcatcttcaattcataatcagccagagcattttctcggtggctaaggtcagatttcaagcgttccagctcagcattcatatcttcagtggttttcttcaggctgtcacgttgctgcaccaaagatttcccttttctaacggcaagatttaacttttccctcagagaagctgatttctgctcttcttgattaaggagctcttgcaactcttcccttttcctttcaagtgcttgaacttcatgaagcaaagattgatgctttccaaagatttcatctctttcatccttcacctgcatcaagtcaagcagcattgcctccagctttttctttaaagaagctacatcctcctcagtagtaagtgcatctctgcttctagcttcatcaaggcttgcatcgcttatcttgggctggtccatttcaacatccaccaggtcaggattcatggacttgagattagtgtaattctctataagcttattcaataatctttccaagcatgcagtactactaccacctgaaaccaaatcttttgcatcagcgtccagtaacacatcagaaatcaagtgctgcaatctccttatt

SEQ ID NO: 3104 - DNA, 662 bp, Gossypium hirsutum
acaattatacagataaggttgccattatttaactttcttatcctgccctagtagagagactgcgcaaaatcactcatggggtagtgaaatgcacgtatcaatagattgaataaaaatgttaatcgtaacagatagtattttacaaccaatattttgtacaattacgtgcatagtaattaacaactaacttttgtaagatggtgtgaggaaacaccctaaagacagatgtataatagaatgcacatctaacttcaaatggaaagggaatccaactaactaggcaaatatcaaagcacaaatatcagtctacagtctacacacctctaagctcttgacaaaaattgattggaaaatgtaatgaattcttgctccagcagacagctcacatgtagacatttgttcatttttcccctctaccattgatgagaatgctggttccaacaaaccattatggtatcattaccaacttagtagattgtaaatgataggtgtttcagaatattaattttacagacagccaaacaaaaaatttaccttcacagtacttcgaaagaatattcaggagaagagctccctggccagcctataaattataaaaccataattttgtcgtaagaaaattattccagttactactcaacaaaggtcggggtagacaaaca

SEQ ID NO: 3105 - DNA, 594 bp, Gossypium hirsutum
  misc_feature (511)..(511): n is a, c, g, or t
  misc_feature (513)..(514): n is a, c, g, or t
  misc_feature (516)..(517): n is a, c, g, or t
gattctcggtatttcttttctatcatgaacttcactagccacagttgttgtgttgtctctatttcagcttaccttctgaacctgaaggtgccaaactgactgattgggcaaaagccgacctggataatatttttacaacaaatgggagcaaaccaggatggtgtaacgtagacccagctgctgcatatgattcaaaagtgctgtttaaagagatatgtgattgcaaatatgatggactgtgggggcgtttctgtgaagtgcctgttgaaagtgtttgtatcaatcaatgttctggaaatggccattgccgtggtgggttttgtcaggtaatggctttatccttctgcatgtttatattaactgtggaaattgattttcttttgaaaggaaaatttctctcaacagtcttctttctacctagattcattataggcaaggatatacacatatgtgtgtgtgtgtgatgagtagtgattgataaggataaaagaatcactgacaacttttgggntnncnnaaaattaatggactacttgatttggaagtataaaagcttataataacaattttcgtaagtttcctttgaatgatgtg

SEQ ID NO: 3106 - DNA, 390 bp, Gossypium hirsutum
  misc_feature (28)..(29): n is a, c, g, or t
  misc_feature (44)..(46): n is a, c, g, or t
ctttgttcgagagatatggaaccaaatnnggtaaacaagcatannntggaaacaatacattctttggtcatatcaaatctatatatttctcctcacaagatttcagcagctgctgcttctgtgctgcttatttgctcaagtgaagagcttggtgtgcctattactgttcatcaggttaacctctttccaaggttcttggttttgtttagaagaaaataaagtttggccatacatttttgtgggtaataaatccatttctctttgagattataacaatgaagtttgattcttaatgtagacaatcctgcctctgattcactgctttgggaagggactatgccctgatggaattgatgtgctggtcaggattggtagttacagttcatcggg

SEQ ID NO: 3107 - DNA, 616 bp, Gossypium hirsutum
ttagtgcttagaattaaatgaccgatcatcaacgaactctctcatgtatataacttttgttttatctttgttatacatgttatgtttggattgctttgcaatttagtgtgaaagaaatggctaatctttttatttttgcataataatgatctctacctttttccaattataagaaatgatactttttctcattgtatgttcttttagatcaacttgatgacttagtctatgtttttttgatattttacattgtagttttctgagaggagatcaatatgcaatagcattggctttgctagaaggaggaaaagttgtcctgggtgtgctggcttgtccaaatcttccactaacttccctcagtgatgctggtcagcattctccaaataataaagttggctgccttttctttgctgtagtaggtggtggaacttatatgcagccacttgatggttcttcggcagtaaaggttataacgacttattataattttttgctattaatctcagtatgtatctgcaacttatacaattatatgggatctccaggtgcaagtaagtgctgttgaaaatcctgaagaagcatcattctttgagtcttatgaagcagcacactccat

SEQ ID NO: 3108 - DNA, 676 bp, Gossypium hirsutum
  misc_feature (635)..(651): n is a, c, g, or t
  misc_feature (656)..(656): n is a, c, g, or t
  misc_feature (658)..(658): n is a, c, g, or t
  misc_feature (661)..(663): n is a, c, g, or t
gagcatcttcgggatatgttgcaaccatggcacgccagtatgtccgcagtgtcatttcttctgtccagagggttgccatggccatatcgccgtctggattgaacccagctgtcggatcaaagctatctccaggctctccagaagcacttacactggctcactggatttgccggagctacaggcgagttgcttcatttcttgtatacatagtagtttttgctaacataccacactagaaattatatgtgccgtcatggtttaccaaatcacctcattcatccttcttccttttctagttgctgatgtggcgttttctgtttgtttttactcagttaccatctaggggcggagttgttgagatctgaatcacttggcggtgactcgatattgaagaatctctggcaacatcaggatgcgatactgtgttgttcgttgaaggtatggcaacaactcctttttaaaatctagaatgctagatgcttatcattggaccttgtatatcaggtccttcaggtgcattcttcataattgtttgaatcaagtaatgcttttgctttggttttgcagtcacaaccggttttcatctttgcaaatcaagctgggcttgacatgcttgagacaactctagtggctcnnnnnnnnnnnnnnnnntctantntgnnntgcaaaaaaaaaa

SEQ ID NO: 3109 - DNA, 646 bp, Gossypium hirsutum
aactttgtctcaacctgttgaacgacaagttagaataggtgatcttttacaaacattttcagcttttcttttatttatttattttccatttactgtaattcatgtacactaatggtggatttagatgcatgccagatatctgactatggttttaaatggtgaaagatgaatcaagaacccaaaagaaacgcaaattgtgtgcatgaaattcaatgatattaataattctgggtttgttgatataattcggggtttgagagtggcttgttttacaggtgcagaaaaaattgatgtatataactcggaggatgagaagaaaaaaaagcttgggtctcttaagaaaaaggcattgagtgcttccagcaagtttagacattcaatgagaaagaaaagcagaagacatagtagagtaatgtcggttgttaatatagaggatggccttgattctgaagagctgcaggcagtggatgcattccgccaggcactcatcttagatgaattactgcctgctaaacatgatgatcatcatatgatgctaaggtcactatcttccattcaacaatactaagcttcgataggaatggtattaggttaggccattaactccttctttgatcatacagatttcttacggccaggaaatatg

SEQ ID NO: 3110 - DNA, 606 bp, Gossypium hirsutum
  misc_feature (601)..(603): n is a, c, g, or t
aaaaaaaatctcgttctaacttttcctacatttttcttgggaaaaaatgtaaatagatctcaaccaaaaactagaatcagacaaatagatccaagattagaaaagaaaagaaaaaaaacctttgcattccaagctgaacgagctcttcaatggcagagtccaaggcaacgcgctcgtcctttttggctaacaacttaacttcttgaaccacatgaaccccccacccgtttctcagatctggagagtacatattcttaatcacctcatttatcatctgcctctcttcttctttagcagatccaagatcctccaagaaccgcttcactgtccgcttcctcaaatcacgcgcgtcgacctcacgcgccatggcctttttcgaggctgtgaacaggcagttcccgtccgtggacacatcgcctccatgcgacagcctgaacaccaccgaggacccgtgctcgctagggtgcttccaaagcacccccttggcgtgaagcttcaagagatgccgtctctgttggtcctctaggccaatcacgtcgtcccaggtagtgccggctgccgccgtgagggtctggtcaactagatcaacggcttcaagagnnnaaa

SEQ ID NO: 3111 - DNA, 657 bp, Gossypium hirsutum
aaatggcaacttactcgccattttcatttcctttacacttaatccccaatacccatttcaacactcacaaaagcttctccttttatccagactctacccattttcagaccaaagtttgcaccttttcttccaaaaacttagccttattcttcaaaaagagaaaaactgtttgtgtgacttggaaactgaactctgctgaagaagaagcagcaactcttcctgtctctccttcatccactctcagaatgtacttccaggtatgggttttttacttttcaatactgtttatggtagcttaatgttattttggtctcgtaaaaggaaaactgaatgtaaactatttaagcccctcttttgatgtactggaattttgttggttgagtgatgtaagttttatgttctaagttctatttgtcacttataattatgttaaagttcaattttgttactggtttctgagcaagtaatgaagaattgttgttatatttgtcaaatgttgctttagctaatgctggcttttgaacttaagtagtaacatagcttctttaggacttgttctttaatatttatctatggatgaagatatttgtcattgaattctggaatatgtattgtttttcatagacattaaagaacctttactagggctgcatcttt

SEQ ID NO: 3112 - DNA, 626 bp, Gossypium hirsutum
tgaggatccacataatataaaactgggcaagacatgcatatattatccaattatcactagttacttagcatcatcaaattaacttgcctctctggataacatcacactcctaaggagcctaatgcaaccaatcaggtcttccatttaaagggaaagttaaaagcatttcgtttctgttactttatgtcaagaagagtggctgtgagacacattcaattcttcatagatattttaatgacagcagagaagaaacaaaaccagtatgtaagttaaggtgaccataccagacgtaatgcagcattcctcccaaactcatccccgctttcaatcacatcacgaagtgcatcaggaagaaccttccaaaattcaccaacaaattctgaacccttacgcctgctattctgcaaaatgtcattggcaagatacagaaaggccaatctctgctcacgtggagagcaatgaaattgtctgtcccaagtttcaacaacttgttttgccttattcatatggaaaatacaccaatgtgataaagcttaccaagttaagggtgcaaaagataaacttcagaagttcatttgttcttaacttacatggcaactagacagtaatatcaaactggcatcagc

SEQ ID NO: 3113 - DNA, 631 bp, Gossypium hirsutum
cctcgagttaatccaactgctgcttattctaagaaaatcaaatggcaatccttttctggtccattgaccagtaaaccatggcctaccaaaactgtttcagtggaacagccccagttgttctctgggtcaattttgagaaatccaatgcctcaacgatcagcagcatctccaaaagcatcaccaagtgcttcccctatttttatttcctcacctaaaataagtgagcttcatgaacttcctagaccgccagccagtccagccgcgaagtcttcaagacctttaggctttgtaggttattcaggtcccttgatgcctagaggtcatgggctctctgctacaaatacatcggtgatgtcaagagctgcctctccactgccacaacctccgcaggttgttactcgcagtttctccataccctcaagcactcatagagtggtgtcattacctgtgtccaatccactggaaactgccatcagttcagggatgtctcaagatgttgcctcacctcctttgacaccaatatctttatcttgaatctggccatcatcaacttgttcgctgactgttgataggtaatcaaaatccatttagaaaatcttgcactaaaattatgaaaattcagtaagttggt

SEQ ID NO: 3114 - DNA, 613 bp, Gossypium hirsutum
agcttctactatagagagtactgcattgaaaaccgataagacactgatcgattatttaaattctagcagggttctttacaaagacaggatcaacctgtatctctcttggaaaggtggcactgaatagcattgtttgtctaacacctggtggaggcatatccatttgttccacaatctttcttatttgaggctcaaaacccatgtctagcattctgtctgcctcatcaagggccaagtacctgatcatctgtagagaaactctagccctctctagcaaatctaccaatcttccaggagttgccacaagaatatcaacacctctctccagatccctcaactgtccaaatagaatgccatcaacttaaactaacaaataaagttcacacatacaatttaagacaaaaatgatggcatagaatcagcacagctcaaaaccataatggagtttcaaatcttttatgctagagatagcaaaaagacttatcagagaaaaatttacagaacttgtaaagaaatattttcaacaagagcagaataggcagtccctcaaccatgcacaacactcccccctccccccccccaaaaaaaaaccggaaaacagttcctccttggg

SEQ ID NO: 3115 - DNA, 670 bp, Gossypium hirsutum
gtctttgttttcagcggctcttggttctggcactcagctctttactctgtgagtatcatccatcctagttaacagttattctccgaacaaaagacatagaaaagggagagtcaatggtttagttaaatttggccttccattaaaagttacatttgggctattgtttctgaacaatctgttgactatatttatttgcatgctttccagtacaagttttatatttatcctcgctcttgttggggtcttttatccatataatcgaggagccttattcactgctctggttgtcatttatgcccttacatctttaattgctggctacactgctgcctctttctattgccaacttgaaggaacaaattgggtatgcgatacttgtctcttttcctgttgcctatctataaattattattattttggtattagagaaagagatgatattttacattttgaggactccttttctagtttataatcatcatcctttttgctaaaaataaattggctctgctggttaaaccaactaaaaaaatgtaagccattgtggagaagcaaagaagattgagggagaaaccaaagatatgacaaaagcagaaaggcttcggaaaagaaaaaagaaaagaatgaatcagtaaaggctggaaatgtcaaatataaatgaggttcgttg

SEQ ID NO: 3116 - DNA, 609 bp, Gossypium hirsutum
ttctgcagaattaaaatttatgtagagtttttctgaaaggaactaatatcataagcttctaagattttattcagaaacctatatatcatatctacgagtaacaaaatttagagaataccaaagaaaaaagccccgtctagcttgcgtgtagtatttactgtcattgtttcgcatgttatctctgttcataaaaaagaaatcttaagcatttctaattcgaatattaaagaacattttgtaaaaattgcttcaatggttctgcatcgactattactgagtataaaatatgaatgagggagaatttaatgctgaaacttacctcctaagattatgcattgtaatcttttcaaatgcgattcttctaatctgttgagtttcttgcctctttatagcgtggaccaatttttcgagtgttttgatggaatgagaaattcacaatcagctttgggaagtagtggaatgtggaactggacgtgctctgttttcagtgcaataactgctgcatccagccttgcatctggatctttgtatattccttctggtatgtgctctgttttcctcttccattgtgcctgattgaaattcaattctttcagaactggttaggga

SEQ ID NO: 3117 - DNA, 490 bp, Gossypium hirsutum
aatggtaagagtagcaagaggtttaatgaattcatatggggcacaaactccttttaaaaataatatttgcttaggttttcgggtgagtttgaaatgcacctttgttgtatactaaatttcattatcccaagggataagattgaaatcaaccatatgaaaagaagcattaaaataataggaatagatggtgagcattaaaaccccataaacaaggcatatgacattagagaatgacaaaccaaggagacagcttggaaggaaggaatagaaactgtagaatgtacctttgcctgtctgtcattgttggttgtgaagctttcaagtagtaagacatgactgtgggagtatgtgcaattttagttgcactactcctgagaaaaagaaaaagagtgaagcccaagctgtcgtgctaggagcctaatgtatatagtataataatataagccccttggccctttcctcccatgtccttgccaacaacaatggagct

SEQ ID NO: 3118 - DNA, 624 bp, Gossypium hirsutum
tctcaaacttgagcactatttgaaccactatctttgtcagcctggtgcttcaaataaatagattcaatgccttgattctgtgggatggaggaaagaactaaagcaaactgaacaaggaagtgataaccatgggcattatgtatatcttccctaagactgagatcaccagcctctacaaatcaaagttgcatgatatcaacaataactcatgacaaagtaaaatctcgaataagaatcattaaacagaagagccaagaccaaagaactttatgatacataaacaaaatctgtaatcatactcttcttaaagaaatcaactagggaaaatcacgaaccaattacctggtctatatgacaactccatacattcaagtaacaagtccacaatgccaacagtgtaggcagggtccccacaatctggattaaaatctttgacagcaattagaagaacccttatctgcacaaaaggatgtgtagtgtatataggaaatatttaataatgaaaaggaaacgagtaatagaacaaatacatagctgagaaaaatataaataagaagattgctgaaagaaacagaacaagacaaaacaaagttaacagttaaacttggttgcattgtgagaata

SEQ ID NO: 3119 - DNA, 640 bp, Gossypium hirsutum
ttttctccttcttcaacgctgctgctgcttcttctgctgctgcttctgttgggtttaaaagggaaaagaactacagacaaaagccacacattcaaaaacaaaatcttcttatacagacccaaaaagggttgagctttagtggtgtgtgtttttcctgccattgctggattcattctttctttgaactttaaataataataaggtatgggggtgttgataaaaatatttactttgttcaatctgttcttgtgaaacgagccttcaatgttaaatggtgaatcaattctacactgtgagtgagtgtttctttcattttcaatatacatgatcaactttgctatcgaaactacattcttttatatgtttttggctacttttgtattgataaaaatgcccttttctccattgttttgcggtcttgtaaagttgagtttgtttttgactggttggcaccaatacatagatctgaattacattggaaatgttattttattctactaaattgagaagtgggtctttatatctcaactttctttgtattttaaatagcttctttagatctgtcgtgctttagagttcaagctttacttattgcctttatgcctttttaaagaaaattgagaagttgggtcctctttgt

SEQ ID NO: 3120 - DNA, 654 bp, Gossypium hirsutum
gggaaatttatttttttatttttttagaaaagatagtttgattctaaagtgcaatatttacacagaagtgataaaattgattattgaagtcccaatatgatcagaataataaagaatttaataatagaagtgaatacacataagcaatggaaatagagttgaatgttaaattgcctggttcaatgtttggtctcgttcatcattgaaacttctaccacgcttccctccaactgcatcaagctcatcaataaagataatcgatggtgcagatttccttgcaacattgaaaagatctctgaatcgagctgctcctctaccaacaaataattccacaaattcacttgctgatacactgaagaaaggaactccagcttctccagcaactgcacgagccagtaatgtctttcctgttcctggtggacccactagcaacacacctctaggtaattttgctcccagtttttggtagtttacagaaccgtgaaggcatgaaactacctacaaaaagaatgtgtcaatgaaaatagccagcagaaatttacttcattattcatcagagattcagtaaacctagtttgtaataataatagctacaaggaacatcagacaatagacaacaataccccagaaaaatagtagttgcactacagagag

SEQ ID NO: 3121 - DNA, 501 bp, Gossypium hirsutum
tagatttttcattctctgtcatttatatgcaaacttaatttcaaagtttttcctataatttcagtgattttcctagttcttactgtggcttggtgatactcctttggaagaagaatttttgttgttttcatatttataatttctacgaactcacttagtttgactatgatcgtggtacaaccataggaaatttcatatttataatttcaccctattctacttggtcattttctaatttcatttgtttgatcggaactgtaattttaattccttatttgctgattttagattattgtaggagtatatttgcttagagttaaagtcggttctttgttctgctagtttcatttcctttagactatttcatgcaggattataagtccaggaattgatgtagatattaatataatttgatcaatgaaattatatttatactattattagaactcttaactaagttggtgtaaatgtgtgatgagtctaagtgacaccaacttgcaa

SEQ ID NO: 3122 - DNA, 617 bp, Gossypium hirsutum
tacgttcagcttttctcttagcctcccgggtatgtagctggtcgatgtacttctcatgtaaagccttatttttaatctgcttcaacactgggggactaacaagggctccagtacctgagttaccaagtctcgaatggtgcttcttacgacccgaagaagatctctcatgacacttgtggacaaatccctgtttttctaataattttttcggggtacaaaccataactttcggtacaccacgcatggttggacttgtgttgggctcaagaatggagaacagatccgcttcatcacattcgtccacaagatgatgctttcgcaacaaatgtctcactgtttttttctgtacgagaaagcttttctgtttaccgcgacctgagcttttattccttggtgcagaggactccagcaatttgcttgcggagaatgacaaatgttcgataggcgacaagtttgttacatttgccctcgatcgaggctcaggctgagttggagttaaatggttggaatggattctatcaaagcaatcctgggcagattttcctggcacctgagatagagtcggagttaaattatcagagcaaatgcaaggccatatttgacaccgaaacaaatca

SEQ ID NO: 3123 - DNA, 441 bp, Gossypium hirsutum
atattatgttttaccgattaagtcttaactcaattagtataagtgtagttgtcaatgcaagagtatgttggttcgagtgcgctgaagcgcagtatcctcctatttatgggttgggaagagactataggtagttctaggcattgtgaattgtgacactcattacttgattcttggatatcttattaataataattatttttggccactagaagtggaaagaaataggtaaataagagaaaaaatggagttctcaataccacccttcaaagaaaagagaatttatgaaaagtagttagttatttacctgtcgtatacttgaaaagcatatctcttgtttgggaatgcaggaacccatctttggtggcacaaaattaatttaaagctttagaagaattaatatattgttaccctgtattcgatgtgataatggatggaacacgt

SEQ ID NO: 3124 - DNA, 632 bp, Gossypium hirsutum
tggtgctggaggtcaaaaagatcatgtcaaatcattttctcaagtagagatagataacagaatgaggaagattttatgtttctggtgtgtaactaagtgcatactaagccacaaatgtgctaaattacgaaagtttcacttggtaattgaagcacaggccaagctagaagttgaacctaaaagctccaattctgaggagtttcaggactgtaatgagcaattggagctaggggatcaagaaccagactctacttcaccagtgttgtcctggcatgacctccaaggatcccaatggcataacattatgaaactttcaacttacataagccaagttgaggtgattattttaatggactcaggaagtacccataacttcttatactccaaattggtgcgaagattgagcctactagtggaacaagctagcacattgaaggttatgatggttaatggggtcaagtcatccacccaaggattgtgtaagggtgttcaatgggaggcataagggtcaaagttcatcactgactttttagttttgccagtaaaagattgtaacttggttttgggtatctagtgactactatctcttagtcccatcatttggaacttctcttccttaaccatgcagtttg

SEQ ID NO: 3125 - DNA, 637 bp, Gossypium hirsutum
ttgagataaatggggattttagatgccagtttaacgtgatacccatatttattttatggatataatgcctaaagttcaactaagaccacatacttcatttctactgaaattgtttaagcaattgtgtctttgtataaattgttaaaattctgttaaatgcacattcaaggttaaacatggttctgcttatctgggaattcgtttgacaatagggttatgctgataacgctttctgcagaatatggtgactagtctagcagcctgtggaattgaccaaactgaataaagcaaattaaaaactatcatcctgtgttgctttaattttcatttttcctaaagtatccatgttcaacacattcccggacgtgggtatagcatatgaccctccaaatacatgaaaggttatgttattcgaatttcggtgtaagtattggacgtaggtaggaatctgacctgagtattttcagttttttctaggatcgcatgtatttggaggacttttggaggactatatctcgatgcccatgtctgagcatgtgttggagatgaattcagacacgatagttatttaggcaaaatgaagagttgggttaatatagagaaaaacttaccaaaaaaagtcaaacatacccatata

SEQ ID NO: 3126 - DNA, 774 bp, Gossypium hirsutum
  misc_feature (640)..(642): n is a, c, g, or t
  misc_feature (729)..(729): n is a, c, g, or t
  misc_feature (738)..(739): n is a, c, g, or t
  misc_feature (741)..(742): n is a, c, g, or t
  misc_feature (747)..(751): n is a, c, g, or t
  misc_feature (760)..(765): n is a, c, g, or t
  misc_feature (768)..(771): n is a, c, g, or t
ggtttcaaactcaattctcaagcaggtaatgacagactctaccttctgttgcttaagttgttttctattgtatattgggacctctggagggcatacagctcattatctatctttcccattcatcttgttagtatggagtagaattcgccgcggagcatatccttcctctactcacacctcttctgacggcccaacagttgaatgttcagcagtttgccaaatacatgctctttgtcaaggatattcttaggtatagttattattgttgtgctttcatgataaaaaatgaatttttttcttctctgaataacaaactctttttttttccaacattttcttatgatgcaattcctaattctgttttaacacagaaggatagaagaaaaccgtggggttactgtaactgattctggagtcccagatgtaaaacctgctaccactgccaacgggcttcagtctcaagtcttgagcaaagcaaatggaactgtggcttctgcaaaaagcagcccagcatgggatgaagactggggtcctactaccagagcagctgccaatgccagtcacactgcccaccagcctcccaaggacaatttatcctttcactctattttgggtgatcagtcaattcaatcagcacccnnnatagagtggggggaaaggataaattgtccttgggaggctggtgggcagtgtgactggcattggcagctgctctggtagtaggacccngtcttcatnntnnggggnnnnnttttgcaannnnnnatnnnnttt

SEQ ID NO: 3127 - DNA, 637 bp, Gossypium hirsutum
tgcatttccggcatctggaatcgaagtgcaactttccattgaggcctctccaatggtgaaaaatcaaaatccatgtaagagaatttttaaaaatatgcatttttttcatcttattttgaaaatgtagagattaaaatcttttatcaatagaatgaaaattgaaaattgaaatgcggcagacaactatttttctcttcttttaagttcaataatctttttgctatttttgtagtcgctataatatgtttattaatgtaaatagaaatacaaagtgagttattaaatagatgttaaaaaaattaaaaacaagagcaagttgtgttaattatatattacttattactttcgtgtttattggatttatgatttggtttttaaactgttgaacttctaaaaataaatactatattgtatttaatatgttttaaataatttgttttatagcattataaaataaatttatcatttatcttttgtatttcaataatttttaacaaaaataaaaattaaacgaaatagaatatgcaaattaggagcatgagcagccagcaaagcaagagtgatgatggcggctttgtattgattggagaaaactgtttggtccaagcttcgaccaaactcttcaactctaaaaaaa

SEQ ID NO: 3128 - DNA, 641 bp, Gossypium hirsutum
aagttatatgcacacacatatagagagagagagatttaattaaacaatgtatatatggttagtagtgtgtgttaaagagatgattaccattgacatgaatgtcttttataacccttcttaagatcccaggagcaacatttgctaatctaagcgactcattgatgaccttataagcacaaaattacatgaattaattattaaacctcacgcttgattcttgataaaacctaaataaagggaacagattaaaattaattaaagaatatatgtatacaagagagattcactttcgtatctttttgtacaattaatattttaagtattcaattgttgaatttaatatttcattaatataaataatacatgtcaaatttgatgcaaatttaaaatttataaccatttgttttatgaaagaaattccaacggttgaatatatattttagatcggtacaatagagacattggatcaattaaaaaatttatatgcatgatatatataattatatcgatagatttaacggtggaatcattatttttacactagtgtaaatggattctcctcggctgtatataaagggagagagagatgacatatatgactaacgttacgagtaaaatgcatggatttgtaatcctcccat

SEQ ID NO: 3129 - DNA, 630 bp, Gossypium hirsutum
tatacaactcttacaaagaataaaagcctttgtttctttttcggactaatcttcaatatttattaatttttttacatttaataaatgttctatgttgaactatttatcaaagtcttttagtttttaaaaatctaaccaccataaaaagattttatttcaaaaaattgttgcaccttttgagttttgaatctaacttatttccaagaatgtaattactgactcatgttgaaatcttattttgattaagggtttgtttagtgtaaaaaaaaaatcacacaattgatatctaattgttgggtgttccttgaaacctgaaaaaactaagttgatttatccttttctttcttctaacttttcttaaagaagtttgaggattaatttgacaaaatttgtaaatgtgaagggttaaatttattaaattatttacaattgagatcaaattggtagaatatctgattattgagcgctaaatgcgttattataccagttagaaaaaagccacatcataatttacgttattaatttaatgatgagtaaccaaaacaggaacaaatacaaatattagtgcctaaattaaaattttttaaagttggacttttcatcatagtttttcctttcttctctacatat

SEQ ID NO: 3130 - DNA, 622 bp, Gossypium hirsutum
tgcatgctggattggattgctaccggggttataagaaatataccacttgaccatattgggacaagtcttattacagttctcagatttcctacttgctctaaactgcatagcttccatggtcttgcaattaatccatctgaatcgatgtctccttcggttttcatcgctgctcggttcaaaaacctacatccaaagcttaatttgtttcaaatgttgagatttgaattcaaaaaacttattgaatgccattctaagccgctcatttcatgtcttatttcttcatatgaaaatatcttttgtcctttctgcagttctttgaagagtggtgtcaaaactcactaaaagtaagagttcaagttcttgaacgagggttgactagagcacatgccatgggctcaccactatattaaaatgtgcatgcatctaatgattacaacttaaaaaggcccaatgttgaaatctctacgtgtgatgtgcagaacagaaggtagatcatcatacctcttgtgcatgaccttcgaatcatatggtatttcatgtgatcaaacaatgagttatgggaaacccccacccatattgatgttacacttaaaaagatgatcttggataaggatcgaccatg

SEQ ID NO: 3131 - DNA, 647 bp, Gossypium hirsutum
cggcgaacctttgcttttacaatgcagtggaccggatgtcgtcgatgcagaaactgtttcttatcgtctttgggtattcttctcatcgtttttcgcttgaaatatatttttgtttctcttccaagttcttatccatattcaaactttacaaatctctactggatttacatttgatttgcaggttagtggctgtttatcatacaacgataagatatcagatggcttttacaatattcttgggatgaatccatatctatgggtaatgtgtaatgagttggaagaaggcagacgcttgccacctttgatgtctcttaaagaaattgaaccaagcgagacgtcaatggaggttgtacttgttgacagacgcggtgattcgcgcctcaaggagcttgaagataaagcacaggaattatattgtgcttcagaaaataccttagtgttggtcgagaagcttggaaagcttgttgcaatatacatggggtacgctttattattttatttttcaatctattttccctgatgattcatttctaccgaattttcactgtgtttgaattgtttttttatatgtagaggatcttttcctggggaacaaggggatcttcacaaacactgaaaattggttagtaggagattgagggatttga

SEQ ID NO: 3132 - DNA, 662 bp, Gossypium hirsutum
caagctcttttgttacatctctttccttctcttgaagagtcttgtactgatcaacagccttcgtattaggagctgttcttttaatttccagcactagatcatcaattttttgtttgaattctgtcgcaagcttctcctgatcaaaaagccttttatcctgcataagcgatcgatttaaccaactaaaatcgaacttcttacccgttgaagactctacttccatcaagtcttgaatgagaggaagcttgtggagctctaagccacatgtatcaataatttcccccttctgttcatctagttgattattttgattctccttagaatttatttggtgattaagtttgggtatggatgttgtagcagcatgagactgcttctcccattcctaaatctccttctcacactcttctgacattaatttccaatccacttctttcttctactgctttacagcttgactacaacctttttttcataaaccgattttaaatcattttccaagggacagagtaggtttgagctttttaactcttgattctaattgtcacttaggatcatactcaaaccttataaatgctgccctggagcataaatgaactaaacccagatcttaaaatagataattgttgtttggatgccaaggataccagtcatgcactgtc

SEQ ID NO: 3133 - DNA, 647 bp, Gossypium hirsutum
tcccccagtcagtttgaagcacttttaccttacagtcaaattgaacttcaataaatttttgaagatatagaaactttacaagagcctcagacttatgtttaataagataaagccaagtaaatctggagtaagcatcaacaaatgaaatatagtaagaatatccttcagaagatacagaagctagcccccaaatatcagcaacaacaaggtcaaaaggagccgaatacatagtaaaagaaagggaaaaaaaggagcttatgaaattttccaagttgacaagctgaataaactgagcttagttgagacttgtttgcaattacattacatttttgaaatactgtagcaatagtcttatcacacgggtggccaagtcttctgtgccacaaatcaaaaacaagactattagaagcaggaagtgccagattaggaacatgagcagtggctggagacggaacaacagctttggattcttagaaggctgtcatgtcaaatctgtacagaccattatgaatgtgacctaccaataagacgtttcctatcttgatatccttcacaaagcaatgaacataatgaaactcaaaataaacctaattatcttttgcaaattgagctacagacagcagatttttacaaataggaggaacatg

SEQ ID NO: 3134 - DNA, 651 bp, Gossypium hirsutum
tgctgtgatagggagtacggtaagaacttctaacaaaagtagtaaaatgccttggtttcaatctaaattagtctctataataagtcatagagggataaatgctataccctaaacacgttgtacaatttaacaggcatcctcttttactggagtgatatgttaagagatgaatttttactttgtgggttattttatatcttctccttcgatttgtcttgtaggcgagtgtcaacacaccagggagtggatatgtactgctgcatcatgtgatgggagaaactgatggtgatcgtggaatgtggtcgtaagtattttgtcgctcgatttgccttaagctgtgaatcaatgacctagtaagccttgaattggttcattatccttcccccattctttagaatattttactatatatttactaacgctcacatgctactttgtatgtctggacttaagagagcctttaagaagaaaaacttggtaacaaaattttgtgattctagtctaaccaactcagcataagaatgattacctgactacaatatggggtaactaagttatgcgtcctataatattcttttgcctttttttcttaatctttctcttagtaagttacctgttgtggttattacattacaagaaaagtggtgccat

SEQ ID NO: 3135 - DNA, 617 bp, Gossypium hirsutum
gtagtaatacagagttatttatattggtattctcaattatttctgctttgtctcaattcaatgggttgttatttcccaatgagaagtccatattttcctgttctctttgagttacagttggatggttgggattatttcatattgttatacttattttttcttccaaattccaatgtagattatcctcatttctggcgagactgggtgtggcaagacaacacaggtattcttttatcttttattttttgggtatatttaatagaactttttgaactatctgttttcgaagtgcccctgcccatcattttcccttcttgattagtctacacggacagagaagaaatgtatatcacatgatgcttgatgggctataattgataattctaatgaaatcctatttaatcctatgaaattaaaatgagcaggttttaaggcttttgatgcagctgaaactgtccttgaaatattctaatcctttatgcaacaataaagggttgctattgctgcaaactgaatctgcaagtttttggttgtctaactcagaggctctttatcttgtttccgaaatgactcttaaattctcatctatgtgcagcttctcaaactctaagtcggga

SEQ ID NO: 3136 - DNA, 618 bp, Gossypium hirsutum
ctgtagagggtgccctcacagatcttctggaaggtgaagcaatgagtagaacccatttggtgcatcattcccttcaaaaggttgctgcttgtgagataggagaagttggaaaagagtcaattcgaagaaagcgttctgctagaagatataacaagaatatttctagttcatcatggaattgtaattatcaggagttgagtcacaaactaaaacccgaaacatctaagagcaagcaatcaaagttggatgaatctgtgagccagaacaacctagaaaactgtgagacttatgcgactgcattcattcctgatgtgcagaacttgtgcaggaaacaattgtcacaggaggaacctatcattcatcaaactaggcactgcaagggaggagctaatgtaaaaaagattaaggatcaaatggataaaccaagagtaatgaccaataatgttaaggagggaagtatgctaacatataagagaaagaggaagagcgtggttgctgatccacctaagttattgagtggcaagcagaaatgcaccaagctgcattcatatgcctctgctgaaactcttgacggcaaattgagtgaacaacgaagtagtccacaagaagctgctatag

SEQ ID NO: 3137 - DNA, 597 bp, Gossypium hirsutum
ttctaatattcccaataaaataaaactttcatcagattgaaatcaaagagaatacataagattacataaccacataatatagatagcaggcttatggaccccagtgatagatgcgtgtcatccattagattgaactaatccacatttcagcttcctgcccctaacaaaaacatgtacattgtgcagttaaaggttgttgacgtcatgtgcaggcataacaaatttcaccagatcgaagggaagatataataaaatataccaccgaatgtctagagatgctaattgctctctaggcaaagacattgttaagaatagtttccatctgataattatgagtgctccatagtagtagtagtagtagtagtagtagtagtagtagtagtactagtagtaatagtagtagtagtagtggtagtagtagtagtagtattgtagataatcagctggtctctattagcacatgacttacaatctcaggagaacttatcctaggtggaagcagttggtatgttgggctcactacaaggccaatgacactgtcactacaattaaaatgtcaaaatttgctgcaagagatttgaaaaaaggaaacaaaca

SEQ ID NO: 3138 - DNA, 1474 bp, Gossypium hirsutum
  misc_feature (629)..(630): n is a, c, g, or t
  misc_feature (632)..(633): n is a, c, g, or t
  misc_feature (635)..(639): n is a, c, g, or t
  misc_feature (642)..(644): n is a, c, g, or t
  misc_feature (651)..(657): n is a, c, g, or t
  misc_feature (659)..(662): n is a, c, g, or t
  misc_feature (664)..(664): n is a, c, g, or t
  misc_feature (668)..(668): n is a, c, g, or t
  misc_feature (673)..(677): n is a, c, g, or t
  misc_feature (702)..(704): n is a, c, g, or t
  misc_feature (706)..(706): n is a, c, g, or t
  misc_feature (709)..(719): n is a, c, g, or t
  misc_feature (727)..(729): n is a, c, g, or t
  misc_feature (732)..(739): n is a, c, g, or t
  misc_feature (741)..(741): n is a, c, g, or t
  misc_feature (751)..(758): n is a, c, g, or t
  misc_feature (765)..(777): n is a, c, g, or t
  misc_feature (786)..(795): n is a, c, g, or t
  misc_feature (802)..(808): n is a, c, g, or t
  misc_feature (814)..(814): n is a, c, g, or t
  misc_feature (816)..(817): n is a, c, g, or t
  misc_feature (826)..(842): n is a, c, g, or t
  misc_feature (851)..(855): n is a, c, g, or t
  misc_feature (865)..(867): n is a, c, g, or t
  misc_feature (869)..(883): n is a, c, g, or t
  misc_feature (886)..(886): n is a, c, g, or t
  misc_feature (891)..(892): n is a, c, g, or t
  misc_feature (896)..(898): n is a, c, g, or t
  misc_feature (901)..(914): n is a, c, g, or t
  misc_feature (917)..(922): n is a, c, g, or t
  misc_feature (925)..(926): n is a, c, g, or t
  misc_feature (928)..(930): n is a, c, g, or t
  misc_feature (935)..(935): n is a, c, g, or t
  misc_feature (949)..(963): n is a, c, g, or t
  misc_feature (969)..(982): n is a, c, g, or t
  misc_feature (984)..(987): n is a, c, g, or t
  misc_feature (992)..(998): n is a, c, g, or t
  misc_feature (1005)..(1007): n is a, c, g, or t
  misc_feature (1010)..(1027): n is a, c, g, or t
  misc_feature (1030)..(1039): n is a, c, g, or t
  misc_feature (1041)..(1045): n is a, c, g, or t
  misc_feature (1049)..(1061): n is a, c, g, or t
  misc_feature (1074)..(1076): n is a, c, g, or t
  misc_feature (1078)..(1089): n is a, c, g, or t
  misc_feature (1092)..(1097): n is a, c, g, or t
  misc_feature (1099)..(1116): n is a, c, g, or t
  misc_feature (1119)..(1122): n is a, c, g, or t
  misc_feature (1125)..(1131): n is a, c, g, or t
  misc_feature (1133)..(1137): n is a, c, g, or t
  misc_feature (1140)..(1145): n is a, c, g, or t
  misc_feature (1147)..(1159): n is a, c, g, or t
  misc_feature (1164)..(1169): n is a, c, g, or t
  misc_feature (1172)..(1179): n is a, c, g, or t
  misc_feature (1183)..(1184): n is a, c, g, or t
  misc_feature (1188)..(1190): n is a, c, g, or t
  misc_feature (1196)..(1236): n is a, c, g, or t
  misc_feature (1238)..(1252): n is a, c, g, or t
  misc_feature (1259)..(1264): n is a, c, g, or t
  misc_feature (1266)..(1273): n is a, c, g, or t
  misc_feature (1275)..(1292): n is a, c, g, or t
  misc_feature (1294)..(1303): n is a, c, g, or t
  misc_feature (1305)..(1311): n is a, c, g, or t
  misc_feature (1313)..(1333): n is a, c, g, or t
  misc_feature (1337)..(1338): n is a, c, g, or t
  misc_feature (1341)..(1357): n is a, c, g, or t
  misc_feature (1364)..(1365): n is a, c, g, or t
  misc_feature (1367)..(1376): n is a, c, g, or t
  misc_feature (1378)..(1388): n is a, c, g, or t
  misc_feature (1390)..(1394): n is a, c, g, or t
  misc_feature (1396)..(1411): n is a, c, g, or t
  misc_feature (1414)..(1420): n is a, c, g, or t
  misc_feature (1423)..(1429): n is a, c, g, or t
  misc_feature (1431)..(1442): n is a, c, g, or t
  misc_feature (1444)..(1470): n is a, c, g, or t
ctacatatttggtatattattatttgtaccttccagtgataatctatactaaagataattgtgtatatatatataggtcctagagagctaagcacttttcatgtaataatttaatgtgcaatattgtaccatcctcctagtcctagatgttgaagaagatccccttatatacaaaatcataaaaacaaaatttggaacagttgaagtacaaaattattgtagtcatttgcatcatcaaattatacatatacctggagaatagtttcatgtgacaaacttgactgcatttaacaaaatactaattaacttgacttgaaatagaaaagaaaatataaaatataaaaaaaagaacaaaaataaaaataaaaagcaacttaccctcttcaactccagtttatatatatatttatatatatattgcccccatttcctgctttgattctcatttaaaaacaataaacacagtgctgataaactagctatctaccaatatcttgatgaaggagctttggccatgatgatttgtagcagtagcaaactgattcaatactcttggaatttttattttaggacctgaaaaaaaaatgaaattattcaaaacattgggggggggggttgagctaattttnnannannnnnaannngggggtnnnnnnntnnnngncaanattannnnnggttaaaaaaaaaaaaatatttttnnngnttnnnnnnnnnnnaaaaaaannnaannnnnnnnanaagaaaaaannnnnnnnaaaaagnnnnnnnnnnnnntctttcccnnnnnnnnnnaaaaatnnnnnnnaaaatnannggcccaatnnnnnnnnnnnnnnnnnaaaaaaaannnnnaaaaaaaaannnannnnnnnnnnnnnnnatnaaaanntttnnnaannnnnnnnnnnnnnggnnnnnncgnngnnnaatanaaaaaaaaaaaaannnnnnnnnnnnnnntttttnnnnnnnnnnnnnntnnnnttgannnnnnnggggggnnnggnnnnnnnnnnnnnnnnnncannnnnnnnnngnnnnnaaannnnnnnnnnnnnaaaaaaaaaaaannnannnnnnnnnnnnaannnnnnannnnnnnnnnnnnnnnnncannnnatnnnnnnnannnnntannnnnntnnnnnnnnnnnnntgtannnnnnatnnnnnnnnaaannatannnatatannnnnnnnnnnnnnnnnnnnnnnnnnnnnnnnnnnnnnnnntnnnnnnnnnnnnnnntatagcnnnnnnannnnnnnnannnnnnnnnnnnnnnnnnannnnnnnnnntnnnnnnnannnnnnnnnnnnnnnnnnnnntagnnatnnnnnnnnnnnnnnnnnaagaatnnannnnnnnnnnannnnnnnnnnnannnnntnnnnnnnnnnnnnnnngannnnnnntannnnnnntnnnnnnnnnnnnannnnnnnnnnnnnnnnnnnnnnnnnnnatag

SEQ ID NO: 3139 - DNA, 671 bp, Gossypium hirsutum
  misc_feature (651)..(651): n is a, c, g, or t
  misc_feature (654)..(663): n is a, c, g, or t
tttgtcacaaaaaggatgacggaattgggaaacgagagtgatggtgttaagaaagctgtcgttaattttcctagatatttggctcaaaaggcacctgagaaggctgagccacgggctttggctgtggattccataatggaggttgttaaagtgatggattttgaggatcaaataggatatatggactatgtgttgaagatgactcaagggaaagctaatcttaggctgttaggtgttgatcttattgcaatgatgttaatgtcattgagggatccttttggggtggattcggatgttaaaaccagggattattggggtacaaggtgcctggaagctttgattactaaatgttcggatttgagtgccggaattcgtgctcgagctctatcaagcttggcacaagttgtggggtttttgtctattgatgataggaataaaggcattttgaaggaagtaatgcggttatccgaaggtggagaggagaggccactgtgtggaatgaatgatcttttgaagaataggtgtatggatgacaaggcagctgttaggaaggcagcacttcttctggttactaagttgatatcccttttagatggttgttttgatggaatcctgctcaagacggtgggtatggcttgctcggatccactngtnnnnnnnnnnaaaaaaaa

SEQ ID NO: 3140 - DNA, 628 bp, Gossypium hirsutum
ggtgaaatagaacttaaggatgtctatttcaggtaccctgcaagaccagatgtgcagatatttgctggtttttcgttgcacgttccgagtggtacaactgtggccttggttggacaaagtgggagtgggaaatcaacggtgattagccttttggagagattctatgaccctgattctggccaagttcttatcgatggcgttgatttgagagagttgcagcttcaatggatacgggggaaaatcgggcttgtcagccaagaacctatattgtttgcaacaactatcagggaaaacattgcatatggaaaggacaatgccactaatgaagagattaaagcagcaattgagatggctaatgctgctaaattcattgacaagttgcccaaggtaacataacatcattttgttttccgattgaaaattttagagcgactaagctaaggattgctgtatggctaacaggggcttgacaccatggtgggggagcatggaactcaactttcaggcgggcaaaagcaacgaatagctatagcaagagccattttaaaggatccaaaaatcctcctcctcgatgaggctacgagtgcgctggatgcagagtcggaacggattgttcaagatgcactaa

SEQ ID NO: 3141 - DNA, 626 bp, Gossypium hirsutum
ccactttctggaccaagtgtccttactgtacagttaagtaccagtattatacagaaatacttaacagatctattcgctgccaaacttgcaagaagaacttcgttgcctatgattcaggtgcagttccaccggcaagtaaaatgagtcggccaaagtttccccaacaaggagttgcacagaatcagggtgcttgcggagttgatcaaaggtctcaaaggagtttcactgttgagaatgtttttacaggctttactccaaatgcacctcatactactgaggctagaaagggaaaggggaatagtaaaagaggaaagaagcaaactgttgaatccagtggaagcagcaatgagtctgatgaggatatggtgattgatggaaatggtgatgttctggttggaaagcagtctaattctcaagcagagcagaatgtgcggagatctggtaggcgtaagaagcacatttcatataaggtgaatttaagtgatgaggaggaccttggtagccttccaaaaaagactaaaacaagtggatcaccctgtgccaatgaagaaactaaagaaatgcctaatgaagacgagtctaaacagaaaaatcgagctggtgaagtgaaatatcagaatgcaagg

SEQ ID NO: 3142 - DNA, 622 bp, Gossypium hirsutum
ttgttttatcaaaaatgttggcacattattggagatgaggtcacttccttttgtttacagattctaaacggtgatatggaggtgagttcgttcaattctactaatattgtacttatcccaaagaattttaatcccatgaatatgacgcactttcgtccgattagtctatgtaatgttttatacaaaattttaacgaaggctatatcgaatcgatttcgagatttgattgggaaatgtattgatgaagtgtaaaacacttttgtgccaggtaaactgatatcagataatgtgctgctagtgtatgaaatcctaaatacgcttaaacaaaaaaggactggaaaaaatggttttatggtagttaaattggacatgagcaaagcttatgataagatcaaatggagtttcataaaggaaataatgatccgcatgggttttgctacaaaatgggttgaggagattataaaatgcattatttctgtttcttattcaatcatcataaatggattcattagggagaaatttcaaccaactagaggtcttagataaggagatcctttaagaccatttctatttttactatatggagagggtctatcacgcttaatgagactagcaatgaaaa

SEQ ID NO: 3143 - DNA, 647 bp, Gossypium hirsutum
ttatcgactttaatctcacttatctaatgaagtgctataaagtcatatctatagtcatatggttttaaacaccacaattccagcatggctgttatttcctccgcggtggtgatctataacaattcttcaccctctactgatacagggaatgccatcgatatacggttcaacgatgggatggcaactcgtaccgttgataactctcttcacgtctacaaaaccaattcatcccagtaactagggatatccctcgctaggttgatcaatccctatgtcaaatccttggaaactcgattaatcaaggaacagctggggaaatgatggtgagaagaaccagtgaaacgatggcgattgattaacgtaccttcagaatgtcatgaatgcaagcagcacaacgaaacagtggaacatttattcagataatgtaatttcaccagaacagttgggtttgaatgccatttgtctctccaaatgtatgcattacattacacgacgctcctttaaaatctacaaaattggtcagatacagttgataataaaagtgacaaaggataggaattcttcacttaccttcttgtcggtttttagaccatttggaaagttcaaaatgaaaaggtatttaacaacaccctgttaataaaactctc

SEQ ID NO: 3144 - DNA, 615 bp, Gossypium hirsutum
taggttgaaaagctcttttaattactagtcatattggttttctttgaaattttcttcattgatactagcccaagccgtgtttgaagatgcttgtaaagctaaaaaaatgccatgtctttagtgtatttttaggaaaagaaaaagaaaaagacagattttcattaattactggtaaaagcatgtaattacatatttttcaaagctattagcttggtttaaacatatgtttaaggaattttcagttttagtactacatattttttttaatagataaatgtagtgtgattaacagcaaggtttggctttagctttaaatggaaaatagcggaatacagagaatgacttagtttgaatgaaatttcttttcctggagagttacttgtatttgaaatcaatataaatagagggaagtcctatcctagttgtttctaaattctagcctaattatagcctgaatatcgtaatcttctagatctgctttctcactaattattgaaagaaaagtatgttttagccaaatcagtcccttcatttcttgttctttttctcggcaatgcatccaccttccatcacctcatttatgcctaattccatgcctaatttatctcaactacc

SEQ ID NO: 3145 - DNA, 614 bp, Gossypium hirsutum
ttgatagaacatgtggttgcaatggctcgtttcattatcagagagacgtgttttaacagtgcattgcaggtaaaattcatgagcttctgtttgaaaatagctgaaagaattcgagtatatgttcgacatgaccatgctgaaaacgcaataggaatctgtcatggttatggaggtttaagaagacaaagaagcatctcaaaacagtagacatgattgggaaggagcaattaaccttttggagaggtttaatggcaacattagtgtcattaatggcctttctccagtgtagcttttgttccggctaatgttttaggtgtaagtactagacacggatatgtgtgatttcgatctaacatagatcagaaggttttctttgcacatcagatagttaaacagacccttgcatatatgtatattcatctacatttgatcctggagagttgactaaggatcagaagacatcaagctctgatcaaactttaaatgcctgtgttgaggaatataagttcagacttcttacacttgttctcaatattcacaatgcaggtgtctgtgacaatggtgaatcttctacaaaacattcacattttagacttcatttgccaaacccatag

SEQ ID NO: 3146 - DNA, 579 bp, Gossypium hirsutum
  misc_feature (561)..(561): n is a, c, g, or t
acattgggctagcctcactccaatgaagctctatttttaacaccataaaacatagttttaatggagtcctatattaaatagttacgagtgctatgagctggtgaaaaacaatcatcccattttgatctactaaaaataatcaacacctgaagaaaaactttgacaaaattgtgaaagcaattgaacatcaaaaaatgataatgctaacaatggtcaatggtcttacataccattaacattcagcaacaagaagatgaccacaaaaacccagagataccaactgcaaacaaacaaataaaacaacaaatcaaaatgaatcagcaaagtaagcatgatttgatgtcggaacatgtgcaagaaatatgagacatatattctcacacaatctctcatatctctcttgttatactcccaccttgtgtataatctcctcctccggggcgcataacgtgtctgtgagaattttacttgtgatactccctgtgctgtgtgtgtgctatacatattatacacttgtgcattgtgtatagtgaagagattttacccccatcacaaatcttntccctttttccacaaaac

SEQ ID NO: 3147 - DNA, 512 bp, Gossypium hirsutum
taaacccaaaaaataaaaataataattatttcttgacttgagttctggaaaatttcatctgttttaccaaatattacgtcttctttgcctgtggtcacaacatgaaacaagaaaaatcttagaaatgcaccatttcacgacattgatgtttacatgcactttaagttatgttatcgagactcttcattctctacatgtctgaaatatgttcggacataggcatgaacatatgatcctaatcttagaaatgaatgctaggcacgaatggatcgtttagtgataacattgacatgtaatgcattttagattctcgatgtatatatccgacatgagtatagaaaacttaaaagaaaactttttgaggcatgaacttagacaactactcccatattggggcctgaactgttttttgttcgaattagtccctgatatttccttgaaaaccttagtttaggccccaatatcataataattgccaagtttaagaattaacttggacaaggaaaagaacg

SEQ ID NO: 3148 - DNA, 587 bp, Gossypium hirsutum
ttcttctattgatccaatcgtatggttacttgtttcccttttcttttctaagaacagaagagtaaatttaagactgtttacagcaggtgtgatctagtgtaatcgttcaactaaattatagattacacgagccaaaagaaatgttacatgacccaaatttagaatgtacccaattttctttttcttttattaaaaactcatactccatactcatgttcgaatattaatcaaatacaaatgattgaacaaggatgcctaaagaaaaatgaaatgaaaaataggcaaaatgaatattctcttctcgcatgtaaacacaaaactcaactagtgtcgtgcaaaattgaaatactctcataaaaacaatattgacatagcaaatccagttaaccaaacttcgctgctagaacgtatgaagatctgtaaactgtaatctaggaacaagcctatcacttatgggatgcactaatcccctggctaggcaccaaattcaatcagtgggatctgggaactgagacgtgcattctaaccaactagtagcgtagtccaacattggagctgaaagacaatggtggctcttctgaaagagt

SEQ ID NO: 3149 - DNA, 409 bp, Gossypium hirsutum
catttgatcgcctgagacagcaagtgagcaaccatatggagatttaacttatgcttttggtgtgagctggttgttatcattaatcttgattccctctaataaagatttgcatgtttagatatacaagctagaaatggaacagaagagattagaagaggatgcatttgtctataactggctccaacagcaacttaaactatctccggcttataagagggtacaattcagagctttatttgttctgtcatagcttcgtactgcttctgcaactagatgagcaagaaggattattgaaatctttttcttctcccctattatgttaattcagtctcttattgcaatcagaacagacattatcatggttctaatctctctccctgacttccagatgctggaagtttgtacttgc

SEQ ID NO: 3150 - DNA, 548 bp, Gossypium hirsutum
  misc_feature (56)..(58): n is a, c, g, or t
  misc_feature (456)..(456): n is a, c, g, or t
  misc_feature (511)..(513): n is a, c, g, or t
accttccagaatgacccaccgtggctcaagtcttgttctactactgtcactacttnnnggtgccaatctgatcaaacacaaccgcatgtgttagtgcatatatgttgatttgtttactattatattataggatttgtatgtgatgcatatacaattctataacatgtcatactttcatttttttatgacatgtcatcatcaaattcactatatgtatatcgaacataaatctttcaattattacacgttttaaacacaaactttgggatatcatgttaagtcacaaatgcatgttgactcaatttttccattaaaattacttaaatgaaattaacataagtgatctaattcattgatgataaaagttcactcatgcatttttatgaaactaaaaagttgtaacttagatgaaaaccgatggtaaattaaatgaaccattccattaattaaaaattntggaaaaaaatcatagaaaagcctcaattactacgttatatataatatttcaccnnnaattaattaatgtgatattgttcatattcataaca

SEQ ID NO: 3151 - DNA, 658 bp, Gossypium hirsutum
ttgtgagcttttttttcctagtagactcccctttcccctgggcttttaatctgcttttaaacttgctaaaaacgtttttttctaattaaaaaaatttctcttttatctaaatgacatagatttacactttaaaaaatgaaataaatttaattaaaaatacataataggtagggtaaattttattgaggaactgaatttgaagttaatgtgaatttagtatttgaatatatttttttattaaatttaattagaattgtcataaataaatataatttaataactcagtgtaaaattaacatgattttaattttgtatacaattgataatttagtaattcaacagttaaatttatctatagaagtacacttttcattgcatgtaaatttttgaatcaattcaatatttctatcatatcgatataaattatcatttatattaacatatatttcacggttgaaagttttccacgtaaaataaatagttaaaatattaattataaaaaaagttatgaactgtaaaatcatattaattttacattagtacaagtaaaaatctcccatgaaaggaaaagaaattaagcagatgtaggaaaaagaaaggcgggggaaaagggatgttttctaaaaaatggttccttttctagcaattgttccttctg

SEQ ID NO: 3152 - DNA, 646 bp, Gossypium hirsutum
tatttgttctatcaattaaatgaatactgataaagacaagataaagagaccattataaatgaatgctatctgatcttgcacccttatacaaatccatccagtcctccagaaagtgtcatccgaacaatccagaagtcgactcaaactgaaactcagattagagcacagctgacaaaataatagacgattaaaattgtgaagaaattaatagcatttaaatgcataggagataaaagaatctataatttcatgcaaacaagcttacatcatcccaagcagcctcagcttgacgaagataaattgtgagaacaatgcaaccaggcctaatatagctctcaatgtcggtgggactatgagatagccaatcaagaatctggaagtttaaaacatacataattatactttcggaagaagcgaaccccatactacagttgcatttaaaaacttttgagtacctgtgctcgcaagaccaaaggaaaatcatttgggtctttcccaaataatttaaacacaatcctatttgtacggctctgcaatgtcaaagtgaaagtaaatcatcagaggtgaaactttcatagaattttatagcactacatatattaatcaacagatgagatcgatcatcaaaatattccttgggaattgc

SEQ ID NO: 3153 - DNA, 642 bp, Gossypium hirsutum
ttgattggactgattattgtttagattagaacacaaattgctctagaagtcggattttactgaaaagtaattttgatctgccatggatctgtgcttagtagctcaaagtattgatcgtagaagtttatatgataaatgatggaagaggtgatttaagattttgaaattttttgaattttatgctaatgtgaaaaataagtatgtttggaatcgacattaaaaaagttagtgcttaggagttgaattaaatttgattccttatttattttggagtacctgcgattgactttcacaaaagttccttaaagtacttgaagatatccgtatactgtatcaaatacttgcacctgagtcggactaacttagctcagacttggtgttctctttttttatcccttcgaaaggacttgttaaagagttattgttgtatttgcaggacaaatcgggtatgctcttgtacccatgattgctaggggagtcatgttgggtgctgaccagcccgtgatccttcacatgcttgatatcccacctgctgcggaggctttgaatggtgtcaaaatggagttggtggatgctgcttttcctcttctaaagggtatatatatggtcattatcatgttgtttaagttttgaatggtgttc

SEQ ID NO: 3154 - DNA, 636 bp, Gossypium hirsutum
gatttagttcatatgatacgaatctcagtttttagcacaaaaattgatgcggagacccggtagccatcatgttcataaatttataattattgcttgcatatactcacaaatggatgtccatgcatatatccagtttcctgttttaatatttctgtgaatatatgagaaattgttaatacaaagatttcaggataaagctgaatataaggtctttatcccgttgttgttctactctcttggtaattgcatgaagcagcaatttaaagttgtttatttcaatgtttaatttaattgaacagcacagttaagaaactataaaaaattggatcagttaatgagaacagaaagcataatcctctgcactcaggtatttactaacattttaatataacgtagcagaaaactctaaaggacctgaagtttaatttgcacctcaacccagtctgttcatttcttcaacttgaggaactatcttctttttgctgtttgatgagctcatttaactgacacaactaggagtggctatgtgaatttttagtttaaatgattatatggattttaaccaataaaatatgtaggctatataaaaggaaatatgcaaggttgacttgaaaattccatttcactattaggagc

SEQ ID NO: 3155 - DNA, 641 bp, Gossypium hirsutum
tgtgccttttcatattcatacttctggttaaattgttccacttcccgcttatgtttctcaattagttttctcatctgcttatcacattttttctcaatttcttttatgcttttcagaagatctctctgtgccaattgaatttctggggcaagtctagactctgaaatggcctgtatatcagaaccttctcgaaaatccgacaaatcttcagtctctgcttttatgttatgctggtaagaagctgcactggaataatctcttccaacagatttacctggtaatccagaagctttaggagagcttgggaccttcaaataccctgtacggtatagaaacattctcttcaaacaccgcaacattgaataaacatagtcagcctcttctttcttgcaagtaaaacctagatgctgctttgcaagtgcaagtgattctttgtgatcaagtttctgcttcaacaaagaagcagcactccaacactgaatacacagagaccagaagtatgagatgttaaaaaaaccagaataccattaatgtatgcttacatataagcaccatgcaacagaaaaggttttagaaatctagaatatctaatagcatatgacacaaaaatgcagcagcagtacataatcccagtaggcgct

SEQ ID NO: 3156 - DNA, 594 bp, Gossypium hirsutum
tacatgtttcactccaattaaagtaagagcacaagaacaatccaaattgaatggaaaaacaagagacacacctttctgaagtatggtatatggtatagggtctgcagaagcgagttcatgtaacaagttgctccttggttcttaagtccaacaaaaccagtctctttctttgagtcatatgaccaataatccaatatcttacggacaacaacctcagcttcaacaacaacagtatcattcacaatataccctttactagggtcataaagatcactgagaggcataaatggtgtgaaaccccaatcactctctcttgcattgaactggtgttgagtgtctgcaaatgaaagtcaaaagcaagacactagataagtttggatgaactttactattgaattagcaataacaagaggaatcttcaatatcacagaggtttcttccttccagcaatatatcaaatatatacactaaacacccaactgcttgcaataaacataacaaaaatgatctgactaataaagggcatcatctaatcaccctatcgtgaacaaaaaaatcaatttcaaataacactgaaaattaatcctttcatac

SEQ ID NO: 3157 - DNA, 624 bp, Gossypium hirsutum
cttcgggtttggatgatctccatcttgagtgcatcagcttccacaagcctcttgatagcattcaggtttacccacctgtaacattgactattagtactaagccaaatagacagttctaacatgttaaggcaatatgacttacaaattgtttgtattgaaaattttaaacttttctatagacttgaactcattgacctgttacaaagagagaatcatgtaagcctcaaccataaagtttaattacgcccccaatccaaacattcatctaaacattgatctcattgaagtttaattcacaatataacttcttctttttttaaatctaaacattcatctcattggagtttttaattctttgatttgcctcaaaatcaaacaaaccaatcaaaatgaacgtgcagtacctaaaagcataagttcataaagccataaaccctaccatatgctaaaattttccagtcccaacattcataaaagtgaaattaaacaagcatagatgtaacgaagctttggttaattatctcgttgactttctttaacgttttaaaattcactaaaactaaaggcaccatgcaaactaaagcattatccagtaaagagaaacaaatgtaaaacaagtggtct

SEQ ID NO: 3158 - DNA, 566 bp, Gossypium hirsutum
agcattcttattctattgaatcactctggctcttcataaaatcaaattgaagagtctgccaacttctccccaaaaaagtgaaaacccctcaataataagcgaaataattaagaaaataaaggaggaaaaaattgtaccaattgatagagactaatggacattattgaattaaaacgtagatagtattcccttcaaattatgagaatgataacaaaaaagtagaatttccagctaatttattagctctgacgtttagactttctagggtgtttggtgtttaagagctgcctcacaacatctctcattgcaggtcttctgcttggctccttttcagtacatctcaaagctaccaaaaccaaatcaataacctgctccctcacttcccattccaccaactcatccacaatcctcgaatccacgatcctcccgatttcggtttcgatttcgccgctcaaaattgatctgacccaccccacgatatcggtctcccccataaatgatggatccaatgccctcttcccggttatcagctcgagcaaaaccacccatagctatacacatccgct

SEQ ID NO: 3159 - DNA, 626 bp, Gossypium hirsutum
cgtggatgctcattcgatactggctccaagtactctctttgtaaaggtgaatggcattggtagtttaaacaatatttagcaagcttcttttgccttttatctttaccattgcctcctgtgcttttgatactggtttgcaacttttgtatataccaatgactactgaattgtttactactcatgtgaacatagtcttggattgcagggacacacatctttaatatttatgtttattgattgaacttgaacctgttttctgtatgttcttttaatataatttcatttcttattgcatatctggcagatttttggttcgattctttgtgtatctgctggatttgttgttggcaaagaagggcctatggttcatacaggtgcttgcatagcttctttaattggacaaggaggttcacgaaaataccatttgacttggagatggcttagatatttcaaaaatgatcgtgataggcgggacctgataacttgtggagctgctgctggtgtggcttccgcctttcgtgccccagttggcggtgtactctttgcccttgaagaggcagcatcatggtaacccctatttctctgacaaatgagtattttttgctacagcttctcctctctattcc

SEQ ID NO: 3160 - DNA, 621 bp, Gossypium hirsutum
caaaacaactccaggctgaacgagaacggaacaacgagctgataaaacacctcgaagaatctcgaagagaagctagaaataaaaaagaaatgacttcatatgctggagctgtagcagggcaacccataaccagagaagataagataatcgacatttcggcaataattaatgggctttgccaatttgacgaaaggccctccgaaggttgggaccaatggtggctcgatatggcttgtaaggccaacataatagaaaaggcagatccaataagcccaagaagtataaagacacacactacagaatatgaaaagataccagaagacacgaaatttgaagattttgtggcctctatataagaacctcagactctcctttcattctcatagatagagaaaactgagcaaaccttagcaaaagctctgaaatcttgtaatctctcaaactctctcttcctttaagatatagagtgaaaagcgtaaggcctcaaaatagccatagccaagagaaggcgccacggcagtatcgaggaagcaagttcacacgagactgagactcttatcagtcgtagtgttttcttaagggtttttttcttttttattttcttccacaagtatttgggca

SEQ ID NO: 3161 - DNA, 603 bp, Gossypium hirsutum
ttcttgctcgtgattaatgaggtcatgttagataaaaagcagtggtaatagtttctgtctactgcctaggatttgttcaattgaatttatgaaatagtgagggtttagcacaccagagttgcaatggctttgtttctcatgatttatgctcttcattttcaggttcgtcagttaactctactttgtcttgtgatgttcctgtttcattcctaaagattgccatgctcagcttccatgatcagatagattatttgaaagaagttgcttccatgatattctcactactactaattttgccagaggtgcttttattacttaatttcttaaggtgccctattgggacctattaagccatacttctgttcttaattgatatgtaataaatttacctgtgtgcagactcataggttgagcttgaaggttttggatttggccaagacaataaaatggccatttttccagacacttgcagctgcatctggggaggaagtggtgagtcttccctttcttttcttcttccttttataaagaaacgtgggccttttggctataagagtgttattggctgccatttttgtgtctgcaacttttaattgtatgtta

SEQ ID NO: 3162 - DNA, 696 bp, Gossypium hirsutum
  misc_feature (505)..(506): n is a, c, g, or t
  misc_feature (517)..(518): n is a, c, g, or t
  misc_feature (520)..(523): n is a, c, g, or t
  misc_feature (532)..(532): n is a, c, g, or t
  misc_feature (534)..(536): n is a, c, g, or t
  misc_feature (539)..(541): n is a, c, g, or t
  misc_feature (547)..(551): n is a, c, g, or t
  misc_feature (554)..(562): n is a, c, g, or t
  misc_feature (568)..(571): n is a, c, g, or t
  misc_feature (573)..(583): n is a, c, g, or t
  misc_feature (585)..(590): n is a, c, g, or t
  misc_feature (593)..(596): n is a, c, g, or t
  misc_feature (600)..(602): n is a, c, g, or t
  misc_feature (604)..(613): n is a, c, g, or t
  misc_feature (615)..(615): n is a, c, g, or t
  misc_feature (617)..(624): n is a, c, g, or t
  misc_feature (626)..(634): n is a, c, g, or t
  misc_feature (636)..(645): n is a, c, g, or t
  misc_feature (647)..(651): n is a, c, g, or t
  misc_feature (656)..(663): n is a, c, g, or t
  misc_feature (665)..(678): n is a, c, g, or t
  misc_feature (683)..(690): n is a, c, g, or t
ttcagttaagatgaataaaggatgaataaagtccctatgttctcagttctcaagatggcagaccaataagatataggtcaaagtccactctgacatcaaataacgaatagttacctgttgttctgtcacttgcagaaaagcaatagtgtaatataccaagtctgcaatattatttgcaacaacctacatgatcaattttataataaattattataataaatcattataaaatagaaatagtaattaaaaatgatatagagtcttctaactttacctgtacaaattttgtgctaccgacaatagtcaaaaggaactcaaacaactgcaagttcaaagtcaaacacaaaaaatggagaggaaagatcaattaaacgagaaactactgatatttgtgcacttgacagaacaacaggtaactattcgttatttgatgtcagagtggactttgacctatatcttattggtctgccatcttgagaactgagaacatagggactttattcannctttattcatnntnnnngaatgaatntnnntgnnngatttnnnnntannnnnnnnncccttnnnntnnnnnnnnnnnannnnnntcnnnnttcnnntnnnnnnnnnntngnnnnnnnncnnnnnnnnntnnnnnnnnnncnnnnncaaannnnnnnncnnnnnnnnnnnnnnccccnnnnnnnntctccc

SEQ ID NO: 3163 - DNA, 631 bp, Gossypium hirsutum
taccttttgcatcactgcaacaatagcggacagggaagcatcagctagttgctccaatacaattcagaaccatagtattgtaacacacaacagtaaaaagaacaaacctggtaaccaaatgttctgcttgctgattagtgagagaagtagactggacactaactgaagctgcattgccaaatttgaaatccaacggattgccaccctgacagcaacgtgttttatggtgaaattaatctataagaaactagaataacaagagaagataaaagaataacaagagaagataaaagtgcatactttctcaagaaactctagttcccttctcctttcctcacgaacaacatactcctgcctgttatatagacaaatgtaaaagatgatagaaaataagtagcttgtacttagggatgtgaaccaagtgcataattttagaatgataaaatagtaaataaaaatggaatgtaagcatcacctaagctctgcttgagccttctcaatagctgctctacgcagggaggtcttgacaccaatgtcaactccgctgtcaacaacccctcccatagaatcaacctcagcatttaataacaatgcagatcccaagctgcatccatgcatccctccctataaa

SEQ ID NO: 3164 - DNA, 647 bp, Gossypium hirsutum
  misc_feature (63)..(64): n is a, c, g, or t
tttttttctttggttacttgcttgtggtaaactcttgactagtgaagtacgtacaaggcgagnnatgtccaattatccctttttgtgaacgctatggttcatgtatagaatctataatttatgtagtttgagattaaggatttgctcaagctgtttggaaatcggttgtctcgaggtctaattggaatgttttcttcaaccttccacttgtcaagtggattatttggaacattaggaatgcgggaaagttcaatttccaatgtggtaaatggggttttttctattcaattgattgttggttcctttggaagaatcgaaatgattttatctttaatcatgctagtggcaatagttatgatcttattttctcagcggtcacttagacagagtctctgaataccaagggtttggcttaagcttagacaactaaatccagtttgagggggtggtggcaactcccaaacaccgaatgggtcaaagttaaggtggatggctcagtttcaaaggttaattcgagggcgatcttaggtggagcgataagtgacctaatgggggttagcttgtcagattcggaatagtaacaagattgactgatatttttcaagttgaagcgagagcaattcgtgaaggtttaaagttagcttggg

SEQ ID NO: 3165 - DNA, 516 bp, Gossypium hirsutum
caagcatcaatctatgtgctaacacacttccatgtaagtagcaaccatgtttctgtaaatctcagccgtggcaagggatgtccacaatctagattagaactaactggaaaaagcaggaagcagtgtggccttggtttcccgagtttcagttgagtcccacatggattttctccttagtcctcaattgaactttgttgattctcaagggcaaaagaatgtacaagccagcactgtttctgcaaatgatatacaaatgttgttttgctcggagaatcagttgaaaaagtacggcgacttgagaacctcaagcaagtcaaagttgcctctctctgggagaggaggaaaaaccaacgacgggtatgatgtctcaaagctttcaagcaactgcagagaatcaaagtaaaattaatatggttaacaaaatgagcgagacacaaatttcagtactttctaataattgaaagacaggaatcaccatacttacattctcaagaactggcatgctgtaaagctcca

SEQ ID NO: 3166 - DNA, 609 bp, Gossypium hirsutum
ttgtttggacgatgttgcttttgttgtttctttttaagaccacagcttccattttgatgttgtttggctgtaaatcttgcttaaactttgtatccaacaaataatttatctttttgcctgttatggaaatcttttgttcttagcacatcctgttcttgttttatccatggctttggattttatttatgatttaagacactcatgtttcatttatttcaggatagtggtcatcaaaaaggctatgagcaatttgatgcagctcttatgggtcttctgcgaagaatattagatactaacaagcgggtgcaagaggctgcttgttcagcttttgcaacacttgaagaggttgttataaatgtgctgcacaacttgttgcatatggggatctaagttcttaaacatttcaacattttttgaaaaattttgtttgcaggaggctgccgaagagttggcaccaaggttggaagtaattttacatcatcttatgtgtgcttttggcaagtatcaggtggtttgctggataataggctctttttactgttgtgattatggcttatgagagatgctgcttcattttcactattgaataaaattttgctcatgtataat

SEQ ID NO: 3167 - DNA, 630 bp, Gossypium hirsutum
tgatcttgaacaaacactcttagttttgactctactcgtggcactttcatcagctccaaaaagtactgaacatgaaaaatcaaaacttgttcaggtttaaaagtttttacaaagatggatcaaatgaaagatgttattggagaagcatccaggaactaaatgttttagttagagcttcttcataaaagcgaatgccagaaaattgttatcttgtatttgcaacaatgctatatgataaatcattgttctccagcacttcaactatcttcttaatgttgaatcaaccaaaatctagtactataacagagatacattatctgcccattctttccttttctttctcatttttgaattagaaagaacccatactaccactaagaaccaaggcagctctgactgaagcacaaagcccactttaccagaacagagatataaaaccaatagcctcttgcagttccagccactgctgcctttttaaattataacaagggagtacagaataggagattgttaaagggtaattcttccctgaaacatccttctatttttcttcctcaaatgaaccacaaagtcaaaaggaggacaaacctatcactctactaaatgtacaaccataaacacccttccata

SEQ ID NO: 3168 - DNA, 621 bp, Gossypium hirsutum
tctccctcaacttttgtctaatagcgtagtaggcaaattggcgttggccatccctgtgttgttggatctcctcaggccaaccgttgttcttttgcaagccgagtgcttgcatgaaaccactgtgggtcctggccttacccatggctttaatcttgcaccaagaaaaatcagcatcagttcgccagtcgtcggcgtcgaatgggcttgtccctttaaatgcaaccacatacaagttgggatttgcttgtgtgtcttgaagaataaaagcttgggttgaaggaagtcctctgtattctgtaccaaaatcaaacacatttcttaatatggatgtgatctttacattgcttgctgcttgatttacacacggatcgatcttaaagatatggttaacaccctagatcaataagtactcacatttttttttaaatttagctcaaagatcaagagcaagaatgagaaataaatgcataaataatgttgatatggtcgaataaattgattagtaagggacaaattacatataatgacaaattgattaaagcaactcacctcaattaaggattaattaatgctataaatcaaaagcaaaaagcctcccattggtggttggccactatcata

SEQ ID NO: 3169 - DNA, 291 bp, Gossypium hirsutum
acgaggcataggcatgtcacaaatggagaaaatcatctcattggagctactaccaaaaaatttttctcaaagacccatggtaatgaatggagttggctaactattgactacaaagaagcttaattcttacaatttgtacataataattaatattccatctttaagcttaaaaaatttccagtgttttaggcttttagcatggcagtaaatggttagacattacatgttgctgtatgcagtacgttaccagtgctagacatttaatagttacacacacaaacaaaaaaaaaa

SEQ ID NO: 3170 - DNA, 898 bp, Gossypium hirsutum
  misc_feature (371)..(371): n is a, c, g, or t
  misc_feature (855)..(855): n is a, c, g, or t
aaaagccatttacaaaaagttgattaatgagttaaatatcagagaaattactaatctgaaagtatcgtacaactggcaagctatttacaaatgtatacgaggcaataggcatgtcacaaatggagaaaatcatctcattggagctactaccaaaaaatttttctcaaagacccatggtaatgaatggagttggctaactattgactacaaagaagcttaattcttacaatttgtacataataattaatattccatctttaagcttaaaaaatttccagtgttttaggcttttagcatggcagtaaatggttagacattacatgttgctgtatgcagtacattaccagtgctagacatttaatagttacacncacaaacaaaaaaaaaagactagtcacacttgcaccagcacaggttaaatattttactagcttgaagcctataagaaggttgtaataatccctttgagataatggctgattgtcaagcctatatttacaacatgaatcttgctacaattttgttgacaacaattcagattttgattttcttgaatttgggcctatatagctgggctttttccaagttcctacatggagaatttatggtccttgctttctaatttagttataacttataatatatggtttaatttagtctatattcaaaggttgatttcattatttgagcactaagatactaaaaaagtcctcataagcattccttgtgctaaaggactactatgaaatatgtgcagatattttagttaggagttctgaaatttatgatagtcactagacaggtcaagaactatcagatattttaaaataaaagatgcaccttcacttgtgccanatacctattgccttttagatatggatgaaacatacattagaaa

SEQ ID NO: 3171 - DNA, 608 bp, Gossypium hirsutum
tatatgccaagtactaaacttaaaaaatctcggcgaaaccaacattttcatttaagaagaaacttttttggacccttttaagagggaagaatggcaaaattttgcaacatattcatttaagaagctgatgttgatgatgcacttggactgttgaaggtggctcaactgttctcgtaatgccacgcttttttgtaagggtcagtggtgtaatcagtccaaattagctgatcctcggcgtgaaatctgaagtgacccctgacttcagattttcttttcttttaactgattttgagagattcagtgaaccacttgcatatgtttctgcttctttgatcatcctatactattctaatattttttgactttcgagacattttcgaacttgtttgttacgtttttaatgctatataaaaaatttataatgcttggttcttcttttgtttttgaatcaagttgtgttgttttggattttgggggttaaaattgtttttgctttcattatcatcttcattttggtctcagcttcttgcaatggccacagtgacagcctctcaccttgtttctacagtttgtcaagtcaacagccatggagcagacactaaggccgc

SEQ ID NO: 3172 - DNA, 416 bp, Gossypium hirsutum
attatgtcatgtgtctgcatatgttagttttttgtgctttatttggatattcctgtctgcatttagcttttgttgtggtgagttctctgctacttcggttatctttggtccttaataagacttttatgttctggtgttagatatctatgcatatgtatgtgtgcatgtgtgtctgtgtatgtaatatgcatatattttgtaaactgcataacttctgtcttgtgtttggcttagaaaccctttaacgtgcatgtatggatacacactcacatacacaaacctgagcatgtttatgatctgaacatttggaccaactgtttgtcaactgctttagttattcaaattttttgttcagctatcaaaattttgtacaagtagccaaatcggaagcgaattatgtctggattagtgttctc

SEQ ID NO: 3173 - DNA, 623 bp, Gossypium hirsutum
gacaaaatacatacactgtatatcccataatgctgctcgaaaatattaatttcatgaacgtaatagagaatagtgctagcaaaggcagatttatgagaattcatcatgtgaatattagatcggagacattcagtacaaggaactattatgttcaaaatatagcttagcaaacagattataactatgttactcagatacgagtgccggatatgagtatattcaattttttccatgttttttcatgtatttggaggatcatatccctatacaatgtcggaatatgtgcagaacacaggtacttcgagcaagatgaaaagttgtaggaacataggtttttaagaactaattcctaatgtggttatgatgcagaaaattttgcatatttgagaagtaaaggaccatagataaaaagcccactaaaactgatcacgccttgcatctatcaatcattactcagagattcgactatcaattgcaatggtggtcgcacagaggagggtctagaagagagatcaactagagtaatcactcaaaaagcgggggagtaaaaccaagtccgagaggtacaccccaaagccaaattcactcagaaagagacaaaataggcagacagaagacccaaa

SEQ ID NO: 3174 - DNA, 703 bp, Gossypium hirsutum
  misc_feature (589)..(589): n is a, c, g, or t
  misc_feature (600)..(604): n is a, c, g, or t
  misc_feature (606)..(610): n is a, c, g, or t
  misc_feature (614)..(614): n is a, c, g, or t
  misc_feature (616)..(622): n is a, c, g, or t
  misc_feature (629)..(630): n is a, c, g, or t
  misc_feature (633)..(637): n is a, c, g, or t
  misc_feature (639)..(642): n is a, c, g, or t
  misc_feature (645)..(650): n is a, c, g, or t
  misc_feature (652)..(667): n is a, c, g, or t
  misc_feature (670)..(672): n is a, c, g, or t
  misc_feature (674)..(675): n is a, c, g, or t
  misc_feature (677)..(679): n is a, c, g, or t
  misc_feature (682)..(685): n is a, c, g, or t
  misc_feature (687)..(688): n is a, c, g, or t
ttttgtgatttaaactttcttattaatcagtttagcatacaatgaacaataaaccatataacttgtagatttgattgataagcatatgaacaaaaggcagaataaatgaccctacctggattccggtccccaggcaagggggtggggcgggaaaaccggacctaaaacattaataacctcccagcccaccaaaggaaggaagggaacaaacctaaatccggctggccccgaaggacccaaatccattccagaaaatacctggggccggttccgcctgaaaccaaaaaagaaacccaagaaaaagaaatgggggccaagaaaagggcagcttaagccccctggcaccccaaataacctggcctcctaatttggcctggaaccaagtttgaagggctttttggggcggggcaatcctaaaacccaaaaacaaaaccaaggggccaaaaaacaattggatgggttaagaaaaaagggggtggcccctggccaggcaaccggaatttccggttttaaaccctggaagaattggttaaaagtttttcttttctttttgggacacaatttgggattttgtaaaagggaaacgggngcggaaaacgnnnnngnnnnnaatntnnnnnnnccccagnnccnnnnngnnnnaannnnnngnnnnnnnnnnnnnnnnccnnnannannnatnnnncnnaaaaaaaaaaaaaaa

SEQ ID NO: 3175 - DNA, 649 bp, Gossypium hirsutum
gcccatgttcttctgtagacaaattttaactctccagaataaaaggtgcaaaaatagggacatcatacagatgaaaattgacattgaaaaacagcaactaggttataaaccacaacatgaatttgagaacgtcagtagcaaatacaaaaattaccagtaaaagttcttgagtcagtaacaatagaaccaggataaaaaaagccaattgcctagtaaaatagaactatcttattggcacccacttcctagagtttagagtaaaacattgccagataaacataatatgcgtgataacttagctttagaaaacgaaacatcataaaatatccataaaacacttcactaatcctataaagtggtccaatatacaatgacaagagtcatttcaacaaacacaaccatgcaccagccttttccaacaaagcatattccaatttagagaaattcagacatcttaacaaataccattatgattaaccttatagtttccatttctgagctacaaggtggtggtataaggggttttcttctgtagactgtcagtagtttagaataaaaattctcgtaggcatagtaatatcagcacaagaataataaaatattatttatggcttagagaggcatcaaaatcagatatcctacagctcca

SEQ ID NO: 3176 - DNA, 611 bp, Gossypium hirsutum
atttaattattaaaagttgttttaatgcattgaaaattttctctatatatacctaaatcttgatcaagttgaagctttgctatcgacatttaagaagtagcttatatatatacatagaaatataaaatacagagaggcaaaaagatcaaaagggcatatgggacagagtctgaatccgtgttaagcaagcgtattgaccgggaacttgacaacgaaaacaaaggccacaactagaccaccaccagcaaccgttgaaactttgatccttccttgaaacctcaccgcccaagaaaccatggctacctatctactcaactttgactgttaaccccatgtgatgtcctctctctctctctctctctctctctctctttaccctaaactcaaacttcaaatatatataaaaataatgggggtattggccgcaattttagctctctctctctctctttttcatttcaaaatcattttctctttgtctaaattctgaattcttgaatgttgaagttgatttcttcactttttttttaatatatagaggaaaaaggaataaatactctttggaagtgtggttggggtgttgacatttgtgtttgcctgtgaaaaaattg

SEQ ID NO: 3177 - DNA, 586 bp, Gossypium hirsutum
agaggatatttgtaactactctcacagggcttgtttcgtttcaataaaatgttcaattttctctacctaggattcattacattaaactgcgattaatataaaccataaagtactattttgaagtttattaggggatacaagtttaaaaaccattatttctagttttatagaagaagatcagaaactttccagataaacaagatttaaaaggttcatcattcggtaaaaaaaggcagtctcaacaaaaaagatttacaaaagaagatttctcccaaaggagtcggaaatcctcaacaaaaaagccagcctcaagcactcaagctcttgccaaagttgagagcatttcgttgaaacagaccatgtgtggtgcacatgatcacctaccaaggaaatgtaagaatttatggacaattatgctaccacttgggctaggtaggttgggcattcatcagagtcatactcattgagaggtcagttggctcccggcagataacgcctcgaagatttttcggtctcacctcaacaaaaattcaatcactaatgtaaatattgctaagttcaagtctcaaatatgccaaactcaagg

SEQ ID NO: 3178 - DNA, 904 bp, Gossypium hirsutum
  misc_feature (73)..(73): n is a, c, g, or t
  misc_feature (77)..(77): n is a, c, g, or t
  misc_feature (115)..(115): n is a, c, g, or t
  misc_feature (213)..(213): n is a, c, g, or t
  misc_feature (216)..(216): n is a, c, g, or t
  misc_feature (221)..(223): n is a, c, g, or t
  misc_feature (252)..(252): n is a, c, g, or t
  misc_feature (304)..(304): n is a, c, g, or t
  misc_feature (331)..(331): n is a, c, g, or t
  misc_feature (452)..(452): n is a, c, g, or t
  misc_feature (476)..(476): n is a, c, g, or t
  misc_feature (508)..(508): n is a, c, g, or t
  misc_feature (523)..(523): n is a, c, g, or t
  misc_feature (847)..(848): n is a, c, g, or t
  misc_feature (876)..(877): n is a, c, g, or t
  misc_feature (903)..(903): n is a, c, g, or t
aattaaaaccatataaagccatcaactctagtatcaggcaaaaagctgaaataatttgtaactactctcacanggcntgtttcgtttcaataaaatgttcaattttctctacctnggattcattacattaaactgcgattaatataaaccataaagtactattttgaagtttattaggggatacaagtttaaaaaccattatttctagttttntanaagannntcagaaactttccagataaacaagatttnaaaggttcatcattcggtaaaaaaaggcagtctcaacaaaaaagatttacanaagaagatttctcccaaaggagtcggnaatcctcaacaaaaaagccagcctcaagcactcaagctcttgccaaagttgagagcatttcgttgaaacagaccatgtgtggtgcacacgatcacctaccaaggaaatgtaagaatttatngacaattatgctaccacttgggcnaggtaggttgggcattcatcagagtcatactnattgagaggtcagtnggctcccggcagataacgcctcgaagatttttcggtctcacctcaacaaaaattcaatcactaatgtaaatattgctaagttcaagtctcaaatatgccaaactcaaggccaaagatcaagggattattatattaaccctttttatagaatttagttttataatattttatgatttatagtatatattaatttaactttgcaaaaattaatataacacacaaatatattagtcatgttaccatccctataaatatagagttgaagtagcatatcatattctaaaataaaaataaaaataaacacaggataacagtactaactannaatttaagaatgagatttatccaaattnngaactttttttcatttgcatataaant

SEQ ID NO: 3179 - DNA, 488 bp, Gossypium hirsutum
  misc_feature (432)..(434): n is a, c, g, or t
  misc_feature (447)..(451): n is a, c, g, or t
  misc_feature (453)..(454): n is a, c, g, or t
  misc_feature (463)..(468): n is a, c, g, or t
  misc_feature (470)..(472): n is a, c, g, or t
agcatacgacacccttaattttaaccccgggttcaggcatccatcgcctaaagaaaatctccaatccctttgagtttctttcgatccactacaaaaacgtcaaaacaatgttgttaagttcaaatgattgaaatttacacttctgtttggaaaatttgtgataatttactcccttaacactccccaaacctaaataataaccggaaaaacaggtttttttttttttaatttttccaaaaattaaagtttggaaactttaaaccttcctttcaattacaaaaaaacttatcctaaaacgttgaactacttttcttttcttccgtttcaaaacaaacaaaaaacaaaaatcaaaaaaacccttaccccctctgttcttaccccaataggaaccctctacaaacaaaatcccataattttcccccaaaaaaaaannnaaaaacaaaaatnnnnntnngaaaggaannnnnnannntatttaattaaaaaaa

SEQ ID NO: 3180 - DNA, 617 bp, Gossypium hirsutum
gaagttttgcacctcaattagttcatcaacatgtagataagcttcagctttatttctgattgccattttaataatttccattggatcttttatttgctggaattgcataggcagaagagtcactcctaggtttggaagtttaacagtaagtgcatcaataaaatcagcctccgctttaacatttctgctacttggaaataaattcaagcaatccttagccttccagatctggaacaagttacagcaacataatcaatatttcagtttttgaacaaaaaaacaaagagaaaaatcagaatatttcatttactttgacatcattgaaccacaagtgtgaatttatgttatcatcagcttgtggttaaaataaaagttaaaatcagatcaacagggaatctattgattttaatgatcgtaaaacaaaattatacatgacacaacttcaaccattagaaggaagcttccaggattatacacctattaagccattcttgtatatccaaaaccataatagaccatgatctgacagaaaacttacttctgagccagccagacttgaagctgagaaaaaaaactcccttgcagcttgaataacaagattctccgctttctctgta

SEQ ID NO: 3181 - DNA, 591 bp, Gossypium hirsutum
tgatgaaggcctaacagtaggtctccatactggttgcaggacagacattctcattctgttcttgaatcaggatgcaaaccttctgcggtcttatgttgttcgccaggaaggaattccactttttggacttttggtatgtgttctgttcaagtttattggtaatatggtaaaaaattatgtggaaataaaagaatgggatgaactcaaaagatcttcctcaccttggtatgtgcttgcctgtatatagggagagaattagaagaactaacgtagttgtacacttgcaggttaaagggatggtaacagattttggggaggatatgcactgccaatttcttgaaattcttcgtagtttactggattcattcacattatcaggagctcaggtgcctacctttgattcttgatttctccgtgcaagttttatattttggtagatgggaaattttatagacttatgctcaacctaaatacccaaataactgggccgtattagctggatccttttcttctactcttcatagtttaagatcatgacttttggatctagcttaacctctttctaacccttgtcttgctttactgcacaag

SEQ ID NO: 3182 - DNA, 597 bp, Gossypium hirsutum
  misc_feature (558)..(560): n is a, c, g, or t
  misc_feature (589)..(591): n is a, c, g, or t
actttcaaatatatataagttaacaagaatagagaagcatatagtaaccataatggtctaaagtttgaaatcaagtcattcaggaatatagatttatatgtataactgggagaagtaatttaaccttaacattgatcttcagggcaacattagccaagtactgtttactgatcttgaagacatgttttgtgagacagcattgtgatatcaagcctagatcagtttcacaaattcccttcaaatcacctgaaaagtagaatgatgtcagacttcagtactccaataccatgttgagataattcttccagtttccgatccttcattttggaaccgaaggagggtaggattttcaggaatcatcttaagcacatatatgaacaaaggaacaaagcataaatctaagaattagaatggcaaaccatcataacatgacataccataaagtgatccattgttgtcaggtaatatagctaatagaagctctaattcttttcccttggttttattcatggatgcattataaacatgcttcaaggctttttccactaactcaggccnnncactgtagattggaataacaggctctggnnngaactc

SEQ ID NO: 3183 - DNA, 635 bp, Gossypium hirsutum
  misc_feature (629)..(630): n is a, c, g, or t
aggctcgggagaagagggaatctgaagcaccaccaactgctatgcaagagtccttacgaattgcatttatcaaagaacagtatgaaacacggctgcaagaactaaagcaccagttggctatctccaaaaagcatagtgaggaaatgctatggaaattacaagatgccattgatgagattgagaatagaaagaaatcagaagcttcttatttaaagaaaattgaagaactgggtgttaagatcttggaattggaggctgagttacagtcgttggttttagacaagcgtgaaaaaatgagggcttatgatctgatgaaagctgaattggattgctcaatgataagccttgaatgctgcaaggaagaaaaagagaaacttgaagcttttttgcaagaatgcaaggaggaaaaatctagaatctcagttgaacttagcatagtgaaagaattgctcgaggcatccacatcaaccatgaatgttcagaaggaaaaagatggcaaactgaaagatggttgcttctctgatgagctggttgtcaataatgctcaaactagggacattgatcttaaatatttggaccaagatactccaaaaaactccaaagatgcagatgatggaagtgactgttcnngtgct

SEQ ID NO: 3184 - DNA, 610 bp, Gossypium hirsutum
catcttttctcagcggcatacaaattccttaacatcacgtaactgccgtgattagttggctccatatggaccaacttatttagcactctctctgccctttcaacattattcaaggaccagtatgcaaataggagtgaagtgagaattattgcattggcttcatatggcatactttttatcagcttctctgcttcctccacacatcctgccctccctaacagatcaaccatacaaccataatgctcgatttttggggtgagcccgaattctgccattgctttaaaccacctcttaccttccttcaccagaccaccatggttacaagcagacaaaacaccaatcatggtcacatcatttggcacgattcttcgattctgcatttccaaaaatacacccaatgcttctttggcacacccatttacagcatatccatttattaaagcattccatgaagctatttctctttctagcatctcatcaaaaacttttttcgctttatttatctctccacattttgcatacatatcaataagagctgtacatacattggttgctctatcaagtttcttcctctgaacaaaatggtgaaccctttcacccacttcaagag

SEQ ID NO: 3185 - DNA, 647 bp, Gossypium hirsutum
gtttgtctattttattgcagttcttgtggcgtccaaggccaccatccttcttgacacctgagaaggaggaagagattgcaaggaacttgaagaagtatagcaagaagtacgaggcagaggaccaggatgtatcgatgttattgagcgagcaagatcgtgagaagagaaggatgttgaaggaggaatgggaaaagtgggttagtgaatggaggcgggcacaagaggaagaaaaattggagaggcaaaagttgagggatggagaagctagtgatgaagaagaagaatacgaggccaaagaagttgaagtagaggaagtgttggatgtgtcggaagaggtcctttcatttgaagagtgagaacctgtagtagaggagcttgattcttcattatgatgttgttgttacctttactttttgattttgttaccgtaagaattttgggtcatgacattgccaagtttagttgattatgatttatttgaaaactagttaattttagatcagaatcagatgtacacttctcgtctggtttcaggtttcactgcaaaaagagtactaacaatggatataaattttcaaatttcaacttttgcttttcttaggagcccatttgttgaaatgtgatcccttgatgaagatttctcgttc

SEQ ID NO: 3186 - DNA, 616 bp, Gossypium hirsutum
gaaaagaaaattttagaattggccaaggatctgaagacctttaatagtatcagaaaataactcctatatatcagggtttcccaagtactgacaaattagtcaatttaaggtacacagacaagaagcaaatatatcagggtggttgacagccctgatacgtgctagtaagatcgcagcactttacagatacgacactcaaacaaaaagccaaacaatggttgactgatcattaggatgtagaattgattattaatcaaacagtaggcaactcaggaatactacaaattgcaagagtatgcagagatatttaactccataaagtaacttcactatacaaagcaaccataagaatctctatatagttcagaaattgtcccctgagaaactttttttaacaaaggcaaaaagacttgaaagtgctcatcttgaatcatatctcaatcatcaattatacaagtatttgtcaaaataaatgaagctttttatcagtctaagggatgtaaataaaatgaccttttggtttgggaacaaggtgagggctccatatatacccgtaaggcacatcaggaggagagctataggatcctctcaaataggtaacaggtctcagcttcag

SEQ ID NO: 3187 - DNA, 609 bp, Gossypium hirsutum
ctgcacatcaagatttaattcctttaaagcagccattaaccttgctgccggatggttctttctcttgcattggattcgaatcattgcgtcccacccgataaccttcacttcggtttccaattctatcagtctattcccaaggtggttcgatgtcttggggttttgtgggcatgaatctttctttgccagctctttcttcattgcttctaattgtttctgcaactcttgtttctctgattctgcattttgtacctttgtgctaagctcgttaatatacgaaatagcatcaccgaggagtgatgctttatccatcttggacacgttaggtaccacggcacgcaaggcgtaaaacctctggttaagcttctcccttctttgacgctcggcttcgacgtgattcagaggctcttctctaccattagccggctttctccctcgtttcctaggcttcttttcaggctccaaaggtttgacacattcagcttctttaacgacggaagcttcaatatcagagttatctgaatctccagcacctccactggatttcatcataccagaagaaggcaagactacagcagaagaaaaggaaagcatcccatcttcatgact

SEQ ID NO: 3188 - DNA, 621 bp, Gossypium hirsutum
agtcatcaaagttggttgtcggcatcaccaccaatttacatgaacttaagttacttaataaaggaagctacttgctattattttcttagattgtgatttgattctttatcttgatgtttttccactcttttaaacagtcgatagttatgattgttgagattttcttagttatttgattttgtaatccttcatctaaactcttgaatgaaaattacaaataattcttttaataattaaaataaaaataaaaatatttgaaattaaacctaaactctcgcggtggaaaaaaaagagttggcgagtctgaaatcatatttaatacgaaagtcaacccctcatccgactgtgacagagggacagacagtgtcttctaagttttttttttattatatacctaattatatagtttaatttattgtattagaattaggcagtattaactatgaatgaaaagatgaaaaatcttatcttgtgatcatccacttggttgagggtgtatatgatattcctttcctctttctatctttctgcctgctgctaccgattttaaactaatctaaccacaaattcttcaccatcgtttttgtttggaaccctgcacctgcaggtcagttcaagttt

SEQ ID NO: 3189 - DNA, 597 bp, Gossypium hirsutum
  misc_feature (526)..(530): n is a, c, g, or t
  misc_feature (532)..(533): n is a, c, g, or t
  misc_feature (535)..(537): n is a, c, g, or t
  misc_feature (540)..(541): n is a, c, g, or t
  misc_feature (543)..(544): n is a, c, g, or t
  misc_feature (559)..(562): n is a, c, g, or t
  misc_feature (575)..(579): n is a, c, g, or t
  misc_feature (581)..(581): n is a, c, g, or t
  misc_feature (586)..(591): n is a, c, g, or t
gatagaaaaactaatacataaggttagggaggtggagcaagttgacagctttcaaacattaaacaaataagattaatcgtacaaactctttgcttttcataagtcaatgaaggctccacaggatgcattagagagccaagtataacaaaagaattaaacgccacagaaatagcgatttcacaccgaaactccttatatgaagtctcctacttgactagagtatatccaactcaaatgccagtggaatatataaaagaaacatacatagcagtatcataattgacaagtacttaacagacatccatgtaatgttcttcgacaactacatcttctttgattttcataatgatgttttaattagaagattctgcgaatgacgttttgtgaagcatttttaagaggagaggaggcaggttgttataagatgacaactactgctaataataaaaacatccatcgaaataaataaagacagctatttattgcatgacatacttgatccttcttgcttgcttatttctatgannnnncnncnnntannanntcctaagagatattnnnnttgtaataaaacnnnnncnagatnnnnnnatataa

SEQ ID NO: 3190 - DNA, 607 bp, Gossypium hirsutum
agttttctgatggtggtggcgatggcgagggagtccaaggcaagaggaatgatgccgccaccgccgctgatggaaatatgttggtacatttgccttggcctctttttacgaatgtttcttttttcttttaatgtctgtgactaagttacctttgcaatgtaattatgttgggtgcatgctggtacagtgcatgaaatacagtataatttgctttttaggtttgtataaaaaaattaaataaaccaccttaaagaagaaaacaaaaatccattgaaaatcatgtttaccaaccataaactattatactgtatttcgaagaaggagcaagctgctactgttcatagtttgtagaactaatttaactgtttttctaaaggaaaaagtattgggaatatctacctatactctgtctttttactgttcaatttggcgctgttacatgtatttaatagagcagagatggggttaaccaaaacaataaatgctacggacacgcataaatggcatcatttctggttttatttgggattttatcctactttgacatcatgcatggatcacaataacatgatacttttgtttttttttatttctcaatgtatctatc

SEQ ID NO: 3191 - DNA, 595 bp, Gossypium hirsutum
cagccctcacctgtatgttcttctaccctttctgcatgatcttcatggactttgtcctcatacattagtcctactgtttcttttcatatcattgactttgattaggcactactttttacttttatacatactgattacatggcaggtaatgagctatgattcgcatacaaataatgttatggctgtaggatttcaatgtgatggaaagtggatgtattctggttctgaggatggcactgtaaagatttgggatttaaggtagattaaatttgtgcatgcagagcaggggccttaatttattgcaatgctgtcaagggtgcaaggcatgatctaggtgctagaaactttatatagcctgagtaaggcccaaaaaatgcactaggctgagtgaaataagatgcaatatttatgtatgtatttttgtctgtctatagatatacatacatatatttatatctgtatgcatgcacacatacatacatctgtaagcttaagacataattatgataataaactctaaaagtgttgttcagtttatgctacaacatgcaaaattccgttttttttttgttggcaaatataaagaattttctaa

SEQ ID NO: 3192 - DNA, 613 bp, Gossypium hirsutum
gcaattagcaatctgatcaaaagagatgattatcaaaataatgagaataaggagcacccccgtcaagtcagtccagacaaaaaaaatataaaaggcagtatcagaaatagagccagagccaccgtcaaactaacacccttacagacaaagcacaacacatatgacctttgaaaataatgttaagaatatgtaaacaaaagttcccaatcatttagcaacatcaaatctatattcttttatatgccaaggaaacttgaccttaatattccttaaaatgtgatcaatctcatttcgatattagataaatttaatcttaaccttaattaaccttaagacatgactacactacttccgagtgctgatctttttcaccttgagtagaaatggtacgtcatacaactgggaatagaattccagagcagaaaagaatttgaagaaacgtcaaaccaaacttcacaaatcatatagcaacagctgacctatgactttttgtatccattaaactcttaactttactaacctttaacatgatcacattcatggtaggtcttttgtttcatatccagaaagcagccactgtaaaaaaaattattatttgtgccaccacatttgt

SEQ ID NO: 3193 - DNA, 461 bp, Gossypium hirsutum
  misc_feature (62)..(64): n is a, c, g, or t
tgcacacccattttggtgttatccgctctttgatttcccgttttggttcaatggggcgcctnnntgtgactagttcaactaataatactccaaatgaataaacatcactcttttctgtaagttgataggttcttaggtattctgggtccaggtagccggcagtgccttttacctgggttgacacatgggttgcaccagagtccgtatctgcggccagcctagcgaagccaaagtcagtgaccttggctcggagcttttcggtaaggagaatgttggaagactttatatctctgtgaataattgggtgatctacataaaattcaattcatgatctaattatttcatcaaagaagatcaaagctcttgtttttgaaaccccagaaataaaaaaaaaacaaacctgtgtacatatgaagatgggagattgcatggcccacatcagtggatatatcaagcctaaa

SEQ ID NO: 3194 - DNA, 629 bp, Gossypium hirsutum
  misc_feature (623)..(623): n is a, c, g, or t
tctaaggcacttagcctacatcaccctccacccctctttgacaccaatacatggattagtaaatttactaattaagaagaaagctctgattttaaatttgacattctatttactcaacgatttacaatatcttgaccatcctttcatgttttaaacattagaaaatcctttgatactcccaaatagttactgtattacatttatgtagttaggcttacctttctcacaccaccagcaaggctagtgacaaggccaacaagaatcccaccgagagcattggtaacaaccggaatctgaaaacaaaggaagaagatagttgtgcttaactttagaatgcatgtaccatagcagctaaaacataaaagtattgccaatatgggcctaggaagggataatctcctcatgtttgggactgattatccgagggatattcatgatcttgtaatgcttgatgcaattgctgattttaataaatagttacgatgtaattctaaaaaaacaaaaacataaaagttttgccagaatcaagttacaggatctgatatagaaattttcaactaaaattggactattaccaaagttagtggagtccaaccataaaagaaaccatagcgtctgatagnttctcc

SEQ ID NO: 3195 - DNA, 361 bp, Gossypium hirsutum
acatggacatgtttcttggttttgcttttattgatttgggaggggggtgatattttgttttagctctaattttcacagcaacgtgtgccgttaatgtacttttcagacagctaaatttgtgatataaatgcacatgaacatcgaaaaatcacatcaaacaagctgcttcgaacccttttttcaaaaaaaatttgagggggagaatataagagagctcatattccacatatgtaaaagaaaaggaaaggccacccatcatcatatagatatatatatctcttaatttaaaacgagaggccactcgtcgtatgtaatttagttgggtactgttcgatcttgacattgactgtagtgatgcaaa

SEQ ID NO: 3196 - DNA, 635 bp, Gossypium hirsutum
ccagcagtgagaaaatgattagggaaagcagtgaagaaggatcaagaaaaaaggagtgaaactgacttcgatcgccggaaggcttgttaggaatgctagccaactcgctcagtaagaacaagccctcgcccgacagtctttcactcttggatagctatagctacggggcttttatggcttgaacggaaataaatccattagaggaaaacaacttctttttgaaaacagactgacttagttcaacaaaaggtctttaccaacgcaacgaaaagagctttttccaccagtcttttaggccgggcatcctctttctatccatttcatttcaggaagaggaagaaaggcgaagttcttccatccagcaaggaagactagccaagtcgtacaccccattcttcaacccccccctttttttgccattgtcactactggtacctgaccccgtcggctcaacatttttgcaaacaccgacccttactcaatagggcaatgaaaagaggagaacgaggacagctgactaccactaaaagtcagactacgagtacacattgtatgattgaaaactgccgctgcgtactatccggtgcttgcaggtctgactggagccttctctccaacagttgcttcaatcaaaa

SEQ ID NO: 3197 - DNA, 612 bp, Gossypium hirsutum
gattttggtctctggttcctgtttgtatgcctttcctgtgttgcttgtgttttgttggagtttttctggtttatatttcttgggatgtactgatctatgatcctcaataaatctttaccttttcccaaaaaaacctccctttcttgtgcatcgatagatccaattctagctcttgaaatataaatttgttaaaccaaatctactaccaattgtgtgccttgcattttttagcttaacagtttcttgaatgcttttgagatacgttatgaaagtgtgagcaaaaaactaactgaatatatgaaaaagcttgagtgttattgagctcattaaccagtgtaccataactattccaggtttcttatggacattacaactttaaatttatctctatcaaaagcttgaatggtgagggaaggcatgtcatagatataaaagcagtttattcatttcctcatttgtctttacatttgtgtgtttgattttcatgtcaaaattattataactaccattgctgcataactgtgtactcattgactgctcctgcttgctaagcaggcattttccaggagagcatcattacatgagatgatcagagactatggacatgcatct

SEQ ID NO: 3198 - DNA, 589 bp, Gossypium hirsutum
  misc_feature (571)..(571): n is a, c, g, or t
gagtctcttcctatttgtggatttgttcaaattgatcagaaacagatgcgtcctcaggtgcctcttgcaactgcaaacgagatgtaggtgactgggagagttcaaagcttgcatggtcatgtacaacctcaactggcttaggaaggagtacatcccttggagatgtgtccagcaaagtactttgtatctcttcttcaccagcaagccgaggcaatatattgtcaaaatgagcttgtggctggggaagtgcaggctcagcagcgaattgcctcataaactcttcaatatcattcaatggcgattgaatttgatttttagctttttcgacgtcatcaggaatggcctcatttggttgtttgacaggggtgattacatctactgctttactagcatattcctcatctgcccattcttcctctttaaatggtgccccatactgctctccgtttttagggccaggtccactttttttgtacaacttataaagagcataatagtcctgaaatgcaaaagagaaacagagaaataataaaaagaaattttccggaattaaactaaaaaagtttcttgngcaaacttcttcagccgc

SEQ ID NO: 3199 - DNA, 633 bp, Gossypium hirsutum
  misc_feature (626)..(626): n is a, c, g, or t
atttcattggtgtcatgatttgatcaatattggagcctcctcattatcttttaaaaatctcacaactttaaaggtgtcatattgcgcaatgatgacaaacttagttacaccattaatagttgagagtcttgtgcaattaacaacaatggaggtaagcaactgcactaaaatgacagaaatagtggcacacgagggagactaccatcaaacaatagttgttggtaaattgaaatgtttaaaactaagttatctacaaagcctcacaagcttttgtcgagggagttacaccttcaactttccttgtttggaagaagtagttgtggaaagctgtcctaaattgaagatcttttttgacggagttttaagcaccccacaattacaaaaagtaaaccaagggttttatgataaaaaagaatgtggggcaggtgacctgaataccaccatacaacagttgtacatacaagaggaaaaggtacggagttaattcataatgctatctagcttccttgtcctgaaacaatgaatgttagtgctcgattttctttcttattgttttattgttgaataactaatgaagagtgtttattttgaattatgagtgtaataatatggatggatttgtatgncttacag

SEQ ID NO: 3200 - DNA, 592 bp, Gossypium hirsutum
  misc_feature (575)..(576): n is a, c, g, or t
cagcccccgtctactgctttcacaacaccaccgcctcaactgattccactacccacggattgctggatggagttctcaaaggttctaccgtcctttgaattttcctgcccccatatgtatccttattcacccctgtacttgtgatgaactaacaccgataataatcaatttgaaccattattctacttttattattgcctaatttctcgagcatcatcgattccaggctttcccctaattgtttcctttggaatgcgtctttttcaattcatatttgcttgcagttttagatatagattcttcctcattttaatgcttccatgttacctgtcaacagtcccaaagagttgtgcaactttgcaaatagtgcctttccatgtatttggcataaagaactggggagaaaaaaaaatgaaaactgggcttgcaagctatttgcagccttgtgatgatcatgagctcattagcatttattcgagtttcgagttcaaggcaatttacaattcgaataactcgaataattcaaatgaaaaattaatgtaaatattcttttgatcccttgtcaactttgaacnnagcatgccccctcatt

SEQ ID NO: 3201 - DNA, 137 bp, Gossypium hirsutum
acaggaaagcatttactacaacaaatggtgaagataatgaagttgttgcacaggatctttctgcccaagacattgggataataaagagacttattgccaatgtgcttgagcctggagaaacggtaatcttttttttt

SEQ ID NO: 3202 - DNA, 648 bp, Gossypium hirsutum
gctcgaattgtttattctgcgcatggtggtgagatagctatttcgtttcttcggggtggagtccacattttttctggtccaaactttagtgctgttgataactaccaaattaatgttggttctgctatcgctgcccctgccttctcttcaacaagctgttgttctgcttctgtttggcatgacactagcaaggaccgtaccatgttgaagataatccgtgttcttcctcctgccatttcaagtagtcaaataaaagctaattcatcaacctgggaacgtgctattgcagagaggtaccaaattagctaatctataaacatgtaatgatttgatggatatttataattactattattaataactcggagcaggttttggtggagtcttttggttggagttgattggtgggatgctgttggctgtacgcagagtgctgctgaggatggcattggtaaacaagctttcactatctgttgaaatttttacctgagtgcaagttatatttttccttagcataatcattttgtatcaccacctactcttacttgacttctgtttttgatgattattgtccttttcagtttctctgaacagcgtgattgctgtcttagatgcggattttcactctctcccttctattcagcacag

SEQ ID NO: 3203 - DNA, 576 bp, Gossypium hirsutum
gggagttgtggttccttttgacgataacttgaatttccacaaggtaagtgatactatcaacaatcaactccaatataatgcttaacatgttataatgaaggtcttttaatcttcaggttattgcggttggaatcactgttggggtgatcctacacggtggtgcacatttaacctgcgatttcccccggcttcttcatgcaaccgaagaagaatatgagcctatggaacccttctttggggaagagcaacctgaaaactactggtggtttgtgaggggtgttgaaggtgtaacaggaattataatggtggtgttaatggccgtagccttcacgttagccactccttggttcaggcgcaacaagctcaaccttcccaaattccttaagaagctcaccggattcaacgcattttggtattcccatcaccttttcgttatcgtctacgttctcctcattgttcatggcatttacctttacctcaccaagaaatggtatcagaaaacagtaagcttcttcttctttcaattcccctttgttcattgtatatctatcatcagttcaatataaatgcatgcag

SEQ ID NO: 3204 - DNA, 602 bp, Gossypium hirsutum
ttttcctggggtttttttccttttaaaggatagcgcgtgttaaggcgaaggtgaagctaaattagaggagagatttgctagtgtaaacagttttgtcggtcgaaaatgaactgaaattgtttcgagtttggacgctggtggacccttcatatcttcctctctctctattttttttgctattatagtattttattttattaagtaaattaaattggaccaaatttgagttattttatagatggaatgaaatgaactgtaaatcttggctcttgggatggtcaacgctatttttatatataaaaagacttcgaaatctagtaaaatatagtaaatattagattatgaaatatggctgaatcaaatgagtaaactcttcagaccaaaaaaaaaaaaaaaaaaaaactacccccaaaaaatttggtaaaaaaaaaaaaaaacccgaaaaggggggttttttaaaaaggaaaatttttaaaaaaaaacaatttcggtttttgggggccccccccccccccaaggggaaggccaaaaaatttcccctttcggtttccccccccaaagggttaaaacctttttccttttttaaggggcaacgaaatttt

SEQ ID NO: 3205 - DNA, 617 bp, Gossypium hirsutum
ttaactgtactattttcatctatttccgttgtcttttcctctctaatgtcacaatctcattctttggaattcatggaaaaaaccaatgtaaaatacagacagactgcgcttatgaattatatgaaatatctctacattctacagctactctttatctggcagctctaataattcaacttgtggggttttagggtggaatacaagcaaagctacctatttacaaaacaaataataatgacaggcaggtttttcaacttcaactggtcttgattcagtttccagccactatttggctcatcatcacgatgtcacctttcaccgtaggcacgggatgttgttgctggacgagttggattcaaaagaggctgaagagctttcactacaatgctcatattaggtcgaaaatcagcttcatattgaacacacaatgcagccacagcagccagctgttgtcaacaaacaaacatcaataaggctaatgcttttaagcaaagctccatcaaccccactaataaagtaacaattcccatgtcccaaattcaacaatacctttgcaagtgctttgggagggtattctccatttagtctaccatcaacacactgcttcaccttgtctt

SEQ ID NO: 3206 - DNA, 517 bp, Gossypium hirsutum
atacacacataatatattattctttacttgttgtatgaaccatttcagctactcaaactctcttataaaagtgcttgactgcttttgtgttccataatttgtaatggtgcagggtagattctattttggagagctattggatgatttagatggttgcgatgagaacatttcagcggtatttttagattttgtcctacttaataaatagttcaaaatgaagttgggaggggggggggagtaaattctatattatggtatttctttgacattgtattttttcagatgcatgctggtattgcagaggttgctgctgctaaggctcgaatgtttgttaataagccagatggaagtatgtagtcttgctttattaactattagatttgcataggcacaaaatcttgtttgacacagtaacttctatgattttatacatagaaacatgatagatctctgtatgttgtggacacttttattggttgcatatataagaggaaaaaggcatccgtttaagtcttta

SEQ ID NO: 3207 - DNA, 571 bp, Gossypium hirsutum
  misc_feature (549)..(549): n is a, c, g, or t
ctggtctacaggatacctcaacttacacaggtaccaccaaggtctccatgggtaatggtgagttagtgtccattgctaatattggttcttcaacctttattgctgggtctcgattgttgcatctaaagaacgtactgtatgttccctccatctgtaaaaatttactttctgtaggacagtttgcaagagataatgcagtctattttgaatttcttccttttcgatgctttgtgaaggacatacagacaggaatgatcttactggagggccacatgcataatggcttgtatagaattgatgtttctccttccaattcacggcatctcctctccaccaacagcttcgagtctcctagtgtttgcaatgttcagatggcctcctctgctgaagtatggcatgacaggcttggacatccgtgtcccagtactcttacacgtgttctaaagtcttgtgatgttccattcaagcacaacaagctatattctgtctgtacaccttgtcagataggcaaggctcacaaactaccgtttagcacctctcgaacaatcnatcagctccgttgagttagtag

SEQ ID NO: 3208 - DNA, 629 bp, Gossypium hirsutum
catcgaagattggtaccacccccttggttggaatgactctgtctcactggcaggcatctttcgacctgaggttcactggctcaagggcaggacagctacttactagcttgaggaaccgagctaacaaaacgcctagaacctggtctttaaagccttgaaccaagtgtgggatcaagccctttccttcccgcctttcctggtctttgagttagagtggaagttgaagtggattgagatcttaggatctagctagataagacttattacacacaccttggtaaaagcctcttgggatgtaagggaaaaggcattagagggcgaccctaaggtcactctaatattaaaactttagaaaactaacttgatctagccttagcccttgactcatatggctttctttcaaactgactcgtcgggaagcttcatctcaaagcatgagactaggtttacactgagagcctaataagggactacttcattgagactgctagaaagaagaaagatcaatatagtacttactttaagtataagctaagcacctcttgcataatcaactgcttggtagtcagatagagaagaacttggaaaattccttcgctccaacacttgttacagcataaggagaccgg

SEQ ID NO: 3209 - DNA, 623 bp, Gossypium hirsutum
ggccctgcaataaaacaaaattcactgtttaagcttataaataaaatctagttttgaaaaaccaaaatatcaaaccaaacagaaggaagaaaccattatattgaagaaatataatccaaagcagtaggatagtgcatgtacatgggcttttgttgcaatggaataagcctcagttaccaccaaggttataggccagagagttagattgtcagtatgaagcatgatagtagatctatcatccaatagaatggttcaagccaaataacaaactttaaaagtctctaaaatatttagcaaacatatccttgcaagcacatcttaactatgcgtttacataagcataaaaaactttatcacaatttgtattttcctataatttctgcgatgacagtccaatatagaaggctgaaggcttgtcctagatataatgattaatctctctttctttcagcagggatatgaatgtggaggcattagtccatgacatcaagttcattgcagcttttttgtcctttctatcactttttttaagaactagaatatattacctgataaaataataaacatacaggaattcaaaattaaaaaccttataagcgtaacctgaactgcaccaagtaaaa

SEQ ID NO: 3210 - DNA, 613 bp, Gossypium hirsutum
  misc_feature (605)..(609): n is a, c, g, or t
ttttagagaagttttcacctatccaccagcttctacgaatttatgtaacacattgcctgtgcctgaagaaaataagaatccttgtatttcctgccactcccgatatgaatcccattccggatccagtcctctcgatgtacccatgcatcccgcccaaaatctaggactccaaggatctgtaataatcatcatggtataagcaaacatttcaagtaatcttaatctagagtctagactagctaacacaacacaaggaactagcataaaaagctaacacaacagttaatctaatctctatgctagttacatataaatacagtaattctggtcccgtacttattgatgtaaatattaaaaaacctcacccttatgaagatattgcataagcaaattcagtgaacaaatgcatttgcattgtaccaaaaacaaaagaaacccgaacattgaagaagaaaaaggatggaagatgacttacagctccacctttccaggacacaaatgttggattcgttcttgattgcaaaacctatttcacaggtgagatacaagaataccaaaaccatcatccgtaattgaaaaaaaaaaactaaccatacttaagcaannnnnacca

SEQ ID NO: 3211 - DNA, 620 bp, Gossypium hirsutum
  misc_feature (612)..(613): n is a, c, g, or t
ataagcatgatacagcataaaacacgtacccaaactcgtccgtcaccgttactgtgacggagatgtttaatattcttaacttcactcattaacaatattaattaaacaaagagaagaaaaaaattgccgatattttcagttcccgccgatacaaaacttgccgcaaaactggcattaaacgagaaaaaggaaggaccactctctcaaatggctaaaatagaatccgccccgaacaaatccccgatatcttggaagtgatcatcgacatgttgccaactggagaagcctccaccaaattcgaactcgaaatcctcacacgaactaaaaaatccattatcgaaatcatctttcaaaaaactcgtatcgtcgtcgaacaaatccggtactgaactaaatatgtcacttggaatagagaatgggttgctggagaaatccgacacgtgttctctggatatgcagcaagaatcctcccgaggttcgctctcgatttctcgagattctttgacgctttgcggcgaatctacttcgtcggtcgaaagcgaaggacaacgaagaacggaggttggggagcaaatattggtggtggtggtgtgggattcttccacggagttnnactctga

SEQ ID NO: 3212 - DNA, 505 bp, Gossypium hirsutum
tcttcatccaacatctatttcaaaaacctattcaaacatgactgtgatatccaaataaaggaaaaaacttctaaaatagttgaacatacttgaatcggacatatacccccattaggaaatagaggtctgtgaaatccctcttataatttcatgcactagaaatcatatctcttaaaagttccgaggcataacaccagatctgtagaacactcgagaaactttgaggcctcgaatatttttagaatcacagtatacagagccacgaaagtaaatctggctaatttatcaaaattgagtcctcacctgagaaatttttggaacaattggtagctcattgttatcgaagctgctttgagaaacctggtttctttcttgctcaatgtactctgaacgaaagacaggaatttcacctttctgaagttcgtcactaaggatatctctagcatgattcatatatttctgtaataaccttacacctgaatcattagttccatcaaacccgatc

SEQ ID NO: 3213 - DNA, 639 bp, Gossypium hirsutum
aggtctgtctatataataatataaatggccattcatttttcagaatgcatgtgaaacaatcatgaaaccaaatgctcctttccttcaatcaattctcacctcaagttcaccagccaaattagcatgcttgcttcttagggtctccattatatccttagcagcatcaaaagcactggcagcagaagcaaccagacctaatgaaccattacgcctcattgcagactggccactatcactgatgcttgaagaactttgttgcataggttggtcattccctgtctgcacactgttctccgttacattggatcgctctgggtcttgcccatgagagttactgccatcatgagacccaattccactgccagagtgagttacttgattaacttgattgtcaggcggtaaattgcctccactattctgttgcattctttgctgagccatggtcattctgccgagttctgatttatttgcaacatcacgacgctcaagcaaatatgttcggagccagtaatatagtgcctggaattttaaatggaaagaagtcaagaaaaaaggtggaagaagggaatatgtaacatacagataatatgcttattggtcgatcagaaaaatgaacatttacctgcggataaacagcag

SEQ ID NO: 3214 - DNA, 583 bp, Gossypium hirsutum
  misc_feature (558)..(559): n is a, c, g, or t
  misc_feature (561)..(568): n is a, c, g, or t
cttcttgtcttcttccaatgacaccattccctttgatatggggtctctgtaaatacatctaaccttcagcaatgacatctcatcacaggattcatctactggaacattgactgtcaccaaaaagtctctttcttcttcagcatacaagtctcctacatcaacagaaccagctttagcatcagccgtcacactggttcgataactcccagcctttatcaaattgattagcaagtttgggtgagcacactccagtttaacgcatgcctcctgcactaccacacttaaaagccctccaatgcatagagcaaaagcatcttggatgacaccctcggcttctatgaaagaaaaggtgcccccagatatttcagaaatcgaatgcattgaagcagcatcatgatctgcaccaaacccgaaggtgtgcacagggacacggagacctgtcccaccattgcgctgaatcgagggaggaataagtgatttataatcggtctgggaatgagatccactaggactaaaaaaaagatagaataaaagaagttacttatcaggcagaacaanngnnnnnnnnggttaagtggaaaaa

SEQ ID NO: 3215 - DNA, 624 bp, Gossypium hirsutum
aaggtcagacctttttctatcacctttttctttttctttctgcatctgcttatccatctttgaaagaactatttgaagtttataatagttttatagctttgtttgttagaaggttctttgactggtaaaagttagaaattgaaacccatatatttctagctttagatgatggtatgggtgcagaattctgaatattattacctggccaaaaaggagttttaagaagttgatataaattgatggagcagctttttgtttgtagacatctttcttatctcttcatttgtacattttgaagtggtacggtctgaatgctctaaaacaagttaatacattcaattatgttcatttttacttgatttctttattgtgcatgcaaaaatttcagcaggccaagaacatagttttcttggcttaaatcaaggataagtattgtattttgtactgtgttgatggtcagatggtgtatattatatggtcaatattatatatatgtatatgtatatatacttgagcagtatgaactttgtattgtttgttgctttgtccactactgtcttctcactcccgtttatttacttgagctatttccatctaagctgtgtggctatctctaccttgaag

SEQ ID NO: 3216 - DNA, 1180 bp, Gossypium hirsutum
  misc_feature (588)..(608): n is a, c, g, or t
  misc_feature (610)..(610): n is a, c, g, or t
  misc_feature (614)..(627): n is a, c, g, or t
  misc_feature (629)..(654): n is a, c, g, or t
  misc_feature (656)..(660): n is a, c, g, or t
  misc_feature (669)..(680): n is a, c, g, or t
  misc_feature (690)..(707): n is a, c, g, or t
  misc_feature (709)..(714): n is a, c, g, or t
  misc_feature (716)..(720): n is a, c, g, or t
  misc_feature (726)..(726): n is a, c, g, or t
  misc_feature (728)..(731): n is a, c, g, or t
  misc_feature (735)..(736): n is a, c, g, or t
  misc_feature (739)..(739): n is a, c, g, or t
  misc_feature (742)..(750): n is a, c, g, or t
  misc_feature (752)..(765): n is a, c, g, or t
  misc_feature (770)..(771): n is a, c, g, or t
  misc_feature (773)..(788): n is a, c, g, or t
  misc_feature (793)..(793): n is a, c, g, or t
  misc_feature (797)..(813): n is a, c, g, or t
  misc_feature (815)..(822): n is a, c, g, or t
  misc_feature (824)..(827): n is a, c, g, or t
  misc_feature (833)..(834): n is a, c, g, or t
  misc_feature (836)..(850): n is a, c, g, or t
  misc_feature (857)..(858): n is a, c, g, or t
  misc_feature (860)..(869): n is a, c, g, or t
  misc_feature (871)..(885): n is a, c, g, or t
  misc_feature (889)..(890): n is a, c, g, or t
  misc_feature (900)..(908): n is a, c, g, or t
  misc_feature (912)..(914): n is a, c, g, or t
  misc_feature (916)..(920): n is a, c, g, or t
  misc_feature (922)..(935): n is a, c, g, or t
  misc_feature (937)..(945): n is a, c, g, or t
  misc_feature (947)..(953): n is a, c, g, or t
  misc_feature (957)..(963): n is a, c, g, or t
  misc_feature (967)..(973): n is a, c, g, or t
  misc_feature (978)..(995): n is a, c, g, or t
  misc_feature (998)..(1001): n is a, c, g, or t
  misc_feature (1004)..(1005): n is a, c, g, or t
  misc_feature (1007)..(1018): n is a, c, g, or t
  misc_feature (1020)..(1033): n is a, c, g, or t
  misc_feature (1035)..(1036): n is a, c, g, or t
  misc_feature (1038)..(1048): n is a, c, g, or t
  misc_feature (1051)..(1056): n is a, c, g, or t
  misc_feature (1060)..(1067): n is a, c, g, or t
  misc_feature (1069)..(1075): n is a, c, g, or t
  misc_feature (1079)..(1079): n is a, c, g, or t
  misc_feature (1082)..(1082): n is a, c, g, or t
  misc_feature (1086)..(1091): n is a, c, g, or t
  misc_feature (1096)..(1112): n is a, c, g, or t
  misc_feature (1117)..(1124): n is a, c, g, or t
  misc_feature (1131)..(1150): n is a, c, g, or t
  misc_feature (1162)..(1162): n is a, c, g, or t
  misc_feature (1164)..(1169): n is a, c, g, or t
  misc_feature (1171)..(1173): n is a, c, g, or t
  misc_feature (1175)..(1176): n is a, c, g, or t
aatgctcgagtcaataacacaatagtacttttcatgtccaatgtcaatgtatctaaaaataaaggaattcaagcatgagtggtaattttggatcaccacttcaaaatcagtttaatacaacaatttttagaaaatttaaatataaagtacttatcaggactgaagtcgacctaattaagaattaaattttgatcacaagttaaccttatgaaccagattgaaattcaaacagcagattcttagctggtatgatattgaaccttaatcagactaggtcgctgggactatgcaacaagatcctatttcaatgacagctgttgagattttggaagacagcaaatatcatttcaattacaatctcaatgttatcggcttcagagaagccagtacaacatatttaacaataatgttcagacatcaaataatgtgtgtggagggataatgcatgaataaaattgccaaaataatcttacgcgacatcaatttcatcccaagtcatggtttctaagtcaagaatatatagatcattcaagagtgttctgtttgcaccctgtccaccaaatatcaccaaggtggttccaacaaggnnnnnnnnnnnnnnnnnnnnnanaaannnnnnnnnnnnnncnnnnnnnnnnnnnnnnnnnnnnnnnnannnnngaaaaaaannnnnnnnnnnnaaaaaaaaannnnnnnnnnnnnnnnnngnnnnnnannnnngagcgnannnnttannagngcnnnnnnnnngnnnnnnnnnnnnnnaaatnngnnnnnnnnnnnnnnnngtaanagannnnnnnnnnnnnnnnngnnnnnnnnannnnagagannannnnnnnnnnnnnnnaaacatnnannnnnnnnnntnnnnnnnnnnnnnnnaaannaaaaaaaaannnnnnnnnagcnnnannnnntnnnnnnnnnnnnnnannnnnnnnnannnnnnnaacnnnnnnnggannnnnnntatannnnnnnnnnnnnnnnnnaannnnaannannnnnnnnnnnngnnnnnnnnnnnnnncnnannnnnnnnnnnacnnnnnnagannnnnnnnannnnnnnaaanaancaannnnnnaaacnnnnnnnnnnnnnnnnnaaagnnnnnnnnaacgctnnnnnnnnnnnnnnnnnnnnaaatagaaacanannnnnntnnntnnaaac

SEQ ID NO: 3217 - DNA, 634 bp, Gossypium hirsutum
ataatattctgaagtttctgttgcatttctacatgaaaatgaattcttctctttctgtttggctgagcatgggctcacctggtgttagatggctttcttatttccgttcttagtaactagatgttgatgttgtctgtcccacaacaaagctccaacttgagtggggtgaaggtgctttgaacagttgtacatactgttcttcaacttttcatgtattttatgtctatcctttttgtttatttggtgattgtttaaattgcagagcctgatgtttataaagaagtaaaacagaagcttgatcttggatctgtaaagtttgaggtgagattatattccttgttttaagtgattggtatttcttttcaccttataagttttttcttttccttaatctactcaggttgctgtattgatgcatctttctatttttattactattgagtatgaagatataggaacctgatctgcctttcactcatttgacttcaaaagtcacaagaatagttaggacgttccttgctatgagttttgtgaagatccaaacagttactattattttatttttttcaaatagatgttatgtcagtttaggaagttccctttaagtattaaaaccaaataaaggagccaaagg

SEQ ID NO: 3218 - DNA, 620 bp, Gossypium hirsutum
  misc_feature (611)..(613): n is a, c, g, or t
ttgtttttggcagtttcttgtacaattaaatttgttattcccaaggctttaagtgttccagttggttttgcctatggtctttgattcatgttttttatattgaaatgatatgaaactaatttctgaaaacaattgctcctatacaaatgggcttgtatttcctttaaaaatgtcaagcatcgatgtcctgaggaaagattgcaaagatctgcattgatttaaactgtttctagctggtgttttcctttgaatgaaagtcattgaactggtgtttatgttaattaatgcagtaatattccatccactagggattgtgtgatttgggtagcatattgtagctaaaggagagtgaaagaaagacttggaaaggtgctgtaattcattgattttttgagtggcagtcccttaatccatgaagatgcgtgttaagttcaatgcttttgttatcacagattgtcattttcaggcagccgattgttcccaattcaggctatccaattaaagacgtaattgctaacaccaaaatattccaaatatttgtttattctggacaaattttccttaaagtagagcattagttgatgtttgaagatgaatattgcaggagcctnnncatatgt

SEQ ID NO: 3219 - DNA, 639 bp, Gossypium hirsutum
  misc_feature (614)..(615): n is a, c, g, or t
gcgatccgcagaaacgcttgcaagcaacattacaattggcagcagctcttcttctacaaattcaacaagggaaagggacttgaactgctgtgggattcaacttctatacgttgggtaaaatctattacttttaacaactaacttcataaaatttcaccttggtttggattccaagggtccaatcccaatcctccgaatgaatccactgaacatctaagtttttaacactgggcttaagggatttccttccccgatacttgaattgctatacgttcttaaaaatgtttagtgatgaagcctacttaaatatgtattcctgttttacttaacaacttgtaatcctgccatgttgatagctaccttcaattcgcaaaataactgatttttttttaattattacttttgaataggggtataattgagatagtcatgctctcaagttattcaagtttagcttaatatgaaaaatgaattcaatttaatcgttattgagttgagctcgaactgcttgagctcattcatctgagttcgaatttcttagcatttaattaacatgaaggcttaggcctaattattgtttgctttctgttaaaatcttttatttttaattaatnntaaaaataacctcactttgaactt

SEQ ID NO: 3220 - DNA, 506 bp, Gossypium hirsutum
attattgtaagagagccacaaaccctgaatacattaattttcgtaaaccgtaattcaaacatgaaagaaattacattgttggtagacaaccatgaaccctaaaaacattaattttcatatattgtaattcagacatgaaagagatgatattattgtgagacaaccacaaatcctgaaaacattagttttcgtggactttaaaatgaatataattattgtgaaacaatcacaaaccctgaaaacattagtttccatgggctttaaaatgaatatagaggaatggcatcgttcgaagagacaaccataaactctcaaaacattagtcttcattaaccataaaatggaactgattgtaaaacaaacaaatgaccggctaataataataattggagtttgacaaaagataatactatattttttagcaaagaggacaggtaaccagggcaaaaacaaaacatttcttgggtaaacaaaagttttccttgtttccttgggataatgcaatc

SEQ ID NO: 3221 - DNA, 646 bp, Gossypium hirsutum
tgtaaaaatgagataaaaaattaaatatactatattaaaaatatatgttcatctaacgagaccctaaattattaactgtgaactgagcataaaatattcagtttcatagttagccacacgtcatagatagcatcacggcgcgcttgtttgagccgctagcaccaaactattgcattcctctctcatcaacaactttgtctgcattcaatctcccaatttactgtatacttactatgattgaacctctcttaaacatggggtggtgttgtatagtataggggggaccctgatttgattgagactcgactgctttctctatatataatattttgagtttcccacagaaacaacagagaaacgttatcaatcatattctgattcttattctttcagcattagtgaatggcgtgtttagccattggatgttagcattgaaaccccataaagggctcatacaacgagacatgataatcaagtgggaagaggcgtaccttgaaaaacaaaaacaaccctaaaggaaaggacccctttgaatgggaaccaacataaataacattttttccccatatcaataggggtgcgtggtggtgttgttttatgttctttcaccaattaaacatatatgcatgtaccctaaattgtttgt

SEQ ID NO: 3222 - DNA, 282 bp, Gossypium hirsutum
cttgcatcaaaagctcgcactcttgctttatatcattttatgtactatatatatactacaagttgattaagacctaagcaaaaagaaaaacataatttgcaagtgggataaaggcttgacaatgagatcagctaatagaaatggttttgaataaatgaatctaataaagtgcacgtgatgaagcatatgttccttgaatgaaacagaatattagaacccatttctttgttaatctagtggcccagatcatcatcaacaaccagctttattaggggggggggg

SEQ ID NO: 3223 - DNA, 648 bp, Gossypium hirsutum
ctgctgctgtggttatgttaacaactggcttgtttggcctctttactgggttgctcaaggaaccatgttttgggctctttttgttcttggtcatgactggtaattcatacaatgcattggacacaaccttctttaattaggcgtgtgactgtctcagtttatatgattattttcttttcaaggcttaattggaattcattgtgcagcggccatggcagcttttcaaacaaccccaagttaaacagtttagtggggcatctattgcattctttcattcttgtgccttatcatggatggtaaaattttgtcataatgttgaacttagtcctcgatgtttgcatttttttgttattttgtccattattctttatcacatgagtttccacaccacagttgaattcactttcattatgattaacttttacaggagaattagccataggattcatcaccaaaaccagggtcatgttgagaatgatgaatcatggcacccggttggttaaacttttcactgatcttttatggtgcttgcttgtttggtctattgcaacacctttgttcttcacctagttttttgtgaattttattacagttaactgagaaaacatacatgaatttggataacaatgaactaacatggctgttcag

SEQ ID NO: 3224 - DNA, 618 bp, Gossypium hirsutum
  misc_feature (35)..(36): n is a, c, g, or t
agttgatcaaaatggtttcagaagaacaatatatnnggaacaaagattacgtgaatctattgcaagggctctaaatcgaagattgatgcttgaccaattttctgtgagctcatcttcatctccaaggtctgtattaccacaaaatatcttggcagatcaaatgcctataccagaagttgcacgacgaatacaacgaaatctatcacagtctgttagggaagatatactgaggcacaatttagcatatgaacaagcacgtgaaaactttacttctaacaggccccgattttctcatgaatttgtttggagttcaatgaatcgctcattcagtagttgcggtcttggaacattggaggtcagtatgagagtatcaacattccatcttcgtcttttcatacattagacaaatcttgaaatcatatataatgtttgaggcttatgaatccaagtatataaacatggtccttcacttttaagtaccttttccattttcttttatgcctacaacctccattcttggccctcgccccgcgcgtgtggttggggtatgcgtaaataacttccagcttgcagagagctatcagaaccatccaggataatattcctggttctagtgat

SEQ ID NO: 3225 - DNA, 619 bp, Gossypium hirsutum
ttgataggaattcagggtgagcagataggatagcagaaagcggaaaaagagaatgtaattgtaggcgtcaggaaattagctaaacaccaaacaaaacctttttttccccgttggatcggcagtttcattattcaatcatcaataaattgcgttaagtacaagcattttttaatatagctttttcaatatcagattcaaaatttgctccattatcgtgcaaatctttcctagaaaattcaactactatttttttttcccaggaaaatataaaagagaagtacaataagaagtcaaaaatgagatttgtttgatagatacaaaagatacttgaaagggttcatattaaaaaaatcgtactgaaatgcatttttggaaaacgcttgttttctactagcgatggaacttctaacactttcaactcacctacttaaaataatggaaaaaaaattgtttactaataagcataggaatgttttagaatctaaagagaagtaaatgattaaaagaatgacaaatcggagttaatttcccaccattactaattcatgtatcaatcagttattgctcacaaactttgtcgatagtagtagtaacaatagaaaccggcaaaatcattaac

SEQ ID NO: 3226 - DNA, 634 bp, Gossypium hirsutum
gccccttctgacaacatgcacttgccggtggggggcgcacagcttctgagcgcgagaacgattctcgtgataaatggaggccacgtcatcggttggaagttcatgcaggtgggtctgcttcttaccgcagtgctccaggatttggtttggagaggggacgagtggagagatcaaatgtgggttttgcagcaggacgaggaaggccaaattccaatgctagcctacaaattgggaggccacaatctgcttctgttattggagctcttcctgtggataaaaacatgacccttaatgcatattcctacccaagaggaaaactccttgacatgtaccgcaaacaaaggactgctccaaattttgacaacctacctgatgagatggatcatttatccacagtaacacaaaaagaaattgttgtgcctttggcatttgttccgcctgatgcagaggaagaggtctgaaccttctagtttgatttatagaagaagaatgtactcatctttatccttctatatggttgcctaaaatcttcttgcgcgattcttacaggctgtccttggagatatatggaaaggaaaaacaataagcagtgaagtggtctacaactcatttatggatgcaagtagggatcaat

SEQ ID NO: 3227 - DNA, 693 bp, Gossypium hirsutum
  misc_feature (436)..(436): n is a, c, g, or t
  misc_feature (546)..(546): n is a, c, g, or t
  misc_feature (549)..(552): n is a, c, g, or t
  misc_feature (580)..(581): n is a, c, g, or t
  misc_feature (584)..(587): n is a, c, g, or t
  misc_feature (628)..(629): n is a, c, g, or t
  misc_feature (642)..(649): n is a, c, g, or t
  misc_feature (652)..(658): n is a, c, g, or t
tgtatgtttctacgtttcatattttaaaagaaaaacacggaaaaaataattgaaaaagttgacatataataaatgttcattaatatcattttactggcttttgtcttgttattgagaaaggggtaaaagaagaatcactgacatttatcatttcacgtttcattcacaatataatattaaatataatgtcaatcgaaagattaggaaaatattggaacatggtagctcaattattaatggaaaaagttagttttaagtatacaaactcaatgcttattcatcaaggcatggaacacacaatcaaaatacattaatgcagccatggaagtatggttggcatcataatgatatcaacatcttccttacaaatgttatgactgaaaactaaattttctagtatttaaagttagtgtacttcataccaaattttctttcntttttctttttcaatacaaaaaagatgaaaagtttatgaaacttacccacccattatgtacataatataaagttttggcctttcgggggtgcggaatgtgaaaaatactngannnncttcaagtttttattcttttttactgannaannnngtcgaaaaaaaacaaaaaatatcatcaactttcatattcgnnccctcaagttgtnnnnnnnnacnnnnnnncattcatattcggtccctcaagttgtctgtttgca

SEQ ID NO: 3228 - DNA, 627 bp, Gossypium hirsutum
cacttcccgcatgatccgcctagttgcaacctaaagtacacaaaaatatgtcagtatctaagtgacaaagaaagcagacatgatcgaaaaataaatactatgcttacctttaagttgatgtttgaatcaacaataacaggtgactttcctccgagctccaaaacaactggtgttaggtgctttgcagcagctgccatcacaatgcgagcaactcttccattgcctaaaaattcaaggatgttttgattcggaatacttttttatcagaatgatacaacaatgtctaaagcagcaactaataaccataaggtgaaaattagaacttctgggagagcaccaaaaatttgggatgtggtcatcttgttgaaaaatcaatttaagacttgggtacatcttatgtcagaaaagaggatccaaaaaacaacatattagcagggaaccaaacaaatatgccaatgcaaaccccaaaaggaatctctcaaaactctgttcagttctttcaagatcccgaagtaagaatttttttagaactattaagccagcaatactttcagtttccaataaactcttgaccagttcaagtgctgcaactacccctaatcacccttagggagcacaatagcctct

SEQ ID NO: 3229 - DNA, 483 bp, Gossypium hirsutum
  misc_feature (452)..(452): n is a, c, g, or t
  misc_feature (458)..(458): n is a, c, g, or t
catggtggtgttgttcttacagggatttggtataagatcggtggttctaaggagataaatttgcatcccattttgtgctgggaatggaaaagcttggtcaagtttttgagttctagaaagtgaaaacgatgagctgagcatatcaaaaattttgaggctggcatttgttggtgtattgggacctcatgtttgttgcattacagaaaaatcattgtgtacggtgatactggctctgaattgaaacgtttaccaatgggaacatgaagaattaagtttgggacaattacgtgtagaatttgactcatccaaaatgtcgaaaaaggagataataaatttattttaaagttgtaataacttatgattacaaaaaaaatttatggtactagagctaccaggagtttacgggatcaaggccattgcctgcccctctttgcctacgtccctgattatgncccttnttgcctacgtccctgattattgtcc

SEQ ID NO: 3230 - DNA, 661 bp, Gossypium hirsutum
aaagggaatagcccaaggtccctatttgagcacaagagcagtccgcattttatcctggatcattgcttgttttcactccctcgatcttatactttcaatccttggtttgtccaagcacagccctaataagtaatcctagtctttcttgaaaatatgtgtgtatacacacacatcgtctcccccattgacttttgacgttcacgttgggtggttactgttccaattacaaacatattgtattgctagtgtatcagccactgattaagtcagccaagtttccattgatgttatcgtctctctccaatggctgcttgattcatggcccacggtcactcaagtaatattgggcacatgaaattatatgaaactaatcccaattttaccacctttttttaattaaatatgcgagattcattgaaagagggtgcaaagctgtggatctgatcaaagcccattgcaagaaaaactatggatggcttgggctcagctgatcaagggacccaggaaagccatcaagttcaaaaacagaaaactccaaaataaaaaccatgcggttccaaaacaaaacataatcaaaagagaatcaagggacggagcagggcagaaaatgcagcagcagaaaaccgtgcattccatctaaacgggaaactttgcatacaaa

SEQ ID NO: 3231 - DNA, 494 bp, Gossypium hirsutum
  misc_feature (402)..(402): n is a, c, g, or t
  misc_feature (414)..(416): n is a, c, g, or t
  misc_feature (425)..(431): n is a, c, g, or t
  misc_feature (435)..(435): n is a, c, g, or t
  misc_feature (440)..(440): n is a, c, g, or t
  misc_feature (445)..(446): n is a, c, g, or t
  misc_feature (449)..(452): n is a, c, g, or t
  misc_feature (458)..(465): n is a, c, g, or t
  misc_feature (467)..(467): n is a, c, g, or t
  misc_feature (469)..(471): n is a, c, g, or t
  misc_feature (473)..(473): n is a, c, g, or t
aggatgatgatggcatgttgttggatgaaggagaaagtggctttcctagtcaagaagactccaataatccagattttgaggaagatcaagcttccttgcacttaagggactctgatgaagaaactgaaaatgattcagtgatgatggtgtgtctctttgatgcttatgtcccaatgcaatttgtacttgatgaattatgaggaagagccagctatatgtttctgcatatccttgcttcttgcggcattcatgttgtttctttttctcttaaatattctgtatgtgaatgattttttcttttatacatgcaggaaggggacaatatgacaagggagcagataaaggatgagattataaaaacaaacgaggcgcatgccgaagatgaggttatttatgttttcnggatgactccannnttttttttnnnnnnntttnttatnattanntgnnnnattgtnnnnnnnnanannnanctatatttggggggggggggg

SEQ ID NO: 3232 - DNA, 606 bp, Gossypium hirsutum
  misc_feature (274)..(274): n is a, c, g, or t
tgcagtcgaaagaggagtcactcacatcgatacagccgacctctatggacccaaaactaacgaaattctggtcggaaaggtaacatcctttcgtcatctcttcatgttgaatcacattgaaactgagagcgattctttcttgttctcaatttcccacactcttgtgtctattacatgttcgaagatcagcgtgagagaaggatttttttagtttatcaaatggatgatttaatgttttcattcttgttcttggttcgttaaaggcatatggganggaaaccaacatcatttctttttttgcaggcattgaagcatctgccacgagagaaggtacagttggctacaaaattcggtgttgaaagcatgggtccagatggtccggttatcaatggcactcctgaatttgttcgttcttcacttgaggctagccttcaacgccttgatgtggattatattgatctttactatataatcagagttgaccgcaacactcctatagaagataccgtaagcattgctgcattaaagaccctattttgtctttctttagcacaaatacgattttattttgtttatgggaaaattaagcataatttatatatattt

SEQ ID NO: 3233 - DNA, 610 bp, Gossypium hirsutum
atagcaaaatagctttctccttcaacctgttgtaactctgttccagccttttatgatgcaattatgcttgggatgttctatcctttatgctatggttcatatctttgaagatcagattgaatgaatcaattgttcttcaataacacacagactgatggtcctagacataaacttctgttctaaaaaaggcagatccatatctaaccttaaagcattgaatgcaccaacagtaaaaatggccccaataatagataagaaataaaaggtccattgcatctcctgtgtatgcctatgaaaagctttattgtctacgaaacaaatcctgtttactgaaattatgctcctgcacgtcaaaacaggcaaatgatgggtgaggaactttctggattgaccgtaaaagatttacagaatttggagagccagttggaaatgagccttcgtggtatccgtatgaagaaggtttgaaaattctatttccatgtcacatcagtttttaagttcaaaatagcatgccaaataaagcaaacgccgtttggtaacatttactccactgctgtaggaccaaatgttaatggatgaaattcaagaactgaccagaaaggtaaaaccc

SEQ ID NO: 3234 - DNA, 631 bp, Gossypium hirsutum
aattcaaaacatcgtaagcactgctatttaaaatactcaattgtatgaaaggaacaacagttacctgcttgtcggtcagcattggcaaaagcagggggcatggcagcacttgttccggcaccggggccctaccagagacaagcattagaaaagatacattccatacagtttaataacaggagcaaaacatcctactaagtactcacaagggctcgagctggcggagtggtcagctgtgattgctgatacttcaaaatggtccaatcaaagacataatcgaactggaagcctgtttagtaaggatcatgaagaacaaagaagagatgtgacactactgtgatctatggaaataatacaagttgacagtatggattgttaaaaacacaaattcaaaccttcacgaataaagagatcacgaaagattcttttgagataagaatagtctggcttatcatcaaatcttagtgaacggcaataatggaagtatgatgcaaattctgttggataacctcgacataaggcctgaaaagcgcatctatctttagtcgtaattttttttaacacaaaatcagaagctccaagacacatgaacatctttcgaatatctcattccctgtacagaaacctaagg

SEQ ID NO: 3235 - DNA, 646 bp, Gossypium hirsutum
ttcacacgctcacctgcctctgagtaagtcttcagttttatttctaattcctgaagtcgggcatcttttgcttgtaattcctgagagcatctctcaagttcagcagatgtctctgcaagtgactgcttaagaccatcacgctgcactaccaaacctttcccctttgccacagctatgctaagcttctccctaactgaagacactcgctgctctgacagttcaagttcaccttttttctcctgtaactcagaatgtgcagtcacaagggcttcctcttcatggcgcagactttctttcagagtatggatttccagctcctgctgaagcctcaatgcatccaactgatgcatcttttcctctaattctgtcaattcgatcaccttagaaccaaactcctttctacaatcactcgccagctcaacaatttctttgtatttcttaacaagcaaataaactaacaattcaagacgggaaccaggtgttttatatgagtcaatttcatagtcttccagttctacaacattctcaacatgttctataagctttcgaatggcatttgaattaaggcattccttgctcatttcctcaaagtctcttgtcctattcaccaattctgaattaagttgatcattaacagactggagat

SEQ ID NO: 3236 - DNA, 656 bp, Gossypium hirsutum
actgaagcttgatttcacttagagtatcagttgtgcctgtgcattcaactttttctttattgaaactactctttaccatctcctttgctattctaagttagagccatctatgcactgcattagaaaacaacgcgccaatgtccaattagtgccttgttttttgatcaattatgcaatgtgtgaacgatattccgggcatcagataaaccaagaatcaaccaaattcaataaaaaaattctgccactctacttattttagatcatccaaattccaaagacctcagttgacacccattggaatcaattataacagaaaaatatgagaaccacacagcttcatttaaaagaaaaaggtgaagacaatactcaaatttgaaaatttttaatttccatccaccatcaacaacctcttattatttttcagaaagaaaattcggtatcattcacagcattaaatcaacttattagaacaaatagaaagaaaaacctccccatcgtttagattatcgtatacaataacatttaagatataaattggattaaagaaaaaaagaaaagctcaataaacaaaccagcaaaaggaattgaaaaaagaatgtactaaaataaatctaaaaaacaaaatgcattgaatcaaatccataaaagcccaatgc

SEQ ID NO: 3237 - DNA, 618 bp, Gossypium hirsutum
  misc_feature (532)..(532): n is a, c, g, or t
tccccatttggttagctgttgggatattgttgggaagataaagagctgctccttgtgtacgagttcatgcagaaaggaagcttggaaaatcatctatttagaagtaagcttaagactttcgaatataaacaagaaaaaaaagttcatctccatggataattcatgtttgatttgcttgattatttgtttatgcaggaaatccatcagttgaacctttatcttgggaaaccaggcttaaaatcatcaacggagctgctcgaggtctagcttttctacacttttctgagaaggtcatttttagagatttcaaggcctctaatatattgcttgatggggttagtccttatttgcctcattatgctccactagatttcaatggatatatagcatttgaagtagactgatagagctaaaattcagtgaccattcgatagaacaaatgaatatttgcctgtcttgctatatttgtaataaaggaatccatcgtgttacttttcaatcataaagtaatattcccattccgagagcaacnacataatggttttgattctacagcactacaatgcgaaaatatcacattttggcttggctaaattggggccttatggtggaatactc

SEQ ID NO: 3238 - DNA, 587 bp, Gossypium hirsutum
tgtgacctaccatttatcatttattggcccttactaattggataataggaagctttagttacatgtgtcatcatgtataactggttcttgtttggggtgtgtgttagattctaacctaatggtgctctcatatccttaaattgttttatcatacataaggaatagttgtttttggtgcaaaggaggctaatgcctatgggaaattaggaaaaggaatcttcaagtgctgagggtcaaaccccgtccttgtggggatccccctaatggaggtgggtgaaccatttgggttaagcctggggttcaataaatagtttaacatacctcacttgtattctttaaaggttaaaatgagcaaaggtaagtgaatggtggagtatagctggctgacatctgttgacaatgtatattaaattattaagcatttttcttgcatgctctcctggagcctaattaatggtgggtccggtgactgtaagtcaccccttttaagcatttttgttcactttattgcattctacaggagggtcctcttctcaaaagcaaaggaaaggctagcaatgccacacgaatgcagtatgactggaggt

SEQ ID NO: 3239 - DNA, 1138 bp, Gossypium hirsutum
  misc_feature (631)..(631): n is a, c, g, or t
  misc_feature (634)..(821): n is a, c, g, or t
  misc_feature (823)..(948): n is a, c, g, or t
  misc_feature (951)..(953): n is a, c, g, or t
  misc_feature (962)..(962): n is a, c, g, or t
  misc_feature (964)..(974): n is a, c, g, or t
  misc_feature (978)..(980): n is a, c, g, or t
  misc_feature (982)..(987): n is a, c, g, or t
  misc_feature (989)..(989): n is a, c, g, or t
  misc_feature (998)..(1002): n is a, c, g, or t
  misc_feature (1005)..(1019): n is a, c, g, or t
  misc_feature (1023)..(1038): n is a, c, g, or t
  misc_feature (1040)..(1044): n is a, c, g, or t
  misc_feature (1046)..(1053): n is a, c, g, or t
  misc_feature (1057)..(1057): n is a, c, g, or t
  misc_feature (1059)..(1073): n is a, c, g, or t
  misc_feature (1086)..(1087): n is a, c, g, or t
  misc_feature (1089)..(1091): n is a, c, g, or t
  misc_feature (1096)..(1097): n is a, c, g, or t
  misc_feature (1103)..(1113): n is a, c, g, or t
  misc_feature (1116)..(1119): n is a, c, g, or t
  misc_feature (1122)..(1132): n is a, c, g, or t
  misc_feature (1134)..(1134): n is a, c, g, or t
tatgacatgcatatgatcactttggtgttaattcctagtaaaatcaaatgttgccctgtatttctttagtctttattttttttcttttaatataaaaaaagaggatatttccttttctactcaatactttctatattgatcacactgcttttgctagagttttgggtctaggtatgttttggcattaatcgtggcattataatttttttttatttgaaactcaaaatggttcaagtacctgaacagggatttaaatagcggtccgatatcggtatagcggccgttatatagcggtagcggcgccgtccaaaatcgctattgctgaaaatagcggtgtgaagcagagtcactccaatagcggtggaccgtggccgcaatttaatgggtaacgaccaattgtgacaataataggccactattctcactattttacaataacggaattttttattttttgcagagaatgaatatagagcaaaggtaagaacagtaaatgataagggaaaaaaggggtaaatagggaagaaagagaaaaaaaaaagtaaaggaattgaattatatagttataaatttaaaaaagggaaaaaaaggaaatgataaaaccttatgggggtcacctgttactgtctgnaannnnnnnnnnnnnnnnnnnnnnnnnnnnnnnnnnnnnnnnnnnnnnnnnnnnnnnnnnnnnnnnnnnnnnnnnnnnnnnnnnnnnnnnnnnnnnnnnnnnnnnnnnnnnnnnnnnnnnnnnnnnnnnnnnnnnnnnnnnnnnnnnnnnnnnnnnnnnnnnnnnnnnnnnnnnnnnnnnnnnnnnnnnngnnnnnnnnnnnnnnnnnnnnnnnnnnnnnnnnnnnnnnnnnnnnnnnnnnnnnnnnnnnnnnnnnnnnnnnnnnnnnnnnnnnnnnnnnnnnnnnnnnnnnnnnnnnnnnnnnnnnnnnnnnnnnnctnnnccccccccncnnnnnnnnnnncctnnntnnnnnncnttctttttnnnnntcnnnnnnnnnnnnnnntttnnnnnnnnnnnnnnnncnnnnntnnnnnnnntctntnnnnnnnnnnnnnnnttcttccttcttnncnnnttctnntttctnnnnnnnnnnnctnnnnttnnnnnnnnnnncnttct

SEQ ID NO: 3240 - DNA, 898 bp, Gossypium hirsutum
  misc_feature (631)..(633): n is a, c, g, or t
  misc_feature (636)..(637): n is a, c, g, or t
  misc_feature (644)..(644): n is a, c, g, or t
  misc_feature (789)..(790): n is a, c, g, or t
  misc_feature (832)..(840): n is a, c, g, or t
  misc_feature (843)..(847): n is a, c, g, or t
  misc_feature (849)..(857): n is a, c, g, or t
  misc_feature (859)..(862): n is a, c, g, or t
  misc_feature (869)..(875): n is a, c, g, or t
  misc_feature (879)..(893): n is a, c, g, or t
tgtggcatcttctgataaaataacaaaaaactggtatgttcttttctgatgtgtgcagtgagtgtgcaaaactcttggttaaattccactcaacagctgcagaaagtaagctcaaagcattgtataggaaattctcaagtccagatcgtaatgccgtggcccttcttgcacctgcaaaatgccttttgccgatagcaattcatgatggagagtgttaagctgatgattctagacaaattatataactaatgcttttgttaggtttccttgattattcgcttgcatatataagggggttgatcatgtttctattatgatctttgaagtaggatttgactattactaggcatttgatatatttgacggtgtggtgttttggtcactgtctcatttttatttctcatatacattggtgttttgtaccaattgaacatgaattttcaatggaaagtgtcgtttgaaaaattggagttttgctagtatctaaggaaacatttcctttgaaatttccagcaaaatggatttgtaaggaaaaattgcagcaaaaaataataacaaaaattattggcacaatttctcaaaacaaaatttcacattttctagaaatcaaccccttgaaccctaaaccctnnnttnnagaatanggtatatgacattcattagcggccataccaaaccctaacttggattaacagcgactaaatttccaagcaaaacagcccaaatccaaccaagtaaaattgcagcaaaaaataataacaaaaattattggcacaatttctcaaaacnnatttcacattttccagaaatcaaccccttgaaccctaaaccnnnnnnnnntannnnnannnnnnnnncnnnnattaccnnnnnnnccannnnnnnnnnnnnnntaaat

SEQ ID NO: 3241 - DNA, 609 bp, Gossypium hirsutum
  misc_feature (50)..(50): n is a, c, g, or t
  misc_feature (558)..(561): n is a, c, g, or t
  misc_feature (566)..(566): n is a, c, g, or t
  misc_feature (586)..(590): n is a, c, g, or t
  misc_feature (597)..(599): n is a, c, g, or t
tgggtttttgggagctctcagatttaatcctctcaaagaccagcttcgancgttcactcttattcactcagtgcctccaaggtttagtcccaaaccgagcatttagcctaactttaaagtcaaaaatcatgtttataaggagcatctgcatagagaatcactttgcagactagatgcatatcagtttatcacaattctaaaagcttaatcccattcaataataaataaattaagctatattctgaaggaacattcatcgcttatcaaagactttacatatcaaaggctcaaagcatccattggaaaataaacaccccaggaaattaaataaatagaatctacattaaagaaatactcacagcttctttaatgaaaactgaagatggagctcctttccacttgggatcagagtctggaaatatttgccctatatcaggtagccctaaacctcccaatattgcatccacaacacaatgaagcagtacatctcctacaacatattaatcccaaatgcaaaagtgggggattttaatatagatacacattctagataaaaannnngaaantatgtataaatttttactannnnnaagagtnnngaaaaataaa

SEQ ID NO: 3242 - DNA, 646 bp, Gossypium hirsutum
aaattgctttacacatgctttttaagcaaaagatggcaacccatggtcaaattgatcttatcaagccaaatgcaacggttggatttggatccatcaagggcgttcgtacacgggtaggccccacatttgcaaatgaaaagaaaatgctatctatccagaacactattataataatgcccatttatcaaactacttgtttcaaaagataaaatggagaaacaaatatcatttttaaagactagtatctgccaacaaatagattcaacaggccgaagcacatgaacatgtggaaactcctacaactaatttcattaaaaaaaatacattattctgaaaaaaaaatcaaagaaacagaaggaaaatactgtggaatgtactcacttgggaagtcgagcaaagagaagattggttaatacatccagcataacctgaaactggcgagatgtcatgctagctgttatgttgtcagagttaaaggtcagttcctttaatgacttcacctgcaacagaattaaaaagaaagacatgcaaaattaatggtagtctacaattcaataaactgccaaccagtaaagtgattaactataaatgacagcaacttctatgctgtgcaataaacagtactctcccgttatttctcctcgtt

SEQ ID NO: 3243 - DNA, 619 bp, Gossypium hirsutum
  misc_feature (35)..(37): n is a, c, g, or t
aacaagttgagggagtagaagttcaacatgaaccnnnctggtggttatatctcatgttacagaaagcaggtattacttgtccccttcaaaattttgcatgttatcttccaatctttagcttttatgtttccttttgttgctaagtagttaatatgcatgggtctgtacattcaatgatgcatgttcacaagtactgaaaaagttgtctcaaaatactttttcatcagattgaggtgcctgcagctgaagcaactattgaagctactgctcaagggattgcatcaatgctttgcgctcatggaccggaggtggaatggagaatatgtacaatatgggaagctgcttatggtctgattcccttgagctcttcagctgttgatcttccagaaattattgtttcaaccccattgcagcctcccatactatcatggaatctatacatacctcttcttaaggtgctcgaataccttccacgtggaagtccttctgaagcatgtctcatgaagatatttgtggcgactgtagaagctattcttcagagaacatttccacctgaatcccccagggagcaaaccagaaaaacaagatacagcataggttctgcctcaaaaaataaaaa

SEQ ID NO: 3244 - DNA, 574 bp, Gossypium hirsutum
gctcttgtaggtttgcttagcctgtataacatggccctgtctaatctacaactacatttggtatgagaaataagggagatgaatattgctgacttgtatctaatattagaactgtttgaaatttaagttccaattagccaatggttagcatcttttctacttgcatggaaaatataattgcgcatttattttaacagatcacggaaatgattaactccattattgttatttctgctatacccttcatttgatcctctgtttccttgcctagtggtcctaaccttcatggtttaccttctgttttgtatgtagaagtgtaatgaataggttacagatttcttcatttgaaatctatggctattgcatagtaaagttgattctgtcatcttttttgttatagtttgtttgtaatctatgactattatagataaatttgactgataattctcatgagcaatcatttgatgccagaaaatgctgaatgaagctggatatgttccttctaatagtgaaaggtatcctcttggaggcttggtctctgccattgagaattctttccaggcaacaccggagg

SEQ ID NO: 3245 - DNA, 603 bp, Gossypium hirsutum
atagtggttaaccgtgacaaaccacatcaaaacttaaacaacaatcggaaaattcaattagccagaagttgaaggccggaatcgtacaccggggtgacattgggagacgaattcccaggctaaagcttgaaggtcttcgtcttccgttactcgattgaaaggatttggagaacccgcgagttcgattgaagtctgttgcggttgtggcagatcaaagacgttcatggatgtatcagaagaacataccaagtcagatcctaattccgacgcggaatgaaacgtcgtcggcgatcggcattcagcctgcgactgcggcagcactagagagagacactgcaacgtcgaaagtcgggcctgaatgtaggctaactctgcctgtaaattcactacctacacagcataagataagtttatatcaaacattaagtttacctttgaattatgtgaaaaatatccatacaaatatatacttacatatataattattgtttatatacgctgattagatatgggtgcctatttaatttgaaaaaaaaaattgaattcaatttaattcggtaattatcgagtcgagcttgaacagcctgaactatcaatttaccc

SEQ ID NO: 3246 - DNA, 423 bp, Gossypium hirsutum
attttggtaattattgttatgtttattcatttgctatgaagattatccttgtaatgggttaggtcgggtggtgattgtttagggggagtgttaagtggtgttatccctcatatgttaagtattaggtttctcgtgatcttatattaaagttgggccactccacctattgcccattggttttatgttggatgcttaacagtatctaattatattgaacagactggcccaacaggttgaacggagaataggaggtttaacctgtttgacctttggtctgatttttacctagattgataagtataagtagttatgatgttaacataatagtgggttcaaaggtgttactctacaaacagatgtctcattgtgtcataatttatgcttcaagagggattcttgctgagttagaaatgggtaaggaca

SEQ ID NO: 3247 - DNA, 502 bp, Gossypium hirsutum
tttggttaaaaagcaatgcctttttattatctgatataggtgtctggccggaatcgaagagctttagcgacgatgggataggaccgatcccgtctcgatggcgaggatcgtgtcaacgtggcatcgatgatcgttttcgttgtaacaggttgattctacttcactaaaatgagttatttctttgctaaaaatgggaaatcacaagtgttttttctacaaaggaatctgcatatacaatgtattttcaatcaaagccatgttcatgtatatacatatgtatgtatatatgtataaatgcaatagcaacctcaattatgaggtaaagttttgaaagaaaaaagggcccatactttaaagtttttctaaaggtgtgtaacagaccctcctttttaggttatgcaatgatagtggaattcatatgtgaatctcacattcatggcgtttcttataaattaaaaattttgttttcaaatttcttttaatatcattgcagttcaccaat

SEQ ID NO: 3248 - DNA, 627 bp, Gossypium hirsutum
gtgcctcaacaaaatgaagagttggagcaacatgggataaaagtcaagagtatgagcaattaagggggttaccttcttgtcaatatttgtacaataaaccgttctggtacacatttccctttcatcttcggactgcaattgtagttatcatgattctcgagcgtgagactagaaaaaatatatataaagagaaactccaagaggtattcagtaatgtggaaatggactaggggaaaaccgaaacagctaagagccagaaagttattcatccatacccgagggagaaatgtagggttcacaggaaggatagcagtttttgaaggcaagaccctaactggataaaacccgagcattgtcccaccaaggttcaaagcagttcttgcaccttctgtgataaggcagttcatataaaatgtaatatgttaacaaatgtatgtatttataaaagaaaattttatattcaatccgtatcagctgcttaccttcatctgcaaattccacaaatgcaaagcgaagaactgaatgtggatcaccacaaactcggcaatcaacaacctttaataaaaattcccaaaacacttcaggaatgtcataaatacggtaatctttcacataagcgatcaagta

SEQ ID NO: 3249 - DNA, 562 bp, Gossypium hirsutum
aacccacaagcaacagaaaagtatctagactctcctaatggtaaccaacacccaaaacacacagcattttcaagctcttcgttaccgtcttctaggaagacggatggatctttcgtggctatgtggttaagctcttgaagcttttgttcagaaatgttgagggtaaataaagcacatttgatatggaagtctaatccacaagaacagtgataaacaaagaagtcacatcttttataggagaaatcacaataacagcttccaccatatggtgattctggtaaaagaacaagagggtgatggtgatgataaggatgatcaatctttgaaggtgcctcggcgcatttctttgtgaagagaaaattcacactccccacaactgaagcttggatcgaacaccacctctccacaccttgagcatttagcttttttggtttcatggttctgctcttcattgaacaccaatggatgtatgtgccccaagttttgaaactccatctccatgtttttctttttctctttgtttcgactctcagaagtgatacgcgccaaagatagcagaaaa

SEQ ID NO: 3250 - DNA, 603 bp, Gossypium hirsutum
atattttgttctgttgttgtgtatgatgatactgaatttgatctttttaggatgtcggaggacatagttgctataatgccttctttaggtgatgtcaaagccgcaatattggtggcaaactcatggttaaataatagcaagccatttttagaacctgatttgtctgggtcatctacatctcgttctttgctgaaacttgatgatctgaaggttcatattgctccttcatttgctatgtctgctgaagtcattgaaacaaatttgagaagtttgttttatatttttcaggagttggtttctcagtcaagatttcttaagataacttttaagcaacaaaatgtgcttgaaacaattttggaaaatagcaagaaatggcagcatgatgcctgttccctactgcaagatgtggagtgcctgtatagtgtgactgacattggtgatggcaggagcaatgttcttattttgaaaattgaacatattgttaacttgattgaatctgtctcaaaagctggtttatcttttggactggattttcctgagatgctaaagcttcaaaatgcttgttcaacgctgcattggtgcaataaagtcctttctttctgc

SEQ ID NO: 3251 - DNA, 1345 bp, Gossypium hirsutum
  misc_feature (480)..(488): n is a, c, g, or t
  misc_feature (494)..(495): n is a, c, g, or t
  misc_feature (500)..(506): n is a, c, g, or t
  misc_feature (513)..(515): n is a, c, g, or t
  misc_feature (529)..(535): n is a, c, g, or t
  misc_feature (537)..(539): n is a, c, g, or t
  misc_feature (541)..(548): n is a, c, g, or t
  misc_feature (554)..(554): n is a, c, g, or t
  misc_feature (556)..(566): n is a, c, g, or t
  misc_feature (568)..(571): n is a, c, g, or t
  misc_feature (573)..(581): n is a, c, g, or t
  misc_feature (583)..(597): n is a, c, g, or t
  misc_feature (600)..(603): n is a, c, g, or t
  misc_feature (607)..(607): n is a, c, g, or t
  misc_feature (609)..(613): n is a, c, g, or t
  misc_feature (616)..(623): n is a, c, g, or t
  misc_feature (625)..(647): n is a, c, g, or t
  misc_feature (652)..(662): n is a, c, g, or t
  misc_feature (667)..(685): n is a, c, g, or t
  misc_feature (691)..(692): n is a, c, g, or t
  misc_feature (700)..(701): n is a, c, g, or t
  misc_feature (703)..(715): n is a, c, g, or t
  misc_feature (717)..(723): n is a, c, g, or t
  misc_feature (729)..(729): n is a, c, g, or t
  misc_feature (734)..(739): n is a, c, g, or t
  misc_feature (743)..(743): n is a, c, g, or t
  misc_feature (748)..(764): n is a, c, g, or t
  misc_feature (766)..(769): n is a, c, g, or t
  misc_feature (772)..(782): n is a, c, g, or t
  misc_feature (786)..(790): n is a, c, g, or t
  misc_feature (792)..(797): n is a, c, g, or t
  misc_feature (799)..(802): n is a, c, g, or t
  misc_feature (805)..(815): n is a, c, g, or t
  misc_feature (819)..(822): n is a, c, g, or t
  misc_feature (826)..(837): n is a, c, g, or t
  misc_feature (839)..(858): n is a, c, g, or t
  misc_feature (860)..(876): n is a, c, g, or t
  misc_feature (879)..(893): n is a, c, g, or t
  misc_feature (895)..(895): n is a, c, g, or t
  misc_feature (905)..(907): n is a, c, g, or t
  misc_feature (912)..(915): n is a, c, g, or t
  misc_feature (918)..(923): n is a, c, g, or t
  misc_feature (930)..(932): n is a, c, g, or t
  misc_feature (934)..(943): n is a, c, g, or t
  misc_feature (948)..(952): n is a, c, g, or t
  misc_feature (954)..(954): n is a, c, g, or t
  misc_feature (956)..(966): n is a, c, g, or t
  misc_feature (969)..(974): n is a, c, g, or t
  misc_feature (976)..(984): n is a, c, g, or t
  misc_feature (987)..(989): n is a, c, g, or t
  misc_feature (994)..(999): n is a, c, g, or t
  misc_feature (1020)..(1027): n is a, c, g, or t
  misc_feature (1029)..(1033): n is a, c, g, or t
  misc_feature (1035)..(1040): n is a, c, g, or t
  misc_feature (1045)..(1045): n is a, c, g, or t
  misc_feature (1048)..(1058): n is a, c, g, or t
  misc_feature (1061)..(1062): n is a, c, g, or t
  misc_feature (1067)..(1069): n is a, c, g, or t
  misc_feature (1071)..(1072): n is a, c, g, or t
  misc_feature (1074)..(1094): n is a, c, g, or t
  misc_feature (1096)..(1097): n is a, c, g, or t
  misc_feature (1104)..(1104): n is a, c, g, or t
  misc_feature (1106)..(1110): n is a, c, g, or t
  misc_feature (1119)..(1128): n is a, c, g, or t
  misc_feature (1131)..(1132): n is a, c, g, or t
  misc_feature (1136)..(1136): n is a, c, g, or t
  misc_feature (1148)..(1154): n is a, c, g, or t
  misc_feature (1168)..(1182): n is a, c, g, or t
  misc_feature (1184)..(1186): n is a, c, g, or t
  misc_feature (1188)..(1188): n is a, c, g, or t
  misc_feature (1191)..(1191): n is a, c, g, or t
  misc_feature (1193)..(1193): n is a, c, g, or t
  misc_feature (1200)..(1200): n is a, c, g, or t
  misc_feature (1202)..(1202): n is a, c, g, or t
  misc_feature (1216)..(1216): n is a, c, g, or t
  misc_feature (1218)..(1219): n is a, c, g, or t
  misc_feature (1224)..(1229): n is a, c, g, or t
  misc_feature (1233)..(1241): n is a, c, g, or t
  misc_feature (1243)..(1243): n is a, c, g, or t
  misc_feature (1245)..(1246): n is a, c, g, or t
  misc_feature (1252)..(1260): n is a, c, g, or t
  misc_feature (1262)..(1265): n is a, c, g, or t
  misc_feature (1267)..(1278): n is a, c, g, or t
  misc_feature (1280)..(1281): n is a, c, g, or t
  misc_feature (1297)..(1319): n is a, c, g, or t
  misc_feature (1321)..(1337): n is a, c, g, or t
gtagctgttagaatagtagtagcggtgtgactttcttcttgaaaagactgcttgacttgctttccttggctagaaaggtagtgagtgcattgatgcagagaagttggaatatagtcagtgtgccacgagtgactccttttgttgtcgattgattttactctgtctcctctcactctcaggaaggatcagatacagattctctcgtctggtggtttgggcatagggaaaaggcttatccatgggatttttatttcctacgcccacgacaaaggaagggtccgaaggagttttccactagttcaaatagccttatctcaattcaaagagtgacttgtctttttttgagtactggagtaagagatattccttgtctggtccgtactctggtagtaggactggcatagaaggtcttcctgtcatgtaggaatagggccagttaggtcagtaccagttctcccggcaagagcagatcaaaaaatnnnnnnnnngtggcnntcttnnnnnnntcaaaannngtagttcatattannnnnnnannnannnnnnnngaagtntnnnnnnnnnnncnnnntnnnnnnnnntnnnnnnnnnnnnnnnatnnnnaagnannnnnctnnnnnnnncnnnnnnnnnnnnnnnnnnnnnnnatatnnnnnnnnnnntcgannnnnnnnnnnnnnnnnnnaatgcnntacggatnngnnnnnnnnnnnnncnnnnnnntatttntcccnnnnnntgtnccccnnnnnnnnnnnnnnnnngnnnnttnnnnnnnnnnncacnnnnncnnnnnntnnnnttnnnnnnnnnnnctannnnactnnnnnnnnnnnntnnnnnnnnnnnnnnnnnnnnannnnnnnnnnnnnnnnnttnnnnnnnnnnnnnnncncccccgattnnnatttnnnnatnnnnnnttttttnnncnnnnnnnnnntatcnnnnntncnnnnnnnnnnnacnnnnnncnnnnnnnnnccnnnttctnnnnnnttttttccccccccccccccnnnnnnnntnnnnncnnnnnnacttnttnnnnnnnnnnnttnnctacnnntnncnnnnnnnnnnnnnnnnnnnnntnnctcttancnnnnntttcttgtnnnnnnnnnnacnnctcnttgccgacaacnnnnnnnatatttctgctatnnnnnnnnnnnnnnncnnncnccnanattcagncnccccatctctattntnntctcnnnnnnttannnnnnnnncncnncgtttnnnnnnnnncnnnnannnnnnnnnnnnannccccgtatttttcttnnnnnnnnnnnnnnnnnnnnnnntnnnnnnnnnnnnnnnnnctaccaat

SEQ ID NO: 3252 - DNA, 626 bp, Gossypium hirsutum
taatccctagaaagaaatactcaacagttattagaatgtatgaaacaagcaaaaagtaataaaaataataattctatttacgccaatcatggagctccccaagtttcaccaaacccatcaaatggtaaccagctctctcccaccaaaatagacatacatatctacacacatggtgtgtgtctgtgtatatgtgtatcagtatgtgcatgcacaagcatatatgacacacttatgtaaacaatcaagctttaagtaaaatgattgctaacccaattttaagtaaaacaggtctgggtttaagaaactttatgaaaggctctcataaaacatctgaccatcattttagaaggaccaatcaaatggtcagttgactgcttttaggttcaacactctatacctgccttgacagaagcttgacttataaggaaacaaccattcaagaaagtaacttacagctgtgtcaaactctggtattctcccatactggatggaattgtaccagaaatattattgttccttagatccctgcatgcagtatcttttcttgaggcaatgctactataatttattggacaaaaagagagaaaaagaagcaaaattaggagaagcaggaattgagctggctt

SEQ ID NO: 3253 - DNA, 644 bp, Gossypium hirsutum
  misc_feature (21)..(21): n is a, c, g, or t
  misc_feature (53)..(55): n is a, c, g, or t
cgttgctgttgtatatataanggaaagaacgaaattcagcattcaacccaaannnacaaaaagtcaatgctcaagctaaaccttccagaaacttaatccctggcccaaaaacctcccaaaccaaaaataaagataagatgagaaagtcaataagggcacaagccaaaggaagaaaaggtatgctacaataagcatgcaatgtaatactcacccagtcctcaaatgcctctttaatgagagaaaataaaagcacaagactcagtggaaccatatttgttataggatgaacaggactgcatcaagaaaaagttgttattacataagagttcacatttacacgaatcagttggttaaaatcttcagtattacaaatcattaccaccaaaatatttacaacagaagaaaggggggggggaggaagagaggtttcacatgcagcaaaataggagaagatgaggtaaatgcaatcagtgagcacatggaagaaggtagaagatgataattgtgcctaaaaggtggactttcaagtttcaacatgcaccatgactactaaaacggctgtatgaatacttttttttctttaaatgataatagaatagagttttaacaatatggaacaaaaaatcagcaggaaaactgaaaaa

SEQ ID NO: 3254 - DNA, 645 bp, Gossypium hirsutum
ctgatcctgatggcttttcactttttagcggattgctttctactttctaactgactcgaaggcataattcgaattaaaaaggatggaaatttggcctgcaccgacatcgatcgaaagaaactccaactcaaagctagtaagggagaaagtaaaggctgtaaactagcacttatatatattttaggggcttacttgcctaaaatcactacttgcttgcccggaaaaaaagcatatggtatagagaaagagaataaagaatatgatagaggtcctgcaaacccggagtcttccttaagagaaagaaatttttattttctgcttgccgcccttgcatatacaaaaacaatttagccttgcactactccagctggattgtactacagtgcttgattgaccttttctgctttcaaacttgctagccatagagccttccaatagctaatctcttagccttgagcttgcttatattacatacaataaagggtgagtttgtaggatatgatatagttttcttcttacctaagcatatacagaaagttagccttatacaattagatagctgtacctattagcatattttctcttccctttgctggggttgcttaacttaataaggctagtctgtctatcctgagtttcccgttc

SEQ ID NO: 3255 - DNA, 615 bp, Gossypium hirsutum
  misc_feature (564)..(564): n is a, c, g, or t
tctcaaacgctaatattaatcagttcataagaaaggttacgttagtatcccctgaattttgttccccgtcatcataacaactgaattaacccgcaactcccgcatcttttttgcagcaacacggacaggatctgatgatgaaacaattgcaaccctggaaaaggaagaagataccaggacaggtaaaaccaataacaaaacgagcaagggtatttaggaaattgtatttgtatataacaagccattagacaactgagatggaagaaaatacttcgaattttcagaaattatagttgacaaggatggcttgaacatccgctccctcaaagtttctatgaaggcatatggtgctgaaataaaacatgacaaacaaaacaactaatcactggtttcaatctgtatggtacaagcattaatgtatacccttgatcactcatcaagtaaaagatatgtaatagacatataagtttgtgcagacgcactttgatattatatatgaaccttcttaatatatacatgtaatggcgaggaaaacttgaaagttgactcttttctattcagaantgcattcccccaccaccacctgacctgtatgatttggctcacgagacgtga

SEQ ID NO: 3256 - DNA, 330 bp, Gossypium hirsutum
gcactttctctttcaatttttatatcttttcttatgatataactaagatgtaaatttatatgcttgctatatttataagaaaaatatagttaatttttaggagagcctgaaaatagaaaatttttatttattcaaatgactaaaaaggttaaattaaatgattaatgcttaagataggtcactttaccaagaataggtcaagaccataacttgtaccttaatttgatctttgattcaaattcggaatcgtccaaacaagtaaatgatgagaatataaaatgattcaaatttgtaaggatcaaattcaaaaaaaaaaaaaaaaaaaaaaaa

SEQ ID NO: 3257 - DNA, 664 bp, Gossypium hirsutum
aggaagctttctaagctgcttattacttctcaacttaactccgcagggctattcttcgcttaaacccctacttccacagcttttatgggtgattcaccctttcttattgatgcttttcctattgggataccaatctaagttaatagattgactatggggatatctttattgggaatttttacaattgtaagaaaaatgctgatgttatgactcggaatgattttggcgtctgggagatctttttgccaaacaatcaaaagggttctcttcgcattacacatgtctcacgagtgaagatacgaaaggataccccctcccctctgggatcaaagactcgattccagcttggattaagttctctgtacaggctcctggcgaaattccacataagggaatatactacgatccaccagaagaggttttgtattctatttaaacatccaacgagattgaagagtccctaataggggactatgtcaatacccttgaaaagcaatttaacactaaaaaagttagccgctctgtctgtctctcgctgtcttaagtgctgtgctagctttagcctgactctaacaagtaagcatttggcctaccttcgccggagcagtttccagagaagcaagagcacctgcggcatttaggtttcctatcctagttgctcagg

SEQ ID NO: 3258 - DNA, 611 bp, Gossypium hirsutum
tgggtggcattggagctaagaggaactctatgccagaacatgatctctctattgcattgatatacagtgtgttcggcaagattaggtgccattgactcatttaagcatggattttgtcttgggattaccaaagacaacaaagggttatgattcaatctttgttgttgtgaaccgtttctcgaaaatggcacatttcattccttattctaaaacttctgatgcaactcatactgctgaattatttttcaagtggtaaggctacatggtgttcctacacctatagtttccgatagagttctcaagtttgatggacacttttggaggactttttggaagaaaacgggaacccaattgaagtttttcagcacttgtcatccacaaacaaatgggcaaactaaggctgtcaatcgatgtttaggaaatttccttaggtgtcttgttgggaattgtgagaagagttggaatttgattactcctcaagctgagttagcatccaacaagtctgtgaatagaacaattaaaatgacaccttttggagcttcctatggactcaaacctcaaacacgttcttgatttagttcctttgccatttggaactaaggtgagtgatg

SEQ ID NO: 3259 - DNA, 327 bp, Gossypium hirsutum
tttctggaaattatggatgggtattaccggatgctttttccgttaaaccccggcagcattcgaccagttatgccctcagtgtgtgagcacgaattcctctctagaccctccaagagggaatcaatgtcttctgtaggaaaaagagtgcaacatgttttgtaagtacctccttaagtctaaactcatgtacatctgtttaattttggtttataatgttaaattggtaaaatatattattttatgaaattatgttaaattctgtcactgttcattcctttcttttgcattttgaaaagcagataataaggtataaaaaatgaactcctt

SEQ ID NO: 3260 - DNA, 658 bp, Gossypium hirsutum
tcataacagatataagatactctctttttcttggtgtgtctgaataaatatgataaggttgagaatatgcaagactaaacgtggtaaacagtatatgaatcagcaggaataccataccaagagaaatacatgccccagccactatattcacatatgcctggacaatagtttctgcatccatttcatcaatgtccatagtatcatccctaagacctttgacaccattttttataatttcaggaatctgggactgaatccagtctttggagggatgaatcctgaagagaataatcttaaactcagatataaaaactagaagcttaaacagtgaatgcttcaataattaaggcatttatcaagtaaattacctgccccacattatcaaattccgagcaatgacacgaagcattataaaatcaggtcttacgtattgcaaatcaaaatgtgtttgagggattgtaagcctagagacaatcacctctgattcactctggcatataaaatgagaaaggttaatatatcttatttatgtcatatgcatgtggtaatctgctcataatttcccatgttaaaattaccttcaaaaacattaaagcaagagctatcatagccccaggtgcagtgacatcaacattgaaagtgttcccgtccatcatct

SEQ ID NO: 3261 - DNA, 502 bp, Gossypium hirsutum
  misc_feature (48)..(55): n is a, c, g, or t
  misc_feature (401)..(401): n is a, c, g, or t
  misc_feature (451)..(453): n is a, c, g, or t
  misc_feature (461)..(463): n is a, c, g, or t
  misc_feature (476)..(479): n is a, c, g, or t
  misc_feature (497)..(498): n is a, c, g, or t
gtacacatcatccacgtatttcatatagtctgcataagaaagggcatnnnnnnnntcgcatgagcatacgaaaatcggagtgcttgaaaccttccgcaatcgcactacctttgcctaaggttgaccccatacaatgtattaggaaaagttgtacggggacatgttcatattcacgctagatacgtttaaaatacttccagtatgcttttctacaattgccctggtgcgtttctactagtggaatatgtgacttgttgtcattcctgattgaaaatgctctctgatctccccaaagttttatatctctctcccatcatcccaaatgaatccctctgtcatgtgcaaatgaaactgccctttcatgttatggtcaaaagatccatcccattgacaactaaatncccaaattgctacccattgaaagtatatgtcaaacttgatacccttcgannnattattgnnntcctctgctaaannnngatgttattgatcacacnncctt

SEQ ID NO: 3262 - DNA, 632 bp, Gossypium hirsutum
tcatctgttccatagctatctccacaagccccacaagtggcaccctgttcatcatcttcctcctcttcttccccactctcatcttcatccttggatggtggagacatctttaccatcttactctggggttcagattgacgagactgcaaacaccaaggatatgaatgtgacataaaatcagatgggtgcatgcaaaaggaagaacaacacaggaatttgcggttaactttgtaccaccttagcacttgatttgcttttgccactactgttatgattagcagattggtcctttgattgctttacatttccagtaacaacttcgaatatgcttggaagatcatttatcattagaaagagtcttttcctgccaataaaaaacattaacattagcaatagcaaaaacctgcgatgaaggacactcccccacccccaagacccctaacagctctagtcccttacgaggaaagcatgcatgtgatgcacatgtgacctaatcccaggtttaggagaaaagctgtatttagtctttcttttcttttactcaacctacatccctcatactgggttgtgggtacgttcaattttttctatgtttttccaaatatctggagggtctttggagtggtcatact

SEQ ID NO: 3263 - DNA, 542 bp, Gossypium hirsutum
tcagcatccttttctcaatttcgttctggctctgtccctataggtttttatgcattgccgagggagaatgtatttcctgagagacctggccagcccgaatgccaattttacatgaagaccggagattgtaaatttggagcagtttgtaggtttcatcacccacgagagagagttcctcctgcccctgattgtttgttgagtccaataggccttcctttacgtccggtgagttttgcaactggtggtaactccatctcagtttgtttctgaatatcgatccgtttaagttattaggctgcttatgaaaagcttagccttatgctatgtaaaaatatatcattcccttcctattacctccttacattggccttttccttttcttgataagtttggtttcctaattgttgggttttatttagagcctatctaataaatcttgcttgttagaaaatggatatttactttgatactgttgctgggcaattggtccttctgtagttcccatactaaaatattaaattagattagacgcggttggcata

SEQ ID NO: 3264 - DNA, 633 bp, Gossypium hirsutum
gggggagctctccggagaaggtaatggagggccgaatggtggggatctcggaggtacggtgatgatgcgtggcagtggaccaccaccattatcttcttctctttcgttggacgcaaataaaagtcgatcaatgttaaaatttaaaaataaatataccctttactttcttttaacattagagaaaacccaaatgatggttaaaaatccctgtgaatgaatttaccgccggaagaataccgtgcaaggaaaatcatctttcacacctttcgtctttcttatttaaagtgtcatttaattattaattaatcgcttgatggtttattatttgaacctttgaaattaaaaacctacggacctatttatttatcctttaatagatttactgacattctgccgagcacataatgattcgtaaattttaagacacaaagttattgactccaattgcttgtgcaatcactttccttaggccgaaagcagggaaaaattataaacgctttcttcacttccgataaaaactaagccttgggaagtctgaacttttccaaaaaaaaaaaacttgaaaccgaaaataatcctaaactaacttttgaccaaaatgcaggactacagttgtttacagcatatccgctg

SEQ ID NO: 3265 - DNA, 603 bp, Gossypium hirsutum
attgtcaactttgctccaagatggggtgggaacaagtgaaagggagtcattcaagaattctgtttcagatttgagaaagacggaagagaaattatcccaagggctagataatcttttgaaggtgatagatagctttttcaaagtagttttgatggggcgtgatgctttgctttgtaatctaaggaaggctggtggtgccgtaccagattcagtgatagggaaaaatgtataagataagtgtgaggtgaatcacgaatgtaatgctaaacgtttctgtatacagatggtttaggtatgaggccttgtgttttctgaccagtaggcgtatacaaccatggggtcatatgctagtatgagtggtgtcttagggtagtaattactttggttgtacaagtaatcttatatatcgaaaattatatacaagtatcatatttggttgcaattgttcagtacttgttgctttgaatttccattcccctctgatatcattgcgtaatgtgttttttaccaattttgccttttcagttcaggcagggcaattcttgacggatttggcttcccctgtttattattatccactgtccatgtcaaccgttatgccat

SEQ ID NO: 3266 - DNA, 601 bp, Gossypium hirsutum
aatagaaacctcagattcttgaactgattgttgaccttctgaatttcagacccaggataacaatgacatcttagcctactggttatccaacgcctccacgcttctcttgctactacagcgcacattgaaagctagcggtgccgctggaatgactccacaacgccgtcgatcatcatcagctactttgtttgggagaatgacccaagtaagaattctctctgaagtcaagccatacccttcagtaattttcatttcttaactgatccatatgttgctattattgtcttaaagagtttccgtggagcgccacaaggtgtcaatctctccttaattaatggcggcatcaatagtggggtggatagtctgcgacaagtcgaagccaagtacccggctttgctttttaagcagcaacttacagcatatgtagagaagatatatggaatgatcagagataatctgaagaaagaaatttcaccattgcttggattatgcatccaggtaataaatatatatatataatagaatcagattaagtgaaggcaatactgatgagataaaaatccagaactactttgatcgctcttaaaaagatatgttgata

SEQ ID NO: 3267 - DNA, 630 bp, Gossypium hirsutum
ctttgcaaccaatttcttagaaattgtgatgaaagttcgaattttatgaatattatagtttggttccttccatacataagaaacctcatcgactattaatttcgaggagaagcttacttggaaacaataattaactgacaatgagcaacggcagcctcaaccaaatcagctgagatttcaccaaaacctgaagatatatacaaaaaagggaaacgagaacatggaagctcaattaatatatctacttcaacaacttaaaagcagagaggtcagtccagattatatatcataacagaatgatattcataattgagctgagctgaactcgagcagtaagaagctcaatctcaacttgaaattcgaggctcaaagtatgagtcagactcactgagtttaacttttaaagcttgagcttaattcggttcaaggggtgaactgcttgaacttgctcaattaggcatgattacctagtaaaaaataagctcgatctccatgcttaacctcaagcttgattatttgtgctcgacttctagttcatgctagaatttttcaatattgatgaaaaataaatatatattaaactcgccagctatatgaataaaacatgaaagtactcaaattcagtccagc

SEQ ID NO: 3268 - DNA, 658 bp, Gossypium hirsutum
cttgaagaaatgcattggatacatctatttgataaaggggccagctagaagaagtagaaggagctaaaatggttcgaacagtgaccattttagcaacaggggaaaaaatgtccaaataatcaatccccgctttttgactgtaccctttagcaaccaaacaagctttatatctttctatttcaccagaagctcgaagtttaaccttgtacacctatttacagcctataggaaccttccccgaaggcaaaggtacaacagtccatgtatgattagattttaaggcctgaatttcctcttgcatggcttgaatccaatggggagactttcgagcctcagaatagaaaagaggctcagtaatgtttacaagagaagaaacaaaggcgtgagtattaaaaggtgaacgagaagaagaagtagaagagggagaagaagcacctgcggatgaagaagattggtagggatgaacaaaacctcttaaccaagaaggaggcttaatagttctgctagaccgcctgggttcaacaatgggtagataaggagaaactggaggttgagatgtacttactgaagctgaaacagaatatgggatattgaagggagtatctagaggaagatttattggagaggaaggaacagatgtgggaggaggaatgagtag

SEQ ID NO: 3269 - DNA, 597 bp, Gossypium hirsutum
acacctttggctactcgcgtttccgtgattgggcctgaatactgctatcctcaaccagtagatctggctgtcgtcagaaaggttttgaccatcagtgagggcaaatttgctgtcagtgacatcaatggcaacatcatgttcataaccaaaggcaaaattttcagcatccatgatcgtcgcctcttaaccgatgctgccggaaatcccgtttgcactcttcgacacaaggttcggtttttgttgttcaaagtttctcagacatagctttatttcaagtctacatataaatatagctaccttgatttgttaatagataatgactgtccacgatagatggcaagtattcagaagggaaagcacggaagaaaaagatctgatattcacagtgaagcgatcatcaatgatccaactcaagaccaaattgcatgtgttcttggcaaccaacccaaaagagaatgtttgtgatttcagagtggaaggaagctggctggagagatcctgtatcatatattccggagagttcaacactattttggctcaggtacttaacaccctcttcctacgatttaattacacatatactctagtatcgcacac

SEQ ID NO: 3270 - DNA, 611 bp, Gossypium hirsutum
tcattcaactaggaaccgtatggttgaggttttcagaaattttcaactgtaaaatgcatttccctaaaacttgttctccttaacttggtcaacttattgtgcaatttccttctatggttactttatcttctgagatctttacaggtttgctcaatcaagtcgtcagtctcaaatatcagtttggatacagcctcatattaaggtatacttctacaaaatgaagcaaccctttattagaaggactgcttattcctctttacttttgcagtgttattccaaatttggggatgctgtttttacgctgactcgtttcttccgagatggaggcagctgtactcctgcaaagccagaactagcagaccagaaaacccttggttaagtgtcctttaatgatgttactgttgtcatgtttctttgatttgtatctcttgatcttaaaatgtccaaaattattaatggagctgttttaaacctagcttctttttagttttgaagatctgaagtctgaagtttttgctctagttattaactgcaattttctattcaatttttattggtggggaagttgacctttgtcattgaatgcaatgccttgctgttataagtgcatg

SEQ ID NO: 3271 - DNA, 496 bp, Gossypium hirsutum
aatatatatcaattttttatatatttctataattaaacttaaataaaatattagtttattattaattatcaactcgggcagggcccacatgaataccatatcaaaggcttggcccaccacctagctcttgacaggtctatgttgtttacaaaagataaaggaaagataactttttcatttttatcagcaaacacgatacactcccagactcgggaaaattaaatcagaaagcagtccaagacatcatttaactttaagagagcagaaaaatataaatgtctcttaatactatacctgcttttcagtatcctcatgatctaggtgagacaaatagatcaaagtctccctcataatctgcaacataaaacttcatgaacaacggaaaccaggaaaaaacaactgattcttaatatgtgtatatatatcataataacaaaacataaacttctaaaacatcagctgttggtacaataaagctttgaagtgtttgcactgc

SEQ ID NO: 3272 - DNA, 590 bp, Gossypium hirsutum
taatgaaggtgaaaatttgaaagaaaattttttcaactcaagctttttttagcatgaattagttattttgaaaaacactacaaaactaacaatagcattttggtttgacttgagtttttagaatttttaactgatcactttagaattagcatattagtatcttattagaagacttgttctgattttttaataagattcttagaatcatctgttaatagtcaagatggccgagttggtctaaggcgctagtttcaggtactagtccgaaagggcatgggttcgaatcccattcttgacaaaaataaatttttacacttttttatcatattagaaacggggcttcctattttttatcatattgatgcttgctgaatttatgtgttcgaatcccattcttgacaaaaataaatttttacacttttttatcatattagaaacggggcttcctattttttatcatattgatgcttgctgaatttatgtgtagtgttgggccaaactaaatagtcagacttggagcaagtgtttgaagagcccgcaactgccaatcctaatcccaaagttcttccaaccacaatgagtgggatcct

SEQ ID NO: 3273 - DNA, 804 bp, Gossypium hirsutum
agaagacagagccaaagctacctctttgaatcacaataagggtaccctaagagaaatttaatatcttaagaatcttaaagcattcagcacatagccaggcagtatactcgttttttccccctcttctataactccctagaagacagagccaaagctacctctttgaatcacaatcagggtacccatcggtcattgtaacctgatcagtcaatctttcataaccaatatgtcagaagattggaacctggacattatgctttaaagttttcagttaataaatcatattcctcataatctcataaaataattttggtatctcaataaaggaatcttaaagctgcagagcattgcaggcagtagatttatcctttatttctcaactctgcagctttctacaaaactaagtaagcggtaactctttgaactgtgattcgggcactttaacctgatcagtcaatctttagagcaatatgtaaaaggaactaagaaactagattctcaacttttgaccagaaacaagggaaaaagtatataagtgcatccaaagattggaatttcagtcaaacagttatgtcaatatctaaaatccttagcagacccatggcttttgcatacctggtatggagataagatcaggactaccaaccattgatctaagccactgaaatataagtgcatccaaagattggaatttcagtcaaacagttatgtcaatatctaaaatccttagcagacccatggcttttgcatacctggtatggagataagatcaggactaccaaccattgatctaagccactgaaa

SEQ ID NO: 3274 - DNA, 1480 bp, Gossypium hirsutum
  misc_feature (554)..(571): n is a, c, g, or t
  misc_feature (573)..(573): n is a, c, g, or t
  misc_feature (587)..(590): n is a, c, g, or t
  misc_feature (592)..(594): n is a, c, g, or t
  misc_feature (599)..(601): n is a, c, g, or t
  misc_feature (610)..(613): n is a, c, g, or t
  misc_feature (615)..(616): n is a, c, g, or t
  misc_feature (619)..(620): n is a, c, g, or t
  misc_feature (632)..(642): n is a, c, g, or t
  misc_feature (645)..(679): n is a, c, g, or t
  misc_feature (681)..(682): n is a, c, g, or t
  misc_feature (684)..(695): n is a, c, g, or t
  misc_feature (697)..(697): n is a, c, g, or t
  misc_feature (699)..(699): n is a, c, g, or t
  misc_feature (701)..(701): n is a, c, g, or t
  misc_feature (703)..(705): n is a, c, g, or t
  misc_feature (707)..(708): n is a, c, g, or t
  misc_feature (710)..(714): n is a, c, g, or t
  misc_feature (716)..(722): n is a, c, g, or t
  misc_feature (726)..(740): n is a, c, g, or t
  misc_feature (742)..(750): n is a, c, g, or t
  misc_feature (753)..(754): n is a, c, g, or t
  misc_feature (757)..(773): n is a, c, g, or t
  misc_feature (775)..(776): n is a, c, g, or t
  misc_feature (780)..(805): n is a, c, g, or t
  misc_feature (808)..(809): n is a, c, g, or t
  misc_feature (811)..(813): n is a, c, g, or t
  misc_feature (815)..(816): n is a, c, g, or t
  misc_feature (821)..(822): n is a, c, g, or t
  misc_feature (824)..(835): n is a, c, g, or t
  misc_feature (843)..(852): n is a, c, g, or t
  misc_feature (854)..(854): n is a, c, g, or t
  misc_feature (861)..(867): n is a, c, g, or t
  misc_feature (872)..(872): n is a, c, g, or t
  misc_feature (881)..(885): n is a, c, g, or t
  misc_feature (888)..(897): n is a, c, g, or t
  misc_feature (901)..(903): n is a, c, g, or t
  misc_feature (906)..(908): n is a, c, g, or t
  misc_feature (912)..(919): n is a, c, g, or t
  misc_feature (921)..(921): n is a, c, g, or t
  misc_feature (929)..(934): n is a, c, g, or t
  misc_feature (936)..(938): n is a, c, g, or t
  misc_feature (941)..(953): n is a, c, g, or t
  misc_feature (956)..(967): n is a, c, g, or t
  misc_feature (969)..(975): n is a, c, g, or t
  misc_feature (978)..(980): n is a, c, g, or t
  misc_feature (982)..(992): n is a, c, g, or t
  misc_feature (994)..(997): n is a, c, g, or t
  misc_feature (999)..(1000): n is a, c, g, or t
  misc_feature (1002)..(1011): n is a, c, g, or t
  misc_feature (1015)..(1025): n is a, c, g, or t
  misc_feature (1027)..(1033): n is a, c, g, or t
  misc_feature (1035)..(1044): n is a, c, g, or t
  misc_feature (1052)..(1080): n is a, c, g, or t
  misc_feature (1083)..(1119): n is a, c, g, or t
  misc_feature (1123)..(1157): n is a, c, g, or t
  misc_feature (1161)..(1161): n is a, c, g, or t
  misc_feature (1163)..(1163): n is a, c, g, or t
  misc_feature (1165)..(1168): n is a, c, g, or t
  misc_feature (1171)..(1177): n is a, c, g, or t
  misc_feature (1180)..(1188): n is a, c, g, or t
  misc_feature (1192)..(1203): n is a, c, g, or t
  misc_feature (1205)..(1210): n is a, c, g, or t
  misc_feature (1212)..(1222): n is a, c, g, or t
  misc_feature (1228)..(1239): n is a, c, g, or t
  misc_feature (1243)..(1243): n is a, c, g, or t
  misc_feature (1245)..(1255): n is a, c, g, or t
  misc_feature (1257)..(1264): n is a, c, g, or t
  misc_feature (1267)..(1272): n is a, c, g, or t
  misc_feature (1279)..(1283): n is a, c, g, or t
  misc_feature (1285)..(1290): n is a, c, g, or t
  misc_feature (1292)..(1302): n is a, c, g, or t
  misc_feature (1304)..(1305): n is a, c, g, or t
  misc_feature (1310)..(1311): n is a, c, g, or t
  misc_feature (1313)..(1316): n is a, c, g, or t
  misc_feature (1319)..(1323): n is a, c, g, or t
  misc_feature (1326)..(1351): n is a, c, g, or t
  misc_feature (1356)..(1364): n is a, c, g, or t
  misc_feature (1366)..(1370): n is a, c, g, or t
  misc_feature (1372)..(1385): n is a, c, g, or t
  misc_feature (1387)..(1388): n is a, c, g, or t
  misc_feature (1390)..(1394): n is a, c, g, or t
  misc_feature (1397)..(1401): n is a, c, g, or t
  misc_feature (1406)..(1414): n is a, c, g, or t
  misc_feature (1417)..(1417): n is a, c, g, or t
  misc_feature (1419)..(1425): n is a, c, g, or t
  misc_feature (1428)..(1428): n is a, c, g, or t
  misc_feature (1430)..(1432): n is a, c, g, or t
  misc_feature (1435)..(1443): n is a, c, g, or t
  misc_feature (1449)..(1472): n is a, c, g, or t
  misc_feature (1474)..(1474): n is a, c, g, or t
aagcaaagtaaaagcaaaactcttaaccaaacattgaaatgaagaatacccacacgagactttgacttccttttcacaattttcctttctgggtagcaccaaattttgatgtttcacaggtttggagcctttgggatttcctaggaatgcaaaagctttgaagttgagcttaatggagagggttctggtgggtttcttgatatacctatgggttctgataagatgccttgttctgaaattgggaggggagagttgagagaggcatggtgaagtgaagatggagtccattgaaagagatgaatattggcgaagctaaggagagtgtattaattgataagatggtagaaatttggtggtcattttggaatgtgggaaaacgttcgaggttagtttcggaaatagaaaagttggaaggctgcaacaatgaaggagaagaagaaaggtttcagagacggagaggtttatgtagggattagactttagaagtgggagagatacgacaaaccgatgtggttttctaacattgtttgatttggattgaaccgggttcacannnnnnnnnnnnnnnnnnantccctggttacaannnncnnntttannncttccattnnnntnnacnnttcgctcaatannnnnnnnnnnttnnnnnnnnnnnnnnnnnnnnnnnnnnnnnnnnnnnanngnnnnnnnnnnnngnantntnnngnnannnnntnnnnnnnagannnnnnnnnnnnnnnannnnnnnnnatnnggnnnnnnnnnnnnnnnnnannaaannnnnnnnnnnnnnnnnnnnnnnnnnganngnnnannaaaanngnnnnnnnnnnnncccgtaannnnnnnnnnanttgtttnnnnnnnaattnaaagtagannnnnagnnnnnnnnnnatannntannntgcnnnnnnnnanggtacacnnnnnnannntgnnnnnnnnnnnnnatnnnnnnnnnnnngnnnnnnnagnnngnnnnnnnnnnnannnngnngnnnnnnnnnnaaannnnnnnnnnntnnnnnnntnnnnnnnnnntttataannnnnnnnnnnnnnnnnnnnnnnnnnnnntannnnnnnnnnnnnnnnnnnnnnnnnnnnnnnnnnnnnactnnnnnnnnnnnnnnnnnnnnnnnnnnnnnnnnnnntaantngnnnngannnnnnnttnnnnnnnnnttcnnnnnnnnnnnntnnnnnntnnnnnnnnnnntgtttnnnnnnnnnnnntatngnnnnnnnnnnnannnnnnnntannnnnnattatannnnnannnnnngnnnnnnnnnnncnntgcanngnnnnaannnnntannnnnnnnnnnnnnnnnnnnnnnnnnggggnnnnnnnnncnnnnngnnnnnnnnnnnnnntnntnnnnntgnnnnntgaannnnnnnnnaanannnnnnnttntnnngtnnnnnnnnngactcnnnnnnnnnnnnnnnnnnnnnnnntngatata

SEQ ID NO: 3275 - DNA, 667 bp, Gossypium hirsutum
ggggtggtagaaatttgggtgctaaaaatgtactgctttgttttactttcaaaggctggttccttagtttttctgtaattttttatgtttgtttcatataatatagtgttaatgcttatataacaaaaagtggggttttatcagtttttggaaatcccatttgtcaataaatgaattttggattttgcagattgattgtgattttcctaccattttttataacatttaataatataaaaggtgaaatgtttgaaacataattaactaataatatgttgtaaaaacattaaaatttctatatttgattgtctttttagtgttgacattttcctcataaaagcaaatttggttgtattaacgtaacgtacagaaaagagcagagcagtagtcccacgttttgcttataaaacgataggtgttgtcacatgacagcccctatatcttcttcacttcttcttccccatttcacaaacctttctgctttcaacaaacgcaaaccacacttacaacaatggtaagtttaattgcatgtcaaagtaattggtatgattgcatgtcgatactggtgtttctaatctgtatttgttgttgtaattggtatttgatgataaaagactacctcaaaacgccttgcgggaaggaaggttgctaggtttcgaaggaacat

SEQ ID NO: 3276 - DNA, 411 bp, Gossypium hirsutum
aagctctcgtaacaacctctgtcgtttcaacgatattcaccaaaatagacacttgctgtcttatctttgttgctgtaaatgcatgcaaacatgatcatttattctttattatcatcatcatcaatttttttactgatgtatgtgtcaataaaaatagatcactagcattatttaatatccttgtgtgtgtttacatatatcaacctaaagttggcacatgaaatgacaaggattacactatttcatgttctgcttgcaaatttggtatctgatccagttagtttgattcagataaccaaccttttcatcctgatactattatagattttgatgctttagtttgttgcttttttttctctgcattagatgtgaacgggtacatttttttaaaataaagtttgggtcttctca

SEQ ID NO: 3277 - DNA, 623 bp, Gossypium hirsutum
  misc_feature (604)..(604): n is a, c, g, or t
  misc_feature (606)..(606): n is a, c, g, or t
  misc_feature (609)..(620): n is a, c, g, or t
cggccaagcagtgaaaaatataagaacttcatttctccattttatacttcctgcaaaatctaatactaacaagctatgctttcactccaggcatgaccatcatataggaccctgctgaaccaaaatgaataggacatccacttccaaataaagagaaaagcccaatccagagtctcaacaccaatgaacatgcaccaactattttctctattgagcaatcatgaagaaggattcaagtgtatacaatgtccttgatccaaacgtccttagtcccatttccactgtaccgtatttctaaaataatcaggtaatgtcctaacctgtcatataggagatgtgaatacgcttatttcttgtcaattacattttccaatttacctttatttcacagggtctccagcaaatacctcctcctggtatgattaataatataacaggtttaaccccacaacaagtggcatggtcattcctaaattaattttaggttcctgaagtgacaaataaataaacaaataaataaaagaaacttggcaggttccataggtcattccacacatgacatcatctcttccactagttacataattacacaccagccatcacncnaannnnnnnnnnnnaaa

SEQ ID NO: 3278 - DNA, 340 bp, Gossypium hirsutum
tctatgtttgttcgtagaaagaacatatgcttggtcatgtaacaccttgcttgtcccaatggctgtgacagaggcatcatcaaaacgcagccattggccgttggggtatcgagcatcagctgtataatgccccttggagggctctcttccatgatgtgttattgtagcaacaagttcatattttcggccctataaatgaagtacaaaaatgaacattaaatatgtagcattaacttgccaacaagttaggacacaaaaatgtagaacacaaatacagcattgcggaccaaatacattcgtggactaaaaagagcaagttagctaagcagcattgactaaa

SEQ ID NO: 3279 - DNA, 575 bp, Gossypium hirsutum
  misc_feature (437)..(437): n is a, c, g, or t
  misc_feature (485)..(485): n is a, c, g, or t
  misc_feature (511)..(517): n is a, c, g, or t
  misc_feature (548)..(550): n is a, c, g, or t
  misc_feature (569)..(571): n is a, c, g, or t
ctcggattatctgtttaatacttcttactaaaggcatggtaggaacttgaagagagtcatcattaatcagacggactgcctggaaatttaatctcaccgaaatagtattcactgtacagaagctttttaagtttatttgaccggtaacaaaaggcaaagtgaccgttttttgacgtgggtgctttgattgttagaccaggttttcgctcagatggtactgttcacgcaacagggacttcgtttgaagcctttgaggatcatttgatataaaaccaggactcccaaggatcactgtaaagctttcccccaacaacaaagctaaggtaatcatatgcatttctgaatccaatgcattgcatagacggtcccaagtaaatgagggttgctatgaacaagaagaataaaatagggtgggtggatttagccagaaaggcttnatcggtgcagctgggcttactcaactctcctttattgagagagctaanaatgttctttcattttctccaggttnnnnnnntttcaatggaaggatgtatgatgtcagtcannntgagttgcatggtttaagnnnctaa

SEQ ID NO: 3280 - DNA, 605 bp, Gossypium hirsutum
gcttcagatatgatggcaaccaactttttaccatccataaagagctgcttctcatgcatattgaccatttccattgtcacttccttcctaaaaataggttggaggaaagacaccttaggtaaccttcagtataaggtcaactaaagctgagagaaataattactaaactcacgtgttccgtgcctggtaagtcacacctttcccacttgaagcccttacaagcatgccgcgcctccctgtcatttccgcaaccttatcaggacctccaagctgcaaactcattgaatacatagttaaaaaggacaaaaatataaggaaaacatagatacaatagtttattgatgacaaattatcaccaatgaacagatatcatggacccaaagcagacaaccagaataagcaataacatgcaaaagcgataactgagactaaaacttctctcctgcttccttgtttaatttcttttattttcaagtgcgaatgattcaccacaggcaaagcttgctggagaaggatcttccctccctcatctattatttggagcaaagggatttagttaatgccatagtttggttcaaaacacagagaacatagatgggtcaatc

SEQ ID NO: 3281 - DNA, 640 bp, Gossypium hirsutum
cataatttagttttagagatccaggtgtgcacactgttaagccaatatctatgagatttcttggaagccgatggtcattcttattttccaaggatgataattttatgtggcttcttttcaggcaacaatgccatcaacattcaaaaatccagctcatgtgcccatgtggagaggagccaaggttgcttatttcttcattgccatgtgccttttccctgttgccattggaggcttttgggcttacggaaaccttgtaagtatcctatcttttctacattgatggattaaatcgtctgcaatgtcaatctattgcttattacacttgtttgactttatttagatgccttcaggagggattctgaatgcactttatgcatttcacagtcacagcattccaaggggactccttgccctcacttttcttcttgtggtattcaactgtctcagcagtttccaaatatattcaatgccggctttcgacagctttgaggctggatatactagccgtacgaatcgcccttgctcgatctgggttcgttctggttttcgtgttttctacggatttgtgtccttcttcataggggtggcactcccattcctttcaagccttgctggactgttaggaggactcacccttcca

SEQ ID NO: 3282 - DNA, 646 bp, Gossypium hirsutum
tgcttcagacaaagaatgatgatcaagtgcagaacaatccaagaaataagagggctgaaatagagagatacatcccaaagcccgttgcaaaagaaatggctcagcaagtaatttctcagcaaccagtagctcattcagatgatccgaatgcaacagatgagatcgtgggaagagcagattctgggtcctatggaattgaatgttctcaacattcaggaacagccaccaggacagtggggaaccctacagagtcaaggaatgatggtaggcagggaagaggacatggatcttggcggcaacgggcctcagctgaggcaactttgcaaggcttgcaagatagacattattccactccaagtaaaaatgctcagaaatcaactgaacagaagcaaccccagaaacctgatttcagcctagtgaaagagcagcccaagtatgatgaatggaatacttctgatggttggaacatgcctgaaaatcctgattctactgtaccacctgtacctgtttcaagatatcaggggatgacaggcagaggaaagcgacatccattcaagggacagaagggtgggggaaacaactataattctgatcacaagaaaactaattatggtgaagctgataaacttaacccacaatcttcagc

SEQ ID NO: 3283 - DNA, 480 bp, Gossypium hirsutum
  misc_feature (449)..(449): n is a, c, g, or t
  misc_feature (451)..(452): n is a, c, g, or t
  misc_feature (458)..(458): n is a, c, g, or t
  misc_feature (460)..(460): n is a, c, g, or t
  misc_feature (474)..(474): n is a, c, g, or t
gataatttgtaaatacagccaagcaaccataaacaaacaaaataaataaaaaacataacatgtgccagaatctatataaaatcaattatttgcgtataaaaatattattatatctataaaaccttaaaggcttaaacacaattattaaaaaaatacaaacacaaacggattgccaagtctgaagaaaacccaaattcttgtatgaacaactgaaaatgaaagttaggcaaagtcgggaactgtgcaaacgagtgactctttgttacttagcaattaaaaaagaaaaaaaaagagtatatcagagcacactgtaaattcacatggtgcaaaaactacagtcacaatcatcaatttaacaagggtagttaggtctttttcctcgagatctatgcaaattgggtttcttttttaagtgtgatgatcagtcccatgttctttctcatctggantnnctacangntatatggaatacgntcatca

SEQ ID NO: 3284 - DNA, 597 bp, Gossypium hirsutum
ttgtgcaaggagtaagttttaagaaataaaattttctttcccatgaacttgcgaaactagaaactgttacttgtctgattctaaagcattttcatttatcaatatattttgctgttggacaagattttcctgatctaagtatttgctcatcagctgtcggtacacttctcatggtatcgacatactagcatgtttggcatgacgcttcacgcatatattatatggtaacttgtttgacccatattagcatcggcctttttttacagattgctgcttagcatggagaccagacctgatccactacttccactgtaactactaaaacttgtcttgtttttgtattctgttttagataatttttttttctctaaacctctaatgcttggatttgttatttgattacagaacaaatggtcccataaacccatcatgggatgtatggtttgaagggcctcaaacatcacaaggttgcagatgccggattctgtgatttgaaggcaatctaacatttgttttgttgccaagatatgttatataacatacatgtttaacattttacatctctcaattgttaacaaatattcaattcactcatgt

SEQ ID NO: 3285 - DNA, 470 bp, Gossypium hirsutum
cgctagccaagaaaccaagcctggtaaaatcattggccatctcagaatagtcctcatttacagcatggacaacagcatcaattagtatctgcttattttgctgaaaaacaaaaggcacaacaatgtgtagggtaagacggaccaaactttgtgaagaatagtaagaaagtgctatttctatcaactgccctttgacgcacatagtagggaactgtcagttactatatagcaggagattacactgttcttgaaagaaggaaagcagcataacaaatctaagcatggcacatgctcaacaatgagaattggtaacattatctactggtaaaaacatgtatagtacaaaaaagcatttggctaccatgaattgatataagaactacaacgaaattcattggaattacatgctgacaccaatagagcataaatcattactaactccagcattgacttctggtatatgttacctg

SEQ ID NO: 3286 - DNA, 647 bp, Gossypium hirsutum
gtggtcttaccttcataatgttataatcccaaggatgcaccaggcgatgtgtgatagggtttgtgaaatgatatatcttgcaacttaaattttcatgtagcaaagcagagcaggatattgcaacttggcttccttgaaggcccactccaaaagtcatgatttgtaccttcattggtgaaaggagagcaaagcagagcagggtcttgcaacttgccgatactgaatttaaaggtgcagagtctctggggtaaacctttattgttccagagctctaatgtgaagccgttgcattgccctgagtttttcttggtcgatcataaagtgggtacaagcatgctgtgctgaagtagaacttatttttaggcttggtagtcctgattgtgatttggaatttcgatcaaataaattagatacagagtaggaaagcttacacttatttggagcctttcgatacttcaggttgtaatatttttattattataatcaatggtttcaaactctcctttttcatcattttctctgcttggttcaaacaaattatcatgcataattgaatcaaaccaagctcaagctataacaagctcaagttgcacttgattcaaacaaattcttttcctttgttgctttcacttcatcgaacccaaatc

SEQ ID NO: 3287 - DNA, 630 bp, Gossypium hirsutum
cgctggttctctacaccgcaaatccgtaagatctgagttcagagggtgatgactttgttccatattctgggagaagaacactgcttgcctggctgattgattctggggctgtgcagttgagcgaaaaggtgcagtatatgaatcgtaggagaacaaaagtgatgctagagggctggatcacaagggatggaatccactgtggttgttgtagtaaaatcctcacagtttcaaaatttgagattcatgctggaagcaaattacgacaaccatttcagaatatatatttggattctggtgtttctctccttcagtgccaaatagatgcatggaacagacaagtggagtctgagcagattggttttcattctgtagacgtaaatggtgatgaccccaatgatgatacttgtggcatttgtggagatggtggggatctgatatgttgtgacagttgtccctcaacatttcatcagagctgcctcaatatagaggtacttctgcataatttttgcaccagctatctagtgttttatatttataatggtgttgagtctcttgtttgctttctttttctataagtgttccttgtagacttctggatcagttatagagattaatgcaggtttgtagttg

SEQ ID NO: 3288 - DNA, 603 bp, Gossypium hirsutum
  misc_feature (59)..(59): n is a, c, g, or t
  misc_feature (554)..(554): n is a, c, g, or t
atctatagagctggtttcttggcagctaggacctagcccccataaaaaccccgttccancctttttggaatccaccctttccggtcctatccaaaaccaatcccccgtaacaaagtaacctataaactgggtggaaaacataatccaggccaaacctaccagaaacagaattatctttaatttaaccaaaagaagaaaaaaaataataacccgaccttggaaaaataagtgcattagcgtcatcctgctggtaaaagcacctgtatctgtgagctttaaaaaactgtccaacttaaacccaacagcagcccctgtatagcaggaatgatttgaaacctcgtattaaaggaacatacagcagttgaaaaattttccctcccccaaatctgaatagttgaccacctttaaatgcataaaaaaaatgacacccgggacaagggggttttgggcaaaaaaaaaaaaaaaaaaaagagaaaaaaaaagctaataaaaggaccacggggcaaaaaatggtgggggccactattttcctctaatttctcatgaaaaaccanaatgaaggagatcttcgttaaaggaggacattgtcgccgttgaaaaccc

SEQ ID NO: 3289 - DNA, 664 bp, Gossypium hirsutum
agataaaaataattatttcttaattaaaattttaatttaatttcagatatatgacgtgggaaaaaagatacgtaggattaaattcgaaggactaaattggttaaccgacataagctttaagtagtaaagtgatcgaaaaaaatatttaggtatcgcctatttttttatggactttgttcttattttttgagaatttagtgtttttaattttctttagctagttgtaaataggcttgattgtttgattttttttaaaattaatattttcttatttacttttaagattcttttatatttttagaattattattaaatttttttaaatgtatcaaattgatattttagttatagtttaagggttaagtttattattaactctttaaattaacatatatcatgtcatcatcttaataaaagttaaacgaaggaggaactaaaatgtaagaattcgagacaattatgtaacttttgaaaatttatataatttaccttaaaagaaaagaaaagttaaaatattataaatttggaaaaaatattatattatattagattagattatggttttgagtatttgaaaattttaaatgagtttaattttttatttaaatttattttacgaattaccttcttaaatgtttaatcgagtaacctaatcttaacacgc

SEQ ID NO: 3290 - DNA, 612 bp, Gossypium hirsutum
gaaatatctgtgttgatgttatggtgtgtgctaagattaaactttcgtagttgaaaaatttaagggtattaactgagttctgttgcattctgaaaataatctcttataaagtcgtactacttttcctactttacatcctcagaaattaaagatctctctttctgtgatcataaacataattatatgtaaaaaaatcagatctaacccttttagagggaatggaaatttgtggtccatacatgtgccttcattagcactcttttgttcaccttgatgcataaatctttttaagactttgcattcctagcattataggagttcacatgcataaatcagatgacctggcattcttatatataaaatcaataatgtctttctactgcccctttagaacacttcaaaatttccccaagtttgtcctgtcctttataacttcgcttccttaacaggacccacaatttcttgtttaactttttgcaattttatataatgcaggtattgatagaagcagtttaaaatcatatgccacaagttatcgtgattgatgaaattgggacaaaactggaggcaatggccgcatgcacaattgcacaacgtggaattctgctagat

SEQ ID NO: 3291 - DNA, 666 bp, Gossypium hirsutum
  misc_feature (607)..(608): n is a, c, g, or t
  misc_feature (615)..(633): n is a, c, g, or t
  misc_feature (635)..(640): n is a, c, g, or t
  misc_feature (644)..(648): n is a, c, g, or t
  misc_feature (650)..(653): n is a, c, g, or t
ctctccaagtcattgcgtgaggtaggcattcccgtgacttgttcagatgttttaaaaaaaaatggtcatgcctttttgttttttgtcttcaacagctaaagagtattaatttctctcatcattttcgattgatatccagaaattatttgattttgtgttctttgaatgagcagtatggagtgaatgtgaagcagcaggagtattttgcggatagcccttcaacaggaatggaccctgctactagagatgaatagttggagttagaattatgttattactttgttgatgctgctggaaacctcctttatggccctttattacttgattgctcagcttaatagactcgattaacatttacagggttgtggctaataatatttccagtcaatgtgtatgtgaaaattacattttttttcccgttaattggtggtctaaagagaagcttttgttacctcattcccgaaaaataagtgacattcaactatacaatctatattaatgaaatgctaatggcttagatgaagatgatatattgacaaaactttcctaacatgctgccatttttctgtacatatcgcaataatttacagaggtgtctccatcaggnnaaaaatnnnnnnnnnnnnnnnnnnncnnnnnnattnnnnngnnnnttaggaaaggttt

SEQ ID NO: 3292 - DNA, 620 bp, Gossypium hirsutum
actgtgtctgattttcttttacgagccctcacatgtccaacatgtattctgctgtgaccatgttggacttgtagaaggatctgtgcttcatactctagcactcataagtgagacattgaatttcatatgctctagtaaactttgtagtaggaatcctatctctagtagagttaatcctcaagaaccattacaactgaaatcatcatatttcaagatgggtttaacatattacattttgagtgttttagttgattaaggaatggatgccaagaatcactcgttttcattcaaagaaaaatcacatccccttttttatgactatcaaaccaaattcttgccccaaagtacccatcaatttccatcagacaaatccctcaattaaccaataaatcctaattcctaatattattgctttccagaatttcatgcaaacctttttcctttcatttccaccattttttaaaaataattttcattggtaccaacctgggccgaatcctaaaaggttaaaaaaatttctaataagacccccaatcctaaaaaccccaattttccgaacccaataacccctaaataataataaggctaattttttcaaaaatttaaggccccccttaaaa

SEQ ID NO: 3293 - DNA, 612 bp, Gossypium hirsutum
tgaagattggggcatctgatggaacaaaagcagctagatcgggaggttggtctttccctacaggagggttagcctaccaatgacattaaatcagctaatctggcatataattactggtgaaataagacagtttatgaaaatcaatatcacctccaggtcaacgtatgatgggtctctcccaatcgatttaagaaacttgtccagaccgtgggcgttaagagctgggaacacatcaattaggaattattccaatcaggcaccaaaatatttaagttcagaaacaaagggctatttaaagtgacatgactaagttcctccttgactgccagttacacaaagccacatcctagcaagtcagttccctttttctatcacaggatttctaggcctcaatgactaaattgaatacaccatggaaacttaaggcattgatacttgtaaccaattaactgccaagaacagagaaaaagaaacaccaagttttaaattgatgggttgggttaaaagatcttatgtgttttctcttatgaatgagcatatcttgataaaggagaaaaatgtgatacaagctaatgtgccacatatatgaaagccaccactaattgttttgtt

SEQ ID NO: 3294 - DNA, 600 bp, Gossypium hirsutum
ccacatgtagccaattcccatttgggccatagagttttaatttgtagtattgtccaacttgaaaattgtagcataactagtaactctgtcaatgacggctaaaagcccattgatggaatgtttatttagcatctgccattccatttgtgtctggttgaaaccttctttcatttgtgttctttagttctcttaacatgttaaccttctctttttagagttcgttattttattttaggatttactttcttttttcgtcttcctggtttcatcataactacttttaaataaatgttcaatatagtaaatattcaaaattaggggaaaaaagaaagaaactacagaagaaaaagaaatcaatgcaaaagaaaagggagaaagctttacttcaaattgtagtaataatacaatgtacattttatagtactaaatataaaattttgctatcattatgcaactttcaatagattgaattgatattaaatttgcaatatatttgtacattgtaattcataattttaattatatcattgattgtttaacagaaagatgttagttaatatattacttcgaaggcttaaaaaatgataaaactaatttaaa

SEQ ID NO: 3295 - DNA, 622 bp, Gossypium hirsutum
caaatataaattcttggggaaaataaaaaagttaacataggatacttaacatccctcgcttctgatatgcttttcaggctcagctattgcatcctctctgatggacagacaagggagaaaaagtcttctgatgacaagtttttctggaatggtaggtttattaagttgtaggcttgtagcaattcttcttccaaattagagagtgtggactccactgctaatctctttgaaactaactgcatttgcattttgggccttcagatacataaacatgccatctctcatgtatcttcactgcataaagtttcttttatttttttccccctacattatgatcaagtttcttaaattgaaactgatcttaccttgatgcaaagacttcatctgaagttttatactagaattggtaaaattatactatgttgttaaagattgtaacttctcttgtatgcaaaactctagctaggttgtaggtatggactgtggaaactctaggataattattctagattgtctaaaagatgtttccaagtatattgagttactttttcttttttttctactaaattgtgttgaaggattgaattgttgtaatactctgttgatattcctctctctctat

SEQ ID NO: 3296 - DNA, 553 bp, Gossypium hirsutum
ttttttgttcagatttgaaatgtgaagtttcttatgttctcttcagctgaaaatgatacgtggtttcacgagccaaacccaaagacatgaatgaatcatagctgtgtaagcaaggtgattaaggagaattttaaataagaaagaaaaagaacctattcgctttttgtccaaatgggttgtagtagcttcttgaatcattatttacctccttcaatgccctcgtgtgtaattgttgagcttttgctagcagacccaagttttaatgaggattcaataatatagctattaaaattatttattccatacgattcaaatattatagagtatcctagtctgattcctcttactattttaattatacatatacatatacatatacatattcatatgcatatgcatatacatatgcatatgcatatgcatatacatatacatatacatatacatatacatatacatatacatatacatatacatatacatatacatatacatatacatgtacatgtacacatacacatttataataagctgccctagtttatgttaagga

SEQ ID NO: 3297 - DNA, 738 bp, Gossypium hirsutum
  misc_feature (536)..(536): n is a, c, g, or t
  misc_feature (548)..(548): n is a, c, g, or t
  misc_feature (554)..(566): n is a, c, g, or t
  misc_feature (654)..(665): n is a, c, g, or t
atgaatgagtttgatctacaaattgtatgattttatgtttcaacacatgtttatttagattatatggttatacatattgttttctcagataatttgctatgaggacattgtcttaaaaagatctatgttattccctaccaagacatgcaaagttaatagtagcattttttgttcagatttgaaatgtgaagtttcttatgttctcttcagctgaaaatgatacgtggtttcacgagccaaacccaaagacatgaatgaatcatagctgtgtaagcaaggtgattaaggagaattttaaataagaaagaaaaagaacctattcgctttttgtccaaatgggttgtagtagcttcttgaatcattatttacctccttcaatgccctcgtgtgtaattgttgagcttttgctagcagacccaagttttaatgaggattcaataatatagctattaaaattatttattccatacgattcaaagattatagagtatcctagtctgattcctcttactattttaattatacatatacatatncatatacatatncatatnnnnnnnnnnnnncatatgcatatgcatatgcatatacatatacatatacatatacatatacatatacatatacatatacatatacatatacatatacatnnnnnnnnnnnngtacatgtacacatacacatttataataagctgccctagtttatgttaaggataaacagaatttctagtttga

SEQ ID NO: 3298 - DNA, 606 bp, Gossypium hirsutum
cagcctccagactggatgactggtacaggccaatactagaagtagatttctttgtaacggtgagattagcatctgcaaaagatgatgagagtcacaccgttagcaaattaaaggaggtccctgtgtcattccactcacctgaacagtatgtaaacatttttcggccgttagttttggaggaatttaaagcacaactgtatagttcctttctggagatgtcttcatgggaggagatgtactgtggcagtatatccgtgctgtcagttgagagggttgatgatttccatcttgttcgatttgtctatgatattgatgattctacagcatctaaaagtttgtcagagaatgaccttgttttactcactaaagatcttccaaaaagtacctcccatgatgttcatatggttggaaaggtattttgtcctaatatagtatttactgggatcgtatcattcctgttctgatttcagtgttttctctccctagtatatttttttaattcatttttctgcaagacctttttgaccctcttttcaggcaaatttcttttgtttgtgtgtatatatataactctttttaatttattactcttgaccttgaacatct

SEQ ID NO: 3299 - DNA, 663 bp, Gossypium hirsutum
taatttaactttaaatgtattaaataaaaaatacatgtgtctttttctcgataaaaataactattcaccttaacaaaaactacctttacttaatttaattattatcttataaaaatatatttttatttaaaaataataatatataatagtattttattttataattattcgaacattatatttatatttttactttaattatacttgcatccatatatgccggaatttttataaacttttataatagtttatttaattaataataaaaattaactaattatattaaatagtaatcatttgtttaaatttttgttaattacaaaatttaaatttatgataattgtgaaggatgggatatggttttaaattgatttgtgatctatatgcataccaataattttttaaatacattatatatctatttttaaaagtaaaataaaataatcaagtaataaaataatcaagtaatacagttttttttgttttttaaattgaatcattttgaaaaagtatttgaatattttgaaataaatttaaagttgaaataaaattattataacaaagaggataaaatatttttttatacaagatctagaactatccataattcttactcaattcttaaataagagaataaatacgttttcacacgctcgaatccac

SEQ ID NO: 3300 - DNA, 504 bp, Gossypium hirsutum
ttatgatttacaaatcccacccaactatattggactctcttttttctctcttaaatcaatttagtccagaccaactccaaacaatgatcgcctttgggtcctgttttccagttttatgtgctatcataatttcctttttggcaagaaatcaaaaactgaacaggtagaagttgctacataatagctctatttattgtatgtccgactctatagtctatcctcctgcaacacaggtagaaattcttccggtggatgttgcaacacgcgggtactttattaaaatcgaattaatcaattaaattaatcggtcattaaaagaaaattggttataattttatataagtttaattattgattagttggattcgaaagaaaacaattaaccgaatttgataaaattttgtataaattcaattaaaacacttatcattaaccgttaaaatgatattttccacgagaattaatcaatatacaccaaaagtaatgaaggagaatgagaccgaa

SEQ ID NO: 3301 - DNA, 650 bp, Gossypium hirsutum
  misc_feature (644)..(646): n is a, c, g, or t
ttgatgttatttcttttctgttggatttggattctagtaattcaagcatggtcttatttctttttgtattgattcattttttttccttttccttttttgtgtttgtcatttatttgtatctgctgcttcaaatcgatcttctaacattgtactttatgtatgtatatatattaaacagcatctagccttgctctgtttgggggagattgggaggaggaaagatctgagctcgcatgcccatatagagactataattattgagtccttccaatctccttttgaagagataaagtctgctgcttcttatgcgcttggcaatatagctgtcgggaatctttccaagtatttacctttcatattggaccagattgataaccagcagaagaaacaatacctgttgcttcattctcttaaggaggtatgttttcttgaagtggtgctcaaacctaaccagatatttttgtctgatgcagcatctatgttaatgttaaatttacttgcaggttatagtaaggcaatctgtagataaagcagaatttcaggattcaagtgttgagaaaattctgaaattactttttaaccactgtgaaagcgaggaagagggggtcagaaatgtggtggctgagtgccttggtaaattgcannnaaaa

SEQ ID NO: 3302 - DNA, 411 bp, Gossypium hirsutum
gacttgaatgaaaatagattcaaaatgcgcccagggacatatattacaacacaatgactgctactcacctgttgccagccaagaggggtaatgtgtgcatcaaaatattctggagacatgtatgctttatagttcttatctccatctacattgtggatcccctgagcatgcctcacctggatgtattgttttataagaccacattgccttgttttgcgagcaaaagccaagaaagaaggcaatcttgaatatccttcaaaccaaatatatagcagcttcaaatctgcagtggatgtactgcattaaaaggaaaaataaattcaataccaaccaagtgaagagttttgcagcggtgcaaagggaacaagctcgggccagcactggtatccacatctgcaaccaatatgttag

SEQ ID NO: 3303 - DNA, 615 bp, Gossypium hirsutum
atgcttgcagattcaatccataaattcagcaatatatatgaaaagatcgaaaataataaaaggcaccagatgttggaattagaaaaaatgaggatggagattcacatggagatggaaatgcagaagaggcggatcatggaaaatgcacaagccgaaattgtaaaaatacagcagggcgacgaagaggataacgacgtctccatcgagaatgctagcggataatgcaaaacctgattagttaatgttgactacaaaatattgttgtatatcatattgaagcctattgccaaatgctaccgtgagttagaaaattctttttaccgactttctcacttatattgctttaatatctatagttcacaggtaacaagtccttttttttatgtcaagcatgcaatttggttgaatagcatcatttttgttttgaagaagggcaagtagatctcatgatagctatcagtgcagcattatacaaactagggctaaattaagattgtcgtataccaattgaatgagaagttttcgattagtttgttttcaacttttcccaccatttttcagtaaatccaacaggaaacagagaaaacaaaatgatcttgccatgggaataactca

SEQ ID NO: 3304 - DNA, 617 bp, Gossypium hirsutum
catgcagacaggactttcgtatggaagaagggtctcttaacattctcacatatctgtcaatctcagctccgctgaagaggcacgtaaaggaaagtgatagataacatattagaacacatagataattctgaaggtaataactatgaaatagaaaaggtaagaaccatgagaagtggcaagtgcatgcaaatatcatatgttctacaagcaatgcggattttggatagtgttagagacttgattaaaatattaaatagattaatagtatatgcaattagtacaaacactagctgttacttcttaaatcttactaccaaaaatagatacgaaatcatcggtttcatctttagagtataaaatactaatgttgaaaaaccaaacctgcatcttagatgccctgcttcaggtattcttatggcttctgctatctgtgccaaagctgtggggactaatgttgcagcagcagcattaaaggtttgtggttcataaaatgagctcacaaactcttcgacatgtttcaaggccatccttccaaccccatctatgttcagactctttgaactgccctgtgatgaaggcgaaggccccactggcaccgctgagtctattctgtaaaa

SEQ ID NO: 3305 - DNA, 402 bp, Gossypium hirsutum
tatgttacatgtacagtgggacgaatagtttgaagataaaatcagcaaccaatagaaaacatttgtggttaggattagaatctagaaaagggctatttctccacttggactctgaaccaaaccatggcttcttcttcttccatcactctcccaacccttcaaggttctctatttcaatctcatttcctaggaaaaagccccatcacccatcgtcttcataaaccatttttctcggttgccaaacagcctaaaaaggccttctatgccaagtttgatctatttgaaatcttgggaggtagggggctctgcaatggagaaaaaggcattgaagttgagctaaagagaaacgtggatgaaggttcatcagttggtaacacagatgttgaaagtctgacagcacac

SEQ ID NO: 3306 - DNA, 628 bp, Gossypium hirsutum
agatgaacagatttgggaggtaggttcattttagttaaacactgtctgttatgatcggtaattgaagtctaacatccatcaatattgtgttttaaaggcattggataaatgccaacttggggatggagttcgaaacaaggccggccggctcgattcttcaggttcgatccttctatcttataacacacatgagtttgtcttcttttgcataaattatactttgtatgaatattggtgtgcagttagtgagaatggagagaattggagcgtggggcaaaggcagttggtgtgccttgggcgtgttctattgaaaaaaagtaagatcttagtgctcgaagaagccaccgcatcggtggatacagccaccgacaacctaatacagaagacgttaagggagcacttctccgattgtacggtcataacaatcgctcaccgaataacttcggttcttgatagcgacatggttctgcttctaagtcatggttaataatacagtatgctctgctcattaagatggattcttggaagttcatttcatttgaataaaaaaaaaaaaatttttttttttggggaataaaaaaaaaaaaaaaaagcccctccattttgggggaaaaaaattttttctttt

SEQ ID NO: 3307 - DNA, 606 bp, Gossypium hirsutum
tcaaggtaagcttgacaaaattcaaaaaacaaacatataaatctaatagtattttgaaaagggtatttgccatggtttatttgatcaatgaagtaatgaattgctaatgactccaggaacaatacaatatgcacctaccaagatcagaagtttgtttgctacagtacatcagagggcttcaaagcaatctctcaaagttggaggagttggatgttggcaataccattggcttcccttttacaatttttgctttagtaaactctgttcagctgcagtttttatcattctgaaatttgaagggatgttatcccccttttttttccagattcttttggacagatgaacaccttggaagagaaggtaagagaacagaaaagatggggttttctctgtattttctcattgataccaacaatcatgttatccccagggcaatccatgctaatatttcacttagattgataactagattttcatggtacaggataggcgatttagagattttcatatttgaatttagaaatgagtaaatttaatacaatgtaattcacccatcccttcaaacttcaagtaatgggagagaacaggagaccagcctcaatgccc

SEQ ID NO: 3308 - DNA, 627 bp, Gossypium hirsutum
tggattgtgttgtggaaaactgaattaaagtaaacctatagtgatttctcttcgactgaaagaatcatttgatttgatgaacggatgcaggaccaagaatatgcagttggccgtgttggttttttcttatgccagtgatccattgaggacaatctatattaagatctcttatttctattattttggcaagctcagaagagcaaaaaatatgcactgcaaaactgcagggttcatcgtctaaaatttaaatacaaacacaaacgtttcttatttgtgaagattacagccatacaaattgcacgacattgcggcagcattcgcttgcatcctcccgcaactactcttccccttagagcacaagttgaacccatgaaggcaaaaatgaaattgcatcaatgcctaaagtgtctcacttttgtgaaaagcaatgaaactccatacttgttacaacagtccacagcatccccatctctaatgctcccaccaggctctgcaatcactccaataccactttcacaagcttcttccactgcatctttccaagctattaatagaaaaacacatctttgttaggtaacaggtcatataaacaaaagaatcattactagattgaatgcctgcatacag

SEQ ID NO: 3309 - DNA, 617 bp, Gossypium hirsutum
tactgtctagttacgtagtaatattaaactcttacacctgagttttcttttatctagaaaaagtccctagtccccggtggctaggagtgatcaagttcgcccaaaactcaactcacttccgttgagcgaaccctcatggataactcttagacttaaattgagagcaaagaaatatatatgaaatgggttgaaggtaatgtgaaaaatgatttgggttgttcaagttctttcagatccaaagtcttacctagataattgttttcccaattttctaaattctactaacataactaaaatgatcccaaaaaaggaaaaaaaaagttggaaatattgagtttcgatgttgagataggaagtggttcattacattcattgatgttctaagtgattaataaggttctacatcaaaacgtaaatactaggaaggcattgggaagagtgaaaggatggattgttatgtctatggctttatatagttgtttgcttgctttttattggttgtaggggagttgggactgaggagagaaatgacaaaggggaaagcctgcaatggtcctggaatagagatatgaaagctatttgagttcaagtcccagtctctgcaatgctctgcaaag

SEQ ID NO: 3310 - DNA, 698 bp, Gossypium hirsutum
  misc_feature (649)..(651): n is a, c, g, or t
  misc_feature (654)..(656): n is a, c, g, or t
  misc_feature (658)..(658): n is a, c, g, or t
  misc_feature (673)..(677): n is a, c, g, or t
  misc_feature (679)..(682): n is a, c, g, or t
  misc_feature (690)..(690): n is a, c, g, or t
  misc_feature (692)..(692): n is a, c, g, or t
gactctggggttgatccaatggttttgatgtcccaattggccagccttattatggatatcattgctggaacttacaatattgttgattctaattacagtcattcattctttggtggacgagcttgtgagtgtcatccaattactttgtttttgtttctttggtaacagagaaagcttttttatatgaaaaatggcacctacatattctaattatgttataattagttggatgtacttaagtcagcagtggcgataccaaaaatcattgtgaagatcaaaataactaggaagcaagaaaaaaggaaaaagaagcaagaaaaaatcacgtcacaaataagatatatcatggttttctgaaaaaaaattgacggacatataacatgttgaagtttagttatttggagcaaaatgagcctaaatagttgaactggataggagtttaattctatacagtatctacatgccctttagcttgcttgaatattgatatcagtaaacacttagaatgtggtttctccattgaagaataaaataaacacctatgcctttataagacaagaaatcttttgtagctctagagtcgttcttatttttacctaattcttagttccgaaacttgaaactatgcctcatgtcatttgggtttcannnaannnanttccggaactaaagnnnnnannnnaaaattangnacgact

SEQ ID NO: 3311 - DNA, 629 bp, Gossypium hirsutum
ttcttgtaccatggtcgcatgtttgtttctgcatggcacatatgtttccattctaatgtgttctctaaacaacttaaggttagcttgccagtttgtcgcattaatttacgagagcttatcctcttcttaagatgtgctgacattcatagtgcatttacggtagaatccagagacaaattgtcctccttctttaaagggaaaaatgattaaactaactaaaaagataagaaactttttatatgtttgacaccttctatggtattataaactgaaaggacgtgttcaaatcttaacaacttttgtttaaataacaggtgataattccattcggggatgtagatgaggtaagctatattcttctgatcagcacttcttaaagttagttttgtggcatcaaaaagaactactataacttacaagcattttcttgaccatgttggagaaaattttgaatgttctttgtgcatataataatttggtctatgtaggttcgtaagagtcagcatgcattcattaatcctgcaataacaatcattcttcggatgggtgctggtgggcatggtgtacctccattagggagctctgatggttagtaactaaattctttaccaagcatgaaagcttttaag

SEQ ID NO: 3312 - DNA, 613 bp, Gossypium hirsutum
ctaatgagattcaaaccaaagatataacaaggttatgaagaaaaacaaatgtcctgaattactacaaaaaagcaataactcaaataaaaaaagtaaaatgaggaaaagatgagaggaaattggcagcagtaattagaattaaatagtacgtaaatgaataattttgcaccaagccaccacttcatcatcaaagaaatatgcatagaagccaaatgcaaagcgttttataatatctgccatctaaccaaaatacttgctgtactccggccttatatcaccacacatatgtggtaatctcaagcctcaaaggccaatctccgacacacaaaaaactttaagcatatgtggtaaccttagatttgaacacttcactctttggcttttttggagagaaataaatagaccctgcttttgaaggagaaaagataaccatataaagctcctgctttcatggttctcatccctttcgaacacaagcttccatggtctaaataaatagtccatctcttttaatattaacaatagatggtccattcatatattatgaaggtacatgatgttattggtttattctacctctatctttataatctagcattccacatgcattggt

SEQ ID NO: 3313 - DNA, 655 bp, Gossypium hirsutum
gagatacccttttctagtaaacacaaaatgatgttaccctacggaattcctagtttttgttaactcatgaattatcattcttttggtgttttattctaggaaagaaagaaaatcatcaaagggatgaaaggccatataagcaagatagcacatgatcaatgtggatgcatggtaagggttgtttatggaattctatctgctcaaatttcgtctgttagaaatgccatacgggtggtctttgtagacagcttatttttaaccttcttagcgtgcaaagaggtctcctgaaatctgacctcccatcataattgaaagctgaacagacttaaggaaaaacagaaataaccaaatcaacttaagttggtctgtttaggcagttaactaaattaacctaatataaatgagccgatgtgcccttttctgattcatatttgtttaagattattatatattttattgtatatttccttaaaaagaaatatcataatcatcggagaaatgtaatcaactttgttataatattttccacagatctataatattataaatatattttataatatttaaaatatataaatataatctatttatattaatttggttaattcgatcggttcagttatcacttatataaatccacaactgacggaattca

SEQ ID NO: 3314 - DNA, 1624 bp, Gossypium hirsutum
  misc_feature (963)..(972): n is a, c, g, or t
  misc_feature (974)..(985): n is a, c, g, or t
  misc_feature (988)..(993): n is a, c, g, or t
  misc_feature (998)..(999): n is a, c, g, or t
  misc_feature (1002)..(1008): n is a, c, g, or t
  misc_feature (1013)..(1015): n is a, c, g, or t
  misc_feature (1017)..(1019): n is a, c, g, or t
  misc_feature (1021)..(1027): n is a, c, g, or t
  misc_feature (1033)..(1035): n is a, c, g, or t
  misc_feature (1037)..(1040): n is a, c, g, or t
  misc_feature (1042)..(1069): n is a, c, g, or t
  misc_feature (1071)..(1071): n is a, c, g, or t
  misc_feature (1074)..(1088): n is a, c, g, or t
  misc_feature (1093)..(1095): n is a, c, g, or t
  misc_feature (1098)..(1101): n is a, c, g, or t
  misc_feature (1104)..(1111): n is a, c, g, or t
  misc_feature (1114)..(1124): n is a, c, g, or t
  misc_feature (1126)..(1138): n is a, c, g, or t
  misc_feature (1143)..(1149): n is a, c, g, or t
  misc_feature (1151)..(1157): n is a, c, g, or t
  misc_feature (1163)..(1178): n is a, c, g, or t
  misc_feature (1180)..(1181): n is a, c, g, or t
  misc_feature (1183)..(1187): n is a, c, g, or t
  misc_feature (1189)..(1192): n is a, c, g, or t
  misc_feature (1199)..(1199): n is a, c, g, or t
  misc_feature (1201)..(1204): n is a, c, g, or t
  misc_feature (1206)..(1215): n is a, c, g, or t
  misc_feature (1221)..(1231): n is a, c, g, or t
  misc_feature (1233)..(1236): n is a, c, g, or t
  misc_feature (1238)..(1247): n is a, c, g, or t
  misc_feature (1249)..(1250): n is a, c, g, or t
  misc_feature (1252)..(1254): n is a, c, g, or t
  misc_feature (1256)..(1270): n is a, c, g, or t
  misc_feature (1272)..(1275): n is a, c, g, or t
  misc_feature (1277)..(1300): n is a, c, g, or t
  misc_feature (1308)..(1340): n is a, c, g, or t
  misc_feature (1342)..(1381): n is a, c, g, or t
  misc_feature (1383)..(1394): n is a, c, g, or t
  misc_feature (1396)..(1406): n is a, c, g, or t
  misc_feature (1412)..(1416): n is a, c, g, or t
  misc_feature (1418)..(1427): n is a, c, g, or t
  misc_feature (1431)..(1449): n is a, c, g, or t
  misc_feature (1453)..(1467): n is a, c, g, or t
  misc_feature (1469)..(1483): n is a, c, g, or t
  misc_feature (1488)..(1488): n is a, c, g, or t
  misc_feature (1490)..(1507): n is a, c, g, or t
  misc_feature (1509)..(1514): n is a, c, g, or t
  misc_feature (1519)..(1523): n is a, c, g, or t
  misc_feature (1526)..(1531): n is a, c, g, or t
  misc_feature (1533)..(1540): n is a, c, g, or t
  misc_feature (1543)..(1548): n is a, c, g, or t
  misc_feature (1555)..(1559): n is a, c, g, or t
  misc_feature (1561)..(1570): n is a, c, g, or t
  misc_feature (1572)..(1578): n is a, c, g, or t
  misc_feature (1581)..(1586): n is a, c, g, or t
  misc_feature (1594)..(1599): n is a, c, g, or t
  misc_feature (1601)..(1608): n is a, c, g, or t
  misc_feature (1613)..(1619): n is a, c, g, or t
ccccttaagttatcagttgggggtgtgctatcaaggtaataatttggtttcctttggcttatcaactttttgagcttttgtgttttcagtgattttccctgtcaaaagggggacatttcaaacaagaaaaagagcatttaagcgaaaaagtgtactaacttatccccttgactattttaaatatcactgagaacacaaaagctcagagagttgagaagccagaggaaaccaaattattaccttgatagcacagccacaactaataactgcctgtcacttaaccattgataatgttggtattcagccacattaagttattagttgtggctgtgctatcaaggtaataatttggtttcctctggcttctcaactctctgagcttttgtgttctcagtgatatttaaaatagtcaaggggataagttagtacactttttcgcttaaatgctctttttctttattaaaacgtgcttgtatttatgactgattcatggatccatgatttatgttattggttatcttacagttttgttcaatagtgctcaaatttttgagaaaatatttggagacgaattgatcatggatattattggttctcttgaatgtaagtatatcactatttgtttatagatatattatcagggactgttggtggattattcaaaatttgtgaaaactggaaaaatatggatggccttcacatgatatttaaaatagtcaagggaataagttagtacactttttcgcttaaatgctctttttctttattaaaacgggcttgaatttatgactgattcatggatccatgatttatgttattggttatcttacagttttgctcaatagggctcaaatttttgagaaaatatttggagacgaattgatcatggatattattggttctcttgaatgtaagtatatcactatttgtttacagatatattatcagggactgttgggggannnnnnnnnnannnnnnnnnnnnaannnnnnacccnncannnnnnnaacannncnnnannnnnnncccacnnncnnnncnnnnnnnnnnnnnnnnnnnnnnnnnnnntntcnnnnnnnnnnnnnnnttatnnnatnnnntannnnnnnntcnnnnnnnnnnnannnnnnnnnnnnnctttnnnnnnnannnnnnntttctnnnnnnnnnnnnnnnntnncnnnnntnnnntttattncnnnntnnnnnnnnnntcttcnnnnnnnnnnntnnnntnnnnnnnnnntnncnnncnnnnnnnnnnnnnnnannnnannnnnnnnnnnnnnnnnnnnnnnnactatttnnnnnnnnnnnnnnnnnnnnnnnnnnnnnnnnntnnnnnnnnnnnnnnnnnnnnnnnnnnnnnnnnnnnnnnnncnnnnnnnnnnnnannnnnnnnnnntcaaannnnncnnnnnnnnnntttnnnnnnnnnnnnnnnnnnnttannnnnnnnnnnnnnncnnnnnnnnnnnnnnntaagnannnnnnnnnnnnnnnnnnannnnnnttaannnnntgnnnnnnannnnnnnntcnnnnnnctttatnnnnnannnnnnnnnncnnnnnnnttnnnnnntgatttannnnnntnnnnnnnntttannnnnnntataa

SEQ ID NO: 3315 - DNA, 592 bp, Gossypium hirsutum
atttacattttcagtatctaaattgatagtaatacattttaaaataaaagtttcaaaaattaacaatttaataaaatataaataaaataactactaaaacactttcaaacactctttaactttaatgaaatataaacttaaaaagtaataaaataactctctatcctagagttatcattttgctgtccttcatcctcacctattccttcgaaattcaccaaatccttagtcaaaaatttaccacttgcctcatctagtgttcttttcccttaaaaggagaataggattgcagagatggtgaagctaaggccaagttccaagttggaagggttctaatcgtgaagagtgagaaatgaggcgtcgaacgcgttgatatctaagttaaaggatttgatgttatattgcttgatgtttactttgagaaatgtggttgatttgtattatttattatttacctttttatgttgcagagaaatccgttgaaaaaggtgggggtagtaaagggaaagagaaagtattagattaaagagaagaaaataagtgctctcttgaattcctccctaccatggactttgcatgtttgactgtcatg

SEQ ID NO: 3316 - DNA, 620 bp, Gossypium hirsutum
gcatggatgctggattaaagtggtttgagctggaatgtgtatcttcggacaaggtttgttatgaataattatttgattctctattttaaatgatggttgttgtcatttggatgctttgatctttgaaggaatgtgaaggaaagcctaagatcaattatgttacggtgtttgagcgcccagggttgcaagatttcctaaatcaactaagtgaatttgctgagcttgtactatttactgctggccttgaaggtttgctgatatcaacacattgtttcattttcaacttactacccaattttcttcttatgtttctccccgccactatctcatgacttttaatggctgcccacaggctatgctagaccacttgttgacagaattgatgctgaaaaccggtttagtcttcgactctataggccttctacagttagcacgtaagtatgcttcctatgtgttctccttttataatcttccagcctactctctctgtgatttctagatggaaaatgacggaaccttttcatcttttgtgttacacatttcttgccttctgtattatactgaagttggttctttctatttcactgcctattatctgcgtgctcttctactaatccatg

SEQ ID NO: 3317 - DNA, 704 bp, Gossypium hirsutum
  misc_feature (613)..(624): n is a, c, g, or t
  misc_feature (626)..(628): n is a, c, g, or t
  misc_feature (631)..(631): n is a, c, g, or t
  misc_feature (633)..(636): n is a, c, g, or t
  misc_feature (639)..(641): n is a, c, g, or t
  misc_feature (643)..(647): n is a, c, g, or t
  misc_feature (655)..(658): n is a, c, g, or t
  misc_feature (663)..(676): n is a, c, g, or t
  misc_feature (682)..(686): n is a, c, g, or t
  misc_feature (693)..(695): n is a, c, g, or t
  misc_feature (697)..(697): n is a, c, g, or t
gcatattattagcatttatcctgtttgtaaggtggatatctatgttactatctcattgaaccagcttgctatcaatttaaacataactagactttgcctttaatgatttacagcatatagtatgcacttctgccgatggcagaacattgttagagtcatccaaggcggctcttgacaaaggaaaactagaggatgcggttaattatgggacaaaggtatttacttatagttcaaattcacatctatttatgtcctatattcggtgaatgagaagggatgcaatgttactaaataggacttccattggtctcattttatgttttacttgcttttgaaggcattagcaaagatgatagctgtatgtggtccttaccatcgaactactgcgagtgcttacagtcttcttgctgtggttctctaccatactggtgatttcaatcaggtatctgaacattctgctatttatcagcttaagatatgcgaaactgattcacttttagtctcctcttacagagatataaaagaaaaaggacagctaatgttctccgagtatcatttatacgttcctctactagtaccattgaaaagtaatctaaaccgtttcgtcttgtannnnnnnnnnnnannnaanannnngannnannnnngttaaaannnnttttnnnnnnnnnnnnnnaaaagnnnnnaaaaatnnnancccgaaa

SEQ ID NO: 3318 - DNA, 647 bp, Gossypium hirsutum
aaaaactaaacttttccattaaatttaataacaacttcattttcatttgaagaaacaattcagagtaatccatccagagaataataaaattaaaaattgagaagcttacctcaagaaggccactcatggctgagaaatcaaacggattgggtgggacaaacccaggtcccatattggaaggggaggctccagcctgagctggttgggaagcttctggtttcgaagttttgctgtcaatggtggatgtttctgatttcatacctttggtgtctgttgtcaaagccgatttctcatctaacaaagacaagagaaacataaagaacaagctacatatcaatttacaaacagccaaaccatgcgatatggggtttcatcaacattaaacgaaattagtactgaggtacagtacaattacaaggcctaaacttagcacttggaaggtacaatataattaaaaggcagcactgagattaactatgaaagattatatctttttttttaaaattcaaaaccagataaactcagtgctaaaagggaataactagaatgagctgaaagagtaaattcatctaacagccgattaagaaataaggaaaaggagctcgtattgatctccgaacaaattcaaatccaacaaaaaaagaaag

SEQ ID NO: 3319 - DNA, 623 bp, Gossypium hirsutum
cattagccattagctggttcatcattttataaggtgatcagtgattctagaacaccactagtactgtattaatagtatgattgtatgatttttctctcgaaagaaaacgtgcaatagtaataaattgttagaattttgttcaattcttgttaagacagcaacatatggcatatgccttcattgatctattggtaggcatgtcatttggttaaatgcatttactacgattatcaagatatatattaacgttcttggttcaaataattatagaacttacaatcttgcaactatttgggttgcccatgataaaaaatggttcatttggcccagtctggtctaagaaaataaggaaggaatctctgaaagtcttgtttgtgtttttgggtcacatgagtcgagtttgtcttcggtatctaattgatcgacatattaaagcctgtgggctacaaaaatatggtcttagaggcccacattttgtcatcatcttgatttgaaaaatatctttttaattagatgtgagtaaaatttaattcgattcaaaaaaataaaaaaaaattaatttcgagttaattgaatcaagttattcgagtaagctcgaataagaaatttaggatttcgagttc

SEQ ID NO: 3320 - DNA, 621 bp, Gossypium hirsutum
cgcaggcgggtaaacgtgagtatgatgaatttaaggtcaggataaatggtctttctgattcaattcgacgacgttctgatgccttcaatacaagggaggaggtaaagattttgaagcgatggagagaggacaatagtgatgaaccaatggaaactttgaagataccaaaagctacttggatggctgatagcacccactggcctggcacttggacagttcctgctccagagcattctaggggcgatcatgccagtatcatacaggtaagaattcaagaatagcttctcttcagttggcatgcatatgccagagcattctaggggtgatcatgccattatcaactgctcattattatttcctttttatcatttttaatataatcttaggttgcatttgtgttcccactgcttggggtgttctttgacctcatttgttgctatattacaaaagctgttgttaaataagtttgttaatcatttgtaatgatggtatgattatgtgaactaagatcctgaactttattaattgtaggtgatgttggaccctcctagtgctgtgcctcaaaatggtaccgaaagcgatggaaattctatggatctgagtgaggttgacattcgtctt

SEQ ID NO: 3321 - DNA, 650 bp, Gossypium hirsutum
tcctttttttcctttgtaatgattttcttgagttacaataatgcaacttcttgttttatattgagttataacgttgcaactaatttcaattgtatgaattttatggcagtttattttagagcaactctgcaacttgatctgcccatcaaaaccagaggcggtttatttgttggttctaaacaaagctcacacgcaggaagagtttattaggggatcaatgactaagaatccttattcaagtgctgagattggtccactaatgcgtgatgttaaaaataaaatttgccatcaattagatctgctaggtcttcttgaagatgactatggcatggaactcttagtagccgggaatataatctctcttgatttgagcattgcccaggtttatgagcaagtctggaagaagtcaaacagtcaatcttctaattctatggctaattcttcactgttatcctctggtgctgttacatcaactagagaatgctctcccatgatagtgacataccgacttcaggtttgttactgttttttctattcaatgccttgtctttcctcctttcatggttgagctatgtaggaatgcctttcactacttgtgctattttcttgcaatggtttttgcatatgggaatccttatatagggattggt

SEQ ID NO: 3322 - DNA, 614 bp, Gossypium hirsutum
tttacgaggaatctgatagaattagtgatttagacatagtcactttcaacttgaacagccgtaatccaacgccgaatacaggtgggatcattcaaatggctgcaactttatcattttcgacatccaagccagttcactattatacagagataagcattgccgtaccagtaagatcgattcccatgcagtttcttaacataagccaggacgagaagaaccataatgaagcacaaataacagggttttggactgatctttttaaagaagctgttgcagtgatgccaatcaataccacttataaattggttcctttctacggttctgatgatcaattgtttaaggcacttgttcgcagggttagtttgtgactttattccttatatttcctacaaattatcaagcatcagttgactgactgaaatttccaaatcctcttttatgtattgaagacttttgatgcagccattggcttaacagtaatgaccagaaaagggtccgagctcttagaattctcatatccatatttcgaagtaggcccgatgctagtgatgaaggaaaagcctgaaccgaaccaagttttttcattcatgatgcctttcaccaacgagatgtgg

SEQ ID NO: 3323 - DNA, 603 bp, Gossypium hirsutum
ttctactcgcccgtaccgacatgtcgtcgccaccattgtcattgcaccctttgccattgttctcgaaaggttgtaatgccaccttgcgattacgatttaaaccgcaatggctcctctatcacgaacgcgttcatatttcttcaactcccttaaccttattgttgctttccattcttttatgcaggaaaataaggccaaagatgaccctccctgtcttcctcaggattgtagctcttggtttcctagagtaatgctctaaattcccttccttttgtatcttcatgcaaataaatgcataatttcatgcatacatataataagtaattaaacattattgatgggatgtttcaggccagtgcttgaccaaaacttttactatctggggatgaagttaacaacagcaacatattcatcagcttttgtcaacatgcttcctgctgttaccttcatattggcaatgattttcaggtgagaaaaaacatgccattgcaccccacatcaaatagcttaaaattttccatcaagatattaaaggaatttatcggtcgaattcaggttagagaaggtcaatgtgaagaaaataagaagttagcaaagatcatg

SEQ ID NO: 3324 - DNA, 619 bp, Gossypium hirsutum
  misc_feature (602)..(602): n is a, c, g, or t
  misc_feature (604)..(605): n is a, c, g, or t
ataagaaaacttctcctcgaactcttgtaattagacttgtcaaattctgttctagacttgagacactaattcactctgtttgagcttcaatccgattcaatttcatttgatcataaaaggccaacactctaaaagcagacttaatcctcgaaattggaatcatacatggaagtagtaactctttggagagggtttttcactataagaagacaaagcatacaagatataacagtcttatatggtattgattggaaaggttgtcaaacggaacataacattaacaatgtggatttactatcagatgctgaaaggacccttaaattttccagaacttgaatgtcaatgcatgccttgttacaatacaagcttaagtgcatgcatatgcatgcgccggaggatcatgcagttcactagactaaagtcctgtaacacgtgatgcaatgatccgatcagaattaatgcacccagaacatgaaaagacaggtaaagattctaattcaggaagtttataaattttgttcttgatataagacatcattacctttcaaattatgaaaaacattaacaacacggcaataaaggtgtacctcacactccgagantnnaaacttttacaacc

SEQ ID NO: 3325 - DNA, 975 bp, Gossypium hirsutum
  misc_feature (553)..(564): n is a, c, g, or t
  misc_feature (566)..(576): n is a, c, g, or t
  misc_feature (578)..(580): n is a, c, g, or t
  misc_feature (582)..(585): n is a, c, g, or t
  misc_feature (591)..(596): n is a, c, g, or t
  misc_feature (606)..(622): n is a, c, g, or t
  misc_feature (625)..(625): n is a, c, g, or t
  misc_feature (628)..(633): n is a, c, g, or t
  misc_feature (635)..(635): n is a, c, g, or t
  misc_feature (637)..(652): n is a, c, g, or t
  misc_feature (654)..(655): n is a, c, g, or t
  misc_feature (658)..(663): n is a, c, g, or t
  misc_feature (665)..(666): n is a, c, g, or t
  misc_feature (670)..(674): n is a, c, g, or t
  misc_feature (676)..(678): n is a, c, g, or t
  misc_feature (681)..(683): n is a, c, g, or t
  misc_feature (691)..(693): n is a, c, g, or t
  misc_feature (695)..(707): n is a, c, g, or t
  misc_feature (709)..(711): n is a, c, g, or t
  misc_feature (723)..(725): n is a, c, g, or t
  misc_feature (733)..(733): n is a, c, g, or t
  misc_feature (750)..(754): n is a, c, g, or t
  misc_feature (758)..(760): n is a, c, g, or t
  misc_feature (762)..(764): n is a, c, g, or t
  misc_feature (766)..(768): n is a, c, g, or t
  misc_feature (771)..(774): n is a, c, g, or t
  misc_feature (778)..(780): n is a, c, g, or t
  misc_feature (790)..(790): n is a, c, g, or t
  misc_feature (801)..(808): n is a, c, g, or t
  misc_feature (815)..(821): n is a, c, g, or t
  misc_feature (828)..(833): n is a, c, g, or t
  misc_feature (845)..(847): n is a, c, g, or t
  misc_feature (855)..(856): n is a, c, g, or t
  misc_feature (867)..(878): n is a, c, g, or t
  misc_feature (881)..(886): n is a, c, g, or t
  misc_feature (888)..(892): n is a, c, g, or t
  misc_feature (895)..(903): n is a, c, g, or t
  misc_feature (906)..(907): n is a, c, g, or t
  misc_feature (916)..(917): n is a, c, g, or t
  misc_feature (927)..(932): n is a, c, g, or t
  misc_feature (935)..(937): n is a, c, g, or t
  misc_feature (947)..(947): n is a, c, g, or t
  misc_feature (949)..(952): n is a, c, g, or t
  misc_feature (956)..(957): n is a, c, g, or t
  misc_feature (959)..(961): n is a, c, g, or t
  misc_feature (963)..(969): n is a, c, g, or t
caagggctgcattcattaggtaaaaagacattttcacatcgcaacccagaagcatcccctcgttcaatcaccagttcagctgctacactctggggaaaaaattccaactctattaaaatttacttaatagagaatttccataaaaatgctgaatgagataagtaaatagaaagctatttatcacttaaagtggaattgttttacaaaaaataatatatttaaagtacccttttaagttttatctagaaccatccagactaatataaaatgttgcatgaaagaagttaaaatcatgaaataaatacttttcaaaattcagtatttacacttgccgaataatataaatatattcagcatttaattttcagtgacatacataaaattttaataatacaaattcagtatttttcttcagtttatcaaacgaaaacttggtaaatatatgattaacaaggagatgttaattgaactagagaaaattcattcctaacatcacttgaagaaggttacatggcatctcagaaaattggtagattaatttaggttgctggtnnnnnnnnnnnnannnnnnnnnnnannncnnnngtagtnnnnnntctgctggcnnnnnnnnnnnnnnnnngtnagnnnnnncnannnnnnnnnnnnnnnntnntannnnnnanntgcnnnnnannnatnnnaaattttnnngnnnnnnnnnnnnnannnggaaaaaaattnnnaatttgtnattatttaaaatttttnnnnntgtnnngnnnannntannnncgannnatattttatntttatccgggnnnnnnnnaaatccnnnnnnntttgaannnnnntttattttcgtnnnttttaacnntctttcaggcnnnnnnnnnnnnaannnnnnannnnngtnnnnnnnnnaannataaaaagnngtaatttttnnnnnnttnnnttttttttgnannnnaacnncnnntnnnnnnnaaaaaa

SEQ ID NO: 3326 - DNA, 632 bp, Gossypium hirsutum
atataccgttggactcggtcttgttgagacttgaattttagtgcatttgtaatgtgaactatagatgtagtgaaagaggagtatatagttatgatcaagctgatcggaaagtatgtttacgtaggactacaaagtatgtatgagagacattttagatgttcatctcatacatcatctatgatggttgttgctacttatgtttattggctgatacctttctggccttgttctatcttgctaagttgcttgcacatttgttcgattttcaccccccggtagaagtagtttgtgtactttaaattgtgttcagcttatagtgtccagtccgtggaggaactttgatactggtaaattgttgtcatctcattcagtttgtagaggttaataccttttttataagaaaacgtgggtgaacttggatattggtaatttgtcgtcatctcattcagttcgtagaggtataagaaaactttcaaatttaaaagaagggtagattatggagtttcttttgtggagcttgatactgatattgcttcatgatgttaggacgagacaggggtttataagaacctcttacaggaaatcgcgcagagagttggagctccattgcctcagtatacaacatttagatc

SEQ ID NO: 3327 - DNA, 635 bp, Gossypium hirsutum
  misc_feature (55)..(56): n is a, c, g, or t
  misc_feature (274)..(274): n is a, c, g, or t
tctgtccacacacacaaatgaggatatggcctccaagaatccttcaaatacatgnnaaaactttgaaaaactgattatacccatgtcggatatgcacccgagtctgagtaaacacagttcccttgcataaccaatttgaaattataccatttgagccatacaatccaaataccatgcaaaatagctaagagttttgtattttttttttcaatagcagctagtagctttatgggtgcttcattgccaaataaatctccaaagaagaaaagatcanccaatattaatgggaaagtgagtgctactgctactgttactgcaagtcctatgcaagaaattaaagagtatgaactcaagctcccttctttttggttaaagcataagtgggaaatatagaggaatttgcatgccaaagttatatgtacctctcactgtaaactcatcaacaggtatccgctcccttcgtgggcaatgttcgaactagggaaggctccggtatattggaaaaccatgaacggtcttcctccgacctctgtaagttcaccatttctagttttttatatgctgcttaagctactcttgtagtctgctttttttttctataaaaattgcctttttttttatgacaggaaaataat

SEQ ID NO: 3328 - DNA, 632 bp, Gossypium hirsutum
gtattccgacttggaggtatctatggccctggtagaaggtttgatagttttcataaccagtagtttgatgcttagaattactatttagtaaggaactcacatgttagcacgagtttattttatgaagatggtgatattaggtaaattttggcctttatagttcatgtatgattagctatgtaaattagctccacctttgtatgttaatgctattagcagatcatttttcaaaaaagaagttatcagcagatttgttctattttgttttgattcttatgttaatgctattagcagatcatttttcaaaaaagaagttatcagcagatttgttctattttgttttgattcttcattttccttaaagtatccatgtccagcacccatatctggcatataccgggcatcatgcatggggttgagaaattccaaaaattatttgcatacatggaaaaattggaaaaaattaaatatacccgtgatccacaccaaccgtgtttgagttactctaatactggtgaatgtcattattaatcattaatgaatttaaattgaacttttcatgtcataaatgttcattttagcttattgttgtgcacttcaagttctgcacacactttcacgaggcttatgag

SEQ ID NO: 3329 - DNA, 619 bp, Gossypium hirsutum
  misc_feature (15)..(15): n is a, c, g, or t
aatttttagccaacnaatattagggaataacttttaactgaagtttgtgttgggtcgatgttgttttcccttcttaattttccaacccaaaactaatacatttttgtttaaataatggaattgtgttgaagttcactcaatttggtttatcatgcctctatttggacacgtgtagctggattgcatacttcctgaatcttaccagcttttccccccccatagcaggtccaatgctttgtccaccataattggagtatacggtaattcatcaaagttcaaggttggtatttaatttttacttgtactgttctacaataaggttgttttcagatataataggttttgcagttgcagattggagttcgtcatttctcttcttcaggtatattccatctttacttcaaaaattttccctcttcccatatagggctatctagtttttaaatttttgacagcgtgcctctgagtggtttacttttcattgcattttttccatttcaaggaactgtaaagtagatatgatcttatgattggtatctgggtcataaaaaaaatgctaactagattagcctgactgtttagtctctttgtctatctattacaaaatcgacttatgtca

SEQ ID NO: 3330 - DNA, 387 bp, Gossypium hirsutum
tttgaggtttgatattcagagggataattttcaaattaaaaaaatctttaggggttaggagatttatgcttaatgcccataaattaccaataaattttgcttaattgaaagcttatttcattactatgagaaaaccaaaaacattggtaagaagtattgaatcattaaattaaaaaaaataataatacaatattttttactagatttaaaaaaaaaaagtccctaacttttgtagtttcttcattgacaaggggttatccattgaaagggcaaagctagcacccttttgcccaaaaaaaaaaaggaaatgaagcactcaaattcgggggttttacctggcatgtttgattccagcgatcaacaagggggtcgaaatacaagaacggg

SEQ ID NO: 3331 - DNA, 609 bp, Gossypium hirsutum
cttagagcaatatcatgaaaaattcttaaatggcaaaagcccaaaagcaaagcaattaccttaataggcagagaacaacaaccaattgaaactatacaatcaatttttgtatcaggccacaaaagttgtgcttctcttaaggaaaagacagttggattgtttgccactatagcaccatcttgccagcggtacacatctacacaaatggttaaataaaggttaaaaagcttagacattcttaaaaggtgtagttgatctaagcaaacagaagaaaaataccatcagagaagtcatcaagataatatggggcagcagaagatgctcttatagcttgccacacatggtgtttacaacttcccataaaagcactttgtttgtagccaatttgagaacctgtagttggagaccctagaatggcgattcctgaactttcagatattgcaagaggcacttcaggtgttcccacagggtactgcacagtagtaaaaaaaaggtgtgtaacaaatttatacagctaacaagattaccatatataagcaagaaaatacttgaacccaaaaagagttcatattatatgataaaaaaggaactcttgacctcagcctgatg

SEQ ID NO: 3332 - DNA, 636 bp, Gossypium hirsutum
atatctaccccaactgcaggccacaatataccagcaaaaagccttggatatcaatgagagagaactgggattagatcatcctgacacaatgaagagttatggagatcttgctgtcttctattacaggcttcagcatacagaacttgctcttaagtacgtttgtctgcattttatatatggacattttactgttttaattatagatgttgaagcagtgatcttcacacattctggtgggcctttaaatggatttcagtgtcaaaaattctaatttaatctgcttagctagatgtattttccttttcaaatcttactttttgaacctgatattattgttttcttttggacattgtaagttcctgaagaaatatcttgtaagatggtagtggcaatttcaagtcatatttgaaatctttccggttagcctcttgatcataacatctataagttattgttggatcagatatgtaaagcgtgctctgtatcttttacatcttacttgtgggccatctcatccaaataccgctgcaacatacataaatgtagccatgatggaagaaggactgggcaatgtgcatgttgcccttagatatcttcacaaagctttgaagtgtaaccaaaggttacttggtcctg

SEQ ID NO: 3333 - DNA, 582 bp, Gossypium hirsutum
ttttgactttggttcgatggattatattttacttattttactaaaaaatagataaattatcctatatatatttgaaaaagagtacaaattaatcaaggtaatatccaaagtggaattaatttttaatttgaaaaaaacataaaatccaaggtggtgtattgtgaagaaaaataaaaggtaaaagtactataaagacccttatattaagagccagattgtattttaccttttttacaaaaaaaaaagaaaaaaaaagaagataaattagtcccgttaaagaacaattggtcattttgttaaaaatttcatcaatttctagtattaagtattaatgtggctaacaacaaaaccagactgtgatatattacatgccacatatatctcatgatggcatgacaatacttttaaaaatttaaaaaatcttaaaaaaataaataatttttttacaactgtttttaaaagaccacatctatgatgaacacaaccatttgatcaagttcatcttgaacatgatttttcaaacaatgataaaaattataaaaatataaaaaaaatattaagaattataagaaattacaaaaa

SEQ ID NO: 3334 - DNA, 591 bp, Gossypium hirsutum
  misc_feature (56)..(56): n is a, c, g, or t
  misc_feature (549)..(549): n is a, c, g, or t
  misc_feature (569)..(570): n is a, c, g, or t
  misc_feature (576)..(579): n is a, c, g, or t
tttttctaccatgcaacacgacacaatatcctcggtaaaatttgtttccctaaatnaaaatcctttggtaaggggaaccttcctttcccctaaggtttcccgaatccccattccaagtgaaattttaaaaagttcctccgaaggcaagaaccttttttgttatttatcctgggtatgctcactctatcttgcacatgctcccaacaacaagaagggcaagggaacacaatcaactgctagcttaagcaaagggggtaccaaggctgctcaggaggggagtcatgcaaatcttcaggcatccgaaaatgaaaatggacgtggtcgctccaaagggacgtctgaaggtagtggctccaaagggacctctgaacgtaaagcaaggcgagtaggtggtaaaaatgcggggaaggaagctactaaaaagggaattggtgcaaaaaaaatgactcccgcaagtcgatcaaaaagaagtgcatcactcagttcagctggaattggccagcttggtcaatccaatgaggtgaagcactctggacataaggaaggggnaaccacgaaaccgtttggcnntcattnnnnttcaggatcttc

SEQ ID NO: 3335 - DNA, 449 bp, Gossypium hirsutum
  misc_feature (300)..(301): n is a, c, g, or t
  misc_feature (317)..(318): n is a, c, g, or t
  misc_feature (320)..(326): n is a, c, g, or t
  misc_feature (329)..(329): n is a, c, g, or t
  misc_feature (332)..(334): n is a, c, g, or t
  misc_feature (340)..(340): n is a, c, g, or t
  misc_feature (345)..(353): n is a, c, g, or t
  misc_feature (357)..(360): n is a, c, g, or t
  misc_feature (365)..(365): n is a, c, g, or t
  misc_feature (368)..(369): n is a, c, g, or t
  misc_feature (377)..(384): n is a, c, g, or t
  misc_feature (393)..(397): n is a, c, g, or t
  misc_feature (399)..(399): n is a, c, g, or t
  misc_feature (405)..(414): n is a, c, g, or t
  misc_feature (418)..(422): n is a, c, g, or t
  misc_feature (424)..(430): n is a, c, g, or t
  misc_feature (435)..(440): n is a, c, g, or t
ctccctgaagagcttcaaagctgtaggttttaattgttcaatgcctgcttgtttttattttaggtcttctgcattcattaatcgttctttatttttactttctacagttgaatgcaatgaatggaaagatgattggaaagaagcctctgtatgttgctgtcgctcaacgcaaagaagaaagaaaagctagattacaggtgatttaatctcatgtttctatttagcatagactcttgagatgttgtctttgtcttggcttgcctacttgtaattggacaagctattccaattccccaaganntggaaatggcaaatgnncnnnnnnntgnccnnnaaaacngttannnnnnnnnaaannnnatganatnntaggaggnnnnnnnncatttttannnnnanttttannnnnnnnnnattnnnnnannnnnnntctannnnnntgttttttg

SEQ ID NO: 3336 - DNA, 660 bp, Gossypium hirsutum
aaagaaggcggcactttcagccagtccaagaatataaatgtaaattacatatccagatatcacataactaagaacttattttaaattcaatgtatacccaagttttaggcatatatgactttgtctcatcccttttggtgacataaggcattctttttatttttgcttttactgtattaagtctttgtattactgttacattcttgatttgcctgcactttgggggttctactttttgaagttaagactgactttatgtgtctttccagtcaaggttccattggatgcatatatgatggactttgtattctctgagcgggaagatggtggaatgtttgacaacaaaggtggtatggattaccatatacctgtttttggaggaattgtgaaagagccacctatgcacattgtgcatattgctgttgagatggccccaattgcaaaggtatattttggacattaaggatgttgacacttagaaactttttcaatgcactgatttatcaaggtttttctagatattttatttttggcttacaaatccattcaaattctttctcataatgaagagaaaattctttatggtgacatgcccaagtgaaaagtgttctggaaatgagacaattagggggagaggatgctgcacctcttatacaacca

SEQ ID NO: 3337 - DNA, 966 bp, Gossypium hirsutum
  misc_feature (273)..(273): n is a, c, g, or t
  misc_feature (275)..(275): n is a, c, g, or t
ctcctcttcagcatcagtggtagggccaaccggtggcagcggcgaatccaacagcctcgccattgcacaacagcagttcaagcattcgcagcctgctactgcatctaatctttctgcggcagctacactgaacaggtgacagaattatcccctcaccattgcttccgtacttgtttgtaagctatagggaaggttctttcaacaggttgtttaataccctgttacttaaaaacttgccatttaatggattctaattccgttgatgattgtgtncncttcagcatcagtggtagggccagttggtggtagcggtgagcccaacatcctcaccagtgctcggcagaagtatgagaatttgcagcttggtggcacatctaatctttctgctgcagcttcactgaacaggtgatagaactatcctctacatatattcgtgttggagatatactatatccgagatagaagttagttattacataatattactttcgtattaatgaattctgttcttgcaggtcgattctgaataaggacactgtaggtgaaaaaatgccttatactgcagcaggactctccatgatatcccccaatggtgacttaaaatctaaagaaaaccctttcttgattccaaagcaaccaatctcatacgaagagaacttgagaaatgggtttggagttgtttcctctgactcacagttactattagggaaggttcttcctacagattgttcaataccctgtaacttaaaaacttgtcattaatggattctaattccattgatgattgctgatctttcaggttgcttctgagtaaagacacagtgggtgatactgcaccaggactcaccatgacatccctgatcggtgacttaaaatcaaaagaaaaccctttcttgatcccaaagcagcagagctcatatgaacatcactccagaactgagtttggagttgtttcctctgactcac

SEQ ID NO: 3338 - DNA, 638 bp, Gossypium hirsutum
tgtgttgggggttgacgacgatcgtccgactcatcaccatcaccatcaccatcattttctttctcttttctcactttgtctttgagaatcttaaagcgtatcatactgatcacaagtctgttattggttggctgagttttacattacggttgtttggttgttaatattttggtcaccttataatattatactcttaaatagtgtcaaaatgccttaacatagagtgtattcttattaaggtttattcattaaggtatcttagattacaagcataatcttaaacttttttaagtttagattattttacatttacgcaattttattacgaaatataattatttttttttataataatggaaacacaattcctgcttccctacatgggaataaatttctctttatggatccactagattagtgttcataagctaagaattattatatttaggaaactgtcagatgtgcttaattagttatttaacttttttttagttaattcgaatcaaataataattcttaaattaaccatttttatttctgaaaagaaaattgaagcttacactttcttgattattttcgctggcctggtccagtccattcatgaaaagctggaaagcctcacacaaggtttgtaactg

SEQ ID NO: 3339 - DNA, 612 bp, Gossypium hirsutum
gagacatgacaaagttgtattggcatcggacaatgatcttcaagtggccgtggagcatgcaaaatcagttggtttgaaggtatgattgaactctgattatctatatgtatatctgatagaacatttaacagtggaatttactttagaaatggctagcattatattgagtcttaattataggggaaaatgatatgaacctcgaacatttgtcatgaaacccgataacaataattggaaatcaatccttggatcgtccaaaaataggtttgaaagatttcggattattgatcctttccttatagccaggagattaaaattcacaaggtttccccattggaattgccggagttcacctaagatgaagacaagaaacttctatgtttaatttagtattcaaatttgattcattcttatttaaaataaaactagggtttcttctcaaaagcctttaagcgtaacttaataataacataagtccaattaaatgtttaattgaaaaaaaacaagataactaaaatgtcgattgtgggagtggagttcttattttgctccactgatcaattaaaatgttggtgctgctagagcaaagactggtccgctagagtgtgcttg

SEQ ID NO: 3340 - DNA, 235 bp, Gossypium hirsutum
  misc_feature (117)..(120): n is a, c, g, or t
  misc_feature (156)..(157): n is a, c, g, or t
  misc_feature (167)..(171): n is a, c, g, or t
  misc_feature (179)..(186): n is a, c, g, or t
  misc_feature (192)..(200): n is a, c, g, or t
  misc_feature (203)..(208): n is a, c, g, or t
  misc_feature (221)..(228): n is a, c, g, or t
  misc_feature (230)..(230): n is a, c, g, or t
  misc_feature (232)..(232): n is a, c, g, or t
cagtgtaaatgacattaaattaatactgcaacgacttttattcctcaagagagtatatcatgtctatgtgcatttcgaacttcaaagtttaaaaaaaaaaaaatattaaagaaaaannnngggaaatggggataaacccaaacccaaaaagggaanngtcccctttnnnnntatgcccnnnnnnnnttaagnnnnnnnnnaannnnnncgttgtctgcgcnnnnnnnnangngaa

SEQ ID NO: 3341 - DNA, 616 bp, Gossypium hirsutum
tgtgtcttgcacttaagaaagaaatctgcaatattactgttctgcaacatatggtaagaaaaaacaaaaaaacatgaaattggtatattttctgctgcaaattagcttagaggaatggtcaaagacattcaaatgaatgcaaaaaagggaaaatttacaaaaaaaaaatccccaaaaaacagctaaaagagacgtttataaatatttcacttattaaaagctaattaatagaaaaaactcaaaaaacagatagcttttttccataaaaactgtcaagctttcctctctgtgcaccatttggaaagtttccaggaccaaaccggactctatatttcttcagaattaccatatctgccactttccctttcactctttcacatatactcttactgttcccaataaacccttaatcttcaactttttaagtttaacccttccaaaaaactgctttctcctctttctactccaaacccaaatctttttccctgttttctcgagaaccccattagttttttccgggaaaagatttgatttcttatccgggaaagttagccaaacaggggaatggagggggaaggtgccataccggaccatctccggtgcaatcgaacagacg

SEQ ID NO: 3342 - DNA, 641 bp, Gossypium hirsutum
gctgactgctaaggatttcctcaagccaacttttgcgccatgaacgggcaaccattaaaggactccaccttgaagaaacaatttaaaaacaaggatagatcacatctgattattcatcaagacagggtttacaaaacaaatagcaacaaatagaaaaggttatgtcaatgaatttcatgatgaaacaaaaataatatgatatccaggcatcttacttagtatataataaaggttaactttataacaggatttctgctattgattgaccacagttgtgcctgaactaccatttcttcaccaaaatatatgaaaattttctaccatgccataagtgatatgatgtagtcataagatgatagggttaaccattgaaatgtcacaaagtaaatccttttagtcatattaaatatggcatgaagcgttcctttctaatgaattgtagctttacccaaaatatgaaaaatggtgaccacataaaatatgcatccatcaggagcaattttaacaatgaaacatgtttaaaaggaacaagcattatcacacaagatgaagcatggatccttttcctccttaatcagaatgaatctttcctcaatatagcaatggaacaaaaccccaccacatggataagtttgacaggc

SEQ ID NO: 3343 - DNA, 585 bp, Gossypium hirsutum
  misc_feature (80)..(80): n is a, c, g, or t
  misc_feature (257)..(257): n is a, c, g, or t
  misc_feature (275)..(275): n is a, c, g, or t
aagcaaaaactttaacttctatatcagtccttaaagcacagattaatccaacgaaccattcatccaatacatgcattgtncaattaatgggtcatgactacattaaccagaaacagcaaagtggaaaaggtcacttgagagaaactaacattcaatcagataaaagttaatgacaaaaatgcagtaaacaaacccaaccaaatacaatatgctccataaggtatacgaacaaattagtcggtgctaccacctttaanagatgccaaatgtggtcnatgatgaatgatggttaaaatttacaaaaataatactctgtgtcaattaaaatgacacaattgatattttgaggtcaaaccttttaaactttgactcaattattttcaatattttaattaattaaattttacaattaagtatagttaaaaactacttcattgaaatttgttctttcaaagttctatcaataataaattttaaaaaaataagatatcaaagttgcaaaattttgaccactcaaaaagtcaaaatgtaacaaatttagtgggacggagggaataactactataagaaagcccaaagggatct

SEQ ID NO: 3344 - DNA, 650 bp, Gossypium hirsutum
tatccttttaaaattcaaaataccttaaaaaacgataaatatcatcttctacatgcatgcagatagacaaaagtcggaggaggtagcagttattcggtatccgattctcaaaacagcatcttcatccactatgtagaccatggcgcgccttcttaaatacagcaaatgtataagctctacacctgcctttggattctttggtataggagatgtacacatttcagatccttcatgtttgcctgacaggattgatctattgcttaaaagagactcgaggcctatctacttggattctgactcaaatttaaacactacagtaaattatatttttatcaggataattattgtaaatccttagcagtcggtacatgagaattaatttcaacgatttatataatccaatcagtacggttggatctgggtagctcaattataaatacagcccttacatttttttagttaagaaaattttaaaaatatttactcaaacacttggtgcgatttgttagattaaagttttagctctataaatgctaacaacggagactgaaaatattaaagaaaaagatgatatggtgtgaccaagagtaagcagagcaataataataaagttataggtaattttgtaaggtctaaggacgtgaagtgca

SEQ ID NO: 3345 - DNA, 629 bp, Gossypium hirsutum
tattaaaatatataaagaaaaaaactacgcaaaatgagccgcagcatatcctaaggttcttacttatccatgaatgaagcagcaagtacttctcgacagatatcaaattaacttagagcctgtcacaatttgaagaaaaaaggcagtgatagcatagcttcagatttctttttcaccatattccttttgaaattttggcttactactgggaaagcatgtcttaagcgtttgtttaatcattagctaaaagccagggcatggtttccacaccaattatttttatctcagtaggctagtgtgcttaattctctgtaaatgtatccttgcttcaaatgttactgtatcatcttagtgaacaatgcaactcatgtgctcctgttaaattaatttgtaccaaaaaactaaacagaagtaaatgaaaagtgaattaagatggaatgacccatcctaatgttgacatattgtgaactagacaaacactggtttgaattacatgaaatctcaatacttcctaaaagcaatgttctgatgaaaagaggaaaacaaattcatgcacacacacacacgcgcgcgcgcgtgcacacatacacacataaatatcatccaaaatcattcaagctttaggtgac

SEQ ID NO: 3346 - DNA, 730 bp, Gossypium hirsutum
  misc_feature (81)..(81): n is a, c, g, or t
  misc_feature (403)..(403): n is a, c, g, or t
  misc_feature (422)..(422): n is a, c, g, or t
  misc_feature (618)..(618): n is a, c, g, or t
aaatccagctttgcacgaaagtacattatgtggatgtgatgtctaaatgtaggtattaaaatatataaagaaaaaaactangcaaaatgagccgcagcatatcctaaggttcttacttatccatgaatgaagcagcaagtacttctcgacagatatcaaattaacttagagcctgtcacaatttgaagaaaaaaggcagtgatagcatagcttcagatttctttttcaccatattccttttgaaattttggcttactactgggaaagcatgtcttaagcgtttgtttaatcattagctaaaagccagggcatggtttccacaccaattatttttatctcagtaggctagtgtgcttaattctctgtaaatgtatccttgcttcaaatgttactgtatcatctnagtgaacaatgcaactcangtgctcctgttaaattaatttgtaccaaaaaactaaacagaagtaaatgaaaagtgaattaagatggaatgacccatcctaatgttgacatattgtgaactagacaaacactggtttgaattacatgaaatctcaatacttcctaaaagcaatgttctgatgaaaagaggaaaacaaattcatgcacacacacacncgcgcgcgcgcgtgcacacatacacacataaatatcatccaaaatcattcaagctttaggtgacatactgggtggggtttcagcatttgaatggaggaagcccctactagta

SEQ ID NO: 3347 - DNA, 590 bp, Gossypium hirsutum
  misc_feature (581)..(586): n is a, c, g, or t
ttttcagtagtacaggtggcaaactcatctatgcagtcagcgtttttgggatctcagtcaactcaagcagccaaaaaagatgctttctctacagaatcaaatgctcctcctatggttagcattggggagaaagttgcaccagtgcagttagatgctgctgttaccacatttggctttgcctctagaaatgttggtgaggttttaactattactggatcttcaggtgttaagcttgccaaaagttcagaccaagaactagatttctcaagcaggttggtgtatatctgttaatcaacttctcttgtttggaaggctttttacttgggtcttctcttcccctttctttctttctttctttctttctttctatacctccaatgtaggattgtttataggattactaatagtgggtcaaatgtcttagactattggttagttgattggaaagggagttaaagaattccctaccatgttcgggtttcttataacaggatgggaggggatttaggggtgaatctaacccttgcctgtagaatcactgatagtggggtgaatggtgtagattagtggttagttgatgnnnnnnggag

SEQ ID NO: 3348 - DNA, 659 bp, Gossypium hirsutum
aatcatttgaaattttcaattaaatttgtattttttcaaatcatgtaacagtctccccccccccctttttcctttttctttttccaggttatccaagggttttgcttttgtcaaattgacatctaaacaggatgcagaaaatgtattacttctggattatccttttgtcttagatgtgaagtgttagagattttttctgctatctgtttgaacattattttccattttcaggccattcaaaagttcaatgggaagaccttatgtaaaagacccatagctgttgattgggctgttccgaagaaactttatggtgctggtggtaatactgctgttacttcggatgatggtttgtgtccttaactgaaatttgtctattcatcaaggatttttactatcttgtttcttctgagccattggctgtttcactgagagctgaatgagtgatcttaaccttgtggatcaatcatacatatcaattatcagaaaaaaggggtctatatttcttgtgtttgtagaagtagagaagataaacacatgagattagaggactattttaggaagttaattgcatacacgataagtttcttctgccatgcatgcttttctaaacgattgttattttttactttctgattggtcatcaaaactctgcttgaaca

SEQ ID NO: 3349 - DNA, 637 bp, Gossypium hirsutum
cccttgttcaaccttttctcggacaaaaaacaaatctaattcaacgtgtttgaaccttgaatacatcaccggattcccagcaactgccacagcagccaagctatcacaccataccaacgctttgcctttaagtgtgactcctaactcagataaaagtgactgaatccaaatcatttcagtgatgacatgagcaagacttcgatattctgcctcggctatagagcgagagacaacctgctgctttttcgaaccccaggaaatcagatttcctccaagaaaaacacagtaaccagacgtggaacgtcggtcatcgctgtcatctccccggcttgcatcagagaacccttcgagaagaagtattggacacctaatcaacttgataccatggtccaaggtgcctttcaaataccgtaagatccgtttaacagctttaaaatgttgttatgttggtttatgcatgtattgacatactttattaaccgataatgctatgtccggccttgttatgacgacatattgcaatacgccaactaaacttctgtatagatgagtatcttcaatgggattacttccagtagctgtcaaacggcaagtcgttgtcataggcgtcggtgaaccatttgatctatccatggac

SEQ ID NO: 3350 - DNA, 620 bp, Gossypium hirsutum
tttattctgtgggatgtgtttgagtgaggtgataacacgtcctttactatttcgagaagttcccaagtttccgatggcactaatgttgttcccagctccggcaacgtctcgaggtggcagcttcccccggttttccaatcccctcctctgcaaaagtcatacgaaattgcgccgtgaacttcacggtcgatttttgacctcaaatgttcgattctttaaaacaaggatgcaaaataaataaaactgacaaacctgaaatgtacgggagcgaaagtgcggaagtagaccttggtcttactcatattcacctcgttgcgtagccactgcatcacagtctccaaagacctttgatacgcatgttctatggtcatctcggtttcaattttttccccgacttgaaagtaacatcccctgacacaaacaaatgagaagtttttaatatagattaattagttccttccacctacatcaaccatacattaacatatgattactacaagcacctcagtttctattcacgatcgggccttctccgtcataccattcctccttttcatgtatggtataagaaacaaaatccaaaccaacatacattgaactaatatgcaacccaaatcaac

SEQ ID NO: 3351 - DNA, 642 bp, Gossypium hirsutum
cggttcagtcacaatgcttccaggggcactgtgagctttccttctttgttctttccttctttctgcttcaatcatagtgcgtctaaggttggctgccttataaactggtcttggcaagtgcctgtgcctgcataatcataaccaatacaggagcattaagaactcactacaaaatcactactaattctcttgtgcccaagttcatttatctaagttgataaaatagggcttaacatataaatttcctagtgcatagtttttaaaatccttaaaatgtccaccctagggaaactccctaaaaaaaggtagggaaatatgggtattttattgacattgccagaagtttataaacgtgaaccaagtctcttcagtttcaatttacctcacaatacgcttaacttcaggcagatgcttgtaacgattcttaacagcttcaagatactcatgtttctttctttcccttggaagtacctgcataaggcagaagaatggatgagatatttaagtgagagatagaataagagaaattacttttcaggcagaagaatggtgttcgttggttaagtggaaaaagtaaaaggctagaaggaagcagtgaaaagaaaataatttttgagtgtgcttggtaggaaggaaagtgag

SEQ ID NO: 3352 - DNA, 567 bp, Gossypium hirsutum
  misc_feature (65)..(65): n is a, c, g, or t
gaaacaaattggggtaaggaaagcatattgatatgcacaatgaaaggctttcaagacttgatctncatcctaattgatccgaacctacgctttgaactgttgatgccagcggcggaggaggaagccggtggaatgaagatttccgagtacatttccatgaagaacctgtcaacaatagaaaggtaagccggacttttaagcctggaataataatggagtgcttcttctacatccaatacatgctccatgtctccaacattcatcatctccaattccttcatcttttttgctaatgcataacttcctcctccgtttctcttgatataaaactgctcctctcctttactcaattgtgaacttcccactttatttttctcctcttttcctccattatgctttttgatcttcattggactcttatctacaaagctcatgctcatttgcgctttcaataatgtgatggcatcattgtttctcatctttgcctctaaaccaacttcccagttctcaaaaaaagggggggtttggatagcttttttggtatccaacaaagaagaaagattaagg

SEQ ID NO: 3353 - DNA, 480 bp, Gossypium hirsutum
ttctattctattttgtttacttttctcattaccataataaactagttaattgaagttgcattcctatttcaccttaaaatttcatccaattactattttggttttaaaagaatatttatgatcacaattctgatagtaatttatgatcttatacataatttaacttgaaagttacctcaatttcatttgaatcaattttaaaaaaataagaatgttaaataagtaaagggtaaatgtaatttagaatgaatagcaaataataatttcaacattctattttaacactaatttttttttatttttaaccaacttataattctttaaattgaaaataaatcaaataaaaaataggctaacaacttacatttaaattgatcaaactcgaaattatctaaatttaaaataattaaatttaaaatgaactcaaatctcaaatgaaaaatattgatctaaaaaaattatgacaactacgaactcatc

SEQ ID NO: 3354 - DNA, 593 bp, Gossypium hirsutum
  misc_feature (376)..(376): n is a, c, g, or t
  misc_feature (583)..(583): n is a, c, g, or t
  misc_feature (585)..(585): n is a, c, g, or t
aaaaaaccaatctgagtcatatattttgacttctaatatgttgaacagccttcaactgccttaatgtgaacataagtttggttatgtctaaaaatcacaattgctgactcattggactttatcattacaaacaacagatgccgttctattcttacaaaaatattaattccaagcttaatatgtatcgtcaaatataggtaagacatccaattcactatacggttcctatcaagcatcacaatcatgtgacacatcatttcccaagcaaagtaaacaaaaatctgagagatggatacgcagcagcttgttatcaaatccaccaggggctttggaaatataagcacatcagaatttaaatttgcatatggtgtgaccnaaaggaaggtgaacataggtaactaataatgtaatatccaggagagaattcaacagaagccacttactgaggtatagcaagccttctcgagtgctgaaggctttccaaaatgaaccgtccgagttatatcagttgttccatctagatactttatcagttaaggattaagaatcagaactcagaatctagaataaaaaaatatcggcntngtacttat

SEQ ID NO: 3355 - DNA, 627 bp, Gossypium hirsutum
  misc_feature (59)..(60): n is a, c, g, or t
tgaacctgcatgttcttgtgatatgatctttggaaagacttttttgaatctattggcanntactttcataactagtttatagagaactgagcagagactgatgagtttaaactgggaaatctcctcaggataggcgagttttgggatgagtactataagtgtattgtttaatttaggctctatgggttttcctttgaagacccctttgacccattcacagactgcacttccaatattgtcccactgtttttggaaaaagagagcgtggaacctatcgctccctggagcttttaaaagagccatgttgaagagtgtcgttttgatttcttcatgtgacacatcttttcctagaaaatctatgtctgcttgagccaattagagaaaatggttgggtggtaaaacactgctcctacttgagttttcttcataaagcttttggaagaaacgtattgcttcaatttgaacctcatttggctcataaagccaatccccgtttgcattacgtaaagcattaatgcagttaatctttcgtctatgtagagttcgtccatggaagaattttgtatttctatctcccaatttaagccagtcgcatcttgatttttgcttccagagtagctcctcatg

SEQ ID NO: 3356 - DNA, 622 bp, Gossypium hirsutum
ctgcaattatggccattacctagaaaaaaacacattggacattttaaatgatagaaaataatattgttaatatgcattatgcagccacaatttatgatgctaaaaataatgcaaatttttgaaagaaacctagttgcttcctcataatattaatttctctagataaaaatttcactcacaaaggtgtatctatagttaatttattctacagctcaaatacaaaaagtagacagataataacaagtgctaaaacctgatatactacacttggcagcatctgagttctcaagatttctctgacaaaatctaactctaattcaatcttgctatttttccccttgataactaaacaaaactccatctctcatttgtctcaaatgatcgttttatcagcctagtagaagacgagcttgcaagcccacaaaaagatatggtttagtattaaaagcttggttagattaccaggagaacatgcgtgtataaacgagtcacatatttgattaaactccgtaataaccattaatcttgaactatagacttctttaccaccatatgttatgattcaaactcttcgttatgattcaaactcttcgttggatgggctagagcatttgaaacattc

SEQ ID NO: 3357 - DNA, 620 bp, Gossypium hirsutum
tcagccagatttcaaatttcttgaggtgaggttgcatttgtttttttattttgcctgttgcccctcatcgcccttttcacttttagttatttagaagagatggtcttgaggttatcatttcagttagaacctcagtggaaagggtcttttgtcttcggaatatctagctgataaccaagctaatcaatcattagtgttcacttcattgctactgaaaatgtaacatgtgctgcatttgtgtacgggaaaagaggggagcaaagtatcatagactgggatgcttttgaaagtgagaaagcccataggaaatgcatggccccttagtgcccttaaaataacctcctcctttaagcttaagatgtgctgctgcacaagtttactcgtttgtgagtatgtgtatgtttaggattcttataactgaatttcagcttcttatgtgaatatgcacatgttgcgagcttgctatgtttctattatgcataaaatgggataattattttattctagattgtgttggtacatattgtgatatacatcccaaacactatactgattctaggtatttcactaggttgcctatccatatgtggcaaagcgcttgctgacagatcctaatcagt

SEQ ID NO: 3358 - DNA, 581 bp, Gossypium hirsutum
gtgtatttcagtctctttatatacagcaagtacaaacaagaaattagtcctaatgaggattctggttttacagcaattccattctactatgattttgtagttgactcgggtgattctgactttattggtattagtgttgtccttggggaggaattagcgacagatatatatgcttacctgagtggactcgagatcatggagtttatcaaagaaccaggcttggaactagaaataaggcaaccaaaagagaagcgtgcaatatttatcataaccggttcagtcgttgggtttcttgttatctgtggcttgttggtgttctccttgttgtgcaagacttcgtatggtgtccgtacccttcgttttctaagaatgagctcttatcttggaacaggcacaagatctgtcaatccccctcagttaaagatgtcttttgctgaaatagtagtggcaacaaaaaacttcgaggccaaattgctgattgggaaaagaggcttcggtaaggtttatagaggaactctacggaatggtctcaaagtggcaatgaaaagaagcgagtcaaaacatggtcagggccttccaga

SEQ ID NO: 3359 - DNA, 596 bp, Gossypium hirsutum
actgaattcgccaatcgtcccaagttccttaaagagattagtctgcctgcaaatttaaagtcacacaactgcaatccgaactgtgtttatttgtgatgaaataatatagtaccttccacttgtatgtatctctacagcatcaacatcattcgttttaaggagttcggctgtagccatagcatctcttacatacgtaatctctcctgaatcagtttaaagtaaagattaggcttaagaaattgataaaaacatgaagaaaaacatgtgccagggtccaagaatggccgtagattgtaaagagtttgagtttcagaggaataaaggctaatgcaagcaagaaagtagcaatgcttactgattttatcataagggcaaactggaaaacaacggccgcagccatagcagcgttctgttatcactccgccctgcatctcaaaacgaacctaaatcataaattctaattcccgatgatctaggatctgaaaactgaatcatgagtaatgaggaaaacatagaccttggcttttgattttagatcaaagcagattgcaatgtcgattgttcactcttccctgacatatgatttgcaggatgca

SEQ ID NO: 3360 - DNA, 642 bp, Gossypium hirsutum
attacttacgtactaattatgatatttaaataaacagacaaaatagatgaatgaatgaagatgatgatttgtaagtaaggccaatatcaagtgatgaagcttaaggagatgtgcccctgttcctctttccctctctgaactatcaagggtacttatatttgtacgtatctgcctgccctcccgatttgcttttagtttcccatgcaagtatatattatatgtttcttcttgtcttgatagcagaaggcagtggatatatatgcccataaatgagtgtgattgggactgtatctgggagtgagaccgaccgacttctgaaggagaccggaatgagatgctaaaaatatctgggaagtccttgtgttattcgaactgtatcaaattagtctttatattattaaaaagaatcaaataaggtcaaattgaaatgaaatcaacatttaccatataaaaaaaatcatttagtactgtttaaaagagttaatatatatttaaagtatttatggttttgtaaatgaaatcttttgtttagaattagaaaaattaatatttgagatatttttttatacaccaaatgttaactctgtttataatttggacttatttgattcagatcgtataatacaaggacttccaaggcac

SEQ ID NO: 3361 - DNA, 542 bp, Gossypium hirsutum
cgctcactggtggctatcaaggtgagcctctcttgaaattgcttaactaatttcaaatttcctcaaacttcaattctttcgcctggcagaatcttgaagcacttctagtttcacctttgtatttgccttctttttctctcttattattgatatgcttaaactccgcctgtgcttgcattgccggtcccaagcccgggtaaaggaggagggttgcagtagggctgtgacaaccagtgtaaaatcctatctcatcttttgacatggacagatactccaaatgtattgggattaaggcttgttggtttggttctattaaattacagttatagactcacatttcttgtggccagattttaaaatttacttctgtaaagagttcagttccaccaatttttttcatttttgaaccaatcaaattcctgctgattaggagtagctcacttttcatgcaatgaattatgataatcagagattaatactgggataaaactagaaattagttttttgcatccaggttgccttttttagccctttttagatag

SEQ ID NO: 3362 - DNA, 630 bp, Gossypium hirsutum
gcatatgtgaagtgggatacaaggactcatctgttctgcgcttcttcaccactgtgactgggtatctggagaaaggaaagctggctgatatagagggtatgaagacaaaggtgatgatatgggtaaaagtaaccagtatcacttgtgaaggatcgaagatctatgtcacagccggaatgaagaaaagcaggaatagagaggcgtacgaggtttccagggatggagtaagtgtagataagttttaaagtggttaggatgccttggagatcctatttcttttaacttttaactctgaaccttcatacttttgtgtccataataagttttaggattcaagtgcaaagactggttaactttatggtttctactgtgataaggcttttactctgttctactatgttgaaggtgtctggccaaatatatatatatgtatataatgaaggtggcaatgcatgaaccttgtgtattaagatattataaattgtatggaaggtgctttagaggatctgcaagttctctgtttttaacaagtctttggtgttatcgaccaatgccatggcactgatagattagaatttattttgacatttatgagctatggcgcaagctttgtaatcaaatctgtacagg

SEQ ID NO: 3363 - DNA, 597 bp, Gossypium hirsutum
  misc_feature (590)..(590): n is a, c, g, or t
gaaatttcttcctctatccaagaaatgcaattgtaatgtaattgactattgctccttgtatatccgacttcagaatgaaatggatggtgtaagtcctagtcatcactaaattatttcaagcttatttgtcagtcaagacttttactagtaaatggaacagggtacacaaacagccaagttacacaaacaactagcacatgagtgtgtgggcgagataccaaccaaccatgatcaggtatgtaatgtggacaggatgtctaaagctagccattgttggagggaatcttttcctcccaaaagcaattccctttaaatatagctcatgaaatataacaggtgaactactcaacacggcatgatggttgctcggaaaaattagagtacttgttgccctatgtgcttggactcaggtgtacaagtatgtactcgacacaagtaaggttagtcttttctaagtttttccatgtatttggaggattcttggagttcgtctatattcatgtgtcggacacaggtacttgaaaaaaagtgaagagttcgagtaacatagcttgtacctaaattgtacttcttttagatagcctcagatnccggaat

SEQ ID NO: 3364 - DNA, 594 bp, Gossypium hirsutum
  misc_feature (547)..(548): n is a, c, g, or t
  misc_feature (550)..(550): n is a, c, g, or t
  misc_feature (552)..(552): n is a, c, g, or t
gtttttttgcaacataaaattaaaaaaaaaaggagaaattattgctggacgtttgtcatacttttactgtaagaagtaagaacccactatttcgcatgcatacgcctctcttttatcattctctttaaaacgcacacacaacaacgaaactcttacctgcttaagcttcacttttctttagtttgctcgtctttttgggttctaccttttctctcttttgcaaagttttgcagggctgaaaaaaactgaatggaaaatagattggcacagttaaatcgatctaaataacgagagcccactaacagaaaagtattaagtcccaaacatcagagtgagagagtgagagagagagagagagagagagtagtgaaagctttatctttttaatatttgattttacttgagagtgatgatggttttggaagtagcaaacatttataccatatttgcctgaaactctcagactttagataggtactacttcttttgcagtaaaagaagggggaaaaaacaaatggcggagcagtttttcgtgcctgctcttgannangngctttgcatgcgagttattatgatgggtatcgagtcttgtcc

SEQ ID NO: 3365 - DNA, 559 bp, Gossypium hirsutum
aacagtctagattttggaatattaagttcctccatcagatagccttcagtaaaagatcctacctggaagcctattcgttcattgctaccaattaaggtatcaatccctttgatgggtgatgataactgttgcactgtgaggaatgatgtcaggcttgcagtatagcttgagttgatgatcaaaaccacaaaaagccagataatcagtactaggcgtccaagtgagctcactgtgttttctcctgaaaaaagttcaaaatatccagagttggtatgatgggtgattctgagtactaaactatttggtaaaagcaactgacattgccaagatggaaagaacttactatgggaaaaaaacatcgtagagaagctgaacctgcaaggggaaaaatagagcatggcaggtaaggggtctgaagggaaatgaattggttatcggtcaaatggaaagatacagaaagcatgttttgcatttaattgtctatctattgaatttgcacctattatttctcacaataaagatgaaagcatagatatattgtacatgtgctgcatgttca

SEQ ID NO: 3366 - DNA, 537 bp, Gossypium hirsutum
gttttaatttttttggggtccttgatccgtgaaatctgttcacttcaatattcgaaaaagtttggataaaaatattagacttgaattaaaatatgagctatacttaagctccattatttaacactcaagcttgacctagttcaatctgttctcgattttaacaatcggttaaactctactattagtctttgtactttttgtgaaagttgtgaattttgtccttttactttaaattgatcaattttagtctctttacttttaaaattttagtcttgacccaaacaataacagttaaatttgtttagttagattcaattactagtcaagtactatgcatacagtagtagcgttaatcaatattctccaattaaattattctatggctctatactttttcaaaatttagaattttagtcttgagacatgataggatcattaattcattaaccgaatttttagtgagtagtgtgtggaaataataagctgatatagtattatatatatatgataatatgtttgccgcatcagatatttgaa

SEQ ID NO: 3367 - DNA, 617 bp, Gossypium hirsutum
tgatcagcaaacttgttgaagacagtagaggatcctgaagtttcaagaaggtattggtctttttataagattcaacccccccaccaaaatatatattggggttaaaatataagataagtccatgtactcttaaaaaatttgatccatctttgtctctcattgtgatggacattaaaggctttttgctatgcaacaataagctccagttgcaggctttttggcatatgtagaattatctcggcactcacaaatgcttttgcttgccaaggatgtttctggtctacttagatgaacaatgcttatttgtttttttttgttttcttttaactataaatgataagaatggagtcttaatgacaattattatcaatgttcttttactcagtttctagtgctgcaagtgtgagctaagaagaaaagctatttttttttcttgtttgtaaaattgctaaaacgtgtgtgcttatgatagtactttgtcccagcactgttcatttaaggaaaagcttcattaaatcttgattcagctggataagataaaaccgtgttcataaaattttgacaaatttatctattttgtagtgttattttgcactgtagtctattgtctaacacaa

SEQ ID NO: 3368 - DNA, 652 bp, Gossypium hirsutum
  misc_feature (12)..(12): n is a, c, g, or t
tcgatttttccnttttgaactggtttttatcatatcttctctcttagatgttttattttaactagaagttggtcttgtagggtgttctagaggcaatcagaatcagtatggccggatatccaactcgcaaacctttctttgaattcattaaccgattcgggctgcttcatcctgaggctttggaaggaaagtaagttgagctcttttagtttaaattcatgattaacttccatgaaaatggtaaaattccgtttgacaaaagagattggagctatgaatttattgctgcactctactggttacagctgaaaactaatgtcaatgctcttctccttgatttcatctgtaatcagctatgatgaaaaggttgcatgccagaagattctggaaaaggccggacttctagggtatcaagtaatacaacaattttaatgcaactgttggaactgttatattgtttgacctatgtcctttttcttcttctctatacatgctttaggactaaaaagttgcatacattagtactttataattgtaatattgtactgaggaagcatagttaagtgatctcaaaatggtttttgcagataggcctaacaaagatctttctgagagctggtcagatggcagaattagatgcaagggagagcag

SEQ ID NO: 3369 - DNA, 632 bp, Gossypium hirsutum
gggtatccaatttttgccattgcaatctgcatttttgttagttttagcttcgctgccatgtatgggattgcagttgctgcccttggaatgttaagcaccattgcaactgggttggccattgatgcttatggtcccatcagtgacaatgctggaggcattgctgagatggctggcatgagccatcacattcgcgagagaactgatgcactagatgctgctggaaacactacagctgccattggaaaggtgcggaatttaattcttttcctagagaccgttgttaggacactgtagttactttaatcacagtatagcataaatgatgcatggaaaagctgtaactctgctattattttgtttctgcttcctgaaacttgtgtgaatttgatctctttacgaaacccccaaaattgatttgaatctttgatttccattcggtaacctatctaaaacactttgagctactgtctattatactgcgctgtggtcgtttatatatggcattcttattttctgagttaattatcttttttacaatgccaaagttctcttttttattcttttcaggctgaaattcctaattatggattgcatatgtgatatacaattctctatatgtttccagggatttg

SEQ ID NO: 3370 - DNA, 611 bp, Gossypium hirsutum
  misc_feature (486)..(488): n is a, c, g, or t
  misc_feature (579)..(581): n is a, c, g, or t
  misc_feature (597)..(599): n is a, c, g, or t
  misc_feature (601)..(606): n is a, c, g, or t
aatgttttatgcgaattcttctttcttttgcgccttttggaattggtttgtagatgtcatggcaagttggagaaatttaacgactgctctaaatggtcactttgagggcgggccttcacttttctcaaggcaggcaacattttgctatttacattttgtttattatacggggaaatttttttatgaggaatgattagatatatagacatttaggtgccttgtattaactgttttcaatttttttcttcatttcctgcgctgttagtgaagttttaggatggtagtaatacatcccctccccctcttaacatggctatctaatctgcttttcaacttctgtcacctctatatatttctccctttcttttcttgtctctttggtagttcatgtatttgtctaatcctgtatcttatgttatacacatgagggaatgttatggatgggggtaaggaatgtgtcatgctgtttatcatgtatttctatcnnntcgaacttctttgttgtttactctggttctagtttaataatgttattacttgttccctttctcctcctttatggtttcattggtgcaagcnnnatgtttgtagagagtnnncnnnnnngtaca

SEQ ID NO: 3371 - DNA, 906 bp, Gossypium hirsutum
  misc_feature (692)..(694): n is a, c, g, or t
  misc_feature (785)..(787): n is a, c, g, or t
aaaggacaaggcaatctagttgggaaaagcctctggaactgatgacaccaatagaggtgaggcatttgagcatctggttgctgtttcggctgttaaatttttatgctctatgatctgttaaccttgaatttgttgtgatatgctatttatacaaattgccccctttaatggatgctgagactgtagccattcttaacttgttaaaaaatgttttatgcgaattcttctttcttttgcgccttttggaattggtttgtagatgtcatggcaagttggagaaatttaacgactgctctaaatggtcactttgagggcgggccttcacttttctcaaggcaggcaacattttgctatttacattttgtttattatacggggaaatttttttatgaggaatgattagatatatagacatttaggtgccttgtattaactgttttcaatttttttcttcatttcctgcgctgttagtgaagttttaggatggtagtaatacatcccctccccctcttaacatggctatctaatctgcttttcaacttctgtcacctctatatatttctccctttcttttcttgtctctttggtagttcatgtatttgtctaatcctgtatcttatgttatacacatgagggaatgttatggatgggggtaaggaatgtgtcatgctgtttatcatgtatttctatcnnntcgaacttctttgttgtttactctggttctagtttaataatgttattacttgttccctttctcctcctttatggtttcattggtgcaagcnnnatgtttgtagagagttccacaggtacatattggctactgatttcagaggtatgagatgctgggtcaaaggtttttgctgtatttatcagttctttttgttttcataattgttgctgtga

SEQ ID NO: 3372 - DNA, 661 bp, Gossypium hirsutum
aatggcagcctcactaatttctaatttattcgtagtttcccttctactatccagctctagcctggaaattgtgtttctccgttttcgagctgaggcaaacttatgaaagaaggctgaatttttttcccctaatttcagccaatttgctcttgctttttgttctcagtacatttcatattttattaatttccatattaagatggattttagtatcaataattttttccatcatttcatcatccctctctctgtccatcagaaattctagttccttcattaatttattcttaagaccctttctaccttttctaattgtgcttccccatttcttcaaactgatttgcaacctctcaagcttttctattaatgtgcctgtatatgattcccatgatatcttgacttcttgctcaaaagattcttccatggtctatcatgcctcaaatttgaatttatgacttaccgtatgaatattatcagaaattgtgtttagaagaagaggacaatgattcgacattgaatggggtaaatgttgaatgccctctcacgaaaaagattcatccattccccctttcccaagtgaaccaggcttcagagtatccaatgtccattagttgacaatcttctagaaccgcacgaaaagcctccattattctctgctctg

SEQ ID NO: 3373 - DNA, 617 bp, Gossypium hirsutum
atctgtcatttgctgtgattgttgattattttgatgcagttgttgctgctgtgaataaaaaacatgaaacaccacagtgagcaagctgcaacagcttcaaatctaatgaaagcatcaggaataataacaattgtcaattgatgtgcagtacagataaatataccttaactgagatatcggagtctccacgaggcagcacaggacaaccaatttgcataggtgatccaactttgggaaccacatcgccgagggaatttagtgggacatccttcccaagacccataatctgattgttcagaagcatgcgcatttttctactttcaaaatcatttgctgatggagatgacaagttttgttgtgcttgaagaagaaattgttggtgtaactgaagctgactgaagggctgagaggtctgaatcaaagttttctgctgctggagaagcccagatcgaagttggtccagtccctgctgttggtaagatactattagacaaggaaaccgtatatcaatcttgcatgccttattacttttactataatatatataaaatttgagcacataacccccacatctcatctgagacacattttatgtgccactgtgaccaatcattatc

SEQ ID NO: 3374 - DNA, 636 bp, Gossypium hirsutum
taggaactttggttggcagaagagtttataaacaacagtcgctctatgtgcaaaacaatagctattagctattaggcattatggtataatcgaaacaaggtatatcatgagggggcaaggaaacatatgcataaagtactagcttttatcaaggcttatattttagagatggaaaaattagaagtttcaggcagtaagaatgatatgcaggtgttcgataatatgtttgagataagcacaatatagctttctcgcaaggtgcttgtgctggtttagtatttctgttaaatgcttgatactggcttatgatttaagtctgttatttctggtacagttgtaacttgtttgttattttttgctaacaaattatctagaacacctgaactgctataagtagcctaggtgctactcttcattctgaatacttataatgttaaataagaaatagagtgttacactcaaaatctctctcacttgttcttctttttccttctttttattctgttatctgtgatttctttctaattcataaacatcatgatttcttcatcttttatgttttgctttcagaatacatcaatgttatagtttcttttataatgtacgcagctttttgacatggtatcagagctttgg

SEQ ID NO: 3375 - DNA, 599 bp, Gossypium hirsutum
  misc_feature (8)..(8): n is a, c, g, or t
  misc_feature (430)..(431): n is a, c, g, or t
  misc_feature (433)..(433): n is a, c, g, or t
  misc_feature (436)..(436): n is a, c, g, or t
  misc_feature (438)..(438): n is a, c, g, or t
  misc_feature (578)..(578): n is a, c, g, or t
tgggtgantccgttaacaaaaccctaagaacgcagctgccttcatctacttgggccattactacgccaccgtttcggtcgatatccccagagccatcaagtgttaccagcgagcgttatcccttaatcccgatgattccgattctggggtatctatattcctcctcctcctcctcccctcccatatttttctctttcgttttttttcttcttggattgaccttaaatgaaataaaacacgcttacaggaagctttgtgtgatttgttggatagtcaaggcaaggagaccttggaggtcgcaatttgcaaagatgcttctcacaactctcccagggctttctgggctttccgccgattgggttgtctccaggttttctttttgtcttttatcactcgaaagacttgatttttttttattggtgtgtttttnntntantnggagcaggtgcatcaaaagaaatggtctgaagctgtacaaagtcttcaacaagctattcggggctatccgacttctcctgatttgtgggaagtaagtttttcatttaattctaccatctacctgttctgttttcaaaacngctgtttaattttgttcaccc

SEQ ID NO: 3376 - DNA, 599 bp, Gossypium hirsutum
  misc_feature (575)..(577): n is a, c, g, or t
ttaccttaaatatttagtgactatgcaagagaataactgcaccaattatgtctgttcaggttctccctatgttgttattaaatcatgcctgggtggaattgatatatgtattttgtatctacatatgcatgttatattcagttttatgttcctaagagagcaagagggaattctaccattttatgcatcttctgtttaggccaaacggtaacgaaaaatccacaagcctttccgcttctcatccgactgttgtagaaataggttttcagcatgtaagaaatcaacatgaatcttttgcaccatctgtacaatttgttctatgtttgatgctctacttgcaacaataatgtaatgagctttgaagctttgtatgaattggatgatcacaatggcaaacgtaactaatttagtaaattggtttatgtttatttattgacttattcttacatttctttatgatgctaactatgtttgtatttgacaggcagattttgacttatgtactgattgctttaacaaccggaagtttggctctggcatgtcttcttctgattttattctcatggagcctggtnnnggcctctggccttagcggcgga

SEQ ID NO: 3377 - DNA, 636 bp, Gossypium hirsutum
aacttcgtgttagacaagtaaaacagctaaatgaagcaggaaagtttcaatttagaaatcaattatcatacaagtacaaaagcacattgaatagtcacacacatgcagatcatgtgggaaaatgggaaaatgaaaaagaagtagatgaaggggcaaaataataataataataataagcaaatcatataaccgaaagctacacaaattgaaaattgcaaagcatactaacaacagagcttaaactgagtgaatacagacccgatattgttaatgggcagtcataatcattctgctcactatcgattaaaagcatctttgccaactttccagatagcaaccatgatccactgtaaagaaaaggcgagacaagaaagaattagaaatcagcaaatgtatttttaactcgcatactatagtatatctaagtacagatcatatatgtaagaagacaacaggaaaacgcaaaccgagagaagatgtaaacaaaaagaagaaaaattaacaatcttcaaaaatcaaaaggacatcaattataccaataaaaattaagttcaaaatgcgaaagagaaaacaaaacaaaaaaaaataaaggagaagagagacaacctctctttttctatttgaactagttggaga

SEQ ID NO: 3378 - DNA, 440 bp, Gossypium hirsutum
aaaattaatgaaattattaatttgtacgtttctaaatgtataaaagtttacttgtctatttttttaataaagggactaaaatgtaatatacccctaagtacaaggagttcctaatacttttaccagaagattccgccaacctttggagagttcattcaaacattgaagttgatttcttcccaaatgatttactttttatattggtttttttagggggtgaaagagaataaaatattcttagaagtgtggttggatgtttaccacttcgaataattgaattttatttgaaacccaactgtgttttgattgtaatataagaagaggaatttttttccgcatgatattatatatatcctctcaagtaatggagattttgttgatgaaaataagaagccaacgaccaccataaagaagattgcgatcctaaagctaagagaagg

SEQ ID NO: 3379 - DNA, 541 bp, Gossypium hirsutum
gacttctcaatttgaaacagtgatacaccacaaaagtagtcagaccatgaaatattgcagaagaatttgaaacaatcgacacagatcatttaaaaaaattgaccttaattcttctcagattcctttaagtaaaaggagtaatataataatatgaacaatccaaaagttagcttgtctgtagagacagcaacacatgtaacctattgcacaaatttcccatatacccatgtcatgtatggcacaaagaaaggacagacgattaaatacactcattaatattacataaagtaacaatttttggcatgcagaaccaggaattgaaaccagaattacagacagtatcacctaaattttgataaaataagagcttaaactgttggatgccattagataagaccttacgattactgagttatcattaaatgggaaaacaaatcatatgctagaatttaaaatgcagaaagttcctctacccttaaaaccaacccaaaaagccctatcatgtattatcccaaaagaaataagatctgccatggactat

SEQ ID NO: 3380 - DNA, 644 bp, Gossypium hirsutum
  misc_feature (15)..(16): n is a, c, g, or t
tggccttcctagaannagttcatttctatagaaactaggtttcatgttgtaaatgaagcatgagcaataatgacttgaatatctaaatattatcaataataagatgcgaggttatatattctagttcttgtttatcaagttgtttcccctgcgcctgccaaaactcctttctattacttggtgggttggcaggaaaatatgtacacacgcagcgcgctcgcacacatacagtgaatgcatcactagctttatggaaagttgacagtcttagtggcctgaattcaagttccatattaagggtgtccttggaggaaggtcatggtcttcctcgcactttgaagttgaaatggtgaactatactattaaagttggctagtgtaccttgagaaaatttgaatttgggaagcctttggggctttgattgttggacagacagcccccagatttcccaattgaatccactcacatgattctagtattgttgatgtgttttctgggcccaaatttgcacaatatatccttacatccaatcaacatttaaaagctgtatcacaaaagaacctttgcacagtgttttgtcttgtaagtatctggtaaatcatcatttgtaagtaaaaaaaaaactacaatttctcttgcagcaa

SEQ ID NO: 3381 - DNA, 638 bp, Gossypium hirsutum
  misc_feature (395)..(395): n is a, c, g, or t
  misc_feature (533)..(533): n is a, c, g, or t
  misc_feature (547)..(552): n is a, c, g, or t
  misc_feature (554)..(555): n is a, c, g, or t
  misc_feature (571)..(578): n is a, c, g, or t
  misc_feature (580)..(580): n is a, c, g, or t
  misc_feature (582)..(586): n is a, c, g, or t
  misc_feature (588)..(589): n is a, c, g, or t
  misc_feature (592)..(598): n is a, c, g, or t
  misc_feature (605)..(611): n is a, c, g, or t
  misc_feature (613)..(615): n is a, c, g, or t
  misc_feature (618)..(624): n is a, c, g, or t
  misc_feature (626)..(627): n is a, c, g, or t
  misc_feature (632)..(634): n is a, c, g, or t
tttttttcctttttggggaaagtatatattctacatgttaataagcattagaaacaaacactagtttaggcattagtagaccctcgaacatcataaatactaacagattgcatgtttatgaccaaaaggtgggaaagaaaaatccaaaggagcaatatttacccccttttccatttaggataggtttagggtgggaaaaataaccaagatccccccatttccggcccctatttcccttcccaataaaggaccaacccttatccccatggcctggcccattggttccaaatggcccccctcctggacaggccatttgccttataacctaatttattaacctggaataggccaccccaccttaaccaacctggcaaagggggaaaccccccccgatngctcctttggtaggcccggggaaaccatccagggccaattcccccccggcaagggattggaaaagcaaaaataataaccaaaaaatggggttttattttaaaaaaaaaaaaaaaaccaaatggacacctagttttganaaaggggggaaccnnnnnncnnccccccttttcccccnnnnnnnngnannnnngnntgnnnnnnnattggannnnnnngnnnttnnnnnnnannccccnnnttcc

SEQ ID NO: 3382 - DNA, 581 bp, Gossypium hirsutum
aagcaataacctcactgaatgcataatatgataaaatacatgaaagttcatataatgctatgaggaaaattttcactttaattttacttctcctttaagatttctaaaaaaatgcatctacagttaattgtatgttctttctacctaaaccaaattgaatctcataattagtttcgcactgcacacaggagattcactaattcttttcatgcttagcgagtggtttcataagtaaagattaattgttgtctctatctagtgtttagaatttatagatcattcatgtattttggtaaaaggaaataaaaataattaatacacatgtataaggattgaaaacataaatttctatataaatttatcaataaatgaataatttattcatttagttataattaagtaaactctttataataatttttttagtcagaaaactattgttttatagggtttttattgtatttataagtgaataaatgacatccatgttgaaaaattttcaatttcaatttgtttcagaaacagataaaaaacagataaatctcaggcaataaatagagattactatcacgaactatcta

SEQ ID NO: 3383 - DNA, 485 bp, Gossypium hirsutum
ctgtgattttgtggatttgttgttgatgctgaagtgaaggggctgcttatatttataggataggaaatagggatggatcagaaagccaaatgtttaggaagaaaaactagaggctatttgctcgtggttttccgtagtctggggggtggattggacgcacttggaataatatgacttgaatgctcatctaaaatcactagatgacaaccaacagatgagggctactattcaatgaatggacagtgggcacctggttttcttttattaatagcctggccggagcatgggagtagaacactccaaaccaattgtttttatcactgacaattgggaattggaaaacaccctttgccaaatgccacgtgctgagttggtaattaaatatattgacagtctctctaccttgtaagctaccactgatacgtgtttccctaatgtctattccacgttgaagcgggatcggttcacacacttatgattcatga

SEQ ID NO: 3384 - DNA, 600 bp, Gossypium hirsutum
  misc_feature (185)..(185): n is a, c, g, or t
  misc_feature (188)..(188): n is a, c, g, or t
aatattgagcgttgaaattgaagaagaatgtatgtaagagagacacactgtgattttgtggatttgttgttgatgctgaagtgaaggggctgcttatatttataggataggaaatagggatggatcagaaagccaaatgtttaggaagaaaaactagaggctatttgctcgtggttttccgtagnctngggggtggattggacgcacttggaataatatgacttgaatgctcatctaaaatcactagatgacaaccaacagatgagggctactattcaatgaatggacagtgggcacctggttttcttttattaatagcctggccggagcatgggagtagaacactccaaaccaattgtttttatcactgacaattgggaattggaaaacaccctttgccaaatgccacgtgctgagttggtaattaaatatattgacagtctctctaccttgtaagctaccactgatacgtgtttccctaatgtctattccacgttgaagcgggatcggttcacacacttatgattcatgccaaattttaactctgtcgaaacatatatttcaatctaattagtatggtgtttgatttattgtttatat

SEQ ID NO: 3385 - DNA, 646 bp, Gossypium hirsutum
attttcttctctgtctttatatacaacttaatttcaaagtttttcctataatttcagtgatttacctagttcttactgtgatttggtgatactcctttggaagaagaatttttgttgttttcatatttataatttctatgaactcacttagtttgactatgatcgtggtacaaccataggaaatttcatatttataatttcaccctattctacttggtcattttctaatttcattcgtttgatcggaactgtaattttaattccttatttgctgattttagattattgtaggagtatatttgcttagagttaaagtcggttctttgttttgctagtttcatttcctttagactatttcatgcaggattataagtctaggaattgatgtagatattaatataatttgatcaatgaaattatatttatactattattagaactctttaccaagttggtgtaaatgtgtgatgagtctaagtgacaccaacttggtaatttacgtaaaattgaaaataaaattaaaataatgaatttaattccagaatatttatgtctttattaatttaaaaaaaactcaggttttcttgaaatactatctactcctaaaaggctaccatacttgaaagtttcctacctcatactactt

SEQ ID NO: 3386 - DNA, 610 bp, Gossypium hirsutum
  misc_feature (585)..(587): n is a, c, g, or t
accgcggggccgacccctccttaggtaaatgatataatatcaagattggaagatttcaagtcctaattgttttgaacaaattgatgcagaatttgatctaaattaattgtggatgcaattgtatcccaaaaccttattaattatataagttgtatttttggtttaataggatgggagggcaatttgtctaagtggcttaaagatggactgactcctccaattgtggtaccacgcatggtaacgtttaacattaaaaatgattgattaaattagtatcatcagttaaataaataaatttatcaaaataaaataaattaaacatctttattttagaggaacttccgaatcatagctatgttttgttgtgcgtggttttttaaacaaaaaattttatatgcatctccatgtatttagtagatatggttttggttgtttttatattaaggagacggaagcttgaaaataagagaggagattgaagatcttgagattcaacttccgaagtgttgaatgccagagcagctactaaagcagttggagtcaactataaatttgtatatgtacactatttttataaatctcaannnaagttgagcttgtaagacactat

SEQ ID NO: 3387 - DNA, 624 bp, Gossypium hirsutum
ggatgtcccgaggcttccaaatacccttgtaattggggttgtcgactagaggaggattccatattcctttaaaagctgggttcctcttcatcggtctcttccattcaccacaaccaggagctgtctgacactttgggttgtcaattttgggggcttcccatacaccatcctcttcatcatcccaatcttctggcttggttgcctcaggatcatctatctcttcagactcatcgtctaaccatccttccggtttcacagcctccatatcttcaatttccatgggtgcattttcatcccaatcatcaggcttcacagcattaggatcaggaattctgactctatcgtcccagtcctcgggtttcttttcatttgggtcaggaatagtcttggcagggataattggaggatcaaaatcttgagctgagaggaagtttcccttcttcttcacctctccatcaatcagaatgctaatctcattgtcaggcttcaagatggcagtatagacatgagaaagcttgtcagatgggacgcgcggtgggtcaataagatgatgttcaacatattccccagatttaggattcttctgcttcaggataaagtgcacccttgttgttaatccacata

SEQ ID NO: 3388 - DNA, 584 bp, Gossypium hirsutum
  misc_feature (563)..(566): n is a, c, g, or t
catcagtgggcagttcgttggacagagcttactgatcaacctgatgaagcttccttctgtagctattgtgaagagccatgtagcgggtctttccttggtggatctcctatatggtgttgcttatggtgccaacgacttctacatgtggactgtcacagtagcatgtctaatgaaactggtaatatttgtgatttaggaccattcagaaggttgattctctcacctctttatgttaagaagttgagccccaattcgggatttctgagctcaatcacacatggtgcaaatgagttagcttcttcagtgcgggaaaccattaggagtcagggcaagaagcacaagcataataataaaacctcagctgatacaggtagtaatggtagcatctctgacatgtcaacagagagcactgctgataccccacaaaatgtaaatggttcttatgcaaaagaaggggactgcaatggtattatgactgtaggaaccccatgccaagatggtagcattaataagaaaatagagtcaaatcctagtatcaaaagaagtggatcaattaatcagannnnacgagtctcaggcttaag

SEQ ID NO: 3389 - DNA, 643 bp, Gossypium hirsutum
tctacttttcaatcttgtttcttgactggtataactaaaaacaaaattgtaccttttttaccattttaatacactgatctgtttttttctttccccaaaagaacagaaaaaaaattcccaatcctttccttgtagatttgatggggcaaagcatctaacaatttttgaaagcaaaactgatgtgagttttttcttactgtagttccctttcctttatgaagaaaacaaggttgaaattttttgtgttcgtctgtagtatacatcatatgttttaggcaaatgtgcaaattgatggagatatatatatatacggtagttcttacgaacaatttgacgcatcaggttttgcttaggtcgagtcgagtttaagatagattttgtgatccaagtaatctcaagatatgaaacctcttctttcaatctgggttgggtcaattagggattaaaaagttgaggtatcttgggtttatggcattttaagttttggatcatttgggtttttcagtcatgtttttgagccattttttaagtcatttctagtgctcggctcgggagaatttaggggatgttcaaatggtgaatttggttagaatgtttaactgttatcggttattaaattttataattgaatcctcgattgacc

SEQ ID NO: 3390 - DNA, 574 bp, Gossypium hirsutum
cttcggttggagcagaagaagaaaaaggaaaccccaggtgagaataaggaagctttccatgacctgatcctcaaatataatagcctgagagatgaatatattgcattgtcgagggacaagtcaagggacctgaataaataagggcaaactgttttcttcagtttatcagctctgttcaagtactttgcttaatgggttaacaagtgtttctgcaattaaaacaatagatatataagacatagcttagattacattgcatgcactaggctaatttgactttaattaactaaatatttcctaagcaaactacaaacagagttgcttcgtgatcccaaaaacaaaaatcgcaaccacagctgactttgttacttgcttcccaagattggccttctgaagaactcgaacaggtcagtctgatgtcatgatggcagcaattacagccgatttgtttcggcccggtcaatgaaagatacacccacttgctgttcaaaaacttctcggtattcaaacggaaactagcaatgatttttgaactcatttaactaaaatttgcaaaatcaaaaaacaaattcaa

SEQ ID NO: 3391 - DNA, 610 bp, Gossypium hirsutum
  misc_feature (507)..(507): n is a, c, g, or t
  misc_feature (581)..(581): n is a, c, g, or t
gtagcacatggacaatgtgatagatgaaaactgattaactattatctggaacagaatgtacttaactttgtggaggtacctcggacaaatatagcacctcatcaggtttgtaaatatgtttttcctattttgtggcttattcccattacgtgcttttaccttttaaagtcttttatttttcattttcctcaaatgtaccgtagaatttggccatgatttaacaggatatacccaagaagaataactttataaatgatggagatgtagacgatgaagattacaatgatgatgacataggtgaagaagttgatggtgtgaggaagtccattttcgatcctgtttgtgcaatttgcgatgatggtggcaacgttctaccgtatgccctaactttttggttctggaattttttttgtgtacttttttttttaaaattatttttaccttaacttggccttttcttttgggtggtgtgtggcaatatcatgcataggtttggtgttcctttanaaaaccaataatttttaattcacttggaattctggaaggctttctaaaatgtactactacacttcttttataanattttgggatggtagcgagatttgaacca

SEQ ID NO: 3392 - DNA, 621 bp, Gossypium hirsutum
ttctcatacttaaaagaaatccaccatttattcctattatccattgagacaaaaatacctcgtcgaaggggtttctgtacattaaggtttattttaaggcgacaccattctccactaatttcagatctgagcacccctccaaaactgacacctatggcgtgcaatagatcttttttatcaaattctggtaaacatgaacctatctttaaccaaaatggtgagagttaagccgaatgtgggatctttccaccgattgaattaacctatcaaataaaattagactttttcggaatagccgtagtcttccctccataattagctccaaatattcttctaactcaaacacgatcaaaaataaattctgccccgctgtctgaatctcaaacttcttttttggtttccatatgctcttcatttgtgccttaaaactctccgggttgtaaagcttctctgtccaaattgtacaaatcagagttggtttcacactcagaatcaccatcgaccctttgacagatagttaaataatttcttcttttatgagggaaatctcatccctcttctctctaccgtcactaccactttcccccatcccaagccgcagcagcttggcaaagcaatctt

SEQ ID NO: 3393 - DNA, 634 bp, Gossypium hirsutum
tatcttcttaattacaacatcctaagtttagaattagttctctagagcaatttcgggaaaatggttatggagttagccttttgcgaatcttcctcctctcagttaatcccttttaaaggaacttcatttccatgctctggaattgctgacatgaactaactgctctccgatataatgcatgattcaatcaaattatacattgcatgtggttaaaactttgagatcaccaattgttataagcagcgtaaatgttaaagttgtttggtgatgcgtgaactgtggggaagactaagatggaacatgaccctattattcttagatttcatcaatgatgtctgcactacacagcacaataaaagcacccgctaacgcacatatacatacctggtattcccagccatatttctcagcaaatgcttttgcagcttcttcactgtcaaattcaagtccagcctcaccaacattggcatacggatctcctgttgatgtccaacccattaacggattttcccacctaaataaaaatgtcaattaaggaaatgaaataacgccaatgtttctattgctccagctgaatttcaaatacgattcatgttatacgccttttaaaggctgaccctttattaccttcttg

SEQ ID NO: 3394 - DNA, 626 bp, Gossypium hirsutum
ttatttgcgtctttttacttatttatgaggatttgctaatatatttcatataggttactttcatgaatcaaattgatgtcattctataagaggactaaaagtcttgcttaacaaaataactgttgaaatctagcttccatctgttcaagcatttttaagtgcaaaggaaatgagttattgaaaatattagggtaagcgccaaacttctgggttcaagattagaaatttactttggcatgcatatcacggtcatgccttccctagcatttgggtaaagcatggaaggtccgtttgaatccatctcttcttctagttagaaggtttgaactgattttataataatgagaatgtaaagttaataagagatgccatcttgtacaaagcttctagtttatcaaaaaaggaaaattttctttcttaagtagaattgttctcataccttggaattggagaaggacataacatgaagcatattgctttaaatgagttcttcctggtttgcttcatagaattaggattctgttttgagtgtggcatagttcaatttctaaccagttattttgacctactcataggtttgtcgggttgaggacctacttgttaatgggatcattaagggaagtatc

SEQ ID NO: 3395 - DNA, 623 bp, Gossypium hirsutum
acactgcattgaactaatctgtttatcttatcctttacctgcaagatcaacaagcaaaaaggacataaaagtagagacacgatcaacaataattgtggcatctaaagtatgcatgatacaagaaagatgcaaaagtaatcagctgaagcatgttctgacttccatagaaatttttatttaaaagagaagtcagccaaaaacttcagtccactccgagaatgcagattaaatttgaaaagtcttgaagctaggtcttttacctctttactaatcactggaccaacatctgcgccaggatctgatcctacattcactttaagtgctttggtacgcagcttaagttcttcttccctgagcatgtcaggagaacactcaagttgatatatcttatttgcatcaattaggttttatttcattaaagaaactatcatacatttctacttatcaacaaaaaattaattccaagtgtgttaaaccatagactggaggaaaagacagttatattttaaggtaaagtactgcatagaattgttcacctcacaagaagatgactctgcttacatccaagtttatttgtcaaaagataaatttttggaagacttttaagatataacgaacacaca

SEQ ID NO: 3396 - DNA, 599 bp, Gossypium hirsutum
  misc_feature (538)..(538): n is a, c, g, or t
  misc_feature (547)..(549): n is a, c, g, or t
  misc_feature (569)..(571): n is a, c, g, or t
  misc_feature (580)..(584): n is a, c, g, or t
  misc_feature (586)..(588): n is a, c, g, or t
  misc_feature (593)..(596): n is a, c, g, or t
cacttggcagtacacaagtgaagtacttgtttaattttcttcttatttttgggtttgaaaagcagtaaatgtggagataaaggatggcagaattgtggctatacatcatgtggagatgccattgcctcttagtgattctcagattgatgtatccctcctggcatctgctgcatcaccagttgcctcggtatcaccaaatctcacagtaatcgacgaatcctcggtattagcttctgattgacggatcggttttgaggaattctcgtttctgttgatgtacccggttttcgatttattggttcgacattttaaggccttgtactgaaatataactgttcttatcatcaatacgccaattagagaaagcatggaatataactgttcatttgtttgtatgaaattacatatgtagacaccatgaagggagaaaaaaaaaacatgaatcatgtatggctcatttcactgattagtataccataccattatcttattcctgattgttgtgtgcctaatttggccatggttaaaaaaaatacanaaaattaannnaaataaaaatctttaaaaannnaaacctatnnnnntnnnattannnngtt

SEQ ID NO: 3397 - DNA, 617 bp, Gossypium hirsutum
caacaaaggtacgcttgcttgacaagttgattcttgttcataacttggtgataactaccttctttgcttttagatattttcttccgccctcgatatgaccattttatgcaattgagtatttgctatgtcacttttttcactctttctaaaattaaaaatcagcagcctgaatatttttatcaataagaatggcaatgacaatggaaggtccaaataactctttcagtttgaccttttactagatcatttaatgtgagatgcatttaatttaattcttaaagttggtgtgagaagaaatttaagactgagttggttgcccttctgtcggaaccatttgctttacggctccatgataaacttaggtctttgtctctttcctggtataggtcatctgttattttttctgttagttatctgtcttccattcttgtagtggttttatatttttttttctggttcttttagttgttgcaagttaaagtggagttgtgttatttttgctcttatatttgactgcatacgctgttgcaggtgtaattacaatggcatggtgtccctctgacagctcttatttgctcacttgtgcaaaagataatcatactatttgttgggatacg

SEQ ID NO: 3398 - DNA, 528 bp, Gossypium hirsutum
  misc_feature (504)..(505): n is a, c, g, or t
  misc_feature (513)..(515): n is a, c, g, or t
cataaacataaaatcataagcataagtctcatcttcaaagatcttcaaaaacaccaaaaatattaccatccatgtaattgttatctaccaagctcaccaaatagtagctgctctgaatctgcaacaacaaagaagcatcattattagacaatgtttactcgaattccgagatgtatgtatccaactcgtgcatatatttgaataatcttactccccatactcgtgtccaaaaattacgtttagaactagtagcaattgaggtgcaagagtgagcatcaaagtaaaccaaatattgtaagttcattagctatcacgaacctcttcgagcaaattcttggaaggatcgccgtccgggtacaaggcggaccatgatcgagaccagatttcaaatgcttcgtccttccacaccacaaaactggcaggatccaccacagttggttggattatttctttagcagggaagactccccaagttactgcattcacatctgtgaggcctatganngataacgnnngaaaccagatttc

SEQ ID NO: 3399 - DNA, 461 bp, Gossypium hirsutum
gctctcttccttgccgcttacgaaataacggatcccttccccatccagcgggatgccatctatgccgtccgtgtacattcttatggggttgctcacatcgcacgactcatattcttccgggctattcacctcagcaatgctctcctgtgctgcggcgtaggcgaaccctgtgcatcagtgtaaaaaagatcgtagaaaaaagaacgaaaataaattagagaaaaaagagaatactgccgattaaaatcgtggatctcaccagctttacagctcgatcctttcatatgtatatattcaagtaacaacagtgggatcttagtatagattaaggttaagagtgtttgggttttgatgcgttataggagaacatatttctattttactcaatgtttttgtaacccgattttacaataagagttcatagttcgatacgaataattaatgctagggtttatgatgct

SEQ ID NO: 3400 - DNA, 589 bp, Gossypium hirsutum
tgactggcagtccttatttaaacagttggtgatcaaatttgttatctgctgcatgcggtctctctctaacttctcttgttttgcattttcatcttggatacgggcccacaaagcatctgtgtttgcctttacagctttctcaatgctcctgcccaaggatgcttccagtcttttcccttctttgttaacaggagcagagacaattgcgttcatctgcttctgcatttccttctgcacgctaagggactgcttggtgcaacaaaaacattatattaagaagactataccacaaacattaacacacacaaacaagcgtgtataaagaggagattcttcaattttattctaagagaaacaattctttcttcaaaaagttgtttattgtattttttttaaaaactacctgcccaagcatatcccgcatggccagcaattgggggaaattagcatcagctgacagagccccggaactgcaacctggttcattagatgaatccgtggaattatatgggctagctgaaggggaagatgggacagattcttgagaatttttcttcttctgctttttccctttagcagaagcgggaga

SEQ ID NO: 3401 - DNA, 623 bp, Gossypium hirsutum
atatcataaagagagaaatctattatgacattgccagtaaagagactccaaaaatattttcacaatgaatatataattacacaatataaaactaagtagttgtagaacttggatttgaaagataaaattttcatccaaaaagaatagcaagtgcctacctcttgttgcaaattcctgtcaacccattccttaagtctgtctaatctagtcttgatccaccctttaacaagattggcaattgcagtttcagcttcataaggaggcatctctcggattattgccttcccaccatcatcactgtctactgcatcctcgactgcaatctgcacaagatctttctccagtttatctgcagctctaagtacttgaacagcatcaggggttaactctgtgatgcctgatatgaactgttttatctcattagcataacaagaatgaagggtggccacagccacacctgctgccaaaggatgccaacccttcagtattggactgaaaacctgcttctcatgaactgctaactcaccaacatccttagcaaggattgcaaggacaggaagaggatttggctggtttttggaagctctcctgcttgagtctgccttcctcattctcaatacaaa

SEQ ID NO: 3402 - DNA, 560 bp, Gossypium hirsutum
tgatctttcgtcaagcacttcgagtcttcacactcaatgaggttcacaaatgttcaaacaacaaagaaactgggagaatgttagagtatggttgagtcaggaattgacttatgttagaattctattaaggctaattgttagttgctgttagttactaataattgttagttgttatgagcagttatcggcttcatgttgcctatatatggtggcagaagttcatctcaaaaactattcttgatgtattctttctcttgatttaatagaagatttcttcagtatagaatttaacaattatcaatgatagaagtgagtggtgatagaaaatttgttaaccaaatggttaagattcaaaaccactttcttactttgaagcttaaccattaaattaacaaatttttcatcctcgctccttttcatcctacataccaagtagagacttacagccaaactctcgaaattaatttgtgaattataaagacaccacaactgataataaaaatataataaacaagatatatttatctgggcacaccttatcaaaattaatgtctctttgc

SEQ ID NO: 3403 - DNA, 632 bp, Gossypium hirsutum
aaagagttggagcaattgctaagtaaaaggagtaatcttcttgctaagcaggaggagtactccaagaaaataagggagttgggccctttgtcatctgacgcttttgaaacgtataatttctacctgagattctagtttttatcctttgtttcacctctcatcaatagtatctgggcttcataaaagttgtcagatacttgtctcagtgaacatatttattttgagggtttcttatgtcctttggtttttgttttgagtattttaatcaatgtgcattatttatttcaatattttatttgatatgatgcgtaatgaaagttggttagttgtgatagtatctgcttatcttggtgatattctacattgcatccaaattcatattttgttattttaaaatttttaattcttttccatgttgaaaatgataggtacaagcgaaagcagatcaaagagttgcagaaaatgcttcataggtgcaatgagcagctgcaacagttcagccatgtaaacaagaaagcacttgaccagtatgtaaatttcactgagcaaagagaagaactgcagaaaaggcaggcagagctggattcaggtgatgaggtaaatacaaaccttaacttccttgcaaatggcac

SEQ ID NO: 3404 - DNA, 612 bp, Gossypium hirsutum
  misc_feature (605)..(606): n is a, c, g, or t
ctcggctgcagctttttcactagccatagtttctaactgcgtttgcttgttgtactgaataatggtgtagccccaagaagtcagcccaaacaaataggttttacaagaacaagtgaaaaagtaaacctcagtttctattaccaaaaggtcagttaattcacggtagcgtttctctagctccatatgctcctgagagtaggcaacaacatatgacaatggctccatatatgtgtttgaagtaagaaaaacagaagaataaatttgaactgttacctgtcgagaataatgctcagcatccctcttcatggcagccatttcaaccctcattttctgcagttcagcctgcagacaggaaaagtggtcaaagaaaacaaatccaaaaatcagccagcaaagaaaccagaataatcttactataattttacaatatagaaaagaggaaaacatttttttgatacttgcctctaacaaagagagcttgctctcagcgtctctttgacctctgcgtgcacgctctacttcctcctgccatgcctgcatctaataaaaccatctttaagtcatcattttctcaattactacagttgatgcaacagctaaaggcnncatatt

SEQ ID NO: 3405 - DNA, 667 bp, Gossypium hirsutum
  misc_feature (662)..(664): n is a, c, g, or t
ctcccatcacaggtgaggattttcaggcctgaaaatatgaacgagtcgctaaaaagatcaatgcaagactacattcaagcatctgtcggaataagtaacaaagggaagctattagtgcctaaattgttgcattgttttgccaaaggaatggtggaggactcggttttacccgattggatttgtcaattcttatcgccgcaacaagcttccatggttaagaactgtttatcacgtaataagtggaggatcctaggtgctcgagtattttccatcatacctttcgattcgaggttccggtttctcttcctattggatgataagagcagccagctttcgaaatctaaagtttgagcagagcaggcatttctccatatcacattgtatagtagtggttgccgatgataaaagattttcttacataacaaaactcaatgcatggttacccaaattataaagtaactgtttaagtatttgaaaaattgtttttgctgttaatttacggtctgatttgataatatgagcatatacaaaattaaaacaaaaataatgtgaaattaaatatggatgaaattggaataaagattagggttcttataaataaaataatttcatggtagtttttcaattccctacccctggaaacaaaagatcaatgcgtcttnnntca

SEQ ID NO: 3406 - DNA, 588 bp, Gossypium hirsutum
caaagctcaaaaaagcgttccaaaaaaaccaagtctgtctttgtctttctcaatgacaatggctgtctcattttccattaaaactatactatttcttaattaatggctttgcttcttctccttctacctcagtaaagggtaccctttttccttcactcttattgggttactcatctcagtttaaatctggaatttaaaaaaaaaaatggggaacctttattgggtttacttagtgctgccattttgttttgggttggttttaaacactttgagtcaagagaactcagattcagatgtatacattgtcactcttaagcaagctcctttatctcttagctatcaagggttcaacaatggctctacttcagtgagattaaacaagctttacaagccaaggcatgaactttttttacacttacctgctacatttctgtatcttaataggttgtttgtttctctagaaaatgggagcacttagacattcataaatatccaacaattagtaattgctttgctaaattttgattattgtgttcattgttgccttattcagttgtttgaagatgtaatgtttagagatgcctaata

SEQ ID NO: 3407 - DNA, 638 bp, Gossypium hirsutum
cttttcttttcttttttctcaccttttcccatctctggcaggatctgagaacaagcaatcccttgtaggtcttcctggaagtttggctctcaatatggaaccatcaggaagtacaagtttcttgagtaggtcaaagtcatgttgcccaggtttgtcactgtaataatacaacacacaatatgggaaatcaagcgttaaatttactactgtcacaaagcccactagatgacactaaattgtacctgacataaattgcacatcctccaacagcacgggctgctccatggtattcggccatcggatgcaggctctgttgtcaaatttattcatgcgttaacattggacgattcaatgaagcatggatcgaatttgaatgctttaagaataggtgaaacctgtaaacttacgtgaaacatgtcccaatctggttgcataaattccccaaggaaaacagtgttgtatgcaactgatgcaatatgaattgtgtgggatgccggatctctaggccagaaatcatccgatgccctaataacggcggttcgttttgcactgcacaagcgagtcatatgtcagtgtaagttcatggtcactgatagctttactagtacatgacaaatgaaaatttacctgtataaacc

SEQ ID NO: 3408 - DNA, 612 bp, Gossypium hirsutum
accattacaaatcgcttgatcaccgcagcttctatttcaagcagcaggattcaaagaacttgagtgtgaaatgtaagtgggagtgatgattcttaacaacttatttttggtatagggtgtactttgcggtctacaatgttcttattactaaaattgatccctttttttttctaattgcagctttagtggctgaaatcaaggagttgaaagagaaaaaccagaaagaggacgatgttcttatggctagcgttgctggtcaccgacaacccccctctccacaccttgaatatgaatatgtggatgtcaacattcatgaggatctatataaacttatagaatattcatgtgaagagatgtgctcaacgaaagaacagttaaatcgagccatgaggctctggaccactttcttggaaccaatgttgggtgtgcctcctcaacgtaatggcagagagggcacggaaggtgccggtaaagctcagagttctgctgtaaatggcactgcatcaagcattgctgaaagtgatgggagccctggagttgatgctactgtaaattcagggcaaccaaaggctactagtaatggagatgggaacagttcatccgaactaacat

SEQ ID NO: 3409 - DNA, 519 bp, Gossypium hirsutum
ttctgctcctatcaatctttcagatcgtctgaaccaagtgcttcgatgggctcttggttctgtggaaattcttttcagtaggcattgccctatctggtatggttatagtggtaggctcaagtggcttgaacgattcgcatatgttaacacaaccatctacccggtcactgctattcctcttctcatgtactgtacactgccagcagtctgtctgctcactaacaagttcattattccacaggttagacttctctatattatccttgttttagttgtatatatgcacatatgcccaatactgtctaatgtaaacgtgttaccgaccctcttttagtggcctaaaataaataaacttgttgtctatatggtattgccattatttactgattggatagctataacctgttttgagtctcaaaactgttcatatctatatgcttttgtgaaatgtgtcatcttgaaacagaccttattggaactctctcattttaccctacagaaaatgaaattagtagtact

SEQ ID NO: 3410 - DNA, 616 bp, Gossypium hirsutum
  misc_feature (602)..(612): n is a, c, g, or t
atgttctttcttgtacttatttatgctcatgttcttttctttatctaagccgcaaattttttcttgaacaggattggatgcattcttctttcggttgggcaagatgagtttcatggtgaagtgttgcatactttgaaatatgttgtaaaccagtcagactacactgtgcaaatcctaaataatgttacacaatacctttctcttgcaaaaaccatcaatgtggccgagttgttccttccttccaatgtcattactgacaccgacaagttaaacatagatctaaatgcagcagcagatacacttacagagaataccgatgaaaacgctgtcaaaataagaagagtcttcaatgctgtgtatagtgttaacattaatggaagacaattaataatggttgctattaacattaatgggagacaatcaataatgacaaccatcaactttggaaaagtggcaaaggataatttttttttggtccttgagataatgggctatttattgtttggtccttgaacctcaactataaataggccttctcatttctcatttcaattcatcccaaccaatctttctctcttagttttctctcttctcccatttgnnnnnnnnnnnaaaa

SEQ ID NO: 3411 - DNA, 630 bp, Gossypium hirsutum
taactatagtaactatagtaaaaaatgccaataccttcatgtcatgaataaacctgagtttctttatgacatacataactcttcttggcgatgtgatgtaagataggtttaacatcaattaaagatgacatatagagggtatgattgcttctaggatagttttttccccattttcttggtttacatctaatcaaaatattcagcattccaacagaagaaaaacatattacctctctacatgtctgcccacaaaaaggaaggactaaactgttcgaatcaatatgaatctcatctttcacttcgatgcataatttgtggtctgcaaaagtggaaaggatcagaatattattgaaacagaaatcaaggaaactacacagcaacttcaaactgcaaagaattgagaacactaaaaggaagagaatcagtacatcttttctcaaacaggctgcaagtgagaagggcgcaatcagttatctcatcctcttgagcaatgcagctgccattactacaaaatttgcatatacaatttggacagtgccaatcacccgctggtaggaactgtgaaagtgcatatgtaaaagctaagcgaagctacgcagcattgttaacgagcaagagccaagttatgta

SEQ ID NO: 3412 - DNA, 645 bp, Gossypium hirsutum
tttgacctcacccaaagcatgaccttttgcaacctagtaaaatgctaacatctaaacagagaaaaaaattgcaaaaatcaacggccttagacaaactaaaagcaaaggaggcctaagcgaactcacaatctaggcctaaacatcaattcatttaacctcagttaaatctaaacattttaaattttaactcaatataaggtaaaatactaaaagaaactcctaactgtttcacttttttaagtaaacccctatacttttattgtacccaaatacaccctcatttttcaatttgttcccatacaagcctttatatcaaatgaaagatttatgttaagggcttacatacaataccaaattaaaagtttagggattatttgagtataattaaaggtaaagggcatatctgggtgcaaattaaagattaatgtaatatttgggtacaatagaagtataaggacatgcctagacaaagtgataaagttcaaaagctctttttcctttttgggggggttatttcagcctaaaatctaacatctaaatggataaaagaaaatgcatcttactcaaattgaaagaaaaaagaagggaaaaaaaaagaggggtaattaactaaaggtcaacaaagttagatatcttacaatccgc

SEQ ID NO: 3413 - DNA, 635 bp, Gossypium hirsutum
aaaaaaaagaaaattagcacatatcgtccaacaacgccagtaacaagattgaacaaagtttctactagattcctttaaaggctgaacctctttcttcttatcaagagatttatcttgaactcggtgttcccctccaataacacaaaactcaagaaagcatctttgttgcctttatcattgttcatttagttttaaaaaaaaagtgtaggaaaataatagcattaacattgttgcacaaataagaaaagtgaagtagacccgactgttttcatttggttccatgttaataaaagaaatatttatttttgaaataacaatacttgaataatgtttttggtaaagctgagtttatttctataggaaatgaaagcgcaatatttttgatagaatagagtttcctttgctaaaggaattagaatcgtaatatcaatttcaataaatctaatgtgtcagcttcaattcaaatccaatttgtaagccattagccatttaatgatataaataatgtacttgaactagtttaaaattatgtattccaatactgaatatagccaaaacaatgaattttagactcaaaactttaagctccaaatttaagttcccaaaaaagaccttacaccttaagctttgtgtca

SEQ ID NO: 3414 - DNA, 615 bp, Gossypium hirsutum
attcgtgtctgatgtacatcttttctcctttctcgtttgtttgttccctgctcactgcaaagtccagcctgaagttttctgggttcttctccttcattttctcgaattcctgcaattaacaccacatcaagcatttcacgttttcacacaaaatctcaattaccaacagaaaccagcatttgcttcctagaaagttaaacatttgctaattacctccttgtatagcaatgaactactcgtgggaacaccaaggaagagccatgccaaaccgttgaacttcatagcaagtaagatgttaagtcagtcagtcacatgttcaaatatcacggattacttactttattcttgtcgagttaatgccataggttataatttatataacaggtttcattgcctgcaacagcttgaaacggatgttttggtagattgagcgtgattgttttcagtgttcactcaggttgcatagttagcaatgctaaactgtcgtaaatgatgtacatatacatataccttgtagtcgtcatgcttctcgaagaacattttccacagaaatgatcgaaagggagcgattccagttccagtagcgagctgcaatggagtagctgaaggtgaaga

SEQ ID NO: 3415 - DNA, 603 bp, Gossypium hirsutum
cttgcttgatgtttggtctcagatgtggcctggagctataacaaagcaggccaagtttcagaacatttttcatctcaatggctactaaaacagagactgaaagaaaaacacgaagttgtttaatctcagactaatcagtcggcatctcaaatcgacaaatgggacaataatgactttgtttcagccatttttccatgcaatcaccgtgaaagacatgagaacatggcagtcgagaagcttcaaaaccgaccttgagttcctccaaacatatcatgcagtcttcttctccagcttctactttgactctttctatcatctccttgattgatgattcattagctgcaaccatgtcgttgttaatgctctcaagctctcaagttatttctgtcaaagctctcgtcatccaaatctctacatccataccgctttccaccagtactgccagaatcttactttgtaataatatcccccgttaaccatcatttgtgatatttccccctttttatcttcttatttatacttatattttatttattatgtatttagagaattatgggagaaaaaagtggaagagtgcatgagcatgagtccgagtatgaccaa

SEQ ID NO: 3416 - DNA, 895 bp, Gossypium hirsutum
  misc_feature (616)..(625): n is a, c, g, or t
  misc_feature (629)..(632): n is a, c, g, or t
  misc_feature (639)..(642): n is a, c, g, or t
  misc_feature (644)..(645): n is a, c, g, or t
  misc_feature (647)..(656): n is a, c, g, or t
  misc_feature (663)..(670): n is a, c, g, or t
  misc_feature (672)..(672): n is a, c, g, or t
  misc_feature (674)..(674): n is a, c, g, or t
  misc_feature (680)..(692): n is a, c, g, or t
  misc_feature (695)..(701): n is a, c, g, or t
  misc_feature (704)..(708): n is a, c, g, or t
  misc_feature (717)..(718): n is a, c, g, or t
  misc_feature (722)..(729): n is a, c, g, or t
  misc_feature (734)..(741): n is a, c, g, or t
  misc_feature (746)..(746): n is a, c, g, or t
  misc_feature (750)..(753): n is a, c, g, or t
  misc_feature (760)..(765): n is a, c, g, or t
  misc_feature (768)..(768): n is a, c, g, or t
  misc_feature (770)..(772): n is a, c, g, or t
  misc_feature (774)..(778): n is a, c, g, or t
  misc_feature (780)..(783): n is a, c, g, or t
  misc_feature (785)..(797): n is a, c, g, or t
  misc_feature (800)..(801): n is a, c, g, or t
  misc_feature (806)..(812): n is a, c, g, or t
  misc_feature (814)..(815): n is a, c, g, or t
  misc_feature (818)..(826): n is a, c, g, or t
  misc_feature (828)..(836): n is a, c, g, or t
  misc_feature (839)..(844): n is a, c, g, or t
  misc_feature (846)..(848): n is a, c, g, or t
  misc_feature (851)..(854): n is a, c, g, or t
  misc_feature (856)..(866): n is a, c, g, or t
  misc_feature (874)..(878): n is a, c, g, or t
  misc_feature (883)..(890): n is a, c, g, or t
tcctcctgtgaagttaccctcggaggctgtaagtcagttgctgagaagatgccgagcctaaatgtggagatcatagatgagtgtgaacaaatggaatttaaccttgtcgacaagcagaaggtagacaagatgtatctgtatcgaacattagtcgggcataggaaagatgcaccagaatatgtgttgattttgtaggtgcattgttttggctcagccattatttatctttgcttatttaagtagttgtacgttgttaggagaaccgattttaatgtattattagcttgtggtgatctagcctttatgctattgttgtaatccttgttatttataaatggatctgttttaagtatttttcagaatcaaacaactgaaattccgtcatttctacatgggtttcattagatgaccttattggggtgccagccgccgtgtatgaagagataagaaagaagatttgaagggcaggtggatgaagaaagcaaagcaaagcaaatttaattgagtgcatggcccctactggagatgtcagttcataatgagctaagcctcaatcattattagggcatgaaattgaagaatagtgaggatgtcttcatcatctgtggaatgaggnnnnnnnnnncctnnnntatgaannnntnncnnnnnnnnnnggcattnnnnnnnnananttttgnnnnnnnnnnnnnccnnnnnnnccnnnnntcaatttannttcnnnnnnnntagannnnnnnncccgngccnnnnaaatctnnnnnnatnannncnnnnnannnngnnnnnnnnnnnnnatnnttttnnnnnnnannaannnnnnnnngnnnnnnnnnttnnnnnntnnntgnnnntnnnnnnnnnnncctaaaannnnnccttnnnnnnnntaaaa

SEQ ID NO: 3417 - DNA, 614 bp, Gossypium hirsutum
ccacctctatcattagctgtattaagaatataaatttgaaaattttgatgtttgatcctattgttattgattgtaggattttgctgaatgattatataaaaaccacgaatcatgcaaaaatataaataaaattaactacatcatataatggtccaatatgcatgcaagaacataaattaatagaagcattatatgaactacaaatgaaatttaataataaaacaaattaaattaaagaaagggactaaattgaatgacttaaatccaaattaaggatcaagatataaacgctaaggtagggaaggacataattgtaaacatataaaattgaaggttttaaaaaaacaattgttcccaatatcattcaaatcctacaagtttaaattaattttaagtctacctaataattatcaaaactatcattttatcattacaccacaaactttttatttgatctttaggagttacacttaaataccaacctttaaaattattgtttcaagcttaggtggacgttaaaaaataaaaaaaaagggtttgattgaaatgacaagtcataatgtcacgagcggcagatcaaatcccatgacgaatgcacaataactattctaggc

SEQ ID NO: 3418 - DNA, 1263 bp, Gossypium hirsutum
  misc_feature (569)..(569): n is a, c, g, or t
  misc_feature (578)..(578): n is a, c, g, or t
  misc_feature (580)..(580): n is a, c, g, or t
  misc_feature (592)..(592): n is a, c, g, or t
aagcaacacgacgacctttcccttactaaacaactgaagtggacgccacctctatcattagctgtattaagaatataaatttgaaaattttgatgtttgatcctattgttattgattataggattttgctgaatgattatataaaaaccacgaatcatgcaaaaatataaataaaattaactacatcatataatggtccaatatgcatgcaagaacataaattaatagaagcattatatgaactacaaatgaaatttaataataaaacaaattaaattaaagaaagggactaaattgaatgacttaaatccaaattaaggatcaagatataaacgctaaggtagggaaggacataattgtaaacatataaaattgaaggttttaaaaaaacaattgttcccaatatcattcaaatcctacaagtttaaattaattttaagtctacctaataattatcaaaactatcattttatcattacaccacaaactttttatttgatctttaggagttacacttaaataccaacctttaaaattattgtttcaagcttaggtggacgttaaaaaanaaaaaaaangngtttgattgaantgacaagtcataatgtcacgagcggcagatcaaatcccatgacgaatgcacaataactattctaggcaattgatcaaatgaggcttatttgactcactttaattagtctgattcgtacaacctatgaaaaaatttatctacttgaattttggtggcccagtgaagcattttagcataactagagttatcaactgattattgtaaaataaaggataaaaatgtatagagtttaaatcccttaagattctcatcttacaaataggcactaacttttaactgaaaatgaatttaatttaatcgttagatctaggaaagcttaactataaatagaggtcttcccttgatttgaaaattcattgtatttaattgtgaactaaaaaaaaatttgaaagggggctactttcttatggcttttttattttttctttggttttccttaattccaaaggcttaaaagtaaacttattttaaggaaaatttaaaaaaaaaaaaaaaaaatcataaatttattgggttttaccatatttttggtttttaatccccctgaaaccccaaccccccctccttaaaaaacccccctttattttttaattttcttttttattttttttctaaacagggggggtatagtaaaaaaaaaaaaatattttaattccccctttctattaaat

SEQ ID NO: 3419 - DNA, 599 bp, Gossypium hirsutum
gaccatttgtcaatcttcgttgatttccccttttatttttcatttgcaggtcatatcctttttcactcgggcatttaaatccaatcattttgtgttgtatgtatatgattttggcctactaataggaagagtagttttctttccaatcattagaaattgtcttctgatatgcctgctttcatataaactactaatccgcaggacacttatttagtcttgatattaaatatgctgtacctccgagattgagcactcgtggaggatatgttttttttcttaatcctaatgatggggctgtcttatcctattgtttgttggtaagacacaatgtcttaaaactgttcatatggaaacttgcgactgaaaaatttagttttcggaagcatccagcctggggcagtgaagtgttgatggcacgtatgcagacacccatatatgtatatatggatttttgtatgtacgtagaattcatgaacaattttaggaagatgcgaaagaaactgtctgacaaaattgttctagctatatatatccaaaacattacttgctaaaatgttctcgaaatatatgctgcatttatttaatctaactgggaatgg

SEQ ID NO: 3420 - DNA, 625 bp, Gossypium hirsutum
gaagatgtttgcacttgtagctctcattctctccctttttctcattcttcagcatctcagattctatacaaatcctgctgttagtatttcatttcccatttccaaactctgcattgttttatttccagtttctgattgttttgtgaggattcacttttgtatgtgttaataccaacgaaactatataaaagggatgcgaatttttacttgcctttcttaactctgaagctaattctatggctaattgttgattgttattaattggtcaatttcccaggaacaaaaatggattgtttctattgtgttcatggttcctgtctacgctactgagtcagtaagtttcccatctcttttctatttgccttttttagaatgcttatctatcctgtaattaccaattaagtctgggaccaaaaagaatctatcctcacctcaaattaaagtatattcagtaccatatttgacatggatacgagatataattctttgaacatatagaaaattttacacacctaacttgagtatcgcccctttcaagtgcaaggtaattgagaactttaaatctttcctcctaattccttactaggaggcaatgtgtttctttgacatgcacaggttatatcat

SEQ ID NO: 3421 - DNA, 844 bp, Gossypium hirsutum
  misc_feature (511)..(524): n is a, c, g, or t
  misc_feature (528)..(534): n is a, c, g, or t
  misc_feature (545)..(549): n is a, c, g, or t
  misc_feature (551)..(560): n is a, c, g, or t
  misc_feature (565)..(574): n is a, c, g, or t
  misc_feature (576)..(581): n is a, c, g, or t
  misc_feature (584)..(586): n is a, c, g, or t
  misc_feature (588)..(590): n is a, c, g, or t
  misc_feature (597)..(598): n is a, c, g, or t
  misc_feature (600)..(605): n is a, c, g, or t
  misc_feature (608)..(610): n is a, c, g, or t
  misc_feature (612)..(614): n is a, c, g, or t
  misc_feature (621)..(626): n is a, c, g, or t
  misc_feature (628)..(628): n is a, c, g, or t
  misc_feature (631)..(653): n is a, c, g, or t
  misc_feature (655)..(656): n is a, c, g, or t
  misc_feature (661)..(663): n is a, c, g, or t
  misc_feature (665)..(671): n is a, c, g, or t
  misc_feature (678)..(688): n is a, c, g, or t
  misc_feature (700)..(708): n is a, c, g, or t
  misc_feature (722)..(724): n is a, c, g, or t
  misc_feature (726)..(727): n is a, c, g, or t
  misc_feature (729)..(732): n is a, c, g, or t
  misc_feature (735)..(736): n is a, c, g, or t
  misc_feature (744)..(747): n is a, c, g, or t
  misc_feature (750)..(762): n is a, c, g, or t
  misc_feature (768)..(772): n is a, c, g, or t
  misc_feature (774)..(779): n is a, c, g, or t
  misc_feature (783)..(787): n is a, c, g, or t
  misc_feature (790)..(795): n is a, c, g, or t
  misc_feature (803)..(815): n is a, c, g, or t
  misc_feature (824)..(828): n is a, c, g, or t
  misc_feature (830)..(831): n is a, c, g, or t
  misc_feature (833)..(837): n is a, c, g, or t
  misc_feature (839)..(839): n is a, c, g, or t
taaaaagataacacagctaagtcctacgttagaactaatattatttttttaataataattcaataaaaaaaatgaagggtcacaggaaattcaacatgttgaggaaaacatcgacatttgttctaaccatgaagaatgtgatgcacgcccttctcaaatcaagctgacgaaaggtttttctgccaaggaacatgtaaagggccacatggtgtgttcattttttttttacttatttactgatacctgtaataagatatctcgttttttatttatttaccgatatccgtaatgcaggtgaatgttgtgaaaggattgaagttgtatgaggacgtattcaccgagtcggagatggctaagctcagtaacttgatgagtgaacttcgatcttccggccagaatggggaattgtcaggtgccatcccactttaaagccttgccgagttgagcctgttttagaaatattatgatgaagatttgaaatagttatcccttctgatgtagcgaagttggnnnnnnnnnnnnnnaagnnnnnnnaactagaaacnnnnnannnnnnnnnnaatcnnnnnnnnnncnnnnnntannnannnaaaaatnnannnnnnccnnntnnngccacannnnnnanagnnnnnnnnnnnnnnnnnnnnnnntnnatccnnnannnnnnnacccccnnnnnnnnnnncccttctcccannnnnnnnnccccctcccctccnnncnncnnnntanntcctcctnnnnccnnnnnnnnnnnnntcttcnnnnntnnnnnncctnnnnnccnnnnnnttttcccnnnnnnnnnnnnncccctttannnnntnncnnnnntntgccc

SEQ ID NO: 3422 - DNA, 611 bp, Gossypium hirsutum
attttgtacttcgaccctttctctttcttcatggatacaattcctgtgtttgatttcttcagaatcttattgttccgcttgttaatgggaggtttctcaggtggactttttcccttaagactgagttttgttgatacttcagagaccgtttgtgattgagacgatttcttgacatgatctggagaaatggattttccacttgcagattggctcttctccaacaaccctgacttcttaccactagacgagcctcccttcttagaagaggaattactattactatcatcttctggtttatctatatcttcttgcattatttcaacttctctcatctctcctccaacaagatggcacaattccgaatcaatcctagactcttcaccatatgatccaaagctctggccttgagggtgactgatcagaactctgcatatcacacacattctcgtaaagctgctcaatggaagtgtcagcctgattcatcccattgttgaggtgactagcagattctgcaccacgaaggctttgcggtcttgcgctcttaggggacttattcaaaaccacattttccttaatatgtgatgaagtcccattcacttcattcatatctg

SEQ ID NO: 3423 - DNA, 589 bp, Gossypium hirsutum
actacctatctatacttaaatagcattgactattgagcagagatggatattagttaccagcccataagcagttgcttcagttcgaagactagaacctgaccaaaatatccttggccctgtaaaacttccctgcataagtaaggaataaaatgaacacataaaggccacctcatgatttcattcaacattcaattctcactaaattacttaaaacttccattgctctaacaactcatcaaattaatgtatagaggaaaatataggaattgttataatagttaagatcattcaatgacattaggctgcaatctctataacataccaacaagttttgaaaatttccagaattacatagaagtctattacccatcatacgaactgaagaaaactgaaacagaagttaattattcaaaatacctgaaaattaccagctagccgtctgtattgtccaaaaaggaatcccatttctcgaataccaactcccatttcctctgacggaaggtcctgaaaatatacaatggataaccagacctaaagacctcctatttcctacacattaatgagcatattcaagcagataagagcaggg

SEQ ID NO: 3424 - DNA, 389 bp, Gossypium hirsutum
ttcgagtattatgtgcccgaaaaaagttcgaaaaaaaacgcaacttcaatataatttcgaacactttttgtggaaacgattcatgttgtttttgactgagatagttgttattacaccttataaatgtgaatgataatgactgaagcgaacataaaccaaacaggtcgggttattgccaatacagataattctagattggaaagctttcctcatataaaacatggcagaccaccatagatacttcacgaaaggaggcaatgttaaaagtactatggagtctcctgcattttgttcattttactaaaaaataagtaaattagtgcaaatagaccctttctgttaaaaatttcattcatttttactgttaaaaactggtgtaactaatagaa

SEQ ID NO: 3425 - DNA, 656 bp, Gossypium hirsutum
ggtaagcttttggattttcttttattgctttttagttattcttttgctttaagtatgtttgcataggtgataaagtccttgaatgatgtttaacattaatgaatcaactgctttctttaatcataaaaaagcatgctgatctccttgtaatgatgatgaagctagtttttagataaaaagaaatactatgttttaaggatttgttcctttgttttttgcatcattgatgcatatcaataaattaatatccaatttcagagtgagaatgctaccgatcagatgtgttgaagtaagatatgaagtagtggtgttcagatgtatggataaatacacggttaatcaacatgtggaaattcaactgaatagattgaatgtgaaataaatgtgatatacagagaagttgtaacatccggcatgctagacaaaagacacaaaagaatggaccaatccaaattaggagaaatcaaagtgagacttgagaatgaccctgacaaaatcgggtgtctatggaggagggttgcttaaatgtgaattctggtagaatctttaaagctgactttaatatgaattcctttttgtaataaagtgtcaagacttaattttgtatgaataattgtcatgtgaaatgagctagacaaggaagagagatggacaca

SEQ ID NO: 3426 - DNA, 607 bp, Gossypium hirsutum
cccaaactcttcatcatcatagcctggcacacaactagaaagttcctcaaagcggctgaaacccccaaaaccaaacaaaaccaccttgaaaaaaaaaagctaacccttttaaccaggtccatttgggaaccccccaggcctggacctggcttaaggttcctttccctggacctggcccaaaaaaccggaaggggaaaggccatccaaggggttcccttggaaaccaaaatggcccccgaacaaaagggtggcgccctggggggcaccggaggggggaacaggggtggaaggacccaccgcccccccccacttggcccaaccggcttggtggtgaaaacggcctaccccccccagccccccaaaacctccatcaaaaacccaccagaaaaaaaaaaaaaaccaaggaaaaaaccccggggcatttaaaaaaaggaaaataaaaaaaaaaagccaataaaccatgttaagtgttctgcggtttctcccttgattcacagaaaactcttactttcttaaaaatcaaaatgataatgatgccaatttatacaaagatcacttggtcagtcaagcatactaggatttaagcagggtaactgtatgaaacacc

SEQ ID NO: 3427 - DNA, 647 bp, Gossypium hirsutum
gtgagctagctcattgcagttctgaagatcaacttgtagacattttaacaaagccccttggagatactatatttgagaacttaagaaacagcattggtgtttgctgcatagagtccaagatcaaccttggtgcatgcaaattcatgctaattctatttagttcatttgtatcttagtttagttgtgattaaactttagtttgttcatgctctgatttgattaggtgttgattgacatgttttactatgtgcaagcaatgttttgttagtttcaacatagttggtgggagtagttatgtatttggtgaggttttgtgacttaaattgtattgttgttcttgctgaatggataagcactttttagtttcatttttgctcgtttttcatatgttctttgttcttctctttttgttgacactaacagaagttttgatggccggaagtactttcgaagtaagatctgacaccaggctaaagccgagaatgcccgatgcttgctgtctgagcttaagaagttgcctttgtcgaaacaaaacaataatatggttaaccaaaagagtttccttgaacaaagcttagccaaagctactcaacagcttaggaaactgagcgaggagaatcgccagaatgagttgaaagaagtcaaaa

SEQ ID NO: 3428 - DNA, 631 bp, Gossypium hirsutum
ctctgattgttttcctgagggacgagatccaaaaatggacgactccttccatttaaaaaggtaatattctatccatttttgcttataatcttctcgaatataggtgttaaatgcgaggacttcaaaataaacagagttcgggtaacattgcagggttttgttcatttagccatagagtctggccttcccatagttccaataatcttaacaggcactcatctagcatggaggaaaggtagcttgcatgttcgaccagcaccaatatccgttaagtatcttcctccaattaaaaccgatagttggacggctgacaacatcaacgattacataaaaatggtgcatgacatatatgttgaaaaccttccggaggcacagaaaccgatttcaaccgatgacaccaagaacagttcaagatcataacttaagatccttctttcttttttggtattttgtagtcctgttagagcaatgagcccgcattttctgccttggaaaaattttcataataataatttataatattgttagttctgtttagccttgttctaaagttgaatgtgaaatgggtttcgttgccgattgtgtatacgtgagtgatattgtaagtactgacttccctccaggggggtgg

SEQ ID NO: 3429 - DNA, 605 bp, Gossypium hirsutum
tgctatatcgtaattcatctgaatattgccataaaacggtcagtttctctaatcatggcttccctggttaccaaatattggaatgtactactaccattttattccttgtgcctgcttctttgtgcatgccatatcatttattcatatcaaagaattatgggtacaataggaagtgaagggtattggctttctttgtgatttactatgggtgaatcagagccaggagctttgatgtctgttttgcttagtttaagcatcataaaactgctgcatagctactgcatgtgtgaatgattatgcagcagtcattaattttgatgtagttctgtttcatcttcattcttcaactatttaatggtatcataatctaccagttccttttttttcccctaaacaaattaaaatcttggtctccctgatgtttgaaggaagggaacttccctggattgaacatcctaacaatattaaacatttcaaggaagggggtggtgaatatgctggtattcttaaaaaacaacttaaattcctggttaccttgataatgaaaactgaatttaaaattttaataacccccctctactttttccaacgtctggggaactggt

SEQ ID NO: 3430 - DNA, 626 bp, Gossypium hirsutum
  misc_feature (51)..(52): n is a, c, g, or t
tggaggatatcttgatgttcggagcattcccggctttgctcacctattatnnggcgcaccaagatgcccgaaaccgctcgttacactgccttggtcgccaagaatgctaaacaagcagcagcagatatgtcaaaagttcttcaagtcgatttggaatcctaaccagagaacctccaccaaaaaaagggaacgagttcgggttgttcaccacacggtttctcagtcgacacggaccccacttgctcggtaccacaagcacttggtccttactagacattgctttctatagccaaaacctgttccaaaaagacatctttagtgccattggttggatcccaaaggacaaaaccctggatggccttggaaaaatttaataaattggcagaaccccaactccccttggcctaaggcgcactggtcccgggaattgggtccccggggcctttatttgaaaaaaaagaaaaatccagaacccattggagggaatccttttcctggacattttcctggttggcttaaccatccccttccctccttggaccccaccccaccacccgaaccgaatccttatcctggactccctaacggtcttttttggcaattttggaaccaatggcccttccttg

SEQ ID NO: 3431 - DNA, 565 bp, Gossypium hirsutum
ggagtgggttatgcaagagaataattgcagtagtcaaagctgcaaacgtcttgggtctttcatttccagaggcatttggcaaacagcctattgaattgctacagctactttctcttaaagctcaggagtcttttgaggaagcacatctccttgtgcaaactcatgttatgccagctgctagtatcgctcaaattcttgcagagtcctttctaaaggtgatttcctgatgcagtttatattcacttgagtgatgatgcttatatcaatgctcattgcttttggtatgcggtgtttagttgtgtgagaagcctttatgtttctgtttccatccagatctttgcactgcacccgtctgacagttgcagtttaattttgtttgtatatctaacctgttgacctctcatattcaatatgccttagggtttattggctgctcatcgtgggggatatatggattctcagaaagaggaagggccggctcctcttttgtggagattttcagatttcttgaagtgggctgaactgtgtccttctgaacctgaaatggccatgcattaatgcgttt

SEQ ID NO: 3432 - DNA, 587 bp, Gossypium hirsutum
agcaatccaggatttaacggcaagcacggcggacaaatagacatgagtaacatgcataatttaacatcaattcaaattggttgaaaaatccaatttgattataagacaacaagcaattcaagatttaaccgatgtgtttgcgataacacatcattttaacagtatattctggtctctcaagcttgtcatatgtaatccgtcatgatgagcatgctaacttccatttgaagaaaaaaaatccaaccttggaaacatggacagtatggtttaactaagtgatacatgtaataatctccataaatacaagtccgtaaacattaaacaatcacacgcatcgtgcagccataaaagttcataatgctaaccaatggtaaataggtcttacttccggctaacatgatgaagggtatctatgatttatctccaacttctcttatttgaaatgagaaaatcctataaatgaggacaaaaaggatccaattatccactaacggatcaacgagcgacaaaactgttgatcttcaagctaatggaattgaaaaaaaagagaaccaatcacggtgcaaagagtaaacataagaagaaac

SEQ ID NO: 3433 - DNA, 632 bp, Gossypium hirsutum
tccctaatgcaaatcacaagacatgtgttagacatttatacactaacttcaagaatagccacaagggtaaggcattgaaaggtaccttatagaaagctaccagatcaacatatggaagagagcttgttgaagtaatggtagaaatgaagaatttgttaaatgcaacacatcaatggttggctcagaaacacccagcttagtggtcaaaagctcatttctccaccagatccaaatctaacatgttgtcaaacaatctatcagagtattttaataaggtaagttgactcctaacaccattttttttatgtcttttagatttatttcttcactaatttgcataccactaacaattttattgtttatgtctacaagtttattctaggtgctaaggataagctcatcctaacttgcgtggataccattatgaccaaaattatacaaaggattgctcaaaagaaagaagctaagaaagtcattgaaccattgtgtccaaagattcagaagaagttggacaccaaaactgagctgtgcaataggtgaatcgttccaactcattttaagttcttaaatatctactgtttggctagttttttataagtgttgttttggtcaagtgttggtttgccatatgt

SEQ ID NO: 3434 - DNA, 350 bp, Gossypium hirsutum
gatattaaaagttaagtgagattctattcacttgtattacatatgtatatataaacaggttggcatgttgctgtatgcatgtatatataatatatatatatgtacgtatgtaagtatgtatgaatagtaaagcaagagcaagcgtgtataagaagagcaaaggtgtctgttgttgtctccactttcccagcacttagcctgatttccagggtttcttacatattcttcttctttttttcttctctttattttcctacttttctcatccactttttttttctcctttacaaatcctaatttgtttgcacaaacaaatatgaaatatccttctttcggcagatcacctgcaa

SEQ ID NO: 3435 - DNA, 518 bp, Gossypium hirsutum
  misc_feature (513)..(515): n is a, c, g, or t
tagcagtcaaattattagtgcctgcatgctgctctgcattgtcatctttctctgctgtatggtgttgccgggcggtgggatcggaataggccttgaaatttgtacattccaatcatcctcattcacgccagaagatcattcaatcaacaacggcgtcgttttcacttttatcagtacttgttcacgggtcacccaccctgcttaaatctgattgtagtggtacctagttgagtagtgttaaagagtaaaatttggagcttaactaaccattaaaactgatggaagtaggcagagaacctggcgagctgtcggtgaaattttattactcggtttgacggtaaataaaaaaattgtaaaaattgttaaaattttagtactttatgttcatttgaattccacttaaatttcagcgttaagataattctcatttggataacacaacactcgtcaatttgttaaccaaacttcagccatcacagctttaccatgagatcaccttcacctcgccaagannnggt

SEQ ID NO: 3436 - DNA, 653 bp, Gossypium hirsutum
tggaggaggcttgtctacagacgtattgatggaacaactagtttggaagatcgagaatcagctattgttgacttcaatagcccgcactctgagtgcttcatattcttactaagtattcgtgctgctggacgtggtctaaatcttcaatctgctgacactgtagtgatctatgatcctgatccaaatcctaaaaatgaggaacaggcagttgctagagctcaccgaattggacaaacaagggaagtcaaagtaatttacatggaagcagttgttgacaaaatctctagtcagcagaaggaggatgaattaaggagtggaggtacagttgattttgaggatgattttgctggtaaggatagatatatgggatccattgagagcctcataaggaataacattcaacagtataaaatcgacatggccgatgaagtaatcaatgctggacgttttgaccagagaacaacacatgaagagagacgcatgactttggaaacattgttgcatgatgaggagaggtatcaagaaactgtccatgatgttccctcattgcatcaggtaaatcgcatgatagcaagaagtgaggaagaagttgagctgtttgatcaaatggatgaagaactggattggactgaggagatgacttgtcatgaaca

SEQ ID NO: 3437 - DNA, 636 bp, Gossypium hirsutum
cacttttcctgcccgtctattatgtggggattgttttgaggtaatgacgttgttggtagcaacttcgaaaattattaactggccagcatatatatagtttctgcttctctggattacttatcacattcaatggcataattagtcatggtcaatttgaatagggttataaattatctgaacagtgaaacaaaatgtatttgggcaattggacctgaggaccaacttattaaggatgtacatggtttagcaggtattgaaggatatagctctaatttttgcaagtttataattttcaggtgcgtcttgataaagttttggcaaatgatgctccttttgatatctgcagttgccaggtgactgaagtgctgttgatgttttcttcaatagttggaatttggaaaatctactattaagtgtattttttttatcctacgataaaattgctatttaactatttgtcgccttgtctttaattacatattgtttagaagtttggcctggagttctttaatctttagtattctgacagtatttttaatagaactctacatatgtagaagagctaccaatgctataaactagctgttttctcatgcaagctccttatatgactgaaccataaatgtggctataacg

SEQ ID NO: 3438 - DNA, 612 bp, Gossypium hirsutum
  misc_feature (476)..(476): n is a, c, g, or t
ccctcaaggaactaaaattatagttgattatagcaagcaaaaagcagataaactaaacagaaattcaagagtcaaaatacgatttttcttttgtccatgtgatttgcacttatatttataattaatatctttaagaataaaaacaacctagagttaacctagtagaaagcaagtttctaaatcttcatagtaacgattaaaaacaaatattgttcacaaacaagcagagaatacttatatatactcaatttacatgcatgaataagaagacatctacatgagagagagaaagcaagtgagtgcctaattaacttgaagcaccagcagaatctaactagtactgcaaccaaaatccagtggtttgatttgaaattaactgtgtcattgcattaacaattccattcttcatgtaattcactatccatccaatccccgtcccttccttttacctttccacaaatgtacaagtctcaacntggtctaaaataaatcacatccttcactttggaataatatgctaatattccatagtggtgtctggcatttccaatgtgaaagaaagaccctgccccaacctagagggaagaaaatgaagttaaaacatccacccat

SEQ ID NO: 3439 - DNA, 593 bp, Gossypium hirsutum
actattcagagtacattgacataaatcttttaatgaaaaagaaaaagaaagaaactgcataccttattcttttagaacgtttggctgcaagcaacaatgatagaaggttccaacctgcaccccagtttctatcaagtatctgcaaaaaagataatttgctaaaagatccttacagacagtaagtgacaagttgtgttcaagtaaaatgacttaacctggagtccaatatttccagttgcagagttccgagtgaggattggcagaagaaattcacgcaagcatgaggggtcatttccctgtaattgcatatggaaatacaagatgatatgagataacattcattcaacagaatttaaatgttaaagagggaacgactccattttatcagaagaattagagtaactttaaagtcaagatatgcaacattacagacttgggggtgagtctcggccctcggggatgtctaagacatgattatgttcaatttttctaagttttcttttcccatatattaggaggatcatactcccatacctatggctagatgtgtatttgaccatgtcaattatgagtacttcaaggaaaatgaaaat

SEQ ID NO: 3440 - DNA, 433 bp, Gossypium hirsutum
atttttattctttacactaatttttctcacctacattcctagttctcgagaaacaaacaaaggttccactacgaattgagcagaatatcaaattttaggtctttgtaacaattgatgcctaagtcctaaagggctaaaacacatgcaaaacctaagtttctgatgctacagttcatatatatatatatgtaaaaggactttcaggaaaatgaaaatacttgcataataatatatatatatatccatacttgcataacaagggaacattgcatggtacgtaatattggaggattctgcttatctagtagttttcaagttttttcggactgctgttaatggaaatatatcacagccaagcattagtaccaaccttcgcttgttggcgtacaaagggaaagctaacgattactaacgtcctatgatagaaaaactg

SEQ ID NO: 3441 - DNA, 613 bp, Gossypium hirsutum
  misc_feature (414)..(420): n is a, c, g, or t
  misc_feature (422)..(423): n is a, c, g, or t
  misc_feature (427)..(429): n is a, c, g, or t
  misc_feature (438)..(443): n is a, c, g, or t
  misc_feature (448)..(451): n is a, c, g, or t
  misc_feature (453)..(459): n is a, c, g, or t
  misc_feature (469)..(472): n is a, c, g, or t
  misc_feature (489)..(491): n is a, c, g, or t
  misc_feature (534)..(535): n is a, c, g, or t
  misc_feature (540)..(541): n is a, c, g, or t
  misc_feature (549)..(555): n is a, c, g, or t
  misc_feature (592)..(594): n is a, c, g, or t
ttttgaattgaaggataagtgaattaactgccaccaacctatcgacacattgacaaattggctcatgcttaagaatgcaacacttacatggtttcaactactttttccattgattgttatgttaaaagaatgtcaaatcaagtccagataaaaaaaaaggattaataaaaatgagttgtaacagtgtactaatagcaaatacctcaagaaaatagaatccatcttaaaccttcctcgctctcttacatatatatgatacacggtttctgaacctctggtacacttgcaggggcgtttcttgaagtcagacctcttttcttctttctgttggatgacggttgccaagtgaatgcacagccgacatgatgaatgaacagcagccatatccacgagggccttgaaagaatcatacgnnnnnnncnnacannnttcgtacannnnnngttannnnannnnnnncggattaatnnnnttgatatcatgatgagnnngaaatctataacattgcaagtatgaacttacatgtatattggnnaaatnnatggaagnnnnnnntaaggtaccctcaactacctttaaattgcatttgttnnntaattgacttctcaattat

SEQ ID NO: 3442 - DNA, 623 bp, Gossypium hirsutum
tgtataggggttgctgttcatatcgaatgcagttcctggggacggttttgccaccatgctaaactgttgttgcggtttggtttgcagattcctgtcagcctgtgttccggatttctcttgatttaggaggaaacaatgaggggtgacattctgtggagggactgcatttctgtagaagttcttagtgtcgtaaccatctttaatgttttttacgtcctcatatggtacaacgtatccgacaactctcccaggctttgctgtacggaaaggataacacttctggctcagcaaaatagtaaaacaaacaaaagggaaaataaagccataacgagtctacttggctcagacccacatcgaatgtgcgccgcaatgggataacatattcacgaaactattacgaaatatggtttcaatattcaatgaccaatagaaatgaaagacagaaaacattcatacctgaaggcaccctaggcggaggccgtgttggctttggtttactagaaattacatccattgctttcctggcatctgcttctctatcttgtcggttctcgtacgaaactgaagtagactgtgtatttggagtaataccatttgaatggacggtagacctgcaaataaac

SEQ ID NO: 3443 - DNA, 632 bp, Gossypium hirsutum
actcagcctcaaaacaaattagtgctgcgatatccccaggttatacttatacccaattaactactttgataatctggtttttcatatcaatttagttcaataagtgatttgcatccacaaaagtactttcacatgtttccacaagccaggatatattgcttgattggcatgaaagctcagaaactatatgattcacttcaatcatacaaagacattatcttttccttgtagatcaaaatactacagcatttaaggaggtggctatcattcgccatccacgtgttggtgaatatgcatttggatttatcacatcgtctgtcgtccttcaggtactattttaatattttatctgttcttttgccagatcatttttccagcttgtagttcataattttaaaactaaggtgttcgtgtgatggcttgcttatcttagaaatgatcttgtgatcttttctgaaggagatttgtattgcacatctaaggaatctgaacgatatatatctccctgaaataaactgcttatcttttataatgaattgggataatataatttttggcccttgaacttggcagctaggcctactttggtacttgaaacttttttttgttcactttggatctaaacttggcaa

SEQ ID NO: 3444 - DNA, 623 bp, Gossypium hirsutum
catttatggttcataacaagcaggataaatttcttgcttcctggcttttgtccacaatctctgatgaagttttagttcatttaacagcagctaagaccagttctgaaatttggatggctgttgacaaacgccttggtgccaaatcgagtgccaaactttccagcataagacatacgttgtattcgatcaagaaagcagatctttctgttaaagattatctttccaaagtcaaaagtctaagtgacagtttgacaacggctgggagttttgtttctgatcaagaacaggttagtgtgatcgtggctggtctccctattgagtttgagtctattcgtatttttgcttctgccacacctgtgagcttggaggtggttactgaaatgcttcttgattttgaagcacggcagttggctttgttaactgatgcacctttgcaagctaatgtagtatctagtttgcagcatgataattctgctaactctcgaaatggtactagtcgtggacaaaggggtcgtgagtggtctcgtggacgcactcgtggctcagatcgagggtggtctcgcttaaaaccctagtgtcaattatgtggaaagataggacatctggtgcaaacgtgttatcat

SEQ ID NO: 3445 - DNA, 560 bp, Gossypium hirsutum
  misc_feature (544)..(544): n is a, c, g, or t
  misc_feature (548)..(548): n is a, c, g, or t
  misc_feature (550)..(552): n is a, c, g, or t
  misc_feature (554)..(555): n is a, c, g, or t
caagcagataggagtgtaatttactcatatctcatgccaacaaggctcgcaatctgcgcagcacaagccacaacgcttcggatagtccagtaagcagctgtggggatatgagccactgcgatcgacattggcggcaagtcgctggatatgtactgagaaggtaactcggtgaactcgacgatgcacttggttacttccatcattgccttgatgagtttgtgaagtgcatcgaaatggggtttcagtgtgtgggaatactctaagatatccggcagttgtttaagtagcgccacggatttggcgagtgagttcgtagtgcagagttgaagaaccagccaacattccccgaaattcacggcgaaagcggctaacgttagcaccactttcgcgtcccatgaatagcttgaaagcgtgttgagaagcaccattgttgtcgcatgagcgtcgcctccgcccgagcacttgcatgatatctgcaaaacacatttataatacaattatataatattatccctcggtaatattcgacggtatcgggaatttngatntnnngnnaaaaa

SEQ ID NO: 3446 - DNA, 1388 bp, Gossypium hirsutum
  misc_feature (626)..(626): n is a, c, g, or t
  misc_feature (640)..(651): n is a, c, g, or t
  misc_feature (653)..(668): n is a, c, g, or t
  misc_feature (670)..(681): n is a, c, g, or t
  misc_feature (683)..(685): n is a, c, g, or t
  misc_feature (687)..(689): n is a, c, g, or t
  misc_feature (692)..(710): n is a, c, g, or t
  misc_feature (712)..(712): n is a, c, g, or t
  misc_feature (717)..(719): n is a, c, g, or t
  misc_feature (723)..(723): n is a, c, g, or t
  misc_feature (726)..(732): n is a, c, g, or t
  misc_feature (735)..(738): n is a, c, g, or t
  misc_feature (740)..(748): n is a, c, g, or t
  misc_feature (750)..(776): n is a, c, g, or t
  misc_feature (781)..(782): n is a, c, g, or t
  misc_feature (784)..(792): n is a, c, g, or t
  misc_feature (794)..(798): n is a, c, g, or t
  misc_feature (805)..(806): n is a, c, g, or t
  misc_feature (810)..(810): n is a, c, g, or t
  misc_feature (815)..(850): n is a, c, g, or t
  misc_feature (861)..(870): n is a, c, g, or t
  misc_feature (872)..(872): n is a, c, g, or t
  misc_feature (877)..(889): n is a, c, g, or t
  misc_feature (891)..(892): n is a, c, g, or t
  misc_feature (894)..(896): n is a, c, g, or t
  misc_feature (898)..(899): n is a, c, g, or t
  misc_feature (901)..(915): n is a, c, g, or t
  misc_feature (917)..(926): n is a, c, g, or t
  misc_feature (929)..(934): n is a, c, g, or t
  misc_feature (936)..(936): n is a, c, g, or t
  misc_feature (939)..(949): n is a, c, g, or t
  misc_feature (951)..(954): n is a, c, g, or t
  misc_feature (957)..(961): n is a, c, g, or t
  misc_feature (964)..(974): n is a, c, g, or t
  misc_feature (977)..(982): n is a, c, g, or t
  misc_feature (984)..(988): n is a, c, g, or t
  misc_feature (991)..(1004): n is a, c, g, or t
  misc_feature (1009)..(1015): n is a, c, g, or t
  misc_feature (1022)..(1022): n is a, c, g, or t
  misc_feature (1024)..(1024): n is a, c, g, or t
  misc_feature (1026)..(1026): n is a, c, g, or t
  misc_feature (1028)..(1028): n is a, c, g, or t
  misc_feature (1030)..(1036): n is a, c, g, or t
  misc_feature (1038)..(1039): n is a, c, g, or t
  misc_feature (1042)..(1047): n is a, c, g, or t
  misc_feature (1049)..(1068): n is a, c, g, or t
  misc_feature (1072)..(1072): n is a, c, g, or t
  misc_feature (1074)..(1078): n is a, c, g, or t
  misc_feature (1080)..(1085): n is a, c, g, or t
  misc_feature (1088)..(1090): n is a, c, g, or t
  misc_feature (1093)..(1099): n is a, c, g, or t
  misc_feature (1104)..(1107): n is a, c, g, or t
  misc_feature (1111)..(1113): n is a, c, g, or t
  misc_feature (1116)..(1120): n is a, c, g, or t
  misc_feature (1122)..(1127): n is a, c, g, or t
  misc_feature (1130)..(1148): n is a, c, g, or t
  misc_feature (1151)..(1151): n is a, c, g, or t
  misc_feature (1153)..(1153): n is a, c, g, or t
  misc_feature (1157)..(1159): n is a, c, g, or t
  misc_feature (1161)..(1163): n is a, c, g, or t
  misc_feature (1165)..(1169): n is a, c, g, or t
  misc_feature (1180)..(1182): n is a, c, g, or t
  misc_feature (1185)..(1189): n is a, c, g, or t
  misc_feature (1191)..(1208): n is a, c, g, or t
  misc_feature (1213)..(1224): n is a, c, g, or t
  misc_feature (1226)..(1227): n is a, c, g, or t
  misc_feature (1229)..(1232): n is a, c, g, or t
  misc_feature (1235)..(1236): n is a, c, g, or t
  misc_feature (1239)..(1239): n is a, c, g, or t
  misc_feature (1243)..(1243): n is a, c, g, or t
  misc_feature (1249)..(1252): n is a, c, g, or t
  misc_feature (1254)..(1259): n is a, c, g, or t
  misc_feature (1262)..(1270): n is a, c, g, or t
  misc_feature (1274)..(1276): n is a, c, g, or t
  misc_feature (1281)..(1287): n is a, c, g, or t
  misc_feature (1294)..(1304): n is a, c, g, or t
  misc_feature (1308)..(1315): n is a, c, g, or t
  misc_feature (1320)..(1324): n is a, c, g, or t
  misc_feature (1328)..(1336): n is a, c, g, or t
  misc_feature (1338)..(1338): n is a, c, g, or t
  misc_feature (1343)..(1343): n is a, c, g, or t
  misc_feature (1345)..(1345): n is a, c, g, or t
  misc_feature (1351)..(1372): n is a, c, g, or t
  misc_feature (1375)..(1385): n is a, c, g, or t
ctttgatagattggtgaagatcaagacaaagatcgatcctgaaaattttttcaggcatcaacaaagtatttctccttattttggttgattaaacaaggaatgtcttcgtatctaacaattcaattaaacaatgatatttgatgtgtaattagtaaaagttgaatagtgacgatcatatgataaatcttgtgcacaagtacatttttatgtgcttttccatcataattcaatgaaattgttacacatttatatgtttatatagtatttaattttagtattatgtttgtaatatccataccccagcttagatacgtgacaacacaagaggtagatattcgtcaatggtcctttgttttcttctcagttaagggcgtctaattagttatgaatctgactgaatattcacgagtatatgataagtcatttgattttacctacttgttatagactgttcatagagaccactaaaaagtcgttaagatataacaacctcgtactacctcaacaaaaagaatatcaaagaaggaccaaacaatattatgcttcatgacaactaacatataacaaacatgtcatctggctaaccacacaagcaagccaccaattgtattatcggtgactgacgntacaaaaaaaaaannnnnnnnnnnntnnnnnnnnnnnnnnnnannnnnnnnnnnntnnncnnnacnnnnnnnnnnnnnnnnnnnanatttnnnattnctnnnnnnnccnnnncnnnnnnnnnannnnnnnnnnnnnnnnnnnnnnnnnnncttcnncnnnnnnnnnannnnnattaccnntatnatttnnnnnnnnnnnnnnnnnnnnnnnnnnnnnnnnnnnntcatctcatcnnnnnnnnnntnacaannnnnnnnnnnnncnnannncnnannnnnnnnnnnnnnnannnnnnnnnnacnnnnnntntcnnnnnnnnnnncnnnnttnnnnntcnnnnnnnnnnnttnnnnnntnnnnnacnnnnnnnnnnnnnnactcnnnnnnntaacaanantntnannnnnnncnnaannnnnntnnnnnnnnnnnnnnnnnnnnttanannnnntnnnnnncannnctnnnnnnntaccnnnntatnnntannnnncnnnnnnatnnnnnnnnnnnnnnnnnnncananaaannntnnntnnnnncttcacccacnnnctnnnnntnnnnnnnnnnnnnnnnnnttaannnnnnnnnnnncnncnnnntgnncancctntctccnnnntnnnnnnatnnnnnnnnnactnnncactnnnnnnnctcatcnnnnnnnnnnntacnnnnnnnnactcnnnnncctnnnnnnnnncntcatnanatattnnnnnnnnnnnnnnnnnnnnnncannnnnnnnnnntct

SEQ ID NO: 3447 - DNA, 630 bp, Gossypium hirsutum
ggatgcctcatgcttaacctatatgaaaacaacactcttccacatgcaaattaaaaattgaaaatgacagtaggaaaaatacacatttatagcaccacagagggatgttgttggcatgacgtgttgtcaaatttcatttcatcagatctgtttttcaggtgtgtaaatcaaactcttccaaaaataaaataaatttatgcttgtccctcctcttcatgctttacaagccgctctaaatagctaaggcctttgttctacatgtaacaatattttgaaaatccctgaatggggaagaatgaatttgaaggtggtatttttatatgctattcaacaaacccaaatcttaaggcttcaagtttcaaaaataaggaaatcaacagtgtgcttacaacaacaactatcgacaccttcagttatggccgaaccctccatccacgctcagcaagtgcttcacgcacctgacttgctgcttctgccatgtcgttgaggggaggatagctccagctttctgcaatctaaaagacaaccagggaatttattcatataattaataccggaagagctttcgttattcaatataatccagttataatggttgaaagagcagaaaattggttaggaactaggttc

SEQ ID NO: 3448 - DNA, 944 bp, Gossypium hirsutum
  misc_feature (647)..(661): n is a, c, g, or t
  misc_feature (663)..(665): n is a, c, g, or t
  misc_feature (669)..(669): n is a, c, g, or t
  misc_feature (674)..(686): n is a, c, g, or t
  misc_feature (694)..(702): n is a, c, g, or t
  misc_feature (706)..(713): n is a, c, g, or t
  misc_feature (715)..(762): n is a, c, g, or t
  misc_feature (767)..(767): n is a, c, g, or t
  misc_feature (770)..(781): n is a, c, g, or t
  misc_feature (784)..(784): n is a, c, g, or t
  misc_feature (786)..(787): n is a, c, g, or t
  misc_feature (793)..(801): n is a, c, g, or t
  misc_feature (805)..(818): n is a, c, g, or t
  misc_feature (827)..(833): n is a, c, g, or t
  misc_feature (835)..(846): n is a, c, g, or t
  misc_feature (848)..(862): n is a, c, g, or t
  misc_feature (865)..(874): n is a, c, g, or t
  misc_feature (876)..(882): n is a, c, g, or t
  misc_feature (885)..(896): n is a, c, g, or t
  misc_feature (900)..(902): n is a, c, g, or t
  misc_feature (906)..(922): n is a, c, g, or t
  misc_feature (925)..(925): n is a, c, g, or t
  misc_feature (927)..(928): n is a, c, g, or t
  misc_feature (935)..(935): n is a, c, g, or t
  misc_feature (937)..(940): n is a, c, g, or t
aaatggcactttctcgccattttcacttcctttacatttaatccccaatacccatttcaacactcacaaaagcctctccttttgtccaaagtctacccatttacagaccaaagtttgcaccttttcttccaaaaacttagccttattcttcaaaaagagaaaaaccgtttgtgggacttggaaactgaattctgctgaagaagaagcagcagctcttcctgtctctcctacatccactctcagaatgtacttccaggtatgggttttttacttttcaacactgtttatggtagcttcatgtttttttggtctcgtaaaaggaaaactgaatgtaaactatttaatcccctcttttgatgtactggaattttgttggttgagtgatataagttttatgttctaagttctatttgttacttaaaattatgttgaagttcaattttgttactggtttctgaacaagtaatgaagaatggttgttatatttgttaaatgttgcttttgaacttaagtaataacatagcttctttagtacttgttctttaatatttatctatggatgaatatatttgtcattgaattctggaaaatgtatagtttttcatagaccttaaagaacctttactaaggactgcatctttcaaacnnnnnnnnnnnnnnncnnnaggnccggnnnnnnnnnnnnnaacagatnnnnnnnnnaaannnnnnnnannnnnnnnnnnnnnnnnnnnnnnnnnnnnnnnnnnnnnnnnnnnnnnnaaaancannnnnnnnnnnngancnnaaaatnnnnnnnnngaannnnnnnnnnnnnnataacaccnnnnnnnannnnnnnnnnnnannnnnnnnnnnnnnntannnnnnnnnnannnnnnnatnnnnnnnnnnnntaannnatannnnnnnnnnnnnnnnncanannaaaaacnannnnaaat

SEQ ID NO: 3449 - DNA, 610 bp, Gossypium hirsutum
tgagggaacgcatgcaacaaattgctgcactggagggccttgaaggtgtgccaatggattgtgccaatatcttgaacaacggactggatgtctacttaaagaggttaataaggatgagctttgagctagtaggaaccaggcatggatgtagtttgagtaaaaataatacagtgaagcagcattcccactggaatcttgttaacggtgtctcaccaagtcaccataatcaggttcaaaatagcagctggaatttggaagctatagacgaacagagatactacaaactgatttctttgctggatttcaagactgccatggaattgaacccacagaggcttggagaaggctggccagtactgcttgagaagatatacatgcattcacccgaggaataacattcaggaacttgtgtgtctgtcagtcatttatttggtaacttaatgtcaaaaggttcccggaagtggaaataagttttcgtgagcagggtgctgcatttaggattatgccccctaaaacacgatacttgtggttagttggcaactagtcaaaagggataaggagaaaagcaaacacatgattgattgccccgttgttgtacctttagcattaa

SEQ ID NO: 3450 - DNA, 619 bp, Gossypium hirsutum
caatatatgtacggagaaaacttcttgatggacaaaacacaacatgagcagaaccgaaatatttgccacatgaagagtaaaattctgataggggatttgattcaggttctgattgaattttattctgatctttatttccttgaatttccttagtgatttaataaaactttcatagtaaatcaggatattttgttgtcatattcttgttttccttatcagaataaaaaataagggtttccattctatttcctaaattgtaaaactttaagtggtatattattcatgaataaaacaagttgaaagtttcagcaaaataaaggtacagaactcccttagagctccacaaccataggcaaaaataggaattgaaataaaggcaaaggccctttcttaaaatctgatttttgtgctacctgtccggtgactcaatatattccttccattgacaccctatatctctcgattgcatatagcaatccacttcattaccttcttgttgataaaattgataatcagagtacacacatatgaggctcagatacatgaacaattatgatgatcgatgcatatcttggtaagtaataaagggaagtcaaacacttcagctccatacttccaa

SEQ ID NO: 3451 - DNA, 613 bp, Gossypium hirsutum
  misc_feature (376)..(379): n is a, c, g, or t
tcgtcaaatccagtggacgacaagaaatgggtgacatatatatgaaaatgcttttagaaagatactgataaactcaaaacaaaacaccgaaacacaaatactggtacgtaacaataccagaacaaaaacaatattatccacttgttcgatactataagtaccttaaactcgataggatagaaccaacagaacagaacatgattagagaggttatcaagcatgctatagtttctaatgatgttttcatcgaatccagtagatgacaagaaatgggtaacatatatgaaaatatttttaaaatattaataaatttgaaatggtacaccaaaacacacaaatatcgtaacaatataaccaacaaaacagaacatgattnnnnaggttatcaaagcaaagctgtagtgtttaatgatgtttcatcgatccaatagacaacacaaaatggataattattatagaagtttttctgccttctttcagttcccctttaaggcacattttttaaagcttataacaataaatataacaataaaaaaggagttcatcaagtctttttaacattcccaaataatattacaacaaggtattttatcagaggagtggatcaaatcta

SEQ ID NO: 3452 - DNA, 572 bp, Gossypium hirsutum
  misc_feature (487)..(487): n is a, c, g, or t
  misc_feature (547)..(552): n is a, c, g, or t
  misc_feature (554)..(556): n is a, c, g, or t
gcttaaaggttctgagcctttcaagaggcatattgcaacggtacttgtacagctaaaggaagccaatggccaggcatgtggcttctatgaattgatgtagaagtggtttattcttttcttcgattttgaactctcttcttcgataactttgaattgatcattttccatgcaggtttcttctgctttacataacttgagacaacataatgcttacccagcaaacccagtatcaccacagcagaaacctccaactaagtccaatttcttaggtagcttgacaagttctattgacagttctcttgattcacaagaatctgattctgttgcgggcgaaattgttgaaggctcaagattaaaagcgggttctatggtggatgccgctattaaggtacaagtatcttttcttccttgtgtatatatttactgacccttatttgtctgagttgatgtaatgacgactattatgaatgcattttctttcatgacntgacgtctactaaggaagacgaagatgaatttatgatgattgtagaagaattggagtacnnnnnnannncactatttacacctga

SEQ ID NO: 3453 - DNA, 604 bp, Gossypium hirsutum
gagctatataaggaatgttttcataagcacaagcaggaactagaataatcattaagatctcataccatacaaaccccctaacacatacttaagaatcatgacatgaaaaagaaatacagaatcatgtatcctagaaaccaatttcactttccaaattaggtttctattgatttaacattgaggagtaggcagggattcgtgtttatagggaagggaaccaactcaaggattacctggtgagccctatttgcaaaatgcatgccttgaagaagcagtgcctcttgtgcagattccttgtctaaactgcgtaccaattgaagctccgttcccactctctttatgtacattgtgaccagcttcatagaagcctgctttatctacaaaattacacattcttcactgacaatggcatttttgtgatatggtgaaaaaggaagagcagttgaatatgagatgagaatgcaatgcatgtttgcacttcaagaaattttcaccaatagtcaaatacattaaaagggaggctttcttcacttttcaactactagaaaactcagagaagttcaaaattttcaggccatttactacaacacctgtttcccttcat

SEQ ID NO: 3454 - DNA, 652 bp, Gossypium hirsutum
actacacagttttcttggatcaacatttgactaaaacattctcctattttcgcagagaaagcaaaacttctcatgcaaaatttgaataagaattttttatttgttacatgaatatcaagtgttctttcttatttttaaaataaaatgtaacactatcgaatttaacaaaaaaaccaatttaccgaatttaacaagtaaagataaaatttaaaattaaaaggcaattaaaattttaaaaataaaacctttatttatttttatgtatgcataaaaatctttatttttgtctgaaagaagtgtttctcgttcccctaggcttccagtgcccttttccactaccaagaataagaaaaaagtttaagtgaggggcggggaggaaaataagccgaacacactttgggctgcctttttaacttagtgctcaaacagtacgaacccactttgaatcatggaatcaatgaacctctctcaccttttgaaatgccaaaaagtaggatttcagatttcaaaaagttgatagctccatcacattgtaaagatagaatgaagtactacagtggggaatcaatctctcattttatgtgctttgtgttgtaaagaaatcaaactctcaatttccttggcagccgaagatagaatggtggggtgggtt

SEQ ID NO: 3455 - DNA, 635 bp, Gossypium hirsutum
tcactctgataaggtattgtgaggtcatcaatgtcgggccgaatccacgccgaattggttccagttgagctccacaaatgcatcagtgaatttcacgagcccattttttggccggttaaatcaaatgccggaagatattaaaacgttgtattcgtttaaacgcttttggaaccgagccaatcggttctgcaattgtaaaatgcctgcagccttctgtgaaagaatggcacttaatttagagatatagttatccaactgattgcctggttggtcagcttcaactagcagattcatctcctgtaagcataacaaagttactcatctggacttgggtttgagtttcgctacgaatgaagagtcagagcaatatagccatttacctctcgaacaatctctattgtgtgctccacttgccttcgatgagcggatacgaggtcttcctcttcctagtaataaataaatgaaacgaatttaatttcggaaatatatacaattaggaaagataaatcagatgatcggatcgattgatggtaccttcagcagggcatttagatcatcatctgaattagtctcctcagagtgatccaaatcatcctcggccattctgttcagaccacttttctgacccatgtaat

SEQ ID NO: 3456 - DNA, 653 bp, Gossypium hirsutum
caccatatatctctaaagtaagatccataatgttttcatatctttccgactcatgaaaacatcgtagacattttacctgattacatggagatcgatcatacatattgtgtaatataaaaggttaacaaagtaaagtaactataaacacctttgatcgaagacgcccaccaaaagtatgttgtataaatgtcgtctcttgcaacctcgggtcaaccttgtgttccccacctaatctctccaagcatatggattgcattgaagcaaccaggagtctaatggacaagaaatgaactttcagagagccaaggagatgaaattttcattctcatgataaacacgtaaaaacatgaagcaaaactcaaaaatctcgacacataatgagggggaaaattaagggtttggggggatattggatattgaatcatgtaaacctcaagaactcatgtgcatcttcctggcttccatcacccatctgacaattaatacttcggatgtgcgaaaggatcctagtagaagacaaggggcccccactctctcttaacaacatcacatgttgttcaagctcacacataagacaccaatctttcccataacctacaatgaattaaaaggttatgctatgcatgtggccaaacagtgacatcattctaatg

SEQ ID NO: 3457 - DNA, 629 bp, Gossypium hirsutum
acaaacacgattaataacatattaaacattataattttcaacaaaaaaatgcatctatattaaaaattcgaaacatagaaggaagttttcatttccatggctttctaaaaagcttcaaccaactattgctatattgttcacacgtaagataccaacatgtctttatgcttcaaatctaaaacagtgcatcataacgaaatttctcaagcttatagtcttccttgccccaacttagcagaaccttaatccagcacatgcatcccccaaaacaagatggtaaacacaagacagagatcatacaagtacgcaaatacagttatccattgtttcaccataaagaagcaataaattgaaaaacattcagctttatccctcaactaagctctcacttcctaccaagatttgatacctccaacagtgaaatcaaataattaagcacatcagccaggtaaaccatagtccttttttcttttgcattctagagatccaaaaacctttttgtcacgtatttcttgtcagaagttaacaaatacctaaatccttataaagatatagaaaacgataacttccatggctcttataaattctataaaaactgtatactagtagaaaattgcagattcatatgg

SEQ ID NO: 3458 - DNA, 612 bp, Gossypium hirsutum
  misc_feature (594)..(594): n is a, c, g, or t
aaacttcttgaggtcccatcagcatcacaaatacagacgacttatttcctgaagaatcacctatgaaaaacccaagacttctaaactaatttcatcttagaatataaaatgtttataaattaaacactagtattgtcatctgtagggacaaagaaagaatggattatggcctatgagattgacataacatgatcaatttgctcactgtttttgaattttgacaaactataatactaaataacaagttagaactattgccagcatcctctatatatgacatgttagcaaatgctttttgacaaatcctatttttttgggtgtgtgtgaatagctctagagcatttgatcttttgtatgtaaaaaacatgacaaaaacaatgttaaatatgttttactctcttgtaaacgatgatgtaaatatgtaaacaatgtaggtgttttttttttgtcattttacttttacctattgtctatatctgttagggtttcacgaatgctgaaattttgcttttatttgggctgtttgactgcttacgctgtcgcgatttattatttctgttttaggctgttatgggtgctggacttgatgggccnccgggccgttgattgggg

SEQ ID NO: 3459 - DNA, 633 bp, Gossypium hirsutum
atgacattcattcagttcaaaaactaagcaggccatacatcagaacttttatacataaccagagtttaacatatgaaattattcaatctgcaaggaagtaattaaaaatgcactgcgaatcacctaatttgtctaatccatttagatttggaaccagtaaatgaccaggatccaataaagcatgggatctaggttcagtgttagaagggaattgacagaaaattacacataattgcatgaaaattaattaaaagaacatgatcaacatgctatttattaacaaggagtcaaagaatgacaagtcaagcagtgaacagtataaaaggtaaagctagcttatcttttgtacactacttgcataccttaacaataatcttggtctcctcaaaagcaagatttgctagagacaagacagtatccgcatgatccattagtgcctgggcataccaatggaggaaaaaacgcccatagtagctatcataatcaccccgttcacaaaagaatcccgtttcatgtggcctagaattataatgaccagcattatcaggtcccctagcccagaaagagtgcccacgcaatttagcagctttccgtagatgttgttgtaaatatttatcataaccctggacagat

SEQ ID NO: 3460 - DNA, 596 bp, Gossypium hirsutum
attattccagcactggtattgtggatggagactgaaatttttattcttcttttcaagtaattataatgttaataaaatcttaatttgtagtgtatctttggtgtttgcttaccttgtataatactacaaaaacaaggaattcagggtgcagatgcttagaattagatccacagcatattaaccgttgaaaacataaagtccaaaaacacaataccttacaagtaaataattaaagcattagtgaattatcatgtcatccaaatttttgcatcttcacttgcagagcaagaggggatccatccccagttcacctttcatctactacagagtacagccaacagtcacttttaagacaattttaggataaatcattgagctgtacaaaccaagaattccatgccaacagatccatccccaatcccacaatgctgtaaagtgattgcatgaaagaaaccatccaggtctttccttacatctcatactatcatatgcactgtttcaccggctatcatcaatatattatcatcttgcagtttctggcaattgtgaaagtagtgactgttagtacatagcattcttaaatttagtagtggaac

SEQ ID NO: 3461 - DNA, 586 bp, Gossypium hirsutum
  misc_feature (320)..(320): n is a, c, g, or t
  misc_feature (434)..(434): n is a, c, g, or t
  misc_feature (442)..(442): n is a, c, g, or t
  misc_feature (445)..(445): n is a, c, g, or t
  misc_feature (535)..(536): n is a, c, g, or t
  misc_feature (574)..(574): n is a, c, g, or t
gtttctgcgacggtgagcccgctggaacaggcggcaagtgcgagtttgagtccaagttcaagtgtgctttgcaagcagttctggaaggctggggattatgaaggagctccatctagcgcttgggagttatctacaggtacaactgttgattaattatgctatgttataagtttagttttatatcttgcttgcaagatggcgatattaatttggttccaaatttggaacctactggcacgaaaaatttttgtagtccttttttagtacacgatactgtatgttgccatcagaagatgaaattctatgagttatgagagaanttcaatccagtggggtatatgcattttgaattttgcattgtttgatgaatatgcttacctctctatatccggatcactttttttaaattgctgaatttgttgggaaattcaaanttcccttntantcatgcggggcgtaaacggatgattgtttgatctctgtattttttctttatttgttgattttgttcaatgcttcttcacttaattacgtnngacttgtaggtggcatggatcatgtcagggttcatccnaaatttctacat

SEQ ID NO: 3462 - DNA, 630 bp, Gossypium hirsutum
catgtcaattgtgtggacgagttggtcatactgtccaaaagtgctattattgctttgatgagagttttgagggggtgtctgaccagcccatgcaggctcattatcaccaatttcagggaccttcaactttttcttgtgcaggacctcactattactctcatatgaatgcttccactgatgctgcggctacttctaagcaaagatcgtgttcttcaaatcttttgaattcaaccgtgtggtatcccgatttaggagcatccaatcatgttactaatgatttggataatttgcagggtacaacactgtatacaggtaatcacaagctttacatggggaatggagtatctgtgcctgtagctcatgttagctcaggtcttcttccaactactagtagagtatttcatttggaaaatatcttgcatgttcctcgtatttgcaataatttgctatctgttgctcaatttgcaaaagataatcaggtttattttgagtttcatccagtgcattgttttgtgaaggatgtcaagacagagagcatttcattggtgggtcacattcataatggcctgtacaaatttgatttgtctgctttccaaaagtttagcgctgtaggttcctctccctgtcact

SEQ ID NO: 3463 - DNA, 589 bp, Gossypium hirsutum
ccaaagtgagagtaataataaggaaccattagtatggttataacataaaaaattccagatttgttgagtttggccttgctggagttgggcaatgatcctttatccaccttgtctgttcctttggtataaaggtaagggtttccttcaatgctgtatcaactcaaaaattcaatttaagcaactaaaacaatgaacgacagttacattttttcagaagagtgaaattaatttataaaggagaaattgttgaattacaagtggaaggtacttgaatgcttgggcagggaatatggggggttttccactcaaattattgaaagacaagtatgtgtaaaattaaacaaagtccatatatatatatgatataatccttgtggaaagaaaaataaaaaaaggatgaagtgggtgcattccttcaaatgaaggtcagtaggattagccaaggaagcaggaatttttccggaaggattgttaccagtcagtttcttgaaccagttaccagattctatataaacttattgcacttatatgttaacaaaagacaaaaggggtcaaatcaaagagtagaacatacaggaatcaaggttta

SEQ ID NO: 3464 - DNA, 629 bp, Gossypium hirsutum
atgcgaagatcagtgttgtagcaagtttggtatgtttattgaaatacaaaatttacatccatatgggcacacataaattgttactcagtttcctgttaggaaattcaattaaaatattaggatttccaaataacagggcatgattctattgtgggatgtcaactctgggcttgctcagattgacaagtatttacatagcgatgataacttcgtgattgctggagcattattaggagttgggctcgtcaactgtagtgttactaatgattatgatcctgtgagtttctttctactcttcatctcttggtttatgcagagagtataatgtttgctatatgtgtcctattttgtttttaggctttggcacttctgagtgaatatataaataaagaagattcttcaatccaaattggtgcaattatgggtttggggattgcatacgcaggtgctcaagatgagcaggtttctctctcttatctgtgattttttattggatgcacatcatttaacaattatattcatcttttgttttttggatgagattgtggactgtacataagtaattctaaagaaagcttaccaatgttattgatagatacttaacagcctgattgccatactttaaacat

SEQ ID NO: 3465 - DNA, 603 bp, Gossypium hirsutum
atcgaggcccggttcattaccaaggaatcctcttggttgtaaccgagatgaacatttacagccacaatagcattctggccattgtagagttctggcttcggatccaatctattctgaccaagaggaaatccagatttaccaagacagtcagcagtcatcgtatggaagagtggcctttggggataatacatctggtgcgacaaagtgtccaccctgatgtttgggttcgttgtagagaacccaattgcctgctgagaatgtttctgggcttggtaaagaaccctccgcgcatgatcatgattggcaaatggaatgattccacagcttaaacccaaaagaaatgacatgtccagctcacaatgcgtgtacttgacaggttgcttcccctcaacttctgttaagaggtacctgataccccatgccgtgcgacaatcttcttcctcttcagctccaatgagttcaacaatccccttgtctaaaaggggctggaaagcataattttccttgcccttgaatgcttttagtttgaacagattttcaacaactaaaagcgggcgtagaatcctcccagcatcagtaaagatccgcacctctccctttatg

SEQ ID NO: 3466 - DNA, 620 bp, Gossypium hirsutum
cccaactgtgcaacagtttcacctacgaaaaacgaatgagcatatcaccaaaataataaaaatatagaaaatcatatcactgattgcattttcttttctttctttattttttatttgttttgttttttgcaaaagacatcagagaatgaattttagatgatataatttaggcattattagctgctatcagctgaaatttttttaaataataaatgaacagggaaaagtcacatttttgggatataattccaagcaagtctcaggaatttattaacaaagaaaaataaaatattttccaaaacaaaatctttaacatggatcataaggcatgtttcccctccatggtaccatcagtgaagctatctcaatactagaaaataacgtgtactaaaacattaactcatataaaactccattattaagaaacaagaagctcgagctattataaacaacatacctgtaccatttcactaatgaatttcaaaccccctggtccaataagtgaacccgccagaagatagcccacaataacctatcatgtgcataggtttaggaaaagtaaagaaagacaacttctttcttgcaaaaagacaacttctttcttggcactttcgtgatag

SEQ ID NO: 3467 - DNA, 613 bp, Gossypium hirsutum
ggctttacttgcctgaccccgcctacgacatcaccatcgacaagatcgtgcaggtcgatttcctgtcgagctcctggttcttatctgctgaacttgtcaagtcactcttcattgaaactcctttcactttcatgactggtgaagatcttcaccttaggtacgttttaaaaacctattcaaaactggaagtcttcttttgaatattaaacatgttccacctacattactaaatatggattaaattgcatttgacttcactactggttgaagaaaaggaataaaagggtttcaacggacttagaagactaactatcatagaatgcaactgaaaaaatataaattaattatctttattgaattcaatgaaacaaccttcttaacgaaggctgaaataaattatgactgagactggccttttttaataaagattgcaatctattattgacaagaaggattatttatttattaactacaaaaaaagaaggatacacaacatgttgcttccactaatgatatttctgccatcctttttttttttggctgttcttaattaagtacctccctacaaaacattatttttaattttcttttttcttaaagtgttggtatatga

SEQ ID NO: 3468 - DNA, 629 bp, Gossypium hirsutum
cagtaaacttcaaaatccactagtcaaaacatttttaatttaaaggtgaaaaaagaatagcaataatgatttttgcataacatacattgcttgcattaatggtttacagaaaacagtcatgaactcaccccagatgaacttggaataagctggctagtcgaaccagacattttagtttctttagaatcatctcctaaattggtagtagctgcaattcagcaaccaaagggacgtagatataagccatgaattgacagaaatgaataagattctcaccctaacattcgattttcacgcattatatataaaataagaaagaaagaaatatcataaaatatggccctttcaacaaatcattgcagtttaggaagctcaaaagagaaaacagagataatggagaaacttcaaaatattcaaaattacaaacttgaatcagtgggtacttcatttccaagtttgacagaggttactgcaagtcagtcaataaaataaccaacaataatctggaagaatatttctttccccaagcagtagcatgtccaacaaccttgaataaagaaagactgagcagttgagacacaaatggattgcaccatttcatgaaattattacaatgcaaacaagcttca

SEQ ID NO: 3469 - DNA, 666 bp, Gossypium hirsutum
tctttgttgagaactcaaacattcaaaaaagtagagtctgatattgtcccattcttctactatgaaaaggtaaaatttaaagaaaataaataaaagttaggaatattaaatagattttcaatcagacattccctttgcacctactacctcaccaaaaagcatgccttgaacgtgtctcacccgtaattgaagtacagttatccaacattcgaggaaaatgcaataatgcatagacaagaacatctattatattaactcataagcaactacaggaaatagtaaagaaaatgtaaagactacagtcaaaggaaattaacctttgcatgaatgaacttctcctttacagatatagaatcagaatgacaaggttttcccataagcagcagctgtggtttatcagacttggaaaagcttcatcaccaataataagcattagtaacaaatagctagagaactatgttggtttttattattactacatatactgtattttaatcataagaaaaaaagattctttaccttggggtaagatcaacgtggaaagcatttctggagtgcaacaattcctcccaaactgagttagcaaaggtattgcccagagattgaaacaaacttataacagatgggtcccatacttttacatcaagagtaagcgacctaacctga

SEQ ID NO: 3470 - DNA, 462 bp, Gossypium hirsutum
ttgataaatctaccaatagtttgaactcacatgcttacctgcttcctatattgaaagacaaaaacatgcattaatttttctataggaagtgaaatcataaaatttaagactaaatagaatatgggtatctccccattataagcttagatcaaacaaaattcagaagaaaatctaagaagatacgcaaaaaaaaaaaaaaaaatgaacatgaaccggttagggaatgaataaaaccaaacccaataagcagaaagaaagaaaggttaattttttattgcctgaaaaaaagtaactgggagggtgatgaaaggccttgtctttttgaaatgaaaataaagaaaagaggaggggaggggaaggaccccaatcctatgaggggttgggttttttttttttcttttatttatttctctaatttattaacaagagaatcgtttattttattgggggggggaaggaaaa

SEQ ID NO: 3471 - DNA, 623 bp, Gossypium hirsutum
acaagataataacaaatttgaaacaaaaagataaaatgataaaaccaactatttgaactaaccaactcctagataagaaaaaacaaaaaaccaactcctaaataacaggaacagagtaactcagagctaatcatgtacaagaccatcacatccgcttttaatgcttaatttagaataaccacttacaatcaaccacgttctttaaagagtaataaggcaccaaatcccatgtttgatttaaaacaaaagcatcaaattcactttgcagtgcagatttccataatgggtaggtgagagcctggtttggatttcggggaatttgggaaaggacttgattactcttggatggggttggtccatggattttccttccttttgctgcatttcgctcaaagggttgaaaggagatagtgcatcaagctgttcagaagggccaacttgatcctcttccccagggatcccaaatgggggaacctaggggagccgccgactccaactaccatccatgtacgatcacactagatctgacccggcttcatgcaggcgagttgcagcctgcaatctgaactgaggacgggtttttggagttagctcacccttgcgggatcgcgaccctttgtgta

SEQ ID NO: 3472 - DNA, 597 bp, Gossypium hirsutum
acattcatattgatttatcttccatgggtttggtatcgataatgcagaagtttatagatggagattggatttctagttttcttgatgcaaatgtgctaatgagttcttttaggctagtcattgttagtatgttagaaatgggaaataatgaataacatcattactggatatgcctatgactttcattttcttcttatcatgttattaatttttttaatagttctaagctgctgtagcttttatagggaattaattccaatactatggtacttgataattttacaggaagctgccaatccttttgaatactgtgacattgtcacctctaccacccataaaagcctccgaggtcccagaggaggcataattttctatagaaagggtaaaaagccaaagaagggtggcatgctactaagccaaggaaattgcaatgagcaatatgatttcgaggaaaagataaacttttctgttttcccatctttgcaaggtggaccacataataatcatattgctgctcttgccatagcattgaagcaagtggctacaccagagtataaggcctatatgcaacaagtgaagaaaaagcccaggcatggc

SEQ ID NO: 3473 - DNA, 633 bp, Gossypium hirsutum
agagtaaatattggttcatccatagactatggattaaagagatttacctagtcagttgctcagaaactatatcatctgctagaaggctcaagccagtcatcccaatattcccatttccaagaccaatcgcacatttgacagttgtatctgatgcaattttaattcccggaatagcaatcaaagaaatggaaagataacattttcaccaatttactagtatcatacaaaagttttgacgaaagagagttcaaatttgaactgaaaatgacattaaaaatttagaataaacacagaatcgataaagatgattgcatctatcagatctagcatgtttagcattttgccagtgttgtaggtcagttagagcatcgaatacaagcattaaaataatagcatctttcattatgtgtgagaagcataccacaataaaacaacaatcaccacatcatgcaagttttcttagaagtacaacttatagccaatagaaaacaccgaaaatctttaacttggtgatactgtcacaacagaaatcaagactcaacacagccatatctttaactcaatcttctatcttctcacaagaaatcgactaatctcccaaaatttgcagccaaacacgagtgttaaagagaa

SEQ ID NO: 3474 - DNA, 610 bp, Gossypium hirsutum
gacacatgagtacacattagatgaagaggatagaagggtgcaagatgttataatgaaacccgaaaccctcggaaaatgataccatgatcttgaaaaaaactctttcttgttcatacccaaacatgcgttttaatgaagcgctgcaaaaggaaaatgaaaagcttcgattggagctacaacgttcgcaagctaattacgatgtgaagcagtgtgaagtaatccagcatttgcttgatgtaacggaagttgcggcttctattcccgataagatttcatccccaaaagtgtctaagaaagttgagcgtaattactcagatgtcgataatgaaaacggtcattcgtacaatgataactctcctaagaaacctgattctcgcatgacttcaaggttgtttttccttgtacaatgtgtttggcatttatttcggtttttgccccttagaatatgcattcatagtttatgcatttcgtgtacttgaagctgagtgcagtttctaaagtttttgtcatatgttttcagaaacacttcttcagtttcatcaggacatgatctactctccgatagaggatcacatcggtatgaagaatggaatgctgatttgctcggttg

SEQ ID NO: 3475 - DNA, 608 bp, Gossypium hirsutum
  misc_feature (589)..(589): n is a, c, g, or t
ggattttttactctattaatgattccttgaactgactgcatttcatcgataacaatgacaaattagaacagagcttcttatatggattgctttttggttctgccttgcaggcttgttggttgcatgttagctctcttcaacggacatttgcacttgatatacttgagtgagatatctgcctctgcctctacatatttatgtgctttaacttgtagtctcttcaggacatttgcgcttaatgcttttgttttgcaggttcatcctatccaattacgtggcaatgttcaagattttggttccttatgaacaggtaataccggaattttctgactgaaaatattcttcttattttgtctaaacatgctagtaagactttaatagttgtaaagtttgtgtggtactttaacaggtcttgcagcaccaaatttgttcacttttaatgacttcactccgaaccaactatgaggtagcttctttggtctcttgtgacaaaatccatctcttgcttactatagcttttccccttttgggctttcttgaatttatttgggcattcttcagttttatttttgtgaatgtgcattcagcntgaaggagaagtggagagc

SEQ ID NO: 3476 - DNA, 652 bp, Gossypium hirsutum
gcgctttgattccgccgtggctgatggcgttgatgtgatttcgttgagtgttggtggtgctgtggtgccttattatcttgacgccattgcgattggtgcttacggtgctgctgagaaagggatttttgtgtcggcctctgctggcaatggaggtcctggtggactgactgttaccaatgtggctccatgggtggctaccgttggtgctgggacgattgatcgggattttcctgctgatgttaagcttggaaatgggaaagttgtgactggagccggggtgtacaatgggcggggcttgtctccgggtcggatgtacccgttggtttatgccggatccggtggtggtgatgggtattcttcttctttgtgtttggaaggttctttggatcccgacttcgtgaaaggcaaaatcgttttgtgtgatagagggattaattccagggctgccaaaggggaagttgtcaagaaagctggaggggttggaatgattttggctaatggggttttcgacggtgaaggcctagttgtcgattgccatgtgttgccagctactgctgttggtgcatcaaatgcagatgagattagacaatacattgattccgcatcgaagtccaaatcatcagccactgccactattctctttaagggactc

SEQ ID NO: 3477 - DNA, 616 bp, Gossypium hirsutum
cagagcattctctgatatgcttaatcatggactggtctcatcaattagatcgggattgaatttgcaagcttaacaaatttgtaacgagtcataagacaggatttacaagttacaccattaatccataagagttgagcaaattcaagccattaacatttttacctcctagctgcaagactctgccgattttatcttcattgtagggtacgttatgaagaagcattgtagcatcgatgtctttgaggatttccagctcttcaaagggctcgtcaccacgagcggatacaaccaatctcgtacctgcaaggtaatgaattaatatgatataagcaactatatataagtgttgaattcaatgtaaaaattaaggaatagcaccttctggcaaaagcttgtaagctccggtaggtagttccttcaggttttaccagagccatagcattaggcaatggctttgttagctgctccggtaaaggagttatgacccccatgcttatgtctatcagcctttttaagagcacgtagaataatatcgatcatttcatttcaattgtttttgcagagagatagagagagaaaggataagagatgagtgggaagaaaggaatcagagaat

SEQ ID NO: 3478 - DNA, 553 bp, Gossypium hirsutum
tttatcccttaagtccctccttatttattaatcaagccatttagtcacattattataattagcaagttttacacctttttcaatttagtcttttttaattaattaactgttaaaacgttaaaatatttcaacgaaacttaaatactaccttaatgacactccgtaaatatttataaaaatatttatgacttagtttatagaaacgaggtcccgttaccttattttctaaaaccacttgaactagggttttatcactcgaatctaataattcattgtaagacataaattactaattcaaaaaaaaaattaaaccatatttgactcgtaaatattaaataacaaaatttacgagcttactcgccatatttggtggcgtcgaactactgtttccaatatcactaaaaatcgggctgttacagttatgggtagttctaggtattgtgttaaaaagagcagatatgatcaaaacctataataagatgattaaaaagaattgatttttttattgaaattaaaaaaaaagtagtttatattttttgttgttttacatttt

SEQ ID NO: 3479 - DNA, 630 bp, Gossypium hirsutum
aatcgagaccaggatgttgcaaggaggaagcgagcattagaacttgagaacggtgatgcaagaactaaggtcgaacctcaggaggtgcaacagtactagctgagtcggtggaaccggtaaaaggaaaacatgtttcatcaaacaccacatgtctagaaagaaacatctaactagtatcatctaggcacttgtatcccttgtacacaggactatagccaataaaaacataaggtttcgaacaaaatcgcaacttatgagtattgaaaggcctaagataaggataacacctgcaaccaaatactcggggatgcatataaccaggcagagacttgtgcaatagttcatagggagactttccatctagaatagatgttgggagcctattgatgagatggacggcactaatgaagacatgcgcccaaagatgcatggggcccttagcttgagctagcaatgtcataccaatatcaactatatgcctatgtttgcgctcgaccaaaccattttgttcagaggtatggagacacgataggcaatggtggattcccagctgagaaagaacctatggaaaggatcgaaactcgcctccctagtcagtttgaagaaccttcaccttacaaccaaaactga

SEQ ID NO: 3480 - DNA, 646 bp, Gossypium hirsutum
gtcctccatatcttgcaatctgcatcaaattggaaaaaaccaagaacgcctgttaattaaaaacatggccttggcctcaccgctacaacctccatttctaggatgctgaacaaggagtaaacaacatcctaatagtgtcatcctgtatgttcaaaccccttcaaacacaatggtgtaccttattgtaatgctgaggcagttccaatcgatctgcatcgttgttgcaagcagctgctgaaatttcttctgaagctgtaaaaggataattcttttcattacaaaagcaaacttgggaacagtaaaagatcataccaccaatcacaggaattctttaaccaacaaaaagaaagcttaaaggtcaagggaagataatacaggactagctctctttctttttatctatcctccttttagattattaaccatgtgtaattgttcttactcaggctacagatgattatctgttaatccggataggagactacctatagttaaaagggggggcgggggggtggaatctctccttcactcatctttatatgacaatggtaatcatatatgtgaacaggtaaagagctatagtaaaccaattttttgattcaagaaattataactaaccaattacttctattggcggtaagcgttc

SEQ ID NO: 3481 - DNA, 570 bp, Gossypium hirsutum
  misc_feature (546)..(548): n is a, c, g, or t
  misc_feature (561)..(563): n is a, c, g, or t
attgcgttcatcgggtatgatcggataagttttaaggtctgtttttgaacttccaaaagatttttgcataaatttctttgttgctaagtgtggacttcaattttactgataattgttcatcattattgttattttaccatgtagtttatgatgttgaaaattcaatttcatatgacatttatgtttgaatataacttgaataaataaaaaaaacatgtatttctctggattttatctctttgattcagtttgaatgtggagttctattggccgtgttattcgaactcgggtgcgagtcttgactatgggtgtgattagatttaggggcgaatccagaaattttttatggaggccaaaatagaataataaattttttagagattaaaacataattttatagtatattagtatatgattatacaggtttttaaaggaattaaattttttaaaaaaaaatttgaaggttaaagtgtaattttatcgtaaagtaatttataatttaaatggaactattaagatcaattttttcatttaagggagccaagnnngaaagatccttcnnnggttagc

SEQ ID NO: 3482 - DNA, 607 bp, Gossypium hirsutum
  misc_feature (93)..(93): n is a, c, g, or t
atctgagtcgtcaaaagagaacccatggccaaagtctttgctgctacttatggagtcgaacctcgtgagtgtctcaggttgtggggaaaatcngctgccaaagtctttgctattgtttacggagtcaaaccttgaaaacccgctgccaaaatccttgctactgtttatggagtcaaatcttgtaagcctatccggttgctgtgaaaatccaccatcatgcatgctgaaggaatcaaaccttgagaaactgtcaaactgatcccttgatgcctcactgaaccttgatggcgagttcccaaacttggagagtggagtactgggaaccgagtcttcaaatgtaaatggactcttcttatcataaaagctttctgcatttggggattctgttcttgtgtgtacatcaaaatcacttgatccaaaaaagtctctggccttgtccgagtcctgccatgtgacattaaagatcaagactaaatatatttcaatacatcagaccaagaaaggatcataacaagcacattaaaatattttgaacacacaagaatccgagtttattgagggtaagctaggtaaagcagccagatttatgccttgtgactaaaagctc

SEQ ID NO: 3483 - DNA, 649 bp, Gossypium hirsutum
  misc_feature (7)..(7): n is a, c, g, or t
cttttanatatgtagaggggcagtagggagccgttctaaaggaattgcaatcattctacagctcaaaattattgcaattttccattgcttgtcatacacgatagtatggagccttaaacttgtgtctgaattcaatcggtaaaataccccattcccatttgaatggacaattctttccttcattgtgctatttgtaccttgcaaacacccattcctagagcaggaccaatgagacattatggttttcaactgcaataactctcttgacatcctatatattgtatcgtaatcaatatatccccatatatattgttctactgtttaataaagctgtttctttccgattactacgaatttgagtgtttgaggatgtcatgcagccggtttctacaaggaccagaaacagacaggaaagaggttgccaagattagagatgcagttaaaaatggaagaagctattgtggtaggctactcaactacaagaaggatggaactcctttctggaatcttctcactctcaatcccattaaagatgatcaagggaaaaccatcaaattcattgggttggtttccctttgcttctttgtctttcataattaattcatgcaatattcagaaaatgtatgcatagctattcaatattactgtg

SEQ ID NO: 3484 - DNA, 615 bp, Gossypium hirsutum
gagcacataggctaaagacagcagtttaattccacagcacactctagcttttgtttttatttgaagaccattatgagtaacaactaaagattttggttcatgcaactactttgtaaaaaaggacatccttcaaacatccaacaattaccggatttacaaaaagaaaatttcttatttataattgccacctaaaaatcaaaaccaaaaccaaaaccaaaacaaaagacatgtatctaactcatacctttccccaatcaactaaataaaaattaaacctaagtggcatacataggttggagtagggcgaagtcagaaattttttctaagagaatcggaataaagttatatatttttatgagagttaaaatataatttgactattttattagcttatatctttatatttataatttttcaagaactaaatcaaaattttattttttggagggttaaaagtgcaaatttactatatacagacttatagttttataaattttaaataatcagaagtgcaatctcccattttaggggtggcgccaccgcccctgagctgaagactgggaaaaaaaaaaaaaggcttctccaagtttcttactgggataaaaaacctaacca

SEQ ID NO: 3485 - DNA, 548 bp, Gossypium hirsutum
ctgaccgacttcacaaatgaaatgtgcaagcacctcaaggtaggtagctatttactttgtatgaactagactgcacaaagtatccctatagataagtttctaactacttttatatttgcaatagcgacattgacaacatcagaagccatttcaacttagagaaagaactcttacaccatgtctttctgccccaaggaagcagcctggtgcagcaaacgagtccaaaataccgagttgtgtactttattcttgagacgctcttggagagatgaaataccttgcaaagattcaggaggcgatgaatccaaaagtggatccatgagtgtacagaatctctctaattgactctcatatctatgaaattaaaaagaaacaataaaacagattgttgagaaagaaaaagaaaatcagagatcgctgtttgaacttgttaccactagaattcatctacaatttggagtaatctcgtttcaatactagaaattatataacattattcacaaataaatttaagcagcgaactcgaatttttaaaggaaaattaggaa

SEQ ID NO: 3486 - DNA, 921 bp, Gossypium hirsutum
  misc_feature (865)..(865): n is a, c, g, or t
atccaaccggttttagtatttgtctaagttatcttgtttcaggccaggcaaagtattcgtaaaacaaaacaaagctgaaatcaccataaatcaatttctttatgacattgaaggaaataaaccaagtttcctgattattgtaagcaatgaagttaaaaggataatacaaatgggaattaaaggatcaaacaacaacctcaaaccagttattcaaaacctgcgaagctggggacaataaaagatccataaaatccctgtaaaagaaaataaatagacatgacgtaaggcttagactgaattcactggaatggactgaccgacttcacaaatgaaatgtgcaagcacctcaaggtaggtagctatttactttgtatgaactagactgcacaaagtatccctatagataagtttctaactacttttatatttgcaatagcgacattgacaacatcagaagccatttcaacttagagaaagaactcttacaccatgtctttctgccccaaggaagcagcctggtgcagcaaacgagtccaaaataccgagttgtgtactttattcttgagacgctcttggagagatgaaataccttgcaaagattcaggaggcgatgaatccaaaagtggatccatgagtgtacagaatctctctaattgactctcatatctatgaaattaaaaagaaacaataaaacagattgttgagaaagaaaaagaaaatcagagatcgctgtttgaacttgttaccactagaattcatctacaatttggagtaatctcgtttcaatactagaaattatataacattattcacaaataaatttaagcagcgaactcgaatttttaaaggaaaattaggaaatcanaaccagtacgtacttcggataagcatcggcatctcgtctggagaacttggagatct

SEQ ID NO: 3487 - DNA, 626 bp, Gossypium hirsutum
aacgtaatagaaatggtcaccatcagcagaccatcttattcttctcatgtcacttggcagaaatacagcacttaaaccctgactctgaccaactccatgtgctcatcattttccaatgtaaagagtaaacagccatgaaattatttgaataaaaattcaaaaaacgagaaatgtagaaatttcaaaactttgcagtgtaggtccgagttaaaacagcctgccagaaagatccaagttttatattcttcctctcaatatcaattaagtggaaccatgtgttcatagccaaaattaaaagcataaaaattagaagggccaattgaaacaaccattgaatcgcatttacttaatgacaaacaaatttggtatctacaacttagcgcatcctagccaatcggttgctaaaaatcatgtagcataactcctgccatcacaaacaacaagaataaaacaaagctaggaaaataaagaacacatacagattttgacttcaatgacgaaacatcagcactgttgcttacttccctaacaaattcccggtctctagtagagaactccctgcaattattttggaaatagtaagtaaaccatttcatcatgtgaaacccatctctgtgaacagaaaa

SEQ ID NO: 3488 - DNA, 577 bp, Gossypium hirsutum
  misc_feature (563)..(564): n is a, c, g, or t
  misc_feature (568)..(574): n is a, c, g, or t
gggggggggaggttgaacttgatttgtatataatataaaagataaaaatatatatcttagagcagttggtattatattatacaatgtcagctatatcaaccgtttgaagaacaaaacttacatcaactgcattggtacccttgtccatcagatcaatcttcgttaaaaccccaaatgtcctatctcctgatttttgaccatcaaccaacatgaaattctatacaagttaaatggaaaactaggaaaataatcaccttatcaaaaaatgggaaaagaagtgttctattgctgaatatgatggataaatttatatcaataaactatctgtttctccggccagtaggcaattgaccttgcagtcgaagtgaaaagtaccaaactgttaaaatgaaacctaacactgctgccataacaataggtattctccctttgatcaattatgtcactattccatgcacatttttatctagtctctaagcaggatccttactacaatatgtgttttatgtagatgaaatacacagctgagcaggtaacagaggcatgaggtaaggagcttgcgnncacnnnnnnnaaa

SEQ ID NO: 3489 - DNA, 597 bp, Gossypium hirsutum
  misc_feature (60)..(64): n is a, c, g, or t
  misc_feature (174)..(174): n is a, c, g, or t
  misc_feature (189)..(191): n is a, c, g, or t
  misc_feature (197)..(197): n is a, c, g, or t
  misc_feature (256)..(257): n is a, c, g, or t
  misc_feature (268)..(268): n is a, c, g, or t
  misc_feature (279)..(279): n is a, c, g, or t
  misc_feature (298)..(298): n is a, c, g, or t
  misc_feature (301)..(301): n is a, c, g, or t
  misc_feature (321)..(321): n is a, c, g, or t
  misc_feature (335)..(335): n is a, c, g, or t
  misc_feature (364)..(364): n is a, c, g, or t
  misc_feature (366)..(367): n is a, c, g, or t
  misc_feature (416)..(417): n is a, c, g, or t
  misc_feature (429)..(430): n is a, c, g, or t
  misc_feature (543)..(543): n is a, c, g, or t
  misc_feature (546)..(546): n is a, c, g, or t
  misc_feature (589)..(591): n is a, c, g, or t
gttttctactatgtcaatcttgattagttttccttctatttggttggccagtttattttnnnnntgatggcacaaatgctctctctttacttttaaaagttttgatattcatttgaaatcacagtcaataactcagtttatttatttatgtttttatcttggctaaaataatangcttgcaggatgccnnngaagantgccgaaagttgtgtggcggtcatggttatctttcttgcagtgggcttccggaattatnngcagtttatanccctaactgtncttatgaaggagacaatantgngatgcttttgcaggtgtganaaatgtgaagtagnatataacttttatttttgtcaacctttcntnntcttcattttgttcttttagatggtaatggatgaattccaattttctannggaggcttaatnntagtagtaggttttactatctattatgagaatctctgatttcagtatcttattagctgtattgctggtgcttcttggtattttatgtagataggatgaacctatgttactcgngcntggatgtgagtgttaaatacgagtatatatctgacacagatannntagatt

SEQ ID NO: 3490 - DNA, 618 bp, Gossypium hirsutum
agctgcaaagaaacaaaacacgaggcaatagttacaggatctaaatattattttcagtaatttatgagtgtctaaggttgatgatgatgatgaaaagtcaagcacgtaggtaggtgtggagagaagtatatgtacctacttcgttgcagctaaatattacgggtgattatgaatttatgctaatgaaacagggatgcagcaatttcatcgggacgccacatggtttttctccccttcttacaagatgatcatattcataggagatagtatgtaggaccatgagcctgccgataaaaaaatatctttgtttttgtttttcttttaccttgttattatccaacttttgtcagttgtcgtgtttctttcaacaataaaagctaatttatagaagaaaaaaaaatggtttcaagaaaaagtatatttaaaagtgtttgagtaatattttcttatgttgtattaagagaaacttgttagggtatttatatataattcttactattactatcacggttcacaatagggttcattattttgtcttgacatttggaccgagggtactgacattccctatccttggtgctgacattctctgggtctactttgatttattagacgctt

SEQ ID NO: 3491 - DNA, 596 bp, Gossypium hirsutum
ttacattaacaatacaaagatatatcatatagtataaatgaactcataaatgttatgtctgcaaaataagtttaaaagagaaaaaatagaaacaaatagtaccgacaacatcaaaagaattcagaaacaaacaaagatgcatcaacttgattaaatgattgaaaattacactttaatctaccatcaccagactaacttgacgataaactttaatcaactaagaaatcatcaccaaaaaccttgagatgcacaaaaaatcaaatctttgatggcctatctctttcccatcatcttgaatactatttttactaacacaataattgcactttatcatgataagatgttcttaatatattttacgaaaccttaatcttaacaaatcttatatatttaccataaaacagataaaaacaattcataaatgaaattaaaatagtgacatccatgaccacatctcttatgatacatttaatttttttaaaaataaataaatgaaattcatatttgtgattttctttttcttttgtcttactttagctgctaataaattaggtgaatcaagacagctaatttacaattttgttttcttgaatgaa

SEQ ID NO: 3492 - DNA, 1060 bp, Gossypium hirsutum
  misc_feature (522)..(524): n is a, c, g, or t
  misc_feature (529)..(534): n is a, c, g, or t
  misc_feature (544)..(546): n is a, c, g, or t
  misc_feature (559)..(568): n is a, c, g, or t
  misc_feature (571)..(577): n is a, c, g, or t
  misc_feature (580)..(587): n is a, c, g, or t
  misc_feature (589)..(599): n is a, c, g, or t
  misc_feature (602)..(616): n is a, c, g, or t
  misc_feature (618)..(619): n is a, c, g, or t
  misc_feature (622)..(622): n is a, c, g, or t
  misc_feature (624)..(631): n is a, c, g, or t
  misc_feature (639)..(648): n is a, c, g, or t
  misc_feature (650)..(652): n is a, c, g, or t
  misc_feature (657)..(659): n is a, c, g, or t
  misc_feature (661)..(664): n is a, c, g, or t
  misc_feature (666)..(666): n is a, c, g, or t
  misc_feature (669)..(673): n is a, c, g, or t
  misc_feature (675)..(676): n is a, c, g, or t
  misc_feature (688)..(695): n is a, c, g, or t
  misc_feature (703)..(714): n is a, c, g, or t
  misc_feature (721)..(723): n is a, c, g, or t
  misc_feature (725)..(726): n is a, c, g, or t
  misc_feature (735)..(739): n is a, c, g, or t
  misc_feature (742)..(743): n is a, c, g, or t
  misc_feature (745)..(747): n is a, c, g, or t
  misc_feature (749)..(761): n is a, c, g, or t
  misc_feature (764)..(764): n is a, c, g, or t
  misc_feature (769)..(772): n is a, c, g, or t
  misc_feature (776)..(796): n is a, c, g, or t
  misc_feature (799)..(799): n is a, c, g, or t
  misc_feature (801)..(801): n is a, c, g, or t
  misc_feature (804)..(815): n is a, c, g, or t
  misc_feature (820)..(826): n is a, c, g, or t
  misc_feature (833)..(853): n is a, c, g, or t
  misc_feature (857)..(864): n is a, c, g, or t
  misc_feature (866)..(868): n is a, c, g, or t
  misc_feature (871)..(874): n is a, c, g, or t
  misc_feature (890)..(892): n is a, c, g, or t
  misc_feature (894)..(899): n is a, c, g, or t
  misc_feature (901)..(902): n is a, c, g, or t
  misc_feature (904)..(912): n is a, c, g, or t
  misc_feature (914)..(917): n is a, c, g, or t
  misc_feature (919)..(926): n is a, c, g, or t
  misc_feature (931)..(956): n is a, c, g, or t
  misc_feature (961)..(972): n is a, c, g, or t
  misc_feature (982)..(990): n is a, c, g, or t
  misc_feature (992)..(992): n is a, c, g, or t
  misc_feature (994)..(994): n is a, c, g, or t
  misc_feature (996)..(999): n is a, c, g, or t
  misc_feature (1003)..(1013): n is a, c, g, or t
  misc_feature (1015)..(1015): n is a, c, g, or t
  misc_feature (1019)..(1027): n is a, c, g, or t
  misc_feature (1029)..(1034): n is a, c, g, or t
  misc_feature (1038)..(1042): n is a, c, g, or t
  misc_feature (1044)..(1046): n is a, c, g, or t
  misc_feature (1048)..(1056): n is a, c, g, or t
cagagcgggaagatggcatcataaaaggccaagtggcaaacaactcataaactatcagtttaaggcttctcagagaggatactgcccaacagagaaatgagacctcaggaaataggatatcattgctttaaggtctctaagctcatcgttcactaaagaatatcaaacaagcaaggatttaacagaataaagccagggtagcataatctgaaatcagaacaagttacagtcttcttattcttacttgaacctcagagaatatcctgtgcaaggaagtaagtacaacacaatatagatatatgaatgtaaccatccattttattagaaagttcaggttggtattagcaaaagatgtcacatatgaaaagtgtttatgaggttttcttactgagcctagcaaaacttgaggatattgagtcgtttatataatacaaatgtacatacaaatataaatattgaagtgaggcttagaaaagagagatactaagatcaatcatgaagcattgcaaacaattggtgagnnnggtcnnnnnnctggatgttnnntctgtctaacttnnnnnnnnnnggnnnnnnnggnnnnnnnnannnnnnnnnnngannnnnnnnnnnnnnntnntgnannnnnnnngcacgggnnnnnnnnnngnnngttgnnntnnnngntcnnnnnannctaattggcggnnnnnnnngaatggtnnnnnnnnnnnntaacgcnnncnntccaaaccnnnnnccnncnnnannnnnnnnnnnnnaantaccnnnncatnnnnnnnnnnnnnnnnnnnnnatnanatnnnnnnnnnnnnaaacnnnnnnntaaaatnnnnnnnnnnnnnnnnnnnnnttgnnnnnnnncnnntannnngcggttacaatcctgnnncnnnnnnannannnnnnnnnannnnannnnnnnncaatnnnnnnnnnnnnnnnnnnnnnnnnnntatannnnnnnnnnnnattaatctcnnnnnnnnncnantnnnncatnnnnnnnnnnncngtgnnnnnnnnnannnnnnacgnnnnncnnncnnnnnnnnncttt

SEQ ID NO: 3493 - DNA, 632 bp, Gossypium hirsutum
gagacagaaaattttaatggatggagactgtgcaagtgcactgcacatctggaatagaacaaaaattgatcagaccaaagaaagaatataccaaagatgcacgtaccttgtcaagagttcaatagcagcagaaccatatccaagcttcataagcccaataaaaaaggtgtcaaaatgtttaaatacaatccaaacaaccaaacacaacaatatatgcatagaacatagaacataaatttaccctcatagcactaggatgagtggcaatgcgaacaatgcgagcaccagaaagacttgggaaatcaggatctcggaactgctcacagaatttccatggtatttggtctccatgaggttgatagccaacacttaagcttttgatagccgatttaagcgaaatttgaccttcaagagagatctgcgataaactaatgtgaatatataatgatacagataaaagactcttccatgagagttcaacttacactaattattaagtaatttaatgaaacagctgagaaccattctgctcataacacaaatacgtgtagagctaattttttgataccactgctgcatctaggtctctaacaaaatatcacatgagcatcagaagcagggaaatccatatg

SEQ ID NO: 3494 - DNA, 602 bp, Gossypium hirsutum
  misc_feature (588)..(592): n is a, c, g, or t
  misc_feature (594)..(594): n is a, c, g, or t
aaaggagtctgttaaaggtaagccttatctatcttctgtctttagtctttacctattgttggatttttctttttggtattctgaccccaaattctccatttcaggtttcacttttgctgaggttggttgtatacggaccagaaatagcaaagttacttgctgtcatttttcttcggatgggaagttcttggctagttctgggcatgacaagaaggtatttgacgacttccaattttccaaccctttccttcagtattatgtttataaatgtaacacctagtgaataaaaaacgaggtctcaagtttaatacctcggtatattgtttggaaattcgctctgtaaaaacaatgggagaaaacttgattaagtccaatggattcgaaataacacaaaattgaggtcacttgggacaaatatattgataaacctgattagccattgtggcaaaagttttctgaactatttgactacataaagttactcgagagaagtgaattagatgacataaccttcattgttctagtaggtaatttgtaaggtgggttggcaatcacctctgtttggttaatttattctactagtggagnnnnngntaggaaaa

SEQ ID NO: 3495 - DNA, 581 bp, Gossypium hirsutum
gattaacaaggtacttctaagaatccattaaagtttactctactggaaccgaataacattatctgcaagtttcacattgtaaactaaattgcaatattatacaacatgttgcaaacagaacatatttaacatgagttaaggaatctgccattaagttattttacaatcaccagaaaaagattcctttcacgaagcattttacaatgtaaccagtacacttaattaagtcttttacctctggcttcttgctacttattaggtggatacaaaagcgcataaatcattaactgaattattgtaagctacataaataaacaacaaattagcaaaaacacattgtaaaaaacccaaactttgaacaagaggtgcttgcctcagcgctatgacagggcaaccatcaaagtacatttgccaaaatgaatacacatgcatgtgatgcatttaaatagtaacttacattttgagccgtcggagattatatcttttctcgccaggtattggcatagccagaaccactttttgatgcttatttcttcgctggccccccacaacactatcagaacgtccttcactgtcatcac

SEQ ID NO: 3496 - DNA, 581 bp, Gossypium hirsutum
aagacagattgaatatatgtcaccattagtagcaagctactgcaccaaagaactggtgaaagtcttaatttagaaagttgtccaaaattgttgttcccatcacatccttttttatacaaccttctagcattaccctgtagaatcaagtgtataagaaacataaataggtagcagtataagccggatgatttcatatacacatcgttttaacaaattaaatgataacaaataggaaattttaaagctttttaggagacaactaacaagatcaatcaaaatcaattataattgcatcctaatttcttctctcctagtgaagtcacaaatttttaaatgcagaatcataatttgtgcctatgcaaggaaaggttgagctgtccaacaacaaaaacatagggaaaatacagaatcatgttgtgcctaggcaaggaatgcatatggcatcagccatttaagatgttcctagaaaactaaaacaaatcgaaagcacattttgaacttttacatcatttttattaagtatttttatggtatattcttatcagtaattatctgaaaatttttctatggggcagaagagg

SEQ ID NO: 3497 - DNA, 639 bp, Gossypium hirsutum
tatgaaataatgagatccttccccttctctgctaatgacaccgacatcaattcgtgatctcacccctagaatacagcagcatcagcaaatcctagaatcaaaaggatctacatcttgtatgtactaaaagtaacaagggaggcaaggaaccggaaagggaataaaatacctctagcaatccggtctatggcttcacggggatcatttttcctgggaaaagcataacaataaacacttgtgagaaagcaataatatcataaaatcttataacaaatgaatctagactggattagcacaaactaaccagcccaatgttcgggcaaaatctgaccccgtccccaagggaatgagctgcaagaagggccaaccttgttatatattcctaggggggagaattgaacaattctactatagcgcaagcaaagacaaatgagtaagaagtatatataaatccaaggctatcattcagtcagagactaacgacaatacttacaaaatgaaagaggggaagaaaagaaagagcttgatgggaattcttacaccaagagcggttgaatgaactgcctctgtattccaattagcaacaggtttcccatcccaaaagaacccattaacaacctgcttatcacagttcaattt

SEQ ID NO: 3498 - DNA, 610 bp, Gossypium hirsutum
  misc_feature (595)..(595): n is a, c, g, or t
cttgcataccttgatctatgtatggtttgtgagaataatgttgactactggcgtcgagctgccttctttgaagaaactggtgagacttacaaaagagttgcagctgtatgtttgagacctttggagcagcttgcatcaaagttggtccaaggttttgaatgttcttcagatgataaaatcttctcaatatctgatcagttgcagtcaccaactaacccccgacagaattcaaaatgccacgagctagtgaatgacttccaggtatgacaacattttctagaggtgtgtatgcacccatcccttattgcgtattcatcatgcagaaccattacaccacaatgataagagtctaaattaatcaggagaatcttttagcatcatagctccatttatgaaaacagggaaaagcactcatgtctgtaacattttctgtaagttgtaagtttagaacaacaagctaccctcaacagttcagcatgaacttatttatatgaggtgaaacaagcccaaatttaaggagtataaagcgaaactaataaaagaaaaagttcagatagaaacaagcccaaatttcagggtatttttctgaatctanctaaaataagcatcc

SEQ ID NO: 3499 - DNA, 596 bp, Gossypium hirsutum
actatcagaaaggccaatgccaagtttttcctacaaatttccaatttccaactatcgattacatgtttcaaaataatgttggttagtggaacagacagatattccaacaattttcctgttactggacaagttctgtttccctgatcaaaccactccttgatggctactctctcaaaggtttgacccgtctccagggttactgggtcttcgaaaaactttcctgtcagagggcaaataaagtcattgcgcatgcttgagaatgaggattgttcatgaaaacgtctgtaagtttcatgcaactctgcaccaagacaagatcaatatgagctatcaattcaaaaccttgaatataaagcaaaagcattcataacgtattcccctcatattatcttaaaaaggactgattattgttggttgctgctccgaaataataaaacatattagtaaataaaacacaacaagtatactactaataataatgaagcaagatgaaaaaaataaaagaataacatcttttataaaattgtggtgcggatcatcctcactattattaggaccacaaaaaataatatcatatgatatcatcctatgttgct

SEQ ID NO: 3500 - DNA, 600 bp, Gossypium hirsutum
  misc_feature (590)..(592): n is a, c, g, or t
atcttcaggctggtgtaaattatttcaaccattaatctttattttaaataaggcatggcatttcccaacaaaaagcattccagaaagaattaaatgactaccttcttagcatcaggatctggaatttcttttggaatgtcatcataaccctatagtaatcaaagacgagattatttttcccatgcactttcaggaagtatatataaagtagcataagagaatgaaggggcaaggttactacctcaggcttcttgtcttcgggatcagggatgtattccttgtcatcccaatcttcaggctgtccatgatgcaaaatacttaagttgtattcaaaattcatatgagaacaaaataagccaaaatgacatcaatttagattaggtttgaccaattacggttacctaccttcttggcctcaggatcctttattttcttaggtgggagaagatcccaatcagtgtacaagctaccagtttgtttctcaacattgtcaacaaggatactgtaggtagcatccggacggagaatgaacgtataaacatgagtgagttggtcagtctcacaaggaacttccttttgatcaagtggtnnncccatgta

SEQ ID NO: 3501 - DNA, 510 bp, Gossypium hirsutum
aacacgaggttccattgaatcaacccttttatttttcagctgtaaaaatcaactttaaccaatccaccttctcatcatcacaaataatgagggttaaaatcaaatcttaaaagtataaaattttgtttaaaatgagcctaaattaaataactcgtgattaaaaggactaaaagaaatattataccccttaattaagggactaagattgatgctttcccctctaactacaccccaatatatataaaagtacaaatgagagtgtaaacttagaaagctaaatccaaaatatatgacttatatatatattaaaaaaagttaactcctttcatcattcctttctcttcctgtcaacacatttcttgcatagcaatgtctgattcttctccttgttcttcgtcaccaccttcctcaccaggaagttcagctttagccagccccagcattcaaatggtttcaaaatcggtatctgaacgactccttggcaaattcttcgatgcatcacaatacgat

SEQ ID NO: 3502 - DNA, 604 bp, Gossypium hirsutum
atggaatattttcaattcttaagatcagatggttaaaacgtagtttccttagtgtactaacttttttttgaaagctacgggttttattaacaagcaccctaattaggaaggttattatttgaaataatttattttcaactgcattggaattcacaacattaacagtcaggtactgcatttaatacaaaagtaatactataaatagtattttaactaactttaagaagtggctattcagcactccttagctaaactcattatatatggccggcttcagaagtttttgttgaaacttatgccgcctttccacctttctctagatgaagctaggttactttgtgtctctagatccgaaatgcttgaacgtgtaggcagagtcacatacaagctatgtataagaaacgacatgggcacaagttgaaaaagattccagtctcatgctaattcaccttaaagacactgttatgttcattctttggctgagtcgagaatgttgagacttgcactaaacaaaactaagtagaattgtgatgttggatgatagattcctttatgtggctttatctaatgatgcttttgcatggagaagcgttggaaggtataa

SEQ ID NO: 3503 - DNA, 652 bp, Gossypium hirsutum
  misc_feature (547)..(548): n is a, c, g, or t
  misc_feature (581)..(583): n is a, c, g, or t
  misc_feature (585)..(594): n is a, c, g, or t
  misc_feature (602)..(604): n is a, c, g, or t
  misc_feature (607)..(612): n is a, c, g, or t
  misc_feature (614)..(617): n is a, c, g, or t
  misc_feature (619)..(619): n is a, c, g, or t
  misc_feature (623)..(627): n is a, c, g, or t
  misc_feature (635)..(641): n is a, c, g, or t
  misc_feature (645)..(647): n is a, c, g, or t
atcagttcctcacttttctctgctaaaactgagtatgttgatggacaaatcttgcaccattcatctgttacttggtacgtagagaagatttatcagatagattgctgttttcattatctggccaacgaggtggtagaacaacccccctccccctttttcttggttgagggaattgggattttgaggtaggaataaataagaaacttcaaagcaggcagttgttagttcttccggaaatactaaattaggtgtttgtaagatgattcattcatcatgtcatgtaatgtcaaagaaggaaattagatagaaataaattaataaaaagtcaagaatgagagtgtcagattgctgagatttttgagcttcaacttggttttgaaacataaataaatttggtactgttttgttatctcatttgttatttaatgtatctaattttatggatatatatttgcttgtggctttttctatatttctttctcttagtatttagggagaaactttattttgcattacttcacataaattataaccatccaaatttgcnnttgctttgcaaataataaaacgggttcttatannntnnnnnnnnnncgggtttnnnttnnnnnngnnnngnaaannnnnaattggannnnnnntagnnngtgag

SEQ ID NO: 3504 - DNA, 1243 bp, Gossypium hirsutum
  misc_feature (608)..(609): n is a, c, g, or t
  misc_feature (616)..(625): n is a, c, g, or t
  misc_feature (627)..(636): n is a, c, g, or t
  misc_feature (640)..(648): n is a, c, g, or t
  misc_feature (651)..(678): n is a, c, g, or t
  misc_feature (681)..(690): n is a, c, g, or t
  misc_feature (693)..(708): n is a, c, g, or t
  misc_feature (711)..(711): n is a, c, g, or t
  misc_feature (713)..(714): n is a, c, g, or t
  misc_feature (720)..(720): n is a, c, g, or t
  misc_feature (722)..(733): n is a, c, g, or t
  misc_feature (743)..(746): n is a, c, g, or t
  misc_feature (748)..(748): n is a, c, g, or t
  misc_feature (751)..(759): n is a, c, g, or t
  misc_feature (763)..(769): n is a, c, g, or t
  misc_feature (771)..(771): n is a, c, g, or t
  misc_feature (784)..(790): n is a, c, g, or t
  misc_feature (792)..(795): n is a, c, g, or t
  misc_feature (797)..(812): n is a, c, g, or t
  misc_feature (817)..(818): n is a, c, g, or t
  misc_feature (821)..(821): n is a, c, g, or t
  misc_feature (827)..(829): n is a, c, g, or t
  misc_feature (831)..(833): n is a, c, g, or t
  misc_feature (836)..(836): n is a, c, g, or t
  misc_feature (839)..(850): n is a, c, g, or t
  misc_feature (852)..(852): n is a, c, g, or t
  misc_feature (854)..(857): n is a, c, g, or t
  misc_feature (861)..(861): n is a, c, g, or t
  misc_feature (863)..(863): n is a, c, g, or t
  misc_feature (865)..(870): n is a, c, g, or t
  misc_feature (884)..(891): n is a, c, g, or t
  misc_feature (894)..(904): n is a, c, g, or t
  misc_feature (907)..(913): n is a, c, g, or t
  misc_feature (916)..(918): n is a, c, g, or t
  misc_feature (920)..(920): n is a, c, g, or t
  misc_feature (923)..(926): n is a, c, g, or t
  misc_feature (930)..(936): n is a, c, g, or t
  misc_feature (941)..(943): n is a, c, g, or t
  misc_feature (945)..(950): n is a, c, g, or t
  misc_feature (952)..(954): n is a, c, g, or t
  misc_feature (959)..(960): n is a, c, g, or t
  misc_feature (963)..(968): n is a, c, g, or t
  misc_feature (970)..(982): n is a, c, g, or t
  misc_feature (986)..(988): n is a, c, g, or t
  misc_feature (990)..(1000): n is a, c, g, or t
  misc_feature (1002)..(1002): n is a, c, g, or t
  misc_feature (1007)..(1013): n is a, c, g, or t
  misc_feature (1017)..(1025): n is a, c, g, or t
  misc_feature (1038)..(1047): n is a, c, g, or t
  misc_feature (1049)..(1059): n is a, c, g, or t
  misc_feature (1061)..(1061): n is a, c, g, or t
  misc_feature (1063)..(1071): n is a, c, g, or t
  misc_feature (1075)..(1089): n is a, c, g, or t
  misc_feature (1096)..(1097): n is a, c, g, or t
  misc_feature (1101)..(1115): n is a, c, g, or t
  misc_feature (1124)..(1132): n is a, c, g, or t
  misc_feature (1134)..(1136): n is a, c, g, or t
  misc_feature (1141)..(1146): n is a, c, g, or t
  misc_feature (1152)..(1156): n is a, c, g, or t
  misc_feature (1158)..(1164): n is a, c, g, or t
  misc_feature (1166)..(1168): n is a, c, g, or t
  misc_feature (1171)..(1182): n is a, c, g, or t
  misc_feature (1184)..(1184): n is a, c, g, or t
  misc_feature (1189)..(1195): n is a, c, g, or t
  misc_feature (1200)..(1205): n is a, c, g, or t
  misc_feature (1208)..(1216): n is a, c, g, or t
  misc_feature (1218)..(1222): n is a, c, g, or t
  misc_feature (1228)..(1238): n is a, c, g, or t
cacaattttgatgagcctgtggtcaaggtctgctaggaaaaggaaaatctcgaattatattcaatttaacattaaatatggctcatgctcagatcttgttgatgaatgaaaatgaaacgaagctcgctacattgtcacaagaaaacctgcttactgatataaaggtctggtttacctgttttacaaatttttcgtgtctctcttcaggaagtttctattaattccttctcttttttcatctcatctcatcctctgcatttttttggaacaaaattactgtatcttgaatttgatctcaaaagttttcttctatttgaaggtgttcccatcctcttttagtataaaagcatcattgggaaatttgagaataagtgatgatagtctcccaagcagccatatgtatttctggatctgtgacatgagagatcctggaggcacttcatttgttgaggtatttactttatctatgattttatttttgaccctgcaacaaaagttcttcattttgtttaaatctgtggatgtgttgctcaagttcgctttgtcttttcaaatgtaactagtttttctgtagttctcctagatgacagcctctctgctttatgtgnncaaaatnnnnnnnnnnannnnnnnnnnaaannnnnnnnnagnnnnnnnnnnnnnnnnnnnnnnnnnnnntcnnnnnnnnnnttnnnnnnnnnnnnnnnnaantnnaaattnannnnnnnnnnnnctccttcaannnntnacnnnnnnnnnaatnnnnnnntnaacaaccaaaaannnnnnntnnnncnnnnnnnnnnnnnnnnttctnnacnctcaannntnnnacnacnnnnnnnnnnnnanannnnaaanangnnnnnntacctaaacacaannnnnnnnttnnnnnnnnnnncannnnnnnatnnntnttnnnnaccnnnnnnnaaatnnncnnnnnnannnaaacnnaannnnnncnnnnnnnnnnnnntctnnnannnnnnnnnnntnttttnnnnnnncccnnnnnnnnntttttttcctccnnnnnnnnnntnnnnnnnnnnntncnnnnnnnnnttannnnnnnnnnnnnnnaaaaaannaatnnnnnnnnnnnnnnnaaaaaaaannnnnnnnncnnncctcnnnnnncacaannnnncnnnnnnncnnnatnnnnnnnnnnnncntcccnnnnnnnaaaannnnnntcnnnnnnnnnannnnntttaannnnnnnnnnnctttc

SEQ ID NO: 3505 - DNA, 600 bp, Gossypium hirsutum
tttagcaacatgactttattcagtcttattcaacctaaaatcctcaaagttcccaaaaaattgggaaacattaaatctgacaaagaaaaacagattaatttccttttgaaactgttacagtaggaaactaaaaacaaggaaaaaaatagagtcagttaactagtagtagaacgctgaattttggtaaccactgttaatgaaaacggtgcctttaagtttaaatgaaacgttgagttttagcttgggaaaagctacagctgtcgtgtaacagctttcccaacagattttggtaacggccaattctttcctttttagcggtaaggaagggaatgaggcagttatggaattggttgaatgaaattttcctcttctctcttcttctctgttttctcttttttcttttcttcctccaaaattttccgttttctctgtaataaggtgcatcaagggtatcagagcccgccgatcctccatggctggtgatggggtcactactcacttacaaaaggatgtcggtcatcttcaataggaggttgccaagcttcaaggcgagttgttgcagtgggatgccaagctggacactcggttgaaggaacttaa

SEQ ID NO: 3506 - DNA, 502 bp, Gossypium hirsutum
aaaaaatattattttagtaatacttgaccaccttctcccttggctgtatatacccctaaatcattaaggatctcaacgaggcgatgacttaaacaccaatgggattttctttaaacctcaagattaggtagcagcacctcaacagtctaaactaaaccattgggaagatgccgagattaggttgacaatccaataaatatatttatgtattgaaagtcaaagaaattccattattagccatttatttcgacgaaaattctttcttatcgaaaccaactttgtcattgttgtggctcagtgccctttattatttgaatatgatgtgtagaaaaaaaatactaatggtgattgatttgagataggagagaagcattgcttcaattgcaccttccgcatttcactcaacaccatttcccttgaacaaaccccacacgtgtgggtatgtattatagttgcttgctactttttcttatgtggtgcgcggtgaaattagaattgtatg

SEQ ID NO: 3507 - DNA, 486 bp, Gossypium hirsutum
ttgtggaggcggggaacgagtcggagatgaatctacggttctcaatgatagaatcgagggaggcaccacttttacaacaacgaccgaattgacggatgggtgaagaaatacagggtaaaattgtctaggggaaaaattttgctattacatccgtcgttgaatgagctattcttaacccctctgccgaatgacgattcggtaaatctaacgaataagggaggaatagccattcgccgaatgaagaaaacggtgaaccaaactttgtcttaactgttcatttaagaataaggagggaatgactattccattccctccaaccaaacgtggcctgagttaggcggagcttgcatgtaatgtaaccataaatatttcttatttttatttaaaaatgtaaaacctttatataaaaagaaaaataattgaaacaataacttaacatgtaaattaataattagataagaagtgatcactgagcccaaagctctt

SEQ ID NO: 3508 - DNA, 620 bp, Gossypium hirsutum
aaaaagcaacttgtttacattaccctcaacccatatttcttcccatttatccatggtggtcacaccctcttaagatgtgggaaaatactggtgattgaagttgaatatattactacttacgtattgtaaggttgacagcagtgaacggatatttccttgtttcccatttgaccattgccgtattttagcatcaatggcctgcattacaatgaagtaatgtgaagcaacatgggtgtttgtcaatatgtataaagctacttttggtgtagtatctgttacctgtatttcttcataatcaatgccatgttgtggcaaaactttctcttcttctggtgtcaggtcttctatctgttcatcacccaaagtagagcagttcattagagattcagccaatatcatataacttcaaattccactggtaatatatttggttggataggtagggagatcaatcatgtcagacataccgaaaagttgatctcagatgactctgttggatcttcagcaattgtcttggagccatcagaaactgatgccaacatagagtaagtggaaaattagtattgaacatttgaaaattcatggtgtactaatgaaagaaaggtcaaatgagtaaacat

SEQ ID NO: 3509 - DNA, 625 bp, Gossypium hirsutum
gatatgttcattttaccagctgtaaataatatccttaatcaatcattgcttatgtttggtttggggtttcaggtggaagggccagctgttgttgctgccacagagtagtcctttgctttctccttctaaatctatggatccatggaattataggagctgcaaatgcatagcatatggatcagtctccatatgaaagtacttgtagagtgggaaatgaaaagaagaaaaagaactgtttggttatgagaaatggtagtaactttctgtttaggtagctttatgttaaaactagcttttattcctgtttcgtcctttgtacatcataatgtcagcttcaacttcgagtctaataaaagcttgttcatctaatagctcgagtaagttccgaccgacagtaattataataataatcaattttgtacgaataggccaggcgacaaaactaatccgatcatagttctcaattcgaccaatgaaatgttagaaaagaaaccataagatttagtgttcaataaaagaaaagaataaaacgaataaaatgattttaatatgagttcaaattgtggttcatgaaactgagaaatgggttgaagttaaagggtaaagttgcaggttagggatgtca

SEQ ID NO: 3510 - DNA, 660 bp, Gossypium hirsutum
aggagttctagaagtgggaactcacaggctcaagggttgaccaacaaattcctgagaaaggaacatcacgagcaagctgtgctcccatgccagtccataagacacgatacccttgcactgtcaagggaaacataaaaaaaccattattagaattgtggaggaagaaaaggattttgttgtcttattatgacagcaaaatgcccattcagtaacaattagactgccattcttatggaaatgagccaggagcatacaaaaattgccatatttgttttctcagaagccactggtgtcgcttatttatacagtgatcatttaggatgaaactcaattctaataaaatggaaggaaaaaacactcgtttattaagtatgactccaccaaagtaataataacagacacaagtcatcatgttggcatgttaaaccatctatataagaacatattagcctgcaattaccatatccattaagcttaaacctcatacatcagtttctcaatttgctataaactttcacacctggaactgctgaagcgttgcagaaatacaagttaaaggcaaaaggcacaaggcacactctaattttatattgcttgaggtgtaaggcacaaacagaaaacccacgtgggtgaaggcacaatatgcatgtgcagtaaagc

SEQ ID NO: 3511 - DNA, 612 bp, Gossypium hirsutum
gcccagggttcgtttctttctgcatggaactcctaggcagtggtgcgacggctgcagaatttggatacaggatgagaagaacagattgtatcgtttgattgaaagtgaagatgagaaaagtggtgggaaattgaaggtgtgtgagagattttattttgctgataggaagcctaatatgcagatgcattttgaagttattgaaaagatggatgttagttgattgaataataataatctgaattcaaaataatccaatatcttgaacccaaaattgctcgatttaaacaaattcaaccactcggtttcattttcttttacttgcctctgttttgcatggagcagtcaactcccttgttgggtgttaggtattagaactctaaactctgaaggtagccactttatgtcagtctttttaccggcaatcacctctgtttcgcacgcgaagaggaaaaagtaagcaagaccgtggtgcagatattataagattagataataaacccgtataaaaattaaggggaaagtagcatttaaggcaattcctttaaaatttttaaacaaattcaaatgatttttctgttcgaaatctaagccaaagggacaaaaaagagcgag

SEQ ID NO: 3512 - DNA, 645 bp, Gossypium hirsutum
gccaagatcagaaaaatggaaaaatacgcaattctcttggttcaaaaagacctgagaacatagatgacgagccaagagatagtgacaacagtacttctcttccccatttcatgcaagccacggaatctgcaagagctaaggttaatgcaaagaactcaccaagatcaagtccagatgtgcaagacagagacatttacatcaagaagagacatcccttacctgctgctaatgggaggcagggttctccaagaatcacgcgatcagtggctaaagcccagcagggtgcaaaagaaaatggtagtaccaatcctattcatggtatgttctaaacttataccattatcttgaattgtcagaccttcccactatatggtcagagtcatttgttcccagcttaaaagtacataaatgtcatgctgccatgattctaggttttctattaataacttgtgcttaactgttcaagtcttgtctatttcagagaaatggcaaaggtgacgggttactcggagcaacaatatgccatggaaccttttcaacctctctgatggagaacggctgattgttggtcttactatctagttttatgcctcagcattttcaccacttaggttgattcatgcatgccatctatggtttgtcggg

SEQ ID NO: 3513 - DNA, 533 bp, Gossypium hirsutum
gctgttccttggtgtagtgggtcgaaaatcctctttgtggccttcaactgagtcaccaaaatctgaggtttcagttggtggagggggtgagaatacttgctttggatcatcattgctcactgattttagcagtcttccctccactgagagaaataaaagacaggcaattagaagaaagacagcaaatgtatgcatgggtctgaattccataagtaggaaatcaataaacttgaatgtctctttgtaaacagtaagtatgagaaagctaggaaagaatgaagtgagttctctggtctcagtcccctggtatttataatgcccggaagaattagctacggccctttaaaaaatatcagttcctggtgtagcatcaattgcaataatggatgatttgaactttcaataattttttttttaaattcatcttgataatatttttattcaaagatgaggaaaagaaattgtatttgatatcttgaagattaatatacgcatgaaatctcatgtttgagcctaattttataaacgtgcga

SEQ ID NO: 3514 - DNA, 854 bp, Gossypium hirsutum
aagattgaatggttaggaagggcgtttacagaggctaatcatgaaagaaattctttgcagaagaagattgataatcttgaaaattattataggtcagtagctgctgagttggaggggtcagaaaagagagtagctgatcttgaggcagatcttcaatcggttacgcttgagagggatcaactttctgaaaaattagatacctggaaagaagatccgcaacaaggctcaactttaggggaggacttgagaagaaaatatgaggaccttcagggtaagttttataggttggcagaacgaaatgaaatgctggaacaatccttaatggaaaggaaccacttgttgcaaaaatgggaggagcttttggatggaatcaacatgccctcacaaatgcaatccatggaacctgaagaaaagattgaatggttaggaagggcgattacagaggctaatcatgaaagaaattctttgcagaagaagattgataatcttgaaaattattataggtcactagctgctgagttggaggggtcagaaaagagagtagctgatcttgaggcagatcttcaatcggttacgcttgagagggatcaactttctgaaaaattggagactatgacttctaatcatcataatctttcggcaaaggcagctcaatttgaagttgagaatgaaaatcttcagggcaagatttataggttggtagaacgaaatgaactgttggaacaatccttaatggaaaggagccacttggtgcaaaaatgggaggaacttttggatggaatcgacatgccttcacaaatgcaatccatggaacctgaagaaaagattgaatggttcgggagggcgattacaga

SEQ ID NO: 3515 - DNA, 558 bp, Gossypium hirsutum
tgggcttttaactttaaaaccctccatagaacttgggttagagtgttccacacaaagcagcctgccctctaacaaagcccaatgagtatttgtaatagagtgttcctttgttatggggttgggaaatatggaagtagaaaatggaaatggagaagggaaaggttgtagtggagaaggtgagaggaaagtcaacagtgataagaagcttctcaaagtatccacttaaattcattatcccaagaaaggttttctctcttcttatattacaacagataactaacaagtctttttgtttattctcttcaactgaagctgatgattggttgattcctcaggttggttcttccattaccgatgctgtctggatttacagcctcacctatggcggtggcattgtctccgtattctctcgtaactcagacatcaatctttctatcatttctttgtgttttcggggggttgtgaatttgtgtatcgttgtctttgtcagggggattctatttcagttgaatttacaattggagatggctgcactgctgttcttactacccaatcctc

SEQ ID NO: 3516 - DNA, 703 bp, Gossypium hirsutum
  misc_feature (65)..(67): n is a, c, g, or t
  misc_feature (213)..(214): n is a, c, g, or t
  misc_feature (650)..(655): n is a, c, g, or t
  misc_feature (688)..(690): n is a, c, g, or t
agaaagagagaaatagaggaaagatgatgcaacccatatgagtttggcacaaagaagattgacannnttgggttatcacatgttttgcatttctttatgccatcctttcaattgattaagcacaagccaagtcctaggcacacttttttgtatagaagggaaaaaacctcctttgttccagaagcccaaatttaaattttcatttttattttnncaaaaaaatgcttttttttcatttttcccctcaaaaggtttagggaggttcagccccccttccgacatttttaacaccttcttgtttttttttttttttattctggcctaacatgcgaaatagtgaccaacacaccatacaaattgattcttagtaaaatcctagtactcatatattttgaatttcaaacattacaggtgctccaacttagtaaagagaaccccaaaattttaggataggaaaaataaatttttaattataaaaaaagtaattatgaaattaacatatcaggtggtatacagataggccaccactattcaagggggaatcatgaagaggctacctgttgataagctaatattgcatcagcactctgcacactgttggcttgtgttgcacaaggcttgttccaaagagaataatcattaggtttaannnnnnaagcagttttgaaagacgcaatggccttatcannnctcccgacaaata

SEQ ID NO: 3517 - DNA, 628 bp, Gossypium hirsutum
gagtctgattaatttcttgcatgctttcatttttggcatttgaatgccttggactttgtggagatgatccatcattatttgatgcaccatccctcacgaaagtatcccatgaagcttttgtggtactcctacaatcaaggaactgcatatcaagatcttcaagtctttgatatgcatctaaatatcgcttaagctgtctcggtcctataaccagtaatggttcatgaggcactcctttcaataaatcacgtctcaaagcaagcactcttgccaaacccgtgtggtgatcagcatgaatatgagagatccaaacacattttagatttctaatagccttgtctgcaccatctacaccatatctgctttctcaatagagacgcaaccacgagttaagagggaaaaagagaaagaccgtgatattaatcatacctaactaaaattttgagataattttaccttcttttcagttggccaagggtcccttctccgcaatccaagagcaagcttcctttggagaaaagattgatatagacagagctaacattacgatacttagaaggctgagatgaacctgtaccaagaagcacaatttcaaggtcatctctccttatgttctccaaacaaccag

SEQ ID NO: 3518 - DNA, 593 bp, Gossypium hirsutum
  misc_feature (538)..(539): n is a, c, g, or t
  misc_feature (541)..(542): n is a, c, g, or t
  misc_feature (585)..(587): n is a, c, g, or t
ttgcaggtacggatatcaactaagtgatgtcaaggttacaatcaaatcttccttgttacccaactgttggattggtgaaaagttattgatcttggtaggtgtttagattgtgattgtaaataaaacaaaaaagttagtagtaatttatgcgatggatgaattatttgtgggcctttcacgttccaatcaacctttgcatgtgcgtagcttcatcatcttccgctggctttctatctcttagctttctctttcattcacgctcatttacagttgttcatcaccttttcaaacaaaatctacatctttaacgattctgaccagcactttcattaattctttcactttgcactttgcactttcccgataatcaccaaaccaaacccaaagcttggactttacttcaagaatatcattaatatgctttctgtttgattgttttctttctttttcttttttcctatcaatggattcagctactctccttgatcgtgctttgtttcagctcactccaactcgaactaggtaatccgcgatttgnnannggcccattcttgtaatgaaatgactcaagtactgaactgaatnnncttttt

SEQ ID NO: 3519 - DNA, 1204 bp, Gossypium hirsutum
  misc_feature (643)..(697): n is a, c, g, or t
  misc_feature (699)..(708): n is a, c, g, or t
  misc_feature (712)..(721): n is a, c, g, or t
  misc_feature (723)..(743): n is a, c, g, or t
  misc_feature (748)..(753): n is a, c, g, or t
  misc_feature (755)..(757): n is a, c, g, or t
  misc_feature (760)..(766): n is a, c, g, or t
  misc_feature (773)..(778): n is a, c, g, or t
  misc_feature (782)..(782): n is a, c, g, or t
  misc_feature (784)..(790): n is a, c, g, or t
  misc_feature (793)..(799): n is a, c, g, or t
  misc_feature (802)..(802): n is a, c, g, or t
  misc_feature (807)..(811): n is a, c, g, or t
  misc_feature (821)..(835): n is a, c, g, or t
  misc_feature (838)..(840): n is a, c, g, or t
  misc_feature (845)..(864): n is a, c, g, or t
  misc_feature (866)..(866): n is a, c, g, or t
  misc_feature (868)..(871): n is a, c, g, or t
  misc_feature (873)..(873): n is a, c, g, or t
  misc_feature (885)..(890): n is a, c, g, or t
  misc_feature (892)..(892): n is a, c, g, or t
  misc_feature (901)..(905): n is a, c, g, or t
  misc_feature (911)..(917): n is a, c, g, or t
  misc_feature (922)..(925): n is a, c, g, or t
  misc_feature (930)..(935): n is a, c, g, or t
  misc_feature (938)..(940): n is a, c, g, or t
  misc_feature (944)..(948): n is a, c, g, or t
  misc_feature (950)..(950): n is a, c, g, or t
  misc_feature (953)..(961): n is a, c, g, or t
  misc_feature (963)..(963): n is a, c, g, or t
  misc_feature (965)..(972): n is a, c, g, or t
  misc_feature (976)..(992): n is a, c, g, or t
  misc_feature (995)..(1003): n is a, c, g, or t
  misc_feature (1007)..(1014): n is a, c, g, or t
  misc_feature (1018)..(1020): n is a, c, g, or t
  misc_feature (1023)..(1027): n is a, c, g, or t
  misc_feature (1031)..(1034): n is a, c, g, or t
  misc_feature (1037)..(1048): n is a, c, g, or t
  misc_feature (1051)..(1063): n is a, c, g, or t
  misc_feature (1070)..(1071): n is a, c, g, or t
  misc_feature (1076)..(1084): n is a, c, g, or t
  misc_feature (1086)..(1096): n is a, c, g, or t
  misc_feature (1099)..(1104): n is a, c, g, or t
  misc_feature (1112)..(1134): n is a, c, g, or t
  misc_feature (1136)..(1139): n is a, c, g, or t
  misc_feature (1142)..(1145): n is a, c, g, or t
  misc_feature (1147)..(1155): n is a, c, g, or t
  misc_feature (1157)..(1158): n is a, c, g, or t
  misc_feature (1163)..(1171): n is a, c, g, or t
  misc_feature (1177)..(1182): n is a, c, g, or t
  misc_feature (1185)..(1185): n is a, c, g, or t
  misc_feature (1190)..(1201): n is a, c, g, or t
tttctggccgaaaggtagatgcacatttaccttatatagcatttttatgcacttaaatttcttcatttaccttatgtccgacactcacattcaaattcaagtaacatagttacttcttgtctgtgtgcttatttttttgactatccaggtaatgcttggagttgatcgtcttgatatgattaaaggaattcctcaaaagctgctggcattcgaaaagttcctcgaggaaaatccgtactggcgtgataaagttgttttgctgcaaattgcagtgccaacaagaactgatgttcccgagtgtatgttcctttctttctcttgtttctatttgtgctccaatacccttttttaatatgtttgccttaatgtgattctttgtttctcactgttgttaacagaccagaaacttacaagccaggttcatgaaatcgttggtcgtattaatggccgatttggaacattgactgctgttccaatacatcacctggtctgtctttgtcatccaaaactgatacttaatgcgcttgatatgttttcttcatattttagcttcatccatacttcaattcaaatcattttccatgtatgatttctgagtagttgaatagtctccttttcctttggacctacagtaaactcaaannnnnnnnnnnnnnnnnnnnnnnnnnnnnnnnnnnnnnnnnnnnnnnnnnnnnnntnnnnnnnnnntttnnnnnnnnnntnnnnnnnnnnnnnnnnnnnnnatttnnnnnnannnatnnnnnnnatatttnnnnnnaaantnnnnnnntannnnnnnaantatannnnnatatatattnnnnnnnnnnnnnnntannnaaatnnnnnnnnnnnnnnnnnnnnantnnnntntttaatatatannnnnnanataataaannnnnaaatannnnnnnattannnnaaatnnnnnnatnnntatnnnnntntannnnnnnnntntnnnnnnnnatannnnnnnnnnnnnnnnnatnnnnnnnnnattnnnnnnnntttnnntannnnnatannnnttnnnnnnnnnnnnatnnnnnnnnnnnnntaaattnnatttnnnnnnnnntnnnnnnnnnnnaannnnnnttttatannnnnnnnnnnnnnnnnnnnnnntnnnnttnnnntnnnnnnnnntnntatannnnnnnnnttttannnnnntanatatnnnnnnnnnnnnttt

SEQ ID NO: 3520 - DNA, 611 bp, Gossypium hirsutum
  misc_feature (592)..(592): n is a, c, g, or t
aaagacgttggagtctgtaagtcaagctgttggtgaatattatcttttccggctctggggcacttgcgttgcagggacttggcaaatgtgggatcaatgttggagtcattatgaatgtgtgctcgaaatgtttcgcattttaccaggccaatagtgtgagcacctgaataccattccaaaatgaaccagtaatttatcaaaacaaacagactagtattttgccaagtcagaatctgattacctgaaagtgccaccaaatctttcaatgagagtccttgagtatcaaagcttgaaagaagagcactaatattcaggttcggtctagggatgaactctgttgcagcagcattgctagcagtggtagcgtcctttctccctagcttaactttccatgaaggacctcctagctgcaaataataaaaatggcaattattatcaccttccaagtgtttaaattagtcattgacaatgcggtcaattgcagcatggacttactatgacagttgagtctcgtgctgcgattgccagaatatctgcacaagaaactactcctggacatgcatcctccagtcgagctttgatgtcgtcgacnacgttgaatcctctggtca

SEQ ID NO: 3521 - DNA, 517 bp, Gossypium hirsutum
ggcctttacggcagccctcttgtccttgactacggttggcattggattttgcatcggccacgttcgataaccaacgtccactggatggcacaaccttatttttatgcattttgtaatactccactcacctgcttagctcctttcgttagttacatacatacaattacgccggtcgggttagcaaaaaagaaattgtcatttagactcccgtgacccttcaacacccatttttcagttctttgctcttcaagtaacgaaccaatgtaagtctcccaattctctcagattatcattttcatggcaccagctttgtttttcttttttccctttaatgttttttatgttctttttgttgggttttggttatctttgcatttgaatgaactggcagggagaacaggttgaagccaatggatgaagagcagctgagagagtatggtcacaagatggttgatttcattgctgattattacaaaaccattgagaatttccctgttctccacccatatgaagtctc

SEQ ID NO: 3522 - DNA, 634 bp, Gossypium hirsutum
aaagggtcttacgagacatcttgtctttggaatagttgttagcatcttcggattcgacagcattgaagtttgagcattcttgtttatcaacatcatcatcagcatcatgtttggtatctctaaggagccgtagcaattccagtgcacttgcctttcctttctcacttcccttaacggatacatcaaaaaggacaggaaatatgcaacactcatccataactaagtgacagtattcgatactttgcgagcacaatgtaaggagaatagccagtgcattctcttgatcctcaaaaccaccactctcgagtaacatagcaatcgaagcaatgcagccaggtgtttcagtgatccaagtcctaccctcttgattactacacaagtttctcagcaccactatgcagtgtttagaaagagtggtgtcttgtaaatacggaataagtttagggatgcattctggagacaccaaatcagaacaaatatcggtgctcgaagaggacagattgctcaaaattttgatgatttgatcctggaaatctttgatgttcgaatcgagaatgtttaacatggaaacaaaagcaccagatgctgaaatcttagatttacagctgctatgttcagacaatacttccatgat

SEQ ID NO: 3523 - DNA, 522 bp, Gossypium hirsutum
ttattcaattagcataaggccttctatttcctacattctcacttccattgcataatgaaggtcttaagaaagctttcttcaaactttaacctagttacttgttcatagaagtaatcatattgaatcatatttagctaagcttcgctgtttgtaactggggatatttgatctttgttcttgaacgtcattttacagattggaaaataataggaaatatgaagtcacctttcaacctttttcatctcttagttctcgctctgtaactactaaagaggaaataagtaatagccgatgaaactgttataacctatttgtttgtatttttctgacactgactgatttatttctggggctcaatcttatagatgtccaaatctgcaccttctgatcagtctcgcatcaatcttcttgaccccaaggatgtgagtggtttaatccattttctgccttgtttatccctgccttgtgcgtgtttgtttgaaaatgataataggttttattaatacatgcttactacagttg

SEQ ID NO: 3524 - DNA, 615 bp, Gossypium hirsutum
catctatttttcctttttcttcaaatgttgctaagtattctatcctaaggaatatcttaatgataaactagtcaattcttaacaacaccctccacatcatctcccatctcgtcattatatgcaaataaccataggaaaagaaaactaagtagtgtttgttgatggcattatcctcatttctaggagatagtagcatctcaatgtattggaattggactataggtcctttctttttagtgattatgttactacagactattattatatttctttgcaagcttcattttcatagttgtgcttagcttgataaagaagtttcttctcttcaatctcgacatgcaggttgtagctcctgttaaaatgacatttgaaatgtaagtgcattctttatctgaatttccatgatcattctttattcttgctacggtgttcatctttgctttcttaaacaaattttcttggtgttgcagatatgcaacatgtgtagtacccataagtgccttctttgcatcaagtctttggtaagcagttaattatgactgaacttgtttgttgtgtgatatagcgttttcctcattaagatggtatgatttgtcttgcgtaattagtcatttc

SEQ ID NO: 3525 - DNA, 651 bp, Gossypium hirsutum
gattgtatgaagattccaagtcaaaatggagctgcctagcttgctgttctgttaactcatccgctgcccccatcttagccaaccttgaaatccattccctcattttgatctttccctcgaaatcgggtggcaaaataccaagcttattgagtgatgctgagaggtcagacaacaatgggtacacttgatcaacagccaccatgttgagtttcaatgaatccatggcagtaataaaattctgcacacattcagccacaatggcagccgaggtagtcgctgaggcagccgccgcggcccggtgctccaccgtggctggaaccccagaggtcaccaaacgatttatagcagccggacagtccattttatatgtatctgcaaaacgttcaatactagggacagtatctttgagtgttgaagccaaggtcttgaaatgggcaataagcttttggcattcagtctcatattcagatgatgatataatatccctcacataagctttttcaagtttctctgttgccttgataatggcatacagctctgcaaaattctcatacatttctctctcgcgcttgtcgttccatagcttaacctccatttaagcaaaggcttggtatattactatactgaaacaaaaaaggggtcaactttggg

SEQ ID NO: 3526 - DNA, 304 bp, Gossypium hirsutum
aattttttacaatgttccagacctcgaaggactgcttcttaaacccttgagataccatttcggaaaataaaccctatcgttgaaaggttgaagcctcaatatagcaaacgctagtaagaaaacgaaagcacttagcagattaatgcctgctgcaacccctatatcacctagtgttgccatctatataaaatcttctctgcatacacgaagataattcccagatcaggaaatccaccgtaattaaacgattaaactcttaaggttgcaatatattccggatataaacagaaacctcacaggaaaa

SEQ ID NO: 3527 - DNA, 615 bp, Gossypium hirsutum
aagcctgagtaccagttttacacatactcgctctgccgatgtcgaacctcatacagagtataagcagtctgatgttcaagctgatacgttaaataaagctatacctcctgaggaatttaagtgccccatatcttcaaggctgatgtatgatcctgttgtcattgcttctggacaaacatttgaaaggacatggatccagaagtggtttgatgatggtaacgatacgtgcccgaaaactaagatgaaactggaccatctctcattgaccccaaatgctgccatgaaggatctgatatcaaaatggtgtatgaagtataaaatcaccattcaggacccaagcatgcaaccagatgtgcttcaatcattggaaacttcttctgcttccatagctagttttggcagttctatgaatgatctgtgctttccggtagacatcagcagtatatcaattggatctttagatacgagttatacttcggacagatctcataacaggattgcaggtggcttaagtttgatgcctgagcaaaatggtgatgattgtttgcaacaacaatcggtcagcagcacaagaagtaagattgatttggagtgtctatctagcctttgcatgct

SEQ ID NO: 3528 - DNA, 638 bp, Gossypium hirsutum
  misc_feature (24)..(24): n is a, c, g, or t
taaatgaacagtatttaattgtcnactctgtaaatattaaggtatggaaatttttatatgaactgcttaaaatatgaaggaaaacaagatcaaatattaatggcacaccagaacaaagaaaagtctcatagaagtgaaatataatgctaagtccactagtagcataagaagcaagtttgcagtaaaaatagttataagcagagatacgtcctcataatttagtataaaaaaattgacaaaaacccactgagcagtattgttaagtatccaaactaaaaccaattagctgtatatagagggcatttattataagatcacaggaagctcaatgtggttgctaggttgtgaaaataatttagactaaaatcaatcaaaactctgattatttgaccagatcaggtattgtaggtctctagcggataatggagacgacatagcacataaattcatgaatgcagaatactgaccaaaaacccaaggcaacgttcaaaatacattacacatgaaacatactgtaccatacacacctaatggttccactttgacgcaaagaagactgcaaagcacgtctgcaattccgtatccaagggtgagaaagaagcgtttttgcatcaggcctctgtctggcatcctgaaaa

SEQ ID NO: 3529 - DNA, 633 bp, Gossypium hirsutum
atgatacagcagtaaggagaccaatgaaggtcaccgagtctggtttcaaaccaaccttggaaagcatcttgaacaaattaatagtttcatgtatatatccatgatcagcgtatccattaatcatggctgtccatgtgacaatattataattctcagcctcgttgaagactttttcagcatctttaatacacccacattttgagtacatattaactaaagcactctgtatcatttcctcttgttctaacccaatggaaagaacgtgagcatgaagctgcctcccttgctccagaatcgccatatttccgcagacactcagcacactagcaaaagcgaattgtgccggctttggcccttcctttctcatccacgacaaatgctcaaaagcttcttccccatagcctccttgagaatacactgcaattatagtgctccaggaaatggtatcccttcttgacattccatggaacaccattgcagcagaagatatctgtccacatttcgaatacatggtcatgagggaattagcgactgataaagtatctgcaagaccgctacgcaaaacatgggcatgtaattgctcaccccaactaattctcacaagaccagaacaactggcaataacagcagcga

SEQ ID NO: 3530 - DNA, 627 bp, Gossypium hirsutum
aaaattttgcaataaatgtgaaacattacacttcataggcttgatatagacatagtttaagatggaaccttatccattcaaattaattttaattaagccaaaaaggttttgacatggttcaagaataaatagaagcggatgataagtgaaatgtaatgcactactagttcatgagacaacgaacgatcataggttagatccagaacattagcagccaggcaaagactgcagccttagatctggtactctgactgaagcctcaggccactaagataaacgtaataccaatcatattgcaaacttcaatgtttaaacgaaaaatagctccttctatccctttccactagaagttttaatatacaagaaatgaacattgcatggtacaccaacatggctacatcaagccagcaaataaaacacaaaatgtagcggtacaagaaaatagatcctttgtgttcaaaaggttttcttgcttgcttaatcaataggttgttctgtttcctaaaatatgatggtattcacagggcattagacaagattaaaaatgatttagatttaggtggaatagaaaggtaaatggtcaaccttgccaggcaaagaattgtaaccaaagatgctggacagata

SEQ ID NO: 3531 - DNA, 611 bp, Gossypium hirsutum
gaatttcctaacttaaaacaactccatattaaacttttagcaggattatttttttactgtgtcaccctagaacacatagaacaatcaccgtataagctccgatgagcactcaagaaccacaacatttgactccattaagtcaccaaaatctaattaatccaaagtgtcatcatcaaatccatatcccttagacgatgaagtatttattgtgtgcaagttacatgcacgttatttttttcctgatatttcaataaaatattttatattattttatattaaaatttattttttataaatacatataataaaattgtgcatcacacatgtataaaatttagttaatttattattttaaatattttaaagatattaaactaaattttatcatttaaaagggacaaaatgcaattttatcattatatcaatttaggagttaaatgttatttcttttgtcttgtttagcggcagtgtcaacttccgggctggctatcgcccattttttttctcttctatcaaccttttctttctttcttcttctcattcactactcacgtcttctctcttttcagtttgcagatctattttgtgggtttctttgttgccgcgtaaat

SEQ ID NO: 3532 - DNA, 638 bp, Gossypium hirsutum
tccggggactactatattgtcctctattttgcagacattcttccagtttctgcttctttcgatatattaatcaatggggtcgttcagcaatccaatttcactataacaacctcagaaaccagtactctatatttcacacaaaagcgaatcacaagtctggatattgcatttaggagaatcagattctaccctcaaatcagtgcatttgaggtctatgaaattgttgatattccaccagaggcttcttcaactacagtttcagcacttcaagttatcgagcagtctactggttttgatctcggatggcaagatgatccatgcttaccaactccatggaatcatattgaatgtgaaggaagtacagtgacatcattgtatgtaccaaagtaaactgtagcttacgaatttggtattctacctcggctaactacttgtatggatttatcatttttctcttagggacctttcagacaccaacttgaggtcaattagtccaacatttggtgacttgctggatcttaaaatactgtaaatgtcttcatctgtcttttaactcttaatattatcagcctatcgcatcctctatataaatatctcattctctttcagggatttgcataacacatcactttcaggag

SEQ ID NO: 3533 - DNA, 722 bp, Gossypium hirsutum
  misc_feature (602)..(604): n is a, c, g, or t
  misc_feature (611)..(611): n is a, c, g, or t
  misc_feature (613)..(614): n is a, c, g, or t
  misc_feature (618)..(626): n is a, c, g, or t
  misc_feature (633)..(634): n is a, c, g, or t
  misc_feature (644)..(648): n is a, c, g, or t
  misc_feature (650)..(650): n is a, c, g, or t
  misc_feature (652)..(652): n is a, c, g, or t
  misc_feature (685)..(686): n is a, c, g, or t
  misc_feature (703)..(703): n is a, c, g, or t
  misc_feature (705)..(706): n is a, c, g, or t
tttgctttcttcttttacaataaataaaatatatacacctttaattaactggcatcaactaatggcgtacaattaatatatacattaccaattcatgcagaataattatttgatataaaaagatgaattttttaaaatacacaagcataattaaaagattgtcaaatgtattgattagttgaagatgtgttggcctttatttacaatattgcattaaagtttaaactttaaaagcataagcataacaaccataaacaagcattaggggaaccacaaatgtagaggggaatcaatccaagtatctcaactgattgaattcatctcattctcatacaagcaagttattttatgttcaccccttctaccttttcttctttttcgtccacacactgcgaattatagataataaaactaaagattctaaggagaaacagaaacagaagcaaagtgccttccgtttttacatattccatgcccttctgaaaggactacgactatgaggtatctatttggttcagtcaatttgtgtttaataacatttatttttaaccaacataaaaaaaaaaaaagaaaaaaaataaaagggaaattccggccccccnnnccccggncnnaaannnnnnnnncccttcnnaaaggactannnnnangnctatgatgtacctattttggttcagtcaatttnngttaaaaaacatttaantnnaaccaacataaaaaaa

SEQ ID NO: 3534 - DNA, 677 bp, Gossypium hirsutum
cttgccgcctttgtctgctctcctattacatatccactgtttcatagctttaccattcagacttttcttttaccaaattcatatgtttaactatccatttaatggattcggtacaccatatttttaatacaaaacatgttcaatcgatatagaagaaaggttttgcaaataggtttgaatttaaacttgccgatggtcacaatcttaaaagaaatctccacttgttgaatgtcaattatggtattaggcttaatcacgtgccctccgcaatttgtactttacagtagaattattattgaagtttttataccaccagtcaagttatattttgttccttttattcaaaaaataggtaaactagtacatatacattagattaaagagcaaattgataatttttgttaaaaattgatgtaattgatggaatacccaaacaatgattgtcacgtgtacctcatgctgccatacatggaacagtttttaacaatagaaattaatgcaatttttaataaaaagactagtttgtcctttgatctaaagtacaaagattaatttatccattttttgagttgaggggataagatacaatttaactcttaatacaatacaataacttttatgatactgaatctgtcctcattttgctttataatgaagcgtctactcatttagttctg

SEQ ID NO: 3535 - DNA, 303 bp, Gossypium hirsutum
cctaattaggaacagaaagttggtagaaaaggaataacatctcaatatatcatgatcttactttaatttgatgtgcccctccagtacccaatctgtggtcaacatcacacagcaatctacatatgagatcctttgcctcatgacttatccttgaatcttcaggaaatcttaggtgacttttccagtgcacgatctaaaaatgatttatgaccgatatgttagggaaagaatgatatcaccatcaagagtaacatgatgaaaatgttctttctaaaacttgggtaggggcaacagacataatgc

SEQ ID NO: 3536 - DNA, 620 bp, Gossypium hirsutum
tttcaataatttcttcctgtgttgaaaattcaaagaagaaaggcctctaattttattctacttttagtaacttctgacgtttcaaattgattgttaaacctgaattcatccgttctgagattagggtaagctatcaatttctattaaaccaatctgccagtaagactttatagttgataattgactaattctcattcaccgaacattatatgagattcatgaaatcttttaataaattgtgattgtgattaaataattacaaaattgtgggattgtaaaagctactacaagaggaagaaaacatgtactcttatactaggaaaagatcaaaactcaaaacagcaatacataatgatgaggaaaagcaaatatgacaacctaaatttctgttcacaaatcatattgaaacttgggtcccatctaatggaattgatttatttaaatgttccatcataaattcgtttttttaataactaaaattaaacacaaatgaattaaaattctttacaatcggaaacaaaaaaagggagaaaaatacattagaggttacatagatatttgtggtacagacagttaatcaattgtgcatcaaaattcttcactatatatcagcttccctc

SEQ ID NO: 3537 - DNA, 618 bp, Gossypium hirsutum
gtcataaaaagtggggaacgtgcaccattttatgttattatatatgtcaatggtttgaatcatctatgtcaatcctgacttattatataatgtgaaaaagatagtgcgtatggggaagtaaaaggcgaagaaaacaaaagatgcgtgtatgttgaggtaatgtagccaagaaaaagaatacaaggtgttgaaaaccttttgtggccttgttttacaagcttttagcttccaccatggaatagagatgggcttcaaatttagctacgatagttcatttgggtgttgatttagtgatcggattgggatctaaatgaactagtattgcttggaatttacaatagagaaaagttcattagtcttgtgggctcattttctaatacgatattgaatatttgcaccactatttgtacgtcattgtgttgaaaacacttcaaaaaagagagtaaacgtttactcttaaaattaatatcgaagtcaataatttaaactcaaaaataatttgtataaaaaataatctaaacttaaaatgattttaatttaaaattatctagcctaaaattactttaataaatagtccaaatttatccaaataggtgtctagcaaatatatagcccaaa

SEQ ID NO: 3538 - DNA, 330 bp, Gossypium hirsutum
tttgcttgtttaggtttccttttgggcaaggtatcgagaaacataatagcttcagaaaacaaaacgagcacgtgatttaaggaacttcttttttgccactagtagcagcatataacctaactaaattaatagaagcacagatcacacataaatggtaaaagtatcatggaggcccttgtactaggagttggattgcattttcccctatttacttgtgtaacttgcacgttagatcaaagagcaaattgatccttttgttaaaaattctatccatttttattgttaaaaactagtccttgtacgttagtatgaggtacacgtgatatacca

SEQ ID NO: 3539 - DNA, 520 bp, Gossypium hirsutum
aataaaatttcgtattttggactacggttgttcaccccatatctacgttgtgggattgaatcgcaagaactgcctgctagtagtgtggggtagtgatatgttcctaccagtggcgtgcgagttataaaaagatggtatttttattttaggcttataaatgatttcaggttgcttcttgataaaatctattactttccttgttttagaaaaaaggaaattccagtgatgaattcaagtgctaattatgtaattttattaaaaaaatggtaactttattttagtcttatctatgatttcaggaggcttgttaataaaatcttttactttccctttctttataagatgaaattctagtgatgaattcaagtgctaatcatgtaatttgattaaaaaaatggtaactttattttagtcttatcaatgatttcaggttgcttgttgataaaatcttgtactttccctttttgtagaaaaaaaaggaaattctagtgatgaatccgtggttacttgtgatttcttg

SEQ ID NO: 3540 - DNA, 659 bp, Gossypium hirsutum
ttttatgtgggaaataattcaaggatatcatgtattttgttgtttattcaatgatgttggattaggttaatcggaggtgaaccaaatgccttttcctttttcctaggcattattagcagcttgcatcaagtagaaaattgggctatttttcagggttccctttcgatttgggcgaaggggatgcgattgaattgatctcttgttattgtatctatatatctttattattgtatgtatttatctatctatatacacatatcatatggtgttctaagacgtgattgtgtttgttatccatttgattttggctgtttattaagttttcacttcattatttagtttgtggcaattttaaaatttcttaatcattgttgttgtagcaacaatctaagataagggttcaaatgtgtttaaaggggattggagagttatagatagtgtagggtttacattggagaaagttaaaaatgtcctgttaattaatgtaataacgaggaaaaggttcaacttcaataaagaacagagagttacgtctttgatattgaaaattctgtaataaacataatttactttatttttggcaaggaatactatcgtgaaacttcaaataagttactaggtggctgcgcgcactttgttgcgtgcatgttagataggac

SEQ ID NO: 3541 - DNA, 633 bp, Gossypium hirsutum
ctcttaactgaaatctaaatcggactatgaggcagagattaggctgctaattcatatttcatgagagccattttaggctatttttaatttaggaacttctggttttgtttgtcctgcctgttttctaactccttttttgtgtgtttatcatgcaggcttgtcgtcaacagcgtatcagatatggttgactattggataacatttaatgaacctcatgtcttctgtatgcttacttattgtgcgggtgcttggcccggaggccatcctgatatgatagaggctgccacttctgctttaccaactggagtttttagacaggccttgcattggatggccattgcacattcaaaggcctacgactatatccatgaacaaaggtttttcttccttatgaagacttgagaaaaggatttttttgtcaaaaaaattaacatatttctaacaagttagatatttttgatacttgaagttgcgaaatactgcatgtctcacctgtttgacagatttcccaaatatatgacattctaattactatttcatttcagcagcacattatcaaaaaaagtggttggagtagcacataatgtatcatttacaaggccatatggtctctttgatgttgctgctgttaca

SEQ ID NO: 3542 - DNA, 648 bp, Gossypium hirsutum
tatgtatgccctaagaaaagaaagcagaggaaaaacacaaaagaagagaacacagattaagctcaatttctaccaagatctttagccacttctccaactttacactgagcaaaggcataccactcatcttgaattctttcagaaacttcccctgttgtagactattagatacttcatcataaatcttcagtacaatcctattccaggatgagaagaaggcaaaaattagaagatgattaattgagacaaaaaacaaggaatctcttagatacaaagttaaattactagaggatatttaggactacatctgtaagttcaagccaagaatatgaacacttcgaccttacttcttatcagcctcgtcttccagaaggccatctataagacatttgatcgtcttataacactcaaccaccgctgaatgcatgtaaaagtcactgttgatcagtttaatcaacttggcatcctccttcctcttagaatcttttgctatgttcaatgcagcaggaatctgtaagacgttgcacggggataatctataacataaacaacctgcgtcacatggaaaagtaaacctgaaaatatactgaatagtgtttaccttactagctagcaagaaaagtggccaccgaatcacagagtcatcac

SEQ ID NO: 3543 - DNA, 622 bp, Gossypium hirsutum
tgggaagttgctcctttacttttcccagtcctgtgtaaaaaaattcgggcattgaattgttgaatttatgataagcaattatctccctataacagcttcttttccatattaagtaattctagtaccaattagtagttgacattttgacttttcttgttgaccgcagtggtgtttcctcattcaaccagttcattcatgaactttctctggagtctgatacttcaagtatagactactcttccgatgacaacagtcttgatgagacataccctgcgtcaccatcatctcatgggtcaagaagctccaggacaaacttttctatcaataatgcttggcattggacagacttgatggcatgcatattgtcattgattttgttacctgctaggcttctgctgtggatgccatttcttgttttccgtttgttaaatatttggggatcaaagacttcttcagatccaggaagcccccatcttaagaattttcactcctttaggaacatgcacatcaccaaggaccatgttgtcaaccgcagcattgacaggaggcgtggagtcgttgaggtttctacaagaacttgcatcttactgcctctagaagttttctgttttcattgcctcat

SEQ ID NO: 3544 - DNA, 643 bp, Gossypium hirsutum
acctctttcatattctttcaaataaatttattatttttcaactttaaataaggcttccaatagatatagagtacacgaggagtataacaaattcccaaagttattgaatttaccagtttcaaaacattattaggtccaacaaccaagctagacaagggggatcagccctccccactttcctctatcccttgtgatagcaggatttgattccaattcctgggtacaacaaacatggacacctaagttagcactaataacgtcaaaataaaaaaatacatgtgttcacaagcttgaacaaaaaagttcaaatcaagattaaacaaacacaatcgaacatgcaaaagcttaaataatgatgaactgcaaaatcccttgctgagtaataacatcaagattttcatataaaccttatcatttactgtgctgagatttaggaacaacattactacacccaagttctttctatttttactggtttagacacaaatcttgcagctatcttaaaccttcggcatgagtgatttcatgatgcacaaaatgtaggctctcaagttatcatcatttaaaaagagaaaaagaaaattaaagcttactaacatgatctggcttttggagattctgaatagttggaatggagtgtgtg

SEQ ID NO: 3545 - DNA, 687 bp, Gossypium hirsutum
  misc_feature (615)..(619): n is a, c, g, or t
  misc_feature (621)..(636): n is a, c, g, or t
  misc_feature (639)..(643): n is a, c, g, or t
  misc_feature (645)..(647): n is a, c, g, or t
  misc_feature (650)..(653): n is a, c, g, or t
  misc_feature (656)..(661): n is a, c, g, or t
  misc_feature (664)..(670): n is a, c, g, or t
  misc_feature (673)..(675): n is a, c, g, or t
  misc_feature (678)..(684): n is a, c, g, or t
gttgaacacaatggggcaagaacaaagcagaaatcaccagatctggctcgaaggcacagaagtacggaaatcttaccaatggttgagatacactttgacgttgcattcgacaagagaacttttagatctgtctctgggtggtggtttggggtcgtagaaataaaattctggcattgaagacgatccttcacaatagtgttccatctccgttcgcggcagaagcatatgcagggttagaagcaattaagttagtgatcttaatgggttttcgagaagcacaaattaaagggggattcacggacaataatcaggaagtgtcaaacaacagaaacagacaaatcagccatagaagcaatcattcgagatattcaaaacatgtgtgtccattatcaaacaatagagttcaagcatattcccagaatagaaaacatgcgtgcccatcagattgcaaaagatgccttagagagcggagtaacctcttacatggtacaaggagacccgaatctactaaacttgctttcgaaaggacgctgggcaagaagtccagactagaagacgctggagaggaaatgggttttaatgatagcaatgaatgtttaattttttctgggcaannnnntnnnnnnnnnnnnnnnnacnnnnnannnagnnnnatnnnnnntannnnnnnaannntgnnnnnnnagg

SEQ ID NO: 3546 - DNA, 621 bp, Gossypium hirsutum
attgtcacaacgaaagaagccaatttggtaacagttttgttctgctttaattttcctcttgcaggcagctgaagaagcacgacttcgagaggaatttgagagggagggcaaaaggcttcctcctaaagatgaaacgcagctttctgattcaaatgttattacacctggcacttcatttatggctgttctgtcaattgctttgcagtactatatccaccttagattaaattatgaccctggatggaaaaatataaaggtagttttaaagttatggtccccccctttcttttatttttggtgttttctctgactttcataaatttgaaggtaattctatctgatgcaaatgttcccggtgaaggggaacataaaattatgtcgtatatacggctccaaaagaaccttcctggttttgatccaaatacacgccattgcctgtatggtttggtatacttctcacttcactttcttcatcttggatttcaatatttctatttaaaattttatgacacgtaatgtttgtttctgttggccatgtttactggactaaaactgtgcactttgctaattgttgactattgacaggatgctgatttaattatgttagccttggccactcat

SEQ ID NO: 3547 - DNA, 614 bp, Gossypium hirsutum
atgcaatctacaaatccaggaaaagtgatggcatccctgagttgtgaatataacagttagaaagtgcaggaaattttttctcacgagtacctttaagactagtattctcaaataagttgcgaaaagtagaaatataaagatgataagagttgaaaatttgtactcgagttatcctccactaatagttctgtgcacaatgcactgatgactgacctttcctccctaccctcaatcggattcttaggatcaggatctttattcagagttttgcaacctttcaaacctttcacggatacccctgttatggatgcctgcatcaaaatgtcttaacatcaatgtctaactagcttcattcaagtttaaatgccatataactcaattataagacataagacgtaatatacatgtgtagatgtgtatgtcgttttcattttcccttgccaataataagttcttttttctttcattatcaccaaaaataaatctccattcttatacaaggaaaatgtcaatttggaaatgttagagaaactgcatttatcaaccacagaattataagtacttacacgaaaatacgaatgcaaggcagtgctgaatgtaaatggcttgttgtc

SEQ ID NO: 3548 - DNA, 609 bp, Gossypium hirsutum
tgtaacaaggagttcaatagaaactttaatataatattatctgcaaactgtagctttcttaaaggaatgttttagaagagcttttggtaggactctttgttgagcaacgggctcatagaaaccaatccacagttttagacttctttattatgttgttgttaattgttcaagaatttaagaccaagttgagagtttttaattcggatttggattgattcacttgtttgatttggattttggctttcacgagctcatatagttagaaaaaaaaataatgggttacttgtttggttattttattttgtaataggccaattttgacctggcccagtttataaaataaaatccaaaataaacataataaataaaatgtccaaaaattacaaaacactacccaatttacatgacccaaagtaaaacccaattacaagcccaaaaaaaattaaaaccctaaaagccatttattaaaatgattaaattatgaggtgattcgattacaccaaaataaaaaggattggtggcgactctcattttcgtttttaaataaaagccgacccttttcaaaaaaatggtttcgacatatatgatgatcgtttgaaattaaataag

SEQ ID NO: 3549 - DNA, 642 bp, Gossypium hirsutum
atctgtggctgcatcaacctgtctattggtaaccttgtttgtttatttgcactttccacaacttgtcgatatgttctattcattctacttgtggccatggaatttcggcaagcacagtaaaagtttaattaaaaagcaaaagtgttttgagcgaaattaatatgatggaatttcagtcaaatttcgctcaaatttcagaattcaaaagcaaaagtgttttgagcgaaattaaaaacttcatgataaaccgtaaaagtttaattttgtggagtacaagaattggctttgttatttctcaaaacatgaatttcattcatgaaaaagccattaatgatgcgactcattagacaggtattcaacaaaagagagcatcacagaacgacaaaaaaatgtccttgtttctttagacatcaaactgttagcacttcactagaaaatttagttgccacctacacgtttccggtatacatcacatggctatgactggtcactgacacccaactgatactgaagagtactgcaatggaccctgagctggtgttttgatatgttccagtaatggagacaacttcaaaccaatgatttctaccttggcattagaatggccatacaaaaagacgtctgtaatctgcaaacatagca

SEQ ID NO: 3550 - DNA, 624 bp, Gossypium hirsutum
tacagatatttagagggtctttgaagcatcatattctcatatttatatctgaaaatttgttggatatgaatacaaatgaagagctgagctgtgcctatgcttcccacatatgtatttcatttactaaaatggctctaaagtaccttttacctacttgccatgtttcagatggatatacttctggttgcttatggctgctggttgtggacttttcattagtgaagaggctttaaatatttgggtctgtcctttgcattggtacttaatgtttcactaactcaaaatttttgctacctctttttttgcttgctatgtggttcagattcttcatttttcttgaaacatttgtgtgtgacactcgtatccaatacatggatatgggaatatgaccatcatggatcttctaaatacatagacaaacatagaaaatctaattataaatgtatttgacacttacaactaattaaaataacatagtttccttttattaggttttttactttaactaagcactctcttttgaattttaacatatatatctgttttggataaatttaggttggcataactttggcacggttactatcattggatggaacatggcattcctttgttgagtctctc

SEQ ID NO: 3551 - DNA, 589 bp, Gossypium hirsutum
gaagcagcaaaagctaaaatggttcgaacagtgaccattttagcaacaggagaaaaagtttccaagtaatcaatccctgctttttgattgtaccattttgcaaccaaccgagctttatatctctcaattgcaccagaagctcgaagtttaaccttgaacacccatttacagccgataggaactttttccggaggcaaagggacaacagtccatgtatgattagattctaaggcttgaatttcctcttacatggcttgaatccagtgggaagactttcaagccttagaataagaaacaggcttagtaatgttggcaagagaagaaacaaaagcatgagtatgaaaaggaaaacgtgaagaagtataagtggaaaaaacacctgcggatgaagtagattggtaaggatgaatgtaaccttgtaactaagaatgaggcttaatggttcgactagatcgcctaggttcaacaacgggaagagtaggagaggttgaagggtgagatgtacttaccgaagccggaaccgaaattggtataacggaagggggacttggagaaggattgatgggagaggaacaaatagaagtgggag

SEQ ID NO: 3552 - DNA, 628 bp, Gossypium hirsutum
gtgttgtaaaagaataaactgtttcaggtttcaacgaacctcttcccattgttgtataggtacttaattttggcatgctatagtatatgcttcaagtttgtgatttggcattcgcaaaggaaattaggtagtgctgcaccaggttccaaattaactcactgctgtttctttacggcttgagatcgactccacatctctacaatttttattttgctggaatttagaagtgatttatattttgttttgtttttccccttaatttcagttattggcctattagtaagaagaaaattataatatcaaccagcgctagttgtatttttggagacaacttatgttcagattttgaataaaatattgttgagtgaactctaaaaaagtttataaattatttgctctgtctatagatgtgatcaaagtataactcccattacatacaatcaactatgcttcgcatggacagatttggatgggtggtggggtgcggtgtgatgcatttagtttactttttatctcacgttataatattgttgcagtatgtaatctcatcgcgccaccgttgtttttacactaaccgcaggaaactcaccgcccatccaaattcatcctaagtccactgctatttgcc

SEQ ID NO: 3553 - DNA, 653 bp, Gossypium hirsutum
ggcagccacagagataaaattactgaatatttggccggaaattggtcggagaaaggaaaaaacaaaaacaaaaaggagagaaaaggaaggaaaatgaaaaaaagagaagaaaaaacaggtatgctgtgaagatatgatatttatagagtgagggaaagaaaagacttttgagaaagaaaaacaattgtagtaataattacaaccgtacgactaccgtgtctttctctgccctttgaacaacataaaaaggaaatgatgggatgggactaagtttaccggtaatagccggtgaaagcaagtgtaaaatgtcccacgcgttacccgacaacattgtttggaaataaagcagaagttttattttcacctctatttatttaatacatttgattttccaattttacaaaaaaatatattttcttttatttaatttttataataattattaataattttaaataatttttaaaaatttttaaaaatttaattaattgttgacttagtatacgtgaatgtcatgtcagcagagttaaggatatttatttttaaatgaattattaaaataatttttttgtaaagttaaaagttattagcataggttgggtttgttttttcaactcttacactgtgtttggttcagtgtaataggtaatcca

SEQ ID NO: 3554 - DNA, 565 bp, Gossypium hirsutum
ctgtttaaaatcaaactgtcagttggggattcagtatctcagatccaatagaaaacagaagacttttgggcctttgggtctatcttcttccttattttcgttctggtttctgtatttcactatttcttcttctccttatttcatcaggaaacaagattgaaaaaggttacggcttttttttatttattctgcctttcccacttttttttcttatttgtttagtaagttttcagtttctaagatattagtttctttgtatttccattagttaccctgtctttttctatattttccacattgaccccttcaagttgttgttagtcaatttctccatcacatctatttttctctcttttatttctttattgataacgttttctatctttaattgtatgctatatattttttcatttttatatgcaatgttcttttatagataaataaataattttgattgataagattgtttctaataacaaattaaacctaatggactttttctaaaagatatagtttttcagttttatgatctttctttatttatctgcttaccaaaccttacaac

SEQ ID NO: 3555 - DNA, 623 bp, Gossypium hirsutum
  misc_feature (617)..(617): n is a, c, g, or t
gaccctggcatctagtagtgttgtttccttcatttgataaattgggtgtcagcaattcagcctatgcttatttctctcccttttcattgaatttttctatcacatggaaaataatgtaatgatcaagttccaaactttttggttccggttcagcttgtatatgcttgatgaaaataactagaatgctattatgttagttggtataaatcttctgatttccacgccctgctttattttatgttctttactttctgctgtatggtatttgaggtctgctatataattttggtggcatcccaggtttattggcacttatggcacccacattgttgttggtgtgaagatgggagggaaggatgttatttacataaaacagcagcattcctcaactcttcaacctgctgatatccagaaaaggctgaaggatatggctgataagaggtttttagatgccaatgaacattatggaactgtgtctgagcaagttttccagagcgacaaggtttgcaatagaactatcaataatacacttcaaatctgtagttgtatatcttgatgaatcatgtctactgttttgatggaatgaactcaatttatgggttccatgagataccttncaagca

SEQ ID NO: 3556 - DNA, 651 bp, Gossypium hirsutum
tttacacaaaataggtatattgctatacatgccatacttaaatttacaagccatttaccaaaagtcttccggatagtgtgactgagcctctacctttttcttttctttaagtagttcttcagccttgcaagctcaatcaaccagtactaccatttcttttagttcaaggatcccgacaaatactttaatgtcttcgttaagcccgccttcaaatcgtcggcacatcttggcttctgtaggaacatattccctggcatacttacttaatcaaacaaactctctttcatattctgagactgtcatataccttgcttcagctcaagaaactctttacatttctgataaataaacctttcactaatatatttcttccgaaactcttcttgaaagaattcccaggttaccctctctttcggtaccaccgaaatcaaagtcttccaccaattataggctgaatctctcaacaaagatgtagcacatttcaaacattcttcaggtgtacaagataattcatcaaatacccggatagaattttcaagccagaactctgctttctctgcatcatcatcaatatttgctctaaattcttcagccccttgtttacgaattctgtcaacaggggttctgtgaaattttatcatatccatacct

SEQ ID NO: 3557 - DNA, 622 bp, Gossypium hirsutum
tctcaagtgcgcagtaatcgcataccatctgaattggccaaaatcttaattccgttatcattggctgaaacagccaggagagagccatctttattaaagcggatccgtgggcttgcctaggaattaggcaacaacagaagtaagtagctgatatcttcaaaaatgatatagaatttaattgaatacaatgaacttacaggaaggcctccttcggcatcataactggtcaaaggttgaacattgtccatatcccagaattttattgagaaatcgtcaccagcagccaaataccggttcttagttgtatcaaattgcacaacacctaaagaacgtttgcggaatccttgataggtcctcttcacagccccttcactttcattccattctacgataaatgactccccttctttactggttccacatgaaaaaagcctacaatatccagccaccaaactaactttaatcacaataattcttgacaatcggcttaagataaatatacgagtaatggtgcaagaaaactaaccttgtaccatcagcactgtaggccatggttgtgcaccaccgaccaggagcttcatagtcaacccgcgatcccatattatcatacaaccatgccttt

SEQ ID NO: 3558 - DNA, 623 bp, Gossypium hirsutum
tctgatatctactcgcattggatccatcagtaggcactccatttgctgctactaaaccatgttttgttacatcaccaccctaaagtaccaaacaagtttgtgtaagcatattacaacaagagatcaaagagagaagctccttgcttttccacgtcaaagttcatttttattaaagtatccatgtctgacacatattcagacatgggtgaggggatatgacctttcaaggaccctccaaatacgtgaaaaaaattggtaaaattgagtatacctgtggtaagacacacacacatccgacactcacatccaagtgacataggaatacagtagccaatatgcataaattcgtacctctaatgaatgtgctagatcagcattagcttcaggttcatgatcctcactggcagaaatgctaggtctagatgctgttgcaccacacccttgaaattcaaactaatctcagtatcgcagcatgattttggaaaggaaggaataattagaaaaaaaagtaataacataactaggttagcaaagaagaaaatcatggaaatgatttccgtgttaaatttttctgtcatacacacctgatgccccttcacactgtttccaatgtgataaaaaaa

SEQ ID NO: 3559 - DNA, 604 bp, Gossypium hirsutum
catcaagtctcatttaacttgcctaatcagcacaatctgagttatgaccttggtttgtgttatgaatggaaagaatcaatagaatcaaggcaagaatcaaggatgcaatcaagatctcacaatttaaggcaacaacataaaataataaagggattagaatccctattatatgtattacctaaattagtaagcctagctttgttatttgaacagcaaaatgaaatgaaagagtaagaagaaaattattaaagtttgagataggcagctctctctcttttagctccagcctccaaggttggtagcccactttgaatagcagtctctctttacaattctctcaccataggttctcatagaaaatccaatccaaatcatcctgtgactagatccctatctaaggcttattacaatttggcctcagagccaggttccagggaagatccaagcaaccaaaagaatcaaattatgaagatgataaagctcatgttgggaagcgctgccttgactgataacaggctgcacttgctttgttgatcgttcaaattgatagtctatcccaaagtcaggaagcgctgtcaagccaaaggcttgaacaagaaacagt

SEQ ID NO: 3560 - DNA, 657 bp, Gossypium hirsutum
ctggtgttttctattgggaaaatgtagaaaggcaaagttcatcctagatattttattgatggctgagctaccccgaaagggtgcaagtttccctttcccttaatccaccaccttgatgactgagctttaccaactcagttggcaggcacattctatttcaattatgattgcattttaaggtcgtgaaacaactgtcgtaaacctctctgcccttcatagtttttttattttttttgtttgcaccccctcccctgggaaattaaatttgtaagatgccccctatacatggattcaggtgcagaatgtgaatcttctatggcgatggcagttctgacttgacaatgaagaaagtgaatagcagagacaatggatgattgctgggttatatgaacatcaagttaaaacaacccaatccatatattgaccaaaacgtgaagtataagaggaattgaggaagttattggtctggaaagatacagagaggatgaagaagaaaaaaatgcaaaacaagaacgtgaaattgttttagagataagaaggaagatagagggttgaaacttcaaaccagctttagtatgaaccaattttttcttacagagcagcctgcttttgccttctcccattcattaagaatgagatcatgggtcctctttgatg

SEQ ID NO: 3561 - DNA, 613 bp, Gossypium hirsutum
  misc_feature (550)..(550): n is a, c, g, or t
ttgcctcattttgagttacttttcattgattgtatatatatcttccagattgttgtgatgggagtgatgagtatgatggaagagtgaagtgtcccaatgcatgttgggaggctggtaaagtggctagagataggctggtgaaaaaaatcaatacttataaggagggggttacattgagaactaaggaaatcgaacaggctaagatagcaatagctaaagatgaagctgacctaacaaagcttcaaaacgaggagaaattgctgaagggcattgttgaagagcttaaaggtaacacttacttctgaagattccttcatactcgttgtgttatcattgtggatgtgatgcgacaatattatacttagtctgatttgggttgcatttgtttgttgaagtgttgtgtttatttttctcttgaggttgtctataatgtgagtatggtcatgaccagtgacggtaaaatgttatatgaagaaggtaagtagtttcacgtgtggtatgacatgtgcttacccgaaacgagattttgttcccgaaaactcattggctntttcattgtatttctcatctatccgttaagcaaaagatatcaaggatgtgtgtatagcaaatg

SEQ ID NO: 3562 - DNA, 639 bp, Gossypium hirsutum
ataagggcgagtatggaatgatgtcctgagaaaagattatggaatgattagcgtgtgagatatgatctttcaaatataaaaataaataaataaataaatgttgaattatacctatatcttgggtatatacccgtatttgagaccgctcctgagtttggattcatagttgcaggatcctccaagtaaattgtgtacacttgaatcaaagaccagaaatttcagctgaaccattagattgagtgcacaaccttctacaggactgcatattttaatggaaaagatcgtttaaatgtttacagctgcatccatgctcgtgtggctacaaatattaagaatgcaaagagaaacagttgaaaagacaagaaatattaagaaagcaagaaataaggttttacgtttgtttggtagctcttaagaatatacaatacggacaaaatctcaagttcgtgccaagtattggacatagattaaggccaaaaaatgatttgtctttactctaccctattagccgaaaacaatgcccttgacccttgacagaaacgagaagttgctggatctaatccaaactcctcactggagaaatatactcagagtgcattttgtgaagaggaaataaccatctgattggataatggacag

SEQ ID NO: 3563 - DNA, 635 bp, Gossypium hirsutum
gatgcaagtcatacaagtcttttcacttaatttctctagaggttccaacgataagtttctcaacttaaaactcattccaaaatttaaatagaatcaaagcaattaaagttttcaattgctggcatttataagaaattttggaagaaaaagatgcattttacctgaatcagaaaagcggagccttttgtttcctctgcaccaagttgttcagcacttccacaaacatagttctttttatgattgagaaacttggcatccacctctgcacctccatcatccttatgcagtaaatgaatattagcattcaacatatttgtagtatcagaaagattgttgtgcttcactgaacttactgtgaaaggaaggtctcttggcactgatctttggggatctgatgcattaacgttggaacttttatcatgctctataagtagtgctttgcgtttcttcatagaacatagttgttgctctttactttgttgtttatctgatggaagatgaccagtcaaaccaataacatcatgattttgatattgcatttttcccctcccagtaattaacaactttttctctttgctcattggaccatttgatcgcttcaattttttcaaatccatacacggagtgaaacatga

SEQ ID NO: 3564 - DNA, 612 bp, Gossypium hirsutum
ttccgagcgacaagcactagaatcgggtacagcaaggtcgagacccgaaattcaatgccgaatgtttagtatcgatgtttaatctccattgcccggcctctttaaacttttctgtttttggtagattgagttttgtcacaataggtttcagcaaaattgtggatgaacaatttcaattaatggatggatttgttggggtgttaagagttaaacagccctttcattgtttcatttaatacttttttgtattttatttaatattctttttaaaattttaggtgatgcatgatgtaattttatattgttctgtcatcacacattaacgaaatctaatatcttagtataagaacaaaatctaattttaacacctaagctgatgtgatagttaaaaattaatttgaaatttagatatgatttgaaaaattatgcgtaattattctgaacaatttttttaccaagaggtactcattaaaataaaaatacgtcgaatgagtctataactaaattgataccattaatgcaacaagtcaaaaacgatatattcactagtatggtattgacttaatttttattgcaacactcttaagctagtattatattcggatttaaggg

SEQ ID NO: 3565 - DNA, 644 bp, Gossypium hirsutum
ttcagcggtttcccatcttcaggtgcacctagcggtggagttgcaccaccaatgccaggtgctcgcccgaatgtttttatgtcatctccacctttgactggtccaactggtccagctgcgcccctctctagtgcacctgctggtcctttgagtaatgggcctccagcaattgtttcgggagctttgcctggtgcacccctgtttcctcttgctccaagtgcttcacaacctcctgttggacctccaccaactatgatgtcagctagggctcctgctcaggctccaaccatgcgttctgttttgggaagtccggctgttacttccccaccagttcagccaatgccttcagcatcaccattttcagctgtgcctcaagctagaccaccacctccaggttctccttatggatcacagacttggccgatgcagcctcagcaggttagcactacaatctttacagtttatgctttcagaattcttcccataaagaaatgtaaacaactagagcatatcattgattttattgttgttgagttggtcttttagcaatctatataaggtgtacaaggtctttgatttcctttcttttcataatgcatttagtaactaaaattttatgtgcacctttgatgtttgggattgtt

SEQ ID NO: 3566 - DNA, 540 bp, Gossypium hirsutum
  misc_feature (495)..(496): n is a, c, g, or t
  misc_feature (526)..(529): n is a, c, g, or t
aagatcgagggctgaccattgtaaacatggagctggctaacctgttgtaaccacgactcatcatcatcctcaagacttgaagatcaataaaacaaggtatcttttcttggtactacgaaagcttttttgtttcaactaattattagtatcactttgtagggtttaagtgaggtttatatttgatattttggtattttatatggggagggagcatataaattaggcaaagatgtatgcgtacagctgtactttgaagacggacgtctaaaggtatctttgaagtggatggtgatgcactggaactattaattttttattaacaaaaccgattcttcctcaaataaacatatgcgtttcttggggaccaagtccatttgcgtgggcatcaagcgttagatatttccaattttcgagtaatttgtatatatttaataattgaaaaactacatagttacatcaatttttaaaagtatgcaaatagtacttttatctttnnattttaatttcagtaaatatctcgctatannnnataattagttt

SEQ ID NO: 3567 - DNA, 488 bp, Gossypium hirsutum
atacgtataattactatgtgggtttctgtacagttcttttcacttgcctgattaaccataactaggcagtgtgctcaattgataacctactggaattttaatatgtgcattgccatatttaaacaatgcaggaagatgttactacgcaacgagttgttgagatagttgagatgttaagaaaaggagagaagccaccggtaagcaactagatcagaaaattgcttggttttcctcacagtactttgggatgtttccagtttatcctttttttttgtttgcataatgatgctcatgccactaatgtttgttctaatctgacttctatacatcaggttggcacccaaaatcctaaacgtatcatgagtggacctgaaggaggaaataccactttgctaagtgatccaaaacctcccccttgccgagatcttgatgccctgctaaagtatggagttttcatgttcctgttgaatttttttaagctcaagcag

SEQ ID NO: 3568 - DNA, 645 bp, Gossypium hirsutum
aaagaaaatgcagcaacaattacttccaacaagtcaacagagcatgatctttaatttgaaatgaaaaagggaataaggaaaaatgtatatgctatgccaagatagttgacttacagcaaataaggtaagaatatatgctccagctgtaactcccatgcacattacagcaccaagcctgtggttaaaagttaaaaacataaataaataaataaaaaggaaagagttaaaagataaacaatatcagcttgcttgcctttattattttccatataaataaataaatatatatatgtatatatattaaagaagatgacagcttaagaaattatataagggtggcaggtgcctcaagatgcatcattttcagacaactactgcacaccaattaccagccatcattacaacataatatgcgtcatagaatgcctagagcataagagaatacagtaaagtaaatttctaataagctgacacttggaaagaaaaagcaaataaagtaactatgaaattatatttttacccgaaaaagttgagaacctcaacaatctgatctgccaagtcatcgacggaaggactaaagtcatcagagacaatcgaggcagctcccaactgcaatatttcttgaaggaagttccggataagaag

SEQ ID NO: 3569 - DNA, 616 bp, Gossypium hirsutum
  misc_feature (583)..(583): n is a, c, g, or t
  misc_feature (601)..(601): n is a, c, g, or t
tatttctctcttcttagatctttctttcacccatagggttaggaacagaaatgaagtctagaaaatagaaaattcataaaaacattcaagaaaagaatcacgtgcacaataaatactgaaatactaataaaaaatatgattggtccaaaatctgaacgacaagacatgtccccagttgttgcagttccaaacgaaaaatccactcgtttcattggcctgttggacttagcttcgtctccaagtattttgaccatccagaaaatcaacaatctagttcaaatcatcaacgccagcccaaacccagttcagaaacaaaattatcttccctaacagtggaccccatttgcttcgtcccgaccagttaaccaaccacacagattttttttttttaatccttcaaacaaaacccagacgaagtaattccctggaaacaacccaaactttggtcggcacttcttttctttctgattttttttttaatttctttttcttttggcagcgatgccataacaaatgggttataaaacttccacgtacaaatcaccaacaattaacttgaccctggccgttgaacctccagttncactcaccgccttcaaanattttttttcctttg

SEQ ID NO: 3570 - DNA, 620 bp, Gossypium hirsutum
attattaaaatgattttagttcctgggaacaataagcaccagtggtctagtggtagaatagtaccctgccacggtacagacccgggttcgattcccggctggtgcatttgttaattcaattttacgatatttcgacaatgaagttgtggttttgttgataaaacatagtttttcggaacaactagcaccagtggtctagtggtagaatagtaccctgccacggtacagacccgggttcgattcccggctggtgcatttgttaattcagttttacgacgttttgtcaatgaagttgtgcttttgctgacaaaacattgacaactatcaccattacaatataagagcaagatggtgggaactgaactctcttacagtttctgacatggattttgttttatcaaatgctggctcttgttttcctgatcagaatctgtagattttgtaccatactgcattttcgctagtatttatctttatcctccttcacctttgggttttcacgttattgagtttgacattagtgtcgatattgggccgggttaggttggatttaagtaaaaatttaggtcagtttgctagattcggtctaaaaaatcggcttcaaaatttcctcaagtctg

SEQ ID NO: 3571 - DNA, 599 bp, Gossypium hirsutum
cgccatttgaggagtgcaatggaaatactgcacaatttaaagatcagcagaatgatatgaagtttgttcattggactgactattctttgcaaagtttgggtgatttcctttccaaaggtggctccatagtaaaccaaaggagtgattggcatctttggtcatctgataacaatattttagaagaagatcacttcttggaaaatagatttattgcttcaggaagaccaaactatcatgtgaacgacaataatataagttcaaagttaggtaatgaatccctcaagtttgagagttgtgtgaccaatgaaacagttaggagtgtttttccttttgatagtcatgaactttgcaatgacttgcagtttaggaaaaatatcagcaaaccttttatgcaaagttgctccttccaaagaaaccggccacttgacagggagttggttgaaagtgacgtaggagttgactcaccaattgatagccttaagacaaaaaggaagtgggtctgctcaaatgatggctttaatatgatggaagttgatttcagtgaccagacatttgatcacctttcaaagactgcatggcaggatggacccaagcttgta

SEQ ID NO: 3572 - DNA, 656 bp, Gossypium hirsutum
gcatgcagaggatgcttgtgagaaactctatatgtggtttttgctaaagagaagggaggtatgtttttccctccttaaaatgctaaatagcttcattgatctgtaggataagtggctactgcattagatatatatgttggtccattcggcaagctgctctagctatgaggctttctattcatgttcaaatttaacacactatgtttgctggttaccttatgccttttgactgtcttcttaagaaaaagatccttgtatttcgaagaaattttggaaacaagtagttattgatgtctaaaacatcctaaagactgttcattgtaatactttgtttcaatctcgtcgatgttttaaaaatttctaataggaggttgcttggtatagaattaaattatggaagttcagtatttgtttttaattttttttgggtcgtatgcatttttttactgatgctttcctttacccttttgattgttctccctcagattttgttgtctgatgctagagtgttgggattgggtccaagatttatgtctgtttacattcagaagctggctgtaagtgttccgtttcttaattttttaattgtcatactgttcatggttttggtgctaatgtttctgtggtttcagattgagcggcgaatatactatgat

SEQ ID NO: 3573 - DNA, 586 bp, Gossypium hirsutum
atacgatgatataaacaatatgaaatacatacactactgaaaagaagcatgcatgcaggggggcattaataggtcatttatgatgatttgaaagaccctgatgtgtatatatgtaccaaacttttttatttcctacaaaaaaaactagtcttcttctcttttgattttgataagatatgccgccatttttctttctctctcacctcagtgaggcctgtgttttatggctcaggtcatttttacacttgaatcgatgcctgaactctgtaactgtgtgattttgatagattgagttgcctttcgctattgtctgagagagagaggatctaggtttgaccaaagtactcatatgatttttgttgcctataatatttttttagatttgtagtttccatcataggactagttataataaaaaaaaattcatcgcattttcattgaccgtcaattctaaggaagcatcaagaacacagagtgtttaaatttaagcaaaatattgacccatatattacatgatattgacaatcgttgctttgctttttgcatgcaaatctgggatggtggatgttcggctctcatttcatgt

SEQ ID NO: 3574 - DNA, 647 bp, Gossypium hirsutum
gacttctctgaggatggcagcgaaaggggtaataaaagaagtagttgactgggatcgctcacgatctttcttctatagaagattgcgccggagaattgctgagagttctctggtcaaaattgtaaaagatgctgctggtgatcaactgtcgcataaatctgcaatggacttgatcaagaaatggtttttggattccagtgttgcaaagggaagagaagatgcttgggttaatgatgaagctttcttttcatggaaggatgatctgggaaattatagtgagaagctacaagaactgcgggtccaaaaggtattacttcagcttacgaatattggcaattcatcttcagatatacaagctctacctcaaggccttgctgcccttctaagcaaggtaaaccatccaactatcttttcttacttttacagcattcttgtttatgtctctcagaacctattgataaatgtgttaatctaatgcagatggagccatcaagcagaaaacaaatggttgatgaacttcgtaaggtgctcggttgattaaattacctataagatcctgggttttctcattcttctgctacttgcattaatattttggtaacttgctgccacacctggcgtggatcttctgtaacaattcaaaaaaa

SEQ ID NO: 3575 - DNA, 600 bp, Gossypium hirsutum
agatatcatagatttatcatgatcaactgttgataattacatcttagtcacttttattagactttgtcaacaataaattctagttgatcgtgatgacaatgtagagatctcaaaagacatcaaatttatgcattattaattcatagaattatttatgaattggtttgaatcgaattgaatagtgaaaaaaaatcaaaatttaaaaacttgtttaattatttaaattatattttgaatatttacaatcctttcatattcatatttttgtttttataattaaacaacacgaatggaccaagttttaaacaaaatccctaccaagtaaaagaaaaaaaaaactgcacctattttaaacattactgttttgtttaagaaaacaaagtatcttcaatctgggtcactacttcatataataacttctgttttatgtggtatttttggcaatttttttttgggggtgggggaagttgattgtatgtacgtttgaatgaaaagattaaaacatagttttaactctttttcacatgattaaagctttaaatcccattttacggtttagactattttatttatataattatacattaatgcatgtaataa

SEQ ID NO: 3576 - DNA, 498 bp, Gossypium hirsutum
  misc_feature (443)..(443): n is a, c, g, or t
  misc_feature (449)..(449): n is a, c, g, or t
  misc_feature (453)..(453): n is a, c, g, or t
  misc_feature (455)..(455): n is a, c, g, or t
gtgtgacgagacctcggtgcttgagattccaatattcattaaagaattgagggatggaaattccaaggaaaagtgatagccctgtgataatgaggtttctcatacaattcatgtttgtgaattggagaaatgataatccaactgaagctgcaaccaagcaggaaattgtgatttaaagttataaataccatgaaaacaatagtataggaacttggataatcctactaatataaaacataaatacatacatacctacaagaccaaagaatacacagtatagtgccgcaaagattgggaaaggtatggatgcaaacacagctccaaattttcctgtaaaaatttctggtcaaattaccttaagggggaaaaacatggccagaatttgaaaatccaaaatggcacccccaataataacttttctttccctaacaaaaaataaattnactttngttntncaccccttcaaatttggaaatacctaaaaaggaaaaaaataac

SEQ ID NO: 3577 - DNA, 650 bp, Gossypium hirsutum
acaggatggtattgtaggtaatgagcattctgctgcctctgatggacagattgttaaatatcagcctttgacaaatgatgctaaagcaatgctcaggcagatcgtaaaaggggatacttctaccaggcttgactccattaacaactatcatgataatttcctggttggtgatggtttgtcatcatctactggattggatggtgggaaatcttcaagccatgcatcaggagtgactcttcaagaggtcccaccaacttcagggatctctgtggatcgcccctcaagtgccatatctgagattcaatcttccccatgtactacatcttctgaaaagattacaacaacacaatctaccaattcgagtgcactggttggaggagaaaaggtcccatccatttccattcctcaaacaaatacaattatgcctgaactttctcaaataccagaaatggtcccagaaagcgatgttgatatccccaccgaagactgcatggagtctgaaactgggaatgggggatttattgatcccatttgtttggttcccttagaacttgatgacattgctcctgatcccgacatagatgccttactggatagttctagtttctgggatgaccttattgtgcaaggtccagtgccagaggatattg

SEQ ID NO: 3578 - DNA, 626 bp, Gossypium hirsutum
  misc_feature (565)..(565): n is a, c, g, or t
tgtacgcccccctcagtgacctgttacaaattttcaaaatgtgatcacataaaaaaccaactatggtagctttaatggtttttctttttaactttgttaactataaacattttgcaccaataatctctgagatgctacctccttttcacagctcccttcttgtcaacactgaaaaagctgagttgtctgagtttttcttctctttttttcctctttaaattttgctttgtcgggtactaagaatgatttagagctattattatcactaattcttattcatgccccagtatttcttcataaccatctcgccattgttaccaacaaaaaagctaagagaaagaattagttgcagaaaccacaagtgtagcttcttgtttcccgcggcagcgccgctttgttcttgttcctcgtgcgtgtccaacccatatctcgataagccatttggttttcgttcctggattatatttgattcgatgttctttttgtttcaccttttcttcaaccgccagtttctctctttatgtttacacttgatagttgataccctctttttattaccgtaaantaagagttgcaggggttaaattttaaactcgtcaaaattgactactaaagggttgagcaac

SEQ ID NO: 3579 - DNA, 649 bp, Gossypium hirsutum
tatgactctgagctcaaaaccattgctgccagatttcttcgtggattttcctctgaacaaatcgatattcacaaacaacagcaacaagcacttacagctgagcctgcacccaaaagatctgttgatacttttggccaacgtacctcgatctaccggggtgtcaccaggtaaataaatgaccaggattagttctaacaagaacataccactttatttcctcaaaaaaaagaacattccactttaaaactagtagtatgaaattagcgctcaacagtttgttcttttggttttttatttaggcatagatggactggaaggtatgaagctcacttgtgggacaatagttgcagaagagaaggccaaagtaggaaaggaaggcaaggtaatactagtattctttccccaattatttatcttaaaacatttcgattgttttcttaatgttttaaacgggtctattgagatctaggtatctcaactgttgacgcaaatctttaaaagagcccatttctagggctgagatcttgtgatgaagtttgtaatttgaacggcagagcggcattgaatttttcctacttattaattgtgcatgcatcattattaatattagcgcgcattaatattgcgaatggttgaggattctcatatg

SEQ ID NO: 3580 - DNA, 616 bp, Gossypium hirsutum
tgctctttgctaataattatacaaccatacactctgcaaataatttttttaactcacatatatgaaaaaagaaaaggaaaaaaagaagaagcctacactatgattacaatgcatcagatgatatttcttttggatttggaatataaattcagttttttttttaaaaacttatttagttcacagttttgctaacccaaaacacatatagtaaaaccactataaaataatattcttttaagacctgaaaaaaatattattttatcaaggttatttgtttatcgataaatgaatattttattaatttatcgataaattaacatttattattttagagaatatttcatactttatgcatgagttttctttctttttaaaatcaaaattcaatatgcatttaggtgcaatgaatcaaagttaattggttcatgtaacaaaaaaaaagaaaaaaaagagttaattaattggttcatgtaaccaaaaagaaaaagagttaatggtttcaaaatccaatacgtatatattcattcgataggtaacaaattttattataaataaacacatgtacatattaaaatattgtaattcatataacctttttttccatggcttcccattt

SEQ ID NO: 3581 - DNA, 596 bp, Gossypium hirsutum
gctatataaaaaaaaaaatcttgaaaattattttttcaatttcagtttaattccaaacaaaagattttatttatagaattataaaaactttaaaaatattaactttgttaaacaataaatgatattttttaaatagaaaacattaacttcattttgatttgactttatttgattcttttaaataatataaggactaaattaatttatttaatagtaagaagactaatttaattagtttcctataatacaaggatctttcacatacattcaccttattattagttacaagaattatttttaaataatatatctccctggaaaacaaccatgaatgtttatgtgaggttaatctatcttttatgtatatagcttatttatattagaaattccatcacacatgtatttgtgtggaaatcatagatttagagtatagatatatgtttaaaaataacatacaataaacaatgaaatatatggtttgaaatatgtaaggtattaaaataaaaaattagattaaactgtgagtaaaacgaaatttaaacacataaatacatcagctaaaaaatattaaatgcagtacaattatttatcattgt

SEQ ID NO: 3582 - DNA, 616 bp, Gossypium hirsutum
  misc_feature (606)..(610): n is a, c, g, or t
agggttttagcattaaggtcttgaattctttcttcaagaacagattctgcatccatattttacaacaatcaaggaatcgaggttaagatcagtgtttgtttggaaactctaagtaaggtatatatttatcagtaaagaaataaaaaagaaattttacccaaacgagagatcttgagcttggcgtcgcgcaattcaaggatcaagagattgtggttgttactttgttcatcttgagatgcgagtgacaagaagaagaagaagaagacgaagaagaaaaaactgaaaatggagggaaggagaatcatattaaccgccattactgcctcttctaaacaaccctttttatttttatttttatcttttctccctttttcttctcggaagaagtaaacagaaatagtggcgggtaatcgaagcttgtagaatccaggagaaaattgttatttcatgaagtatgaacaaccaaacaaaaatcagttgaataaagttatttctatttacgaaaaagacaagatatatctttttggtaaaggaaaagagaagatattattataattcgtccaaaatcaaaattgtttgaaatgggcaaaaaagtttgcaatatgnnnnncgtctg

SEQ ID NO: 3583 - DNA, 637 bp, Gossypium hirsutum
ctttatgcccctgggttgttagatataaccaaaatatataaatcaattaacaagacttttcaatattaagaaaaaaatgagaatttgtttttatgtaagacttttcaatatttttttacttttacaaagtctaaaattcaaatttagacttatgcgaattttcaaagaaaaaacaattatatagatcaagtaaattaatttataatttaatgaggaaatcaaattaattttctcaagaaaagataatataaaacaaataaaattgggattaaaaaggattaatttcactaaatgtcctcaaactatcacttaaattttaaactggttcatacatttcaaaatattttaattggattcactaagtatcaatctgatctttccttcgacctagtcgtcaaatttgattttaatgccagtttaaatccgacatgaagcatttttaaaactcatctattaaagtaaacaaacaattgtgacatgaacagattaaaaagtaaatagtatcactaaattttagaaggatatattcttttaacacattatatccaaacatttcttgctaaagtgcttacaatttcatcaatgtgtttttaatatgttttaaaccaaaatcgagttaacatttaacgctcgaact

SEQ ID NO: 3584 - DNA, 643 bp, Gossypium hirsutum
tctttcatcgttagttttacttagtttgggagtcaaaattgttccatctcatgcattcatagaatttttctgtcttttgcgtttctttggggtatacaactgtttttccttttgctgttcttttttttataaatgtatttttggttagcactgcttagagaaaagtgatactattataatcacaatttgggcatatgacattaaacacagtttactgaggcaacttatttctgtgttgccttattattataatattattattattggttttaatgaaattgaggctataatgcatgtagaagataaaatacaccctgaaggtggtgctcccgttaatggagaaaaatgaagtggccaaatttcaactctctctctctctctgtcccaaatttttttttttcatttgatttcatctgatctttaggccactaatttcccctttgaatttaagcctttttgcattgaaagcaatattgaaaacctttttctttttaaattgttttttatttcaagcatgaggatctaaagccactatactcaataaaattgatgtttggtaccacggatataaaaaaggaaattttcttttttagagccactattctccactgcttattaatgatacacagggggaaatgaaatt

SEQ ID NO: 3585 - DNA, 616 bp, Gossypium hirsutum
ggttgatttcagttactgaaatttatctttaattttttcttatgattgaagaagtttgatgattattttaggttataatttacagtatggaatgttgaaaaaatgtgaacaaaggcagccatgggaccctgttttgagtttttgtactgtctttagactcttagattagttggaagggtggaggaaggaaaaaaagtttgaatctaatggttgagctatacaaaatagctcgcataccaaacagagtcctagtaaatagccactttatttaaaatttgcttcttattttcttgagattatgtttgaacagtgtttggttccgtggagcatccgttgtcaagtttgtctgttgagggtgcagtgagggccgatggagaaagttttgaaggaactgtctggaaacaagagtattctgtttctaacgactcaagcatagctcctgggggtggctctggtggaactgtacttctgtttctgcacactttgactcttggcgaatctgctattctttcaagtgttggaggatatggtagttccaaagggggtggcggtggaggtggtggaaggattcattttcattggtcatacattccctctggtgatgtctaccagccaa

SEQ ID NO: 3586 - DNA, 615 bp, Gossypium hirsutum
atgcatataaactaaagtcaagtcaatcgttcagatccattgatataacttggagaagaaaatatacaaaatatgtggtcaataatttgattatttcaaacagggcaaaaggtgttttgggggggggggagcttagtccctgaattgtttagggagaacaaaagtgttcttaaaaaccagcaagaaatccatgatcctcttttcttttccccaaaaaaattacatataactaagagatcccattttgcaatttataccaaaatgttcttgtcaacaatttctggaacgcactactgaactacgcatgggaagaatatcaggatataaatcatttgatgaataaagacaaggaggttgagatctttatatccataaaatatggatgaaattcagtaaactaatgcaaagaaccgacttagaattccctaacagggaacggaggttatcatttgcaaatttgtttaatcatactaaatttatatagagaaagatacaactattcagttacattgcaacagatacaatcacctagcagcctacacaaggaaaagtaaaaagagaattcaactttgcgatagtttcctaaaagtgtgataagtgctaccaatcagttgg

SEQ ID NO: 3587 - DNA, 648 bp, Gossypium hirsutum
tttgattcgatctttatgaaataaatattgagatgtaaatagaagcttacttaaaattctttggtactttaacttaatctaatccagacaaacaaaaacaggattcactgtactatatcatattatattatatatgaatctcacacgtgagagcaaattcctgttgggacatgaaatgaaacaatgatatgagcataattttccacaagcaaattaacagctagcagcattataaatgtatagcagtaggacccctagaaaaaggaatttatatgttcgtacattattgcaccacgtacagcgatagaagaagaatcatggtatctttcatgtaatgccagaaaagcagttggcttttgattacaaaaatacattacacacatgctcttgctttgaataaatttgtatatttgatgcatgtaagtggcaatattggcaacatatagacctgcaaatttgtggaactttgggccatggccatccacgagaaagcaggactgatcacatcaagagccaaagggatgttattcctgtatatgatatgaggtagtggggtataaaacattgaaaataaaagcctctttatgcaaaaagaaaaaaaaagaacaggggaacctgctttcttttccatcgtcgaggggttattac

SEQ ID NO: 3588 - DNA, 616 bp, Gossypium hirsutum
cttctcacaaactgatgcgaagaaaattatcaatatcattatggaattggcgtagcacacggtttgaaacattaatctcaggaccacaaaagtagaccctagaaggcgttatctgaacccttcttacatataccaaaccttcatctaaggatatagtaggtgaaccttgatatttcctcgatcttgagaaatttttgtactcctcaaagagccacctcgaaggttcatagcagcattctcttagataataaagtttctccagcgcatggtctatgtagactttgtgcattctacaaggatcaaccaatcgataaaaagtatcatcaagtgctggtcctgggatgcacccattttgcaccaacagattaaccttgaacaagatttcaaatggcaagtcaattacccgcgaagggcatacaattgggactagactaagattgcaggagtaagaagaaccactttccaaaaccaatctgccttcattttctttgtaataagcaaagttctcccgaaaatttggaagttggaggttgtgaggaagctccaaacataatacagaagactgtccaatacaattagaacgagtgaaatccgttgtccttacccattgatcatc

SEQ ID NO: 3589 - DNA, 600 bp, Gossypium hirsutum
ttcttctatctgaacttttcttgttctgctgtttgctaatttgctggcttattctgtgaaaggtgtcaatacagctttaccaaagtttctatttgtttgactattattaatcaatttttatagtgtaacgctaaacaacatcatacaaagaatcttccctcaagaatatgctgaaaggaggtcagagcaggacaatctgataaattttggtaatgatctgattcctctttttgtcatggatgttgtcatcccttgtcagaagtttccgctccacatatttgaaccacgctacagacttatggtgagtttcatagactttctaatcttaactgtttattataatttcaagaaaaatgggcatgttaccatgttggtagtgcaaaatgtctttgatgcatatgagccatttggcagagttacctttgttctaaatttaagttgtgttgtgtttgctagcaagttctgtctgtctcacaaccattgcctttttccttttaacatattttggcaattttaaagatatgagaaaaactctggatgtaaccatttggaagaaaaaaatttgtcaaaaattatataatcttaaatatggcaaggcta

SEQ ID NO: 3590 - DNA, 631 bp, Gossypium hirsutum
agaacgaggagtggcccatacatgagccccaacaaaattgggtaggtttgggtttgagcgtgaattaaaaaaaaagaaaaaaacctttttggtaaatatttttatttttattgttgttactattataactttaattcaattttttttttaaaaataaaaggaagatcttttacatgagtaatttctttaactttttttcctttcatactagtaatttcttcaattaatgtttaagaaaggtaacttaattttataatcaaatctgttgattgttgaagtcaataaagacttctataataaaattgaaaggaaagagaaaagaacacgagataaaaatccatccaattagataataccaagaatccacaattaaataaggacgaatatttattatatttccagaaatgatcttaaaaaaattaacatgcatctcttttttaaaatatttattcttttagtatttcattatacttgttaacccctaaatataattacaaaacaaaatggctaacaattaaagtttcggatcatttatgaagttcaaaaattgcatcaaccagtaattttgtcaattagcagttttcaaattccctaaaaaaaaatttcaaagcttgtcagctgggtactctgt

SEQ ID NO: 3591 - DNA, 617 bp, Gossypium hirsutum
  misc_feature (479)..(480): n is a, c, g, or t
  misc_feature (567)..(569): n is a, c, g, or t
  misc_feature (576)..(578): n is a, c, g, or t
  misc_feature (582)..(584): n is a, c, g, or t
  misc_feature (588)..(588): n is a, c, g, or t
  misc_feature (591)..(592): n is a, c, g, or t
  misc_feature (600)..(613): n is a, c, g, or t
gagcaaaagaaaagcaacaagaattgaatcctaacagttaaacaagtggacaccttattaaacagccagatttcaccatttgcagttggctttggaacaccatgtccattgtaatgaaataaaactctctctgacttggcatatctgcgacatgtattacaaagtttcttcacttcatccactgtaggatcaagttcaaccttactgcgagcctggccatgtttaatagaaagaattagattctaaacttgatggaatagcctgtaatgaaacatggtataagatggtgttcaaaccttgggctgccacctctcatattgatctctcaagtttttcccaatagtttccactgctttttgtggtgccatagaaaaagggtctgcaacaatggaagaaagaaaaagtggaacatactaatatcaatgaagaacattagattgaaaaaaaaaattatacattttaatcattttgtgaccaanngaatggatgttggatagaaaatatgattgaaaacttatttagtgcaagtgcagcactaggattccaactttttcttccttggcaacnnnataaagnnnaggnnnagtncanngggtgtannnnnnnnnnnnnnattt

SEQ ID NO: 3592 - DNA, 666 bp, Gossypium hirsutum
  misc_feature (656)..(661): n is a, c, g, or t
ctcgaagcaccgatcgtacggacaaccaacgcaccaccaccatcaccagccgcaattgaaaatgttggttccaccgccaccgcctcctccaccacagcactccgacaacgaccgtagctgcagcgaactcagagccttcgattgtaacctcaattccctttgcgaacatatccgaatggaaggtttcaacggcggttccttctccgacattgtcgttaacgccatgggatccacctaccacctccaccgcttaatcctctcccgtagctcttacttcaggtttaaaacgaatgacaaataataaaaataaaaacctaagttttaaatttttttaattataaactaattttaattttttttaaataattgaggaatatgcttaacgggccttggaaagaagctaattctccggttgtaacgctaaacgtcgacgacagcaacgttaacggcgaagcaattgcggtcgcgttggcttatttgtacggacaccatcccaagcttaatgataataatgcgtttcgcgttttagctgctgcttcatttcttgatcttcaggttcttttaaagttaaatggttttttaatcatttcagaggtaataaattaaaatttgtttattggtttatgattttgggaactcgaaactgcttgtaggannnnnnaaaaa

SEQ ID NO: 3593 - DNA, 940 bp, Gossypium hirsutum
  misc_feature (291)..(291): n is a, c, g, or t
  misc_feature (501)..(501): n is a, c, g, or t
  misc_feature (504)..(504): n is a, c, g, or t
tccactttccctttccctttccctttccctttcccttgtcactgactaattaataaactaaaaaaaatctttaaagtttgactaaaagaagaagaaaaaaaaaagaaagaaaaagaaaaagaaaacttctctcttcctcatgtccataaacggcgacctttcagatggaaccgcaattctcgaagcaccgatcgtacggacaaccaacgcaccaccaccatcaccagccgcaattgaaaatgttggttccaccgccaccgcctcctccaccacagcactccgacaaagacngtagctgcagcgaactcagagccttcgattgtaacctcaattccctttgcgaacatatccgaatggaaggtttcaacggcggttccttctccgacattgtcgttaacgccatgggatccacctaccacctccaccgcttaatcctctcccgtagctcttacttcaggtttaaaacgaatgacaaataataaaaataaaaacctaagtttnaantttttttaattataaactaattttaattttttttaaataattgaggaatatgcttaacgggccttggaaagaagctaattctccggttgtaacgctaaacgtcgacgacagcaacgttaacggcgaagcaattgcggtcgcgttggcttatttgtacggacaccatcccaagcttaatgataataatgcgtttcgcgttttagctgctgcttcatttcttgatcttcaggttcttttaaagttaaatggttttttaatcatttcagaggtaataaattaaaatttgtttattggtttatgattttgggaactcgaaactgcttgtaggatctatgtgctatatgtacggattttattatatctgagctctggacttcgaatttcttagcatatcaggtttgaactataatttaaacagtttcttttttattttttt

SEQ ID NO: 3594 - DNA, 652 bp, Gossypium hirsutum
aactaatacaagggtagaaatggtttaataacagcaatagtttcagtattcctcagggtaaaacttaacccctcaagctgatttatgtttccaggtcaagccatgaacaaaattcaataagatagaagaaatggacccccagacactgtagttcttccatggctagacttggcaagcataattgggtccaactcttagatctgttttgggaccttaagtaattagacagtgctcggtcactgagacattggaccctttgcaatcaatcctttgtctacagtagcaatggaaatcacatcaagatctcctggctcttgtctcaaatcaaggccagtaaaatgctcaaattctttgcagataacgctgtggtaaattagagttttgacccttttctctattgtcaattattacattcaatattacatcattagggagaaaagaatgcagaacttacagggacggtaatggcaggaagaccaagaagattaccggcaataatgaacctcatgagataagctgaaacagagtgaaccacatatcagaaaagatggcaaagtctagaataagcagagtacatgtatatgttacttctgtataatgaagatgacaaacctgtaacctgcatatctgtctctccatctttcaaagcact

SEQ ID NO: 3595 - DNA, 633 bp, Gossypium hirsutum
atgatgattcttgtgcatgcatatgcaaatgtcatcaatcgtatggccaatatcaacagaccattaaaccttcaagttctagacttgaagcacatctatggccatatacctttatgtaacaacttgaagttcagtaataaactcgaattactgaaaaattaaaaaatcaaggtttcaagcatcaacaaattaatgacctcccttccacttgtgttaaacttagctatcataaatgcaaaattacacaaaagggaaactaagtaagtcatgctaggcaatcacataaaaagaaaagcagtacctaatgctggtctccatggccatgagaatggtcatcatggccctcccaagggtgtcgccaaccctacaagtcgagaaacaaagtccactaaagaatgaaataaggttactgtgaataaggctgattatgaagacaactgagaggagaaacttcttaccaacactacgggaccatcctgcttagccctgaacaggagccaaaacctgaaacaccagagatattgagaaacatcagaaaatccaccagcattgcagtatcatctttttcaatgtttgccatgaatattcttattttcatggcttttggacccaccagagctgacaaagtttgat

SEQ ID NO: 3596 - DNA, 636 bp, Gossypium hirsutum
tcgtagttcctgccctctcgctaacagtcgctacgccactatccgtgaccacgatggtaactcaatttactcttcattctttattaattttatctgccacttctcttgcttagaaaaatagagaaaggagaaaagggtattactggattagacagtaattaatggtaatgttttttgccgtgttagtctcagttacatcggttaccatacaaatgtgttaaattcattaaaatatatctgttccattagttatgataatcaaaatttaagcatcttgttttttttgtaatttggctttatgatcggttgctagagaatgagagttatctgcctaactgggtagtctgattgctgtatatttatattcaagtgtttgttatgtgattaactttagtggatttgctgtcatgctcttttgcaggggtcttttacttatatatgaagactatagaaagagctcataaacccaatgatttatgggaaagagtaaaattgcccagaaattatgagaaagcacttgaacttattgacaagcatctggtattccatctcttctcatgttttacactttcactaatacctaattctttatttttaactttggctcatggctttctattgcttaacctgcaaaaa

SEQ ID NO: 3597 - DNA, 623 bp, Gossypium hirsutum
ttgctgaaggctggagattttgacacccttgaatctcatgaaagctctccgctttggcctttgagagggatagatctcgtagtagatcatgaagacggcattgtttaactctgtcgttgacactccatttggctacttgaaccatgtttctctcgattaactcattcaagtaatcctctgctacgtcctccatcctttccccttgctgcggaatcaaaccctctgcaatccacagcctatatagtttgtgggagggaatcaagcggtcctctgggaattggcctagatgtaggaagcaagatttgaggtaatatggcaaatcattataactcaacgctagtatggctgacactccatctgcttctcgtccgaagagtgagtgtatgttggaaagaacccttttccattcccccagattttttttcgttgaaagcaatcctcccaccacaatgatggcaagtggtaatccagcacattttgctacaatctctttccctctttcctccaactgcggtgaaccgtatgagtcgttgttatgaatgaaagctttcttgcagaacaacatccagccatcttcttcactaagaagatgcaaatgatagggaatactttgagcatctgct

SEQ ID NO: 3598 - DNA, 593 bp, Gossypium hirsutum
  misc_feature (590)..(590): n is a, c, g, or t
cttcctttgaaactaatgtccatacctttgcattgcagtttaaactttaaaccatttaagaggtttcattttctaaatcttacaccaaaatgagttcataaatgtaaaaccacttaacataggacagaacatgggagaatacataccaggaataagttctaccatgcaaatgctggaaggacgtatgttggatatgcatcatatttggccgcaagggcctttacagaggatatatctgcaacttgtccaaaactatccagtccaagttcagttgcatggatccctccagtggtaaatgctgactggattccagcggcatttgcacccttaatgtcatgatgaagagagtcacctacagcaatagaatcagaagcttccacaccaaccatggccatggctgattcatatattatctgaaaaggaaaaacaggtgtaaaaaaaatgacagttccatagggaaaaggttcattgaaatacaggatgaaagaaacagttatatgaggagaaatagtggcacaccatccattaacatttgaacataaagcactcatgttacatgcttaacgggttgccttctgatgctaaagtgnaaa

SEQ ID NO: 3599 - DNA, 795 bp, Gossypium hirsutum
  misc_feature (744)..(744): n is a, c, g, or t
  misc_feature (749)..(751): n is a, c, g, or t
  misc_feature (766)..(771): n is a, c, g, or t
  misc_feature (773)..(780): n is a, c, g, or t
catataatataggggtgttgcagaggagtgacaccaataggataagaggcactaacataactacgtgtgttgaatgcaagcctaattattgacgaaaatcaatctgatacgaagtgaaaaaaatcaagaaaaggaaagccatatttccatttaccatataaaaagatttttgacacaatttgaggaaccgcgtcgagtaatacattacatatctcattccagtaaactttgaaatggacccttggaaaggtaaatattcacttcaaatcttcaatgcatcaggtagatttaacaggaaatacctatctcatggacaacatttattacaaaacgaaaacttttaaaacatctattgaatatactaaatatatccaactccaaagcagaaggacctaaataagatggccttaacttatgcatacaactcaagaaagtcatttttcgtttttaacataccttaaacacatgtggtgcaccacgaatttggatgtggctggaagttctctgaccaggaaagaagtacattttaagtatagaacctttacctaaaacagaaccattgcgtgccttcacaatggcctccatgacagcatctccatgctgtgattcaagtgatgctctcaactcctcctgcattataaaaaaccaaaaattgttgcaaaagcatatttaaaagaaaaaaaatgaaaaaatgtaaaaatataacaatcttagaaacaatgtattcattaagcctttactatnatccnnnacccaaaaaaaaaannnnnnannnnnnnnaaaaccccccaggcc

SEQ ID NO: 3600 - DNA, 634 bp, Gossypium hirsutum
tcttattgttaggtagagtacttggctgatatattactagttagcttcaagtcagaaatataacagggtttgaaccatcaatagtagttgacctcaatgtcagcaaaaatattaatgtaaacaatatcttaggatggaagcaccatgaagcagattcaatcagagaataacatcctgaagatttatgatgacatcttcccatatcagctggacataataaattcacaaaagtaaaacaagaaaatgatgacaaataaccgtaccatttgccatttacttgagcatgaaccagagtgcacatatgcaacctgaatccagtaatatcaaccttcaattgttctgtactcttctcgccaggaataccattccaaccaagaggcacaatggaagtagccgtgcgaataacaggagactcaacaatatgcccaagctctacagcacctgcaactgacaacccaagccattgttgcagatgtgggaactgttgcacttgctccattccaaagaaagttgaagcactatcattcatgcacaagttataaattctgccaaaagaaagaaaggattatgatggatcacttaaataatttgctaaaaatctgtctaaggaggaagtatttaagtgccatgtccc

SEQ ID NO: 3601 - DNA, 653 bp, Gossypium hirsutum
  misc_feature (554)..(554): n is a, c, g, or t
  misc_feature (639)..(640): n is a, c, g, or t
atcttccctggctcatactgtcgaacatgaagaggtaagaagttgaattgatggcaaaactttttttggtttgcatattattagtttcaaattttcagcttttgtgaattgattatattgcctttcggtttgagcttataattcttgaatgttccgtgacctttttttatactattattagttcttagaggtcattaaattggagggaattgcacaatctcctgaagatgcactaatgccaagagatgttttcctcctgcaagtaagtgttcttatttttttttaattctgcttgccagcggcttcttgattgctgttactctacttttcctcgttatcgttgttattttaaagttttatcttgcgtgatttactttactgtggtattgttttatagctatgcagtggaatggatgaaaatgctgtgggcacctgtgccgagcttatatttgctccgatcgatgcttcttttgctgatgatgcacctcttttgccttctggttttcgtataattcctctcgattctgggaaggcttgcatcttttcctatgttnaagcgtggccttttcttagtgatgattgtatcttttgtgaagtgttttaataagcactggaaattgatgcaggaggcctctagtnnaggaagcctctag

SEQ ID NO: 3602 - DNA, 842 bp, Gossypium hirsutum
  misc_feature (639)..(658): n is a, c, g, or t
  misc_feature (669)..(679): n is a, c, g, or t
  misc_feature (681)..(688): n is a, c, g, or t
  misc_feature (690)..(696): n is a, c, g, or t
  misc_feature (699)..(699): n is a, c, g, or t
  misc_feature (707)..(707): n is a, c, g, or t
  misc_feature (709)..(709): n is a, c, g, or t
  misc_feature (718)..(724): n is a, c, g, or t
  misc_feature (726)..(730): n is a, c, g, or t
  misc_feature (735)..(737): n is a, c, g, or t
  misc_feature (742)..(748): n is a, c, g, or t
  misc_feature (750)..(757): n is a, c, g, or t
  misc_feature (765)..(765): n is a, c, g, or t
  misc_feature (767)..(767): n is a, c, g, or t
  misc_feature (769)..(769): n is a, c, g, or t
  misc_feature (771)..(772): n is a, c, g, or t
  misc_feature (790)..(791): n is a, c, g, or t
  misc_feature (793)..(793): n is a, c, g, or t
  misc_feature (795)..(795): n is a, c, g, or t
  misc_feature (799)..(802): n is a, c, g, or t
  misc_feature (805)..(814): n is a, c, g, or t
  misc_feature (818)..(818): n is a, c, g, or t
  misc_feature (821)..(826): n is a, c, g, or t
  misc_feature (830)..(830): n is a, c, g, or t
  misc_feature (834)..(835): n is a, c, g, or t
agggagacactttccgcattacacaatttatacacacacaaatgtttcaatgtttgtttaagccaaaaactgtaagatcaatggagattgaatacgaaagctcaaagtgagaaattcatatgtttctgcatttagagactactcgagctatgtgtaatgcagacaatatattaagactcgaatgacactagcaaggaaggctacaacgatgagaacatatgggaaattcataccctttcaagtagatattgatctgacacaggtaatctcctattcgtgttgcatctaccactcacaatctccaatagcaaaacaccaaaactgtaaatatcggcttttctcgttagctgacctcgtattgcatactcgggtgctagataacctctatataaaccacaaaaaagataaaatcaaattaataatgctgaatggaagtcctagattaaaggtacttatgcatctaatctatgttactctaactcaaatctaagcatgagagatagaatagacaagcatatacagcaatttaagaacatacgttgttccggcaacacgtgtactaatatgagtcaagttgtcagggaacagcttagccagaccaaaatccgaaattttgggcatgaggtttttatcaaggannnnnnnnnnnnnnnnnnnnaaaaaaaggannnnnnnnnnntnnnnnnnnannnnnnnccncggggggncnaaaaaagtnnnnnnntnnnnnttttnnnaaaannnnnnntnnnnnnnnccccaaangngnannattgaagtttaaagtaannananattnnnnttnnnnnnnnnntttnaannnnnngaantttnnccctttt

SEQ ID NO: 3603 - DNA, 656 bp, Gossypium hirsutum
ctttttgtttttttggcattgaaatgaaaatgaacagtgtagttttctcagcgacaccctgaattattttcattttgtttgttgaattactgaataatatctcttctctgaaacactaaaatgctgtttcagtggaactttagagtcctggaatcatcactttaaatagcttgtttagtttattggataaactatatcagcttcttgtatcatggaaccaaggttaacagaggaaaaaaaaatagtcttgattctcagtgttacctatatgagtgtcataaagcaagttatgctttattgcatgtatttttgtgaattagtggaattagtacaccaactcgttccttaagagaagtagtaatgtcatatccccttgctgattgtggtgcattctgacaattatcttggatcagcttcgagattttttttcttcaaaagttaaaagagtgtttaccctgatcctcatatcctctaatggaagcttctttttttttcatgtttgaaccaaaacttggcataattcaaatcacccccattaaaattgttgaccaagacattatagaaatcaacataatttcttgaacggagcttaaacaccaatgacaaaactttacaagttatactttcaagttacactaataggatgctttgccaaa

SEQ ID NO: 3604 - DNA, 593 bp, Gossypium hirsutum
tggaaaggtctaggttcgctctcaactggtatgtttcctctcttttatttaaagattcttctgctactttgtgggcatggacgttgtttgttttgtttataatctggaacctgatttcatgaaaccatgctttcttactttgagtgtcactgattatcgccccgatgactgacttatcttgttcttgtgattgccattttttaataactgagcaagaatctccccttatcatgactgagcgaaggtccaacgatattcctaactttacagcctgtagtcctgcataggcttcaactgtgaaaggcgatggaacatttgagtgtaatacagtttttgatgccaaaagttcccccgaacagtcctaagccaccaaacctgaagctgatttaaagtttcttttatcgaaggctgcgttaaacttgatttccgccctagtattaatttcttgactgctatgatttttgtctatggtcaaggtacttgatctatctattatacttgtaagttcagctatatagctttgtattctttgtgataactctcttgctgtctctgttttcctttcatggacaagcctgtttctcaagttccag

SEQ ID NO: 3605 - DNA, 638 bp, Gossypium hirsutum
agatttttttatgttaccgctaaagttagattatggaccatatatagatattgatttgatccctatactcactatctctcgtttgcaccattaagcatttgaactttcattttgtcaagtagcgtaagttaataggttgatgtgactaaaaagctaatcaaatcaggacaaaagacaaaaagtgccatgtcattatgtataattagaaaatgaaaacgaaaatcagaaaaaaaaatggaaattctgtttttgaaataataaccgggaggggggggggctgaaatggggagagtgtgaagggagagaaagaaggcagctaccggtgccagtttgaggcagaccaacctgcccaggactggcaaaatcttaagagccaaagtacttagaagatgaaagttaaagtaagtaactaattgcaatttgtgaagtttaaatttttagggtcaaataagcattaatcctaacaaaatgaatgattgcaagaaataatagtgacaaagaaattaaagttagttaaatgaggaaaagggagaaaaaaacaaagacctgtaaccctcttgcaaaagcttcttcctcagcctttgttggctcaatttttgcaagggttatgttgtcattatcagaatcccattccactc

SEQ ID NO: 3606 - DNA, 615 bp, Gossypium hirsutum
tgctagtttctaactggccttgtctagcagggttcttatccctttcaactccatgtcctgaaaattttgatgcgctcttgccatcactatatgcagggaaggttgaagactgaatttttatgatattttaataatttttataatattttgagccgcgactaaaatcaacttaggtaaatagttatttagattcaaatggacttaaacgtttctttagtcaagtcaatggtgttcaacatgcagtcaacaatgttgaacaattaatgattaggctatcggtcaatacccacatcatctatgatatagaagaaaaaaccaaaatgcatcagttcgttagttgagtgtgacgtttattttttaatcacaattaactttttaaatcaaagaagagtaatttaggtattaaaatgaaaaaaaatagtatagatattaaagtgcgaaaatgtaaggtaaagtttattaaaaatttcaatttatttcattcaaaatttaaacttcttctaaatatctttataaaataatttgaatttattaaaagctcataaaaaattaaataatacttttgttaaaatggtaaagaataaatcttcaccgagttataaaaatacaactact

SEQ ID NO: 3607 - DNA, 649 bp, Gossypium hirsutum
atgcagatatcaagccgttgtttccaagacaaagtcagtttgtcgttcgagccatagagatggttgcggagcggaccatttgccatatactcgtaaaccagtatcatctccgattcctcgtcacaaaagcctataagtgacacgagatgtcgatgcctgagctttgaaagcatttctatttcattctggaattcgtttatgccttgctctgatccttggtgtcctctttttattgcaaccttggttccatcttctagggccccgagaaatacgtttccgaacccaccaacgccaatcaccgtcttctcatcaaaattatgggttgcagttcgtaactcattcaaagtgaagaacctgcccagaccttgaatagaataataacttgagtgtccactcttgctttttcttgagccaaagatgctagatttccaggagctgctcaaggaattcttacggctactgccttggattggtagaagccaggacgagaagctgtttcgttcttgccaatctggaggccgttttttccaccgaacacaaaccattccgaggaagaacatggccaagaaggccataaaaatccctgaaattgcaagcactttgagtttcataaatttcccctcgtatgaaccgtcaacagcatataaac

SEQ ID NO: 3608 - DNA, 558 bp, Gossypium hirsutum
ctcggatatttttttgcatcctataaatactccttcgacttggaagtctacctctacattctctgtcgctggtaatgctccccatactgattcctttatatttggagttctaacattgatatctccacctttcttcatactttctgtggtgagctaatcaaagtttgtcatttaacctattgcacgacaaccagcgactactactgaccttagagctacacccaaggaaaatccatgttcgaccctggttggtgcaatgccagtgcgcaatcccaaccattcctacagctttcaccagccttagtattcttacatgctggtcgagcttcctggccatagtacatcttaagggctttgaccagtgagaataagcaccaaaatcaatattatccatgctatcatgaagggttacttgagaagttgcacaccatgtacggtgattgaagtcaaaagaactctagaatgcactatgaattttaagatgatataggtcatatgactaaagattacataagtttgaaaaatgccatttaaaagttaatatgaaaagacgagctc

SEQ ID NO: 3609 - DNA, 645 bp, Gossypium hirsutum
accttgtctcgctcaatccgttctttctgagtccataacattgtcgcatcaaagaggcacattacattaggaagtaaatcctagttatgtttttgcaattgaaaataagttagtgaaataagacaacatgcattgtcctaattgcaactatccctgagttgggtgcacaaaaatatttaacttctatctaaaaaattcttagttggattttaaaaatagagaagtaatagaatggtgatgtccagttacggttgattcctgatgcaacatggttcttttagtctctcaaaatatagcaatatttggtaatggtcctacaggctataataatatctttcggggctaaccaaaagtaaatattatttggtattgacgagacttaaggatgtttacttagatcttggctttagagtttaaaaaatataaataattcaaaattccaggatttcaaattttctttttcgatgatgttttttaatgttttttagccactagaaaagaaccactggcacaacctgtactcaatcaaaaaagaggggtcaaatacatatgttaagttcccgagttattgattgagttacctgagaattaacacaaaattagatccgaagaaagggtctttgcccttattccaactcctaaaaa

SEQ ID NO: 3610 - DNA, 636 bp, Gossypium hirsutum
aaatcctttttgtttatgccttcatttagggttgtcttagattgtaagccaaattaagttgctagaatttgcttgatattatatatgttaggccaaattaagcatctttgtggtgctgcaataccccaaagacagaaaattgataaaaatgttaagatgtattaaaactggaaagcaaaagttatcagggcccataaattgctcttcactttttttcttaactatgtacaccctaattttttttgttcatggctaattcttctcacataaatagtatttaggcttttcttattttgcaacttgaacgttctggactgggggatttgaactgatacatattttcaacatgaatcaggttgggttggattcttttgggtcatatggttgggtactaggaaaagtgtgggatttgccaagcaatcattgagcaagactggatcagttatttcagcttactcttttgcacagcatgcccgtattgactaactggaacactacacgactggaagtaagtggacagagtttcagattcaaatgcttgtctttaagaaatcctagatgcttcaacatatgtataatttttatcttgtgcttatgtttttggccgttttggtgcttgtatatgcgggtgagatg

SEQ ID NO: 3611 - DNA, 615 bp, Gossypium hirsutum
cttgtcaagatatgattgctcttgcagatctgtattatctgtatggtcatcaatagtatagataaagccatcatgtgtattcatagtaaattcttgatcttgagttccaaaaggttgaccatttaatggatgagactctcctccaaacgtaagtgtaccatcttcaactgcaagacgtgaaggagacacaacagcttgtgaggttggcaatacttcagaccttgaaagacaattagattgtgaggctggaattcttccagtttcagttatttgcatgcctgaagcctgagaaagtgatgcatttgtgaagccacccaattcaaccatattaggtccttgtgtaaaattttcagagaatagaacactacaacattcatcatcaggtatcaatgtttgctctggtttgtctgaagtcgtaaccatattaatgaaagatacaggagcatttaatcctacagatgactgaaatgcaatgttcatcatttcacagccttcgctagtctctaaacagttatttggcaaccctgttgattctttccccaaatccagagaagaaatattgggtagatctagtaaaccaaactggtaattcccaactgtagagttcccttcact

SEQ ID NO: 3612 - DNA, 570 bp, Gossypium hirsutum
  misc_feature (564)..(564): n is a, c, g, or t
cgatgctggtgataagcctatctatattggttttggtagtctcgtgagtttgcttctacaacttttccttttttaaacagtaaaatgagagttcataacagtttgttcttcatgcacagttttgatattttatttatttattatctctgagagtctgaggtatatgtgcttttctttatatttacttccttataatgtaattgattattttaattttggggattatttatgtgcatcttatcttactataaaaaattgtattggcttcattaaaccacaactgctttgaacttccaacagcctgttcaacaaccaggagggatgaccaagattatagtacaagctctagagaaaactggacaaagaggcattataaacaaaggctggggtggtcttggcaattgtaatttcacttgttcttttctcgtctttcattagttagattttcagtgttttgcagtgtgtaggagtggatagtggttaattatctttggtgcagtggaaaaaccaaaggactttgtgtactcactagacaactgcccccatgactggctattccaacgntgtgtg

SEQ ID NO: 3613 - DNA, 644 bp, Gossypium hirsutum
agaaccgcatacattaaatgccatgacgccatccatgatacctcaaacaacaagctccaccgctcccattcaggatttgatgaaataaagacttatagaaaaagaacattaacttgaaaaaaatgcagagacacacacgtagaggaaattaagtaatcttatgtttatatatatatataatcccggtctccaaagggagatcatgcttcaccggttcttccttcttttgtctcaatgctcttccattttcatcatgcctcttgcattgcattgcattgcatgtctccactttgcttcagtgcttcattatgtaaacccattttggaattaaaatagtgcttttttggaaatgcaacaagaagggaaatagattagaactaaaataacttaagttcccattaacattacgtgataacctaatttaaacccaacataataacactgttaagtagtccatgcccaacatcataatcactatcaaagtacccttccctccccagatggtcaaccctaaaaaatgtacacatctaaagttccctcataatctgtttctagggtttcttaccaagagtgtgcttgttattatgcatccaaactttcaaaacatgccttttgaccccagtttcgttgcaaaactgttgaac

SEQ ID NO: 3614 - DNA, 643 bp, Gossypium hirsutum
agactggtttgatcttaatcagtctctgattgtttgtgaagtagttataactaggttgtcattgttcatatggttaatttgatgtaagcttacaactttaaacgttaagtaagatgcccattcttttttcccgcttctgaggaataagagttttttcttcttcttattattagtagtattttgttttggggatctgaccaacattctcaaaccttacctcctctgacatcaattcccgtataagtctgcctaattaggaaccgctgggaccaaaaagctagcatttcaaaaatccacacttgctaatgagagccattactcctcattgccgccatttctcaactgccaagcaactaaaagactttgcttcatcatcatcaaccccgaaacctcaacctattctcaatgaagatttttgcggtaaaatattggaccaatacccagatatcagaacgttaagaaagctccattccaagatattcaatgaccaaaatcttcgcttcaacccatctatagccatcaaattaatgagagcttatgcagcttgcggggaaccaaaagtcacacgccacatattcgatgaaattactgaaaagaacatcgttttctttaacgtcatgatgagaagctgtgtagacaccgt

SEQ ID NO: 3615 - DNA, 649 bp, Gossypium hirsutum
  misc_feature (197)..(197): n is a, c, g, or t
cttggtagcagtggcagtattttccaaatacacttcatcatccgcaacaagacagaatttagaacatttttcagcaggagaactctcatcattctcactgttcctttccataagcttgttctcacatttctttatagaaccagcacaggctatcaaactctgagcttcatcatctggacccgattcctccacaattntgttctggtccctttgtacaactgaggtagttgggacctcaagctgtgcctgaattgactcacttctggcattgatcttggatttatttcctccatgtttatcaagaaattgacttgaagcagccgaatcttctcttggcaagtcattcttcaacagttcaacacccccaccacctccagttgaataatctgattttctttttttccttctcgaatactgaataattttctgcccatatttagaaatgtcgctatcaagtttttccatcattatttcatctactttcatttcaacgctttcacatggtttagaaggtgatgggtggtttaacttgccttttgaacgagattttctcgactgccatttgatgttaaataactccaaactgctatatttatcggtgaaaagaccactcaatggtagtgcatgctgaacttgcttaaacgaagag

SEQ ID NO: 3616 - DNA, 629 bp, Gossypium hirsutum
ttgttcttaccttttctatgagggagagatagtatggcttcaccttttcgacatcgatccgaactttgctcttgctgtaaagatcatatttgctgcacaaattgtaagttgaccaaaaaaaatattcagtatagggtaaaaatcaggataaggaaatggactctaggtactgtgattggaatccatgtcatacttgaatatttcgagccacttgagattctcgacatcctccccgttcatcagttgcttgtatgaccctgacctatgcaaggctgcaacataaaggcaagcgactcggttcaatttataaattggaattgaaataaggcttcgaagacctgaaactttttaaactggggactcggtacttaccataaaatgaatggtatctgataatgaaaagagctgctgatggcagagttgtattgttctctttagccacctgaatatattatagattccaaaattagttcgtatcgtcgcatttctcgatgctaaaaagaaggcgtcggaattcatatcctaccagatacatgtagtcatcatgcccccatgacatcataacactgttaagtccacagccctctgagtacactccatatttagtgttgtaagcagggttgtggtag

SEQ ID NO: 3617 - DNA, 585 bp, Gossypium hirsutum
atttttttttatttaggcattttataatttataaaaatttaaattaataatagtaaaagtgcactttgccccccaaaaaataataaaaatttgatttagtcttttaaaaattataaagatatagattattgaaacggtgaaattatattttactatcgtaaaaatatacaatttaatttcggtcccaaaaaaattgttggcttcgccactgatcaccacccttatatctatcattaaatattttagtatacaatttttttttgttgtgataaaatttaatatatataccaatttgtgaactttagaaagaaaatttgagattttttacattgggaaagtttcatccaactgacatttctgtacaatatctgtcatttctgtacaaaatattctgtcagctatatggtgtgtatatatggtttattttttttatcactatacaagcaatgctctctgaatatgatctaagctccttgtcttctaaaacagtttttaattactctactttgaagcaatgtccagcaccgctgctcaaaggagttggggttccactgtgcaatgtccaatcaccagctcaaaggaact

SEQ ID NO: 3618 - DNA, 637 bp, Gossypium hirsutum
cccatctgctgacgctcagctagggcagctattgcacaagcaagtccaccagaaggagatgatgatgaacccgcgaccgtggtcgtggatggtaatacatatccatctcctgaaacataatgcactgaagcagcagcatctacatagttaagatttctctgtctgctgttctcctgtatcagttcaattcaaagaataaacagtcagagaaaagaaatcaatcaaaagtctgtgcataacgtagtcgcgtagaaatgaagatcctacacaaataacaagatgacattacaaacattttaaaattacaagttgcaagttttcctcatttgtttttttttccctgttaaataaattcacatgaagttcttgccatccaaaatacactagttcaatagacagttgggtgctatatgaacaacaaagttttctgtctagcatcttaaactggaaccagtttctaaccaaataactataggcaaaacactttgattaaactgacaggagctaaatacttaaattctgcaattagtttcatacataaatctcatcaaattttgaaaaatatacctgaatcgactgccaaactgcttccatgaccattatctcctcaagatctatgtcaaagtcttcatccctg

SEQ ID NO: 3619 - DNA, 356 bp, Gossypium hirsutum
aaacaacgacattcacttttgacttttcattctaatctgattttttttctctatattttcataactaatccttattaatgttaacaacacaacaagaggttttaactttttctttttgatccatgtgggatatgagtggctagcttagatcccccacttgccaaatactcttcctaattatctcagttcaatgcatgatatatttatctttttgtgtttgacaaaagatgtttctaaggatgggatggagtcaatcttgtacaaaggcttcccattccaatccaaatttagcatgcaatttcacacgtcaagttacctagtattttaatgaacaaaaaatttgtttatctttctca

SEQ ID NO: 3620 - DNA, 632 bp, Gossypium hirsutum
gaaaccctcaaaacatgaaatttaaaaccaacaaatagcaatgaccaattttaaagagaatatgcgaacaaacatcaaactggaaaacataaagaacatatagacaaccatggaagtcaagaaccaaacatagaatcagatcagctagaacataaaaaaaaaatgccaatccaagtggtggtgtcagtgattacgttataaatatatggttatcaatttattaaaaaaaccaaaaagtaattgcattgtgcatcatcttccaagaatttgagagcagtcattccgggccaagtggtagtctgtccaattacagttttttctatctcacttttctttagttttttgaagaaagccattcctgttcgactagctgatatctgatgcagtgaacagtaactctggtatgatatggcaagccgagagttcagaaaactctgactaccttgagaggctgtgttggttactcttcaacttcaagtgagtctaccagtcatttttaattggcaaatagccaaaaacagatggatggttccaaaatttaactattatcattaatatgaaatcagatgctaaatgttatcaagtttagctagcatcactcatcatctgtcagggagctaatttacttctcc

SEQ ID NO: 3621 - DNA, 638 bp, Gossypium hirsutum
ttcgggatggcatacgatgcattgtccttaagtaatcttgataagttgaaggctggaatggaacaagcaatcaagatacaaagggctattctcagacaaggaagtgctgcaataacaaagagtgggtgcatcaggagtggaagaaagtttaggtgggtgaaggttgaagattcagtggacacaaagctgttgggtcacccgcaggctctgaccaagttctgctactttctaatggatgccttgaaggagaaaggagctaggttgaagcctttgctttgtgcctgcacgtcagaagaggcagctaaggtgttgattgttggggtgtgtggaaagcctcgccttggagcacttcaagggaatgcatttggtcttgcattcaggaatgctgccgaggaaactggagctgaatacttccatgagctttttgaatcttcatggattgggttggatgcaggtgctgtcaattccttcatggttagattaactgagaagctttgatgtcaatctttcaatgtgtggtgaaccgaaaactttgcatgttctcaatagaaaaacatttgctccttgctccaagtgactaaaatttttagctaaaatgcaaatcgattattttcctcaatccctttttgttgatacag

SEQ ID NO: 3622 - DNA, 639 bp, Gossypium hirsutum
agtttccattctctagtagtccatgagactaaacttaaggtaacaattgtttattctctacaagctcaacactataccatattaaaatggtgaaatatgaatagggatccaaaatgaaccctgagaatctggtctatcccaattttttccccctgaggtaattaagaaaattgcaatggatgaatcccttgagtttcaaatttaattgttttgaagcagttacacgcgggaatgagcaatctcaaagatgattattttagtcttcttgaggaatattttatgtttgcccttccctgccatagcatgcaaaaaaaaaaaaaaaaaaaaaaaaattttttttttgggtgccctttttttcccttgggtttttaaaaatttttaaccccctttttttaaaattggtttttttttcaaaaaaatttttttgggggaatttttttccaaaatttttggggggggaccaaaaaaaacctttggaacaaaaaaatttttttttttatggtggggtaaaggggggggcccaaaaagaaaaattgggggtttttgggggaaaaaagggggaaatttttaaaaaaaggggttttccaaaaagggttttttttttttttttaatttaaccaatttttttttttggcgttt

SEQ ID NO: 3623 - DNA, 627 bp, Gossypium hirsutum
cgatagttctagatcaatttgtcttgatatcactgccattttttcatagagtagcctgtatgtgcattacattttctgttctgatagttgactcccttgtcaatctatttgatttcttagatgtctctgcttggtacttcatattctgttacattatttgcggcatattttctatagtggcgcttaactttctatgcatggaagcgagatgtatgggagagaactggtggatctgcggaaggagagtcaatgggagttccttaatacgttattttctgtttcagaagctgttgcatacatgcaggtagtttcttcccgtttaaactacaaaacaaacaattttctagttttccttagaaactgtttttaggccacttgcactttgtagtgaaatttaatgactgagttccttgcctttcttcttgatgtaattaacaataatgacatagctctgcaattttatgaccttcttcacgttcacttaataattttctatcctatgtgtctttattgccacttgcatggtgcttgtaagatctcgtaatctccagattcaaaaatctttaatttccacattactttccctttgttctgacttccattattgctaacaatttgctcaactag

SEQ ID NO: 3624 - DNA, 617 bp, Gossypium hirsutum
aaatttagggagtgaaactcatcgatagggtttgaaaacaaattagaagcataaccatcttcatttggtataatttgcaagggtttcaataacaaggcaaagaaaagatggagctcattagaatccagttgagctatgaaaccaagaactgcctttcgaagatgtacacttgcattctgtcaaaattaggtcatacaattaacattggtgataagaatgacacatcatagtaaaaaaaattagatagaatttaaaacccattgactgaaaggttaggggacaaaagatttagatgatgggcatacctttcgtggagcaagcgttttcaagtttctgatttttgggatcaggaggcgaacaactaaaggcaccagatgaaccctatgaccttcctcaattagaccggcttctttagataaactccatgttgtcagttcttctctcagatattttgaattgattagatttttaagatgctggtcatatgggagtaagaagtcgtctttccacgataaaaggcaatcaagaacccttgcctgtatgtcagcatcattgtcatctagcagcctgataaataaaaagaaacaaaatccattaaacgcctaagaaacacccga

SEQ ID NO: 3625 - DNA, 630 bp, Gossypium hirsutum
attaataacaaaacgccaactcttttgaacagaaaaaataaagcaagaaagaaaatgaagttcatcatttgcacggatcttgtgcctgtaaagataattggaagccaagaaaagagaaccaacatttagaaggtaccaccgttataattaatggacagtaagaaacttaattttcctcacgcaactattcttaaaatgagatatatgtatccaagtggcaacattaaaatatattctatctcatgctttgtcaagccaaaagaaacctgttgtcaatatacaaagctttttcatcatcttttcagaccatctagaagatttaatagtagatttagtcatgcaaaggtctattgtaagcatgcataacataagactttaactggaatagcattttacgtacttcatactcaatgctgtctggtgcatcactacaagcagcaggctgtgatccaatattagtttcctccatattaatttccttagccactgtagtggactttagttcagctgtttgctctctttcatttgttctattatcaacttccatagattcagcatagttatgtccatcaccgatctgactgccaacccgtatggaacctgttctggcaaaagatgattggacttgtt

SEQ ID NO: 3626 - DNA, 634 bp, Gossypium hirsutum
ggttagctgaatctggagatatatgatgcttttatagatggttatttaagacagggaaatgaggaaatggtaacaatgttgagaaaggaggtgttagaaactcataaagagcagggggggaattagatgtctactgttttactagttggagcagacctgtttgaatagtgatggtaagttgttcttgcaatttgtatcggttttgtgctttttgttgctagatggtggttgtctaagctttatcgagattcattttggataatgcaggtcaattgttgggaggatgctttagaaatattggtcatggtgcaagggaggatatcttattctttgtgcaaaaaggatgtagtctactttgaagatggctctctgatatattcagtaataacaaacatagcaatgtggccatgaagatggaggcaggttgaggtgctatcgtaattgaagtaataagcagtccaagtaagtattcccagcttcagaatagatacatgattgtgataagagtacttgtatgaaatgcaatactgatgccaagctttgtttattagaacaagaatatagaaatatattaaatgattgatctaagaagggagctctatggttgcattattgatcttctttggaaggctga

SEQ ID NO: 3627 - DNA, 638 bp, Gossypium hirsutum
agtgactgttggtatttttctttgttcatggatgaagaatagtgtgtttcaaggttgctattccctcatatatttcatttttcattgaaactgaattgtacttgtttaacctagaaatctagtaaatatctaatttaaatattgaattgctattaatattttctattactttctttggtgttatctttaaattttttgttgttactgaatttgaagttgtcccaataaattaaatcatctgtagcttttcaaatcatggaaaaagatgagattttgagataaaatcaggaccagccttcacattaattttcactattcttgtttagtatatcaagtttgatgaatactgtaatggaacaatgttgtcaaatatttgtcttgagtccttatatagatggtttcattgcttaatttggatggaaaattcttatgttgtctaccctgtcaatttcccctcattaacagctcatcttcaagcttcaatagccatcattaataagttttaagtttaaatgtctccattttcagacctttagaacttgaacaccaaaaccaaaagaaaatctagtttgtgtcgtatatacatttcttcacttatcctatgaattaaacctagagatcaaggaagcaaatcaacg

SEQ ID NO: 3628 - DNA, 860 bp, Gossypium hirsutum
gctaaggatgctaaggaagtttctgtttccatatttactttgaagaagtcggtagatcaattccggcttcttaaaggtgatctgttggtatttttctttgttcatggatgaagaatagtgtgtttcaaggttgctattccctcatatatttcatttttcattgaaactgaattgtacttgtttaacctagaaatctagtaaatatctaatttaaatattgaattactattaatattttctattactttctttggtgttatctttaaatttgtgttgttactgaatttgaagttgtcccaataaattaaatcatctgtagcttttcaaatcatggaaaaagatgagattttgagataaaatcaggaccagccttcacattaattttcactattcttgtttagtatatcaagtttgatgaatactgtaatggaacaatgttgtcaaatatttgtcttgagtccttatatagatggtttcattgcttaatttggatggaaaattcttatgttgtctaccctgtcaatttcccctcattaacagctcatcttcaagcttcaatagccatcattaataagttttaagtttaaatgtctccattttcagacctttagaacttgaacaccaaaaccaaaagaaaatctagtttgtgtcgtatatacatttcttcacttatcctatgaattaaacctagagatcaaggaagcaaatcaacggataatttggtgtactaattttccaagacatcaccagcaataaaagaaatctgaaaaaaaaataaagttacccagacgaaaaaaagataaactcaccggtggtggagaagaggaacaaagaaccaaagactttcttcatggagaaga

SEQ ID NO: 3629 - DNA, 639 bp, Gossypium hirsutum
  misc_feature (583)..(584): n is a, c, g, or t
  misc_feature (597)..(597): n is a, c, g, or t
  misc_feature (614)..(614): n is a, c, g, or t
  misc_feature (630)..(630): n is a, c, g, or t
tgagaaacctggtggaccttctgtacaagcatctacccaaacatagagttagtgttatgaatggctcagtaaaaaagaggaggggggggggcatgatgtagcattagtttccagagatttagtggttattgcttccatatctctcaatggttagtaagagctttctagtctgctgtggttgaccttggatcaaaagcaagctagttgttcctttattctgcatttagtcatatagctaattatttaaagtctaaacattttagttttcttaagtcatgggtatcatctgatttatccttagggatgctcaaaacttacccatatattaaatataactgaaagtatattcttgtttcttctaatcgatagaattattattatccaaaccatatttgctatttctttgttgagatgttatattcttgtttcttctaatcgatagaattattattatccaaaccatatttgctatttctttgttgaaatgtctcgtggacatttgttgatgacagctcttgcactataaatgtctcctaaactttgtccaactttggggtctcttttttttttttttccccttaannttcccccctttgnccccaaaaataaaaacntttttccccccccaanttttttttt

SEQ ID NO: 3630 - DNA, 566 bp, Gossypium hirsutum
tccccctggtcgctgaccttgctgtaccataggaacaaagaaatttggcacagggggtccaccaggcctcattccaggaaccagttgttgttgataaccaaaaccagcctagaatatatggcataaggaaacaagcatattcatatttcaactgtcctcaacaaaatcagatcactcaaacatccaaatgggcaagaacgccaccttatgaaggaggccaaaaagtgaaaacatgaaatcaagcatatcaacttaagagaatagaaaaagtgaagacatattacttgcggaggaatgatagctggaggtccttgcccatataaaaactgttgtccaagacctggagcaccagaaggatacattggaattcgaggagagacagaagaaatagcaagtggcctcatctgagaaaactgagcctaaataacatgaaactgaattgtgagacgactaaaggaaaaacaaactgattcatagaactatcaaactatgttactcaaactctcaagtgctgagtggacacaggtcgatacccatgtccataagggttggacaaggatactttc

SEQ ID NO: 3631 - DNA, 613 bp, Gossypium hirsutum
ccctaagccaaccaatgcaatgtctagcctctaaaagtaatctattcctaaggcttatctccaaaaaaaaaaccacagttgcaagaagccaaagttataacatgagctaacgtcgaagaaacaagcatgctaataactgacctgaatttctttctgaagaaaagggtctccaaaagaacagtgcaggggataattgccagttttgtcatctaaaatacataaaaagggcaaacattttcagaaactaatgctcctaatatgcttgtaaaagtgaggaagaaaagccaaactttgaactggatatatagcgctagctactgacaaaattccataaaccaataagctgtaagcacaaggtatcattttgtatgaattttgttggaatcaaccaaaacttggacatgaatttgattccagaggataatgacaggaaatggaactttacctggtagaaaccaacagaattgaaccccaaactaagattcaaaagcccaatggatatcccatttaatataccaaatcccatgacagctcgggcatcaaaaggtttgtgctcaaacaatttcatccataaggctacttgaaaaaaacaaaaagggactagaaaatgcca

SEQ ID NO: 3632 - DNA, 568 bp, Gossypium hirsutum
agacgacacctcagagctttgttgtttgtgcccaaacgtgaaatgaatatattgagactgaaattcctttcttccttatttgtttatataaatggaatcgttgagaagagaagggaaaggcagtaaaaagagggagcaagctgcaacaagaaaactgaggatgttaaagaaaagtatatatgaaggcggcataccttttttttattctaagtatggaacctgcaaagaaaagtcaaaccatgcaatattcccttttgaggtgatgtcctcaatttgtctcattaaaatgaaaattatagatcctctctaaatttaaatattctaattaagtccttcaagtatcaatatcgtatcaatcaagtcctttcgttagcttaaccgtcaatttagtcgttaaatgccacttcgaaattaatgcagagtacatttaaaacacgtggatcaaattctaatcatatatgtatctattgcatggataatttagataaaacatattatgaaaaaaaagcagtatcaataaaattttaaaaatatatttttttccctttaacacataatctaagcaggg

SEQ ID NO: 3633 - DNA, 613 bp, Gossypium hirsutum
aagtcattgtcccttaatatacgagttttcacttgctgtcattttgacataacttgaacatgtgcattaacatatgtctgcatatgtttccattctctgttgctccagctgagctatgcccaagatactcagacctagccacatgaaagtagttttagaatcaggtagatattgaataacataaaattatgtcttctctaggaattggaatatgcatcaaacacacattgggctttatatcaatcaaatgaaacccgcctctctagctctgaattatatcattatgtaggcaattgtgtaggtcttaggattgatgtcccaaatcctcccatcccctccaaccccaacaggtgcattaacagaagcccaattgactaaataaaaggctttatgaaatgcttatttcagtgcctaaaaatgcagaatatgattacagtgtcttgctgggaatcttttactgtctagatgtatgatataccttaatatatcattcatcttttcactgcatcgtacaagtagattctttttggggatgacaagagtaatgatctgattttaactgtaaaacacagggcttatagctgaagaatgctgcactgaacactattgacaa

SEQ ID NO: 3634 - DNA, 600 bp, Gossypium hirsutum
  misc_feature (595)..(597): n is a, c, g, or t
tatcagcatttccactttccacgctaaaccatctatttcataaaatcatatatagatagagagcatgttttaatcctgcaaatgatgagacctcaatttcttgcatgacattgaaacctaaaatcaatactaagagaataaaatattgaactcactaaaaggaaaccaatattaaactcatcccatcgattggaaaataacatttagatgtaacaatcgaagataatcctaataaaaaaagaaaaaggtaattacctgaaaacatcacctgaagcttgagagccagctcccatggttagtccaaaaattggatctttagctttctcaccagtgccacccactggataagctttaacctaccaagagaaattgaagtaaactaaagaaaaccaatggaataatttaagtcctctagtaactaaaatccaggcaataggcatgcattactcacaaatttcccttgcttaaaccattcatcagatgggttaggtccatctgaatattttcctgtcaacaacaaacacgtttcaattcaatcatcaagttgaagaataatgcattacgttttaaggggaaaatagtgaaatagaaagtnnnccg

SEQ ID NO: 3635 - DNA, 650 bp, Gossypium hirsutum
tatacgtagcaattatagaaaaaaattaacaataaccatttcacaaacataaaggtatccaacactcaccccaagtcctagtaatatagcaacaaactataacatttcagctttaactgacagcaacatcagactttcagcaaggatattatcaaataatgcatttatgacaggtgaaatatcctctatttcacatagtaagattccagattttatcaaatcttaaggaaatgagaaaacgatctagaaatattataccattaaaaataaaataacagaatagaacttttgtggaacctgcattttatttaatgatgtgtctacaggaattcatactcaatcttgacgtgcttgttctgataattgcacaacttaatacatttataattcccattcaagaaattttgccttcagacaacatcctaagctcatcatcctcatgcgtggaataaatatataaataaaagactcacctccaacgtgcactggaaaacagcttcaaatatacggggaacatcatctatcattgcagctttgtaccttcatgcataaacaacaggaccaaaaagataagaaatgcaagatatactaaaactgacaacaaaaataaacaatactaaagagaaatggcattacttcagcaataacga

SEQ ID NO: 3636 - DNA, 624 bp, Gossypium hirsutum
tttggagaactagggtgatttcatcttggtcaatgacagggtatttcaggtgtttggcaagctcgtaggctactgttttccttgtctggcctttcactgctaggattattggggcatccagttgttcaacctcttgtttttccattttctttctggtttgggtgcctatggaaagagattaattgcaactgtgaggctaggttactcgaattcagggatgtgggacttgggcatatatcaaaaggacacggttacgtgaaggaaaaataaaagtatctgagaaacatggcttctgaaattatgaatacttgctgtccaaggtctctgagaatctttcttttcccttttcttttacaactttaaatgaaatccaaggaaaaagcagaaaataaataatatgattaatgttaaattctattcttaacagacaaaaatgatttggaggtaaagttgattttgatttcaaaacaacaaaaaactttgtcaattgccatctcaccgattatacatcctccctggaacttctaagaggcttctgccattttcctggaagttactgcctcgaaacttctaacagcccaaagctccaatatgaaacaatgaccatgccaatcaactgatcta

SEQ ID NO: 3637 - DNA, 245 bp, Gossypium hirsutum
ttgaatatcctgacttctcctgattctgatggattttgcatttgaatttgaaaatagcaattgtccaactcaaccccgacaaggacaaaattatgagaataaataaggggatggtactaataataaattatatgaggggtagtagaccatgacctttgagaaagggccacatctaaactatggacatccatccagactttgatttgctaatggcccaatgtgcggtgaaaagaacattttcacac

SEQ ID NO: 3638 - DNA, 595 bp, Gossypium hirsutum
  misc_feature (585)..(588): n is a, c, g, or t
tcgatggaagctgaaaaagagtggctacttactgggattgcctgagattaaatggtgtttctccttgacctgagctgcccctatcaccaaaagtgattcttccaaccccatcaggtccaaaacacatagaaaaagaattcgaagcaagattttcattcgctaatatgctaggaacagagacattgtccataccaagcccgaatagaccattaggagcagcaccatttaagaatgatccagtctgagtctgcccacaactgcaaaaaagagcagagcatccttatcataagagcaacaactcgggagaaccaggttattttcctcaggaataacagcgcatatcatgttgatcaagggtatattaatatcatccattgatgctatttcccaagacaatagataatgtttgttaatacaaaaaaggaagtgaaagttacaaacccgaatgtgatcttagcttcgacggctttggttttatcttcatctgtagttaagtgcaagacatcctccaccaagaccccagtagaagaagtgccattagagagatagagaacttcataagggcaattactttgaggtgaagannnnttgtttt

SEQ ID NO: 3639 - DNA, 623 bp, Gossypium hirsutum
atgctgaaactaatagctgatgattagaaataaatccatataatgatattccatctaaattcttgatatcatgttcattttatacaaccacagcatagtggaacggtcaaacaaccagcaaaccttgtgagactacaaacatgaaaaaccatgtcacaagaacctctgattacagaaattccatatgattgatatttcatatcttgatttcatgttagtcttttatacaaccacaacaaagcacaatggaccaacaaccagtatacaaccacaaccaagcacaaaggaccaacaaccagcaaatgttgtgagactacaaacaaggaaaagcatgtcataagaacttctgattatatacattatcatacaaacctaagataatcttcaaacttaaccataaattacatggaaattataggactagctctcactaaaaggttacaaaaagctaagcacccagatgagctttaactttaagtttaaatgatctttattttaaaggaacaaaaatattatatttctggttcgcaataaaatctgattcagattctgtctaatttaaaaatcatgatcttagacccaagaagtatgcttttatcacatggtcacctttctatcacaac

SEQ ID NO: 3640 - DNA, 667 bp, Gossypium hirsutum
atttttcttgaatctttcaatataagatgttacaaaaatagtatgacagttacctaaacttgtaactgctcccatcagttttggcaagttgcaaattaaaaataatacaagagaaagctgaaataaatcagctattacatccatctcattcaaatcctactaactctaaaagtctagttacatatcagcttggatagctttacaaaaaatcaaaaataaacaaaataaaagagctgcttctggtcctgctcgaatgctggtctgctatgttggtctgcatcatggttgactgttgcattgcagtccatgctcaacctgtaggaatgaagacaagaaatgttttgaataaaattagttttacaaggactagctgatcgagaaagtagggtgcatggtatcggaatcgtcattttccctgaaatactttatccaacacatatttgtacatgtgtatacgagtataatcctctaaatatatagaaaaactgaaaaaaatatcaaatatactactttacccatagccgatactaattctaagttggagtaagcaacttgttaaaatgcaaatgttgaggagaggcatcacagtgaaaaccagttatggtgttaaaccagaaatgtcttgtgtagcacatgcattaaaagaacattagcgttaggcatgtga

SEQ ID NO: 3641 - DNA, 410 bp, Gossypium hirsutum
aaatggactgggaagtgatcaacatgcaaatactgtgatagactcttgttaggctatcataagatgatggcaggatccggaccctaaaatataagaagcaacataaaacataccatgccttgaacatccaaaatagttgtacttgaatctatgtgtctcttcgcagcaatggagcaagccggaaacttaatagcaaaacacttctcaaattcctgcacatggtatcttacatatcgttccacagttgtgactcgcatgagcttgtcaggttcaacttttcctagcaattcaatgtaaaccggtcttccttccttatccaccccatgataaccttgagggtagtacttcaacacttcatccaactcactgaactcaaaatcctggttaaatcataataacatttttttttt

SEQ ID NO: 3642 - DNA, 597 bp, Gossypium hirsutum
tttgagactctggatcaactggtattgatgcaacatatgttgcatttcttgtgaattttgtggcagcaatgaacgcatatcctgctgaccagagaacccatcagcatagttctcttggaactgattctgcaattcaggaagctgaaactgttcaggagcttgttgatgcggaaccttgtcatgttgttccactccaggctcatgctgcacttgactgcgtatatcagataccagctgagattgataatcattattgcctagcaaattttgatcctgctcattttgctgcttctggtgatgttgctgttgcagaagctgctgttgttggaactgaagcggctgctgctgaaattgttgctgttgattagcttgaagaatattgtctcttgaagagtctagaggttggagatccatcttttcaaactgatccatggactggggcttcatataggaagccagttgcacaccgtgcaaatttgactgattacttatcaaagaagaatttgttttggaaatagactgcaaattaactggattcaaattctgagaatttgtcattgatccaacagatgttacagcaccatacaacaagctccc

SEQ ID NO: 3643 - DNA, 656 bp, Gossypium hirsutum
tctgttatgctcgtctttttgaataaactacaggggaccagaaggaagttctgtggaattaacagttcaaaccagacccgaaataaagcacttagctcttacataagttaagtgtttcatttgaatatcttatgatgtatttgaacttgatatattagtaactatatccgaagttctaccaatattaattaattcagcatttgaaaatatgctattgttattatgcattccaaattaggtgaggtagaatatgagaatatgtattttgtcattcttttatacctcttttgtgagagatttaagattgacccatctgcgactgcaactttctaggtgagcaaagatttcactgaatcctgtaaaatcaaggctatgcgaaggtcctggttcggaaaagaactaccccaaaatcagttatattaagctaacatcattcaaccaaaaggcttctggtaagtggagatattgactgcaaatactctttctgtttgttgaagatatggactaagccatgaaatcgtatatcctatagtttcttaggagtccattcacacaataaacttttgaatttatctctttttataaacaacctccttttgttttcttcatctttttgtgcatttttgttttcctctttctagttcggttgtgcctct

SEQ ID NO: 3644 - DNA, 617 bp, Gossypium hirsutum
gtaacaatggaacactcaattcgagtcaaacaaatacatagaatgtgtttgaggcactttttttgaaggacagaaagtggaaacaaacaaaagaatattaaaaaaccaaggaaatttctcactctatttgcatatttttctccttccagtatagttaaaatacgtgcaatttacgttgtactttgttgactcctatcttatacctataaatacatgcaacaattgcacacatagtctcatccaaaccctgtgttttaaacactcaacagtaagcaaaggcagcaaattaatctttgaattatttgcttccaaaaccctacacttttccttcaacacatccttgaaaatggcttcacaagcttctccagttctcgcttcaccccatcccgccatttcatccgaaaatcgacccaaggctgattttcatcccggtatttggggtgatatgttcctcaactgtcctgatacggtaatctataattttttttcttacatatttttaagttttttggagatttcatggaaaagcattatacgtacttgagcaggatatcgatgctgcaactgaattacaatatgaagaatttaaagctcaagtgaggaagatgattatggaa

SEQ ID NO: 3645 - DNA, 511 bp, Gossypium hirsutum
  misc_feature (465)..(467): n is a, c, g, or t
cggatctagttccgaactcacttttctccagtcaggttggtatttttctttttcatttcttttgttgaaagagaagaaatccttgttttcaactcatcaactcttatgagcgtatgcttatttgtttacttacacacagtagtcgtactagaaaggccaaaattatcattgtattgtttactacgtaaaatttcaggttattgtaaacaagtcacgtgctcgatggcgtgcagtggtgaccaaaattcccttgctaattgaagatctggacaaggttcccgagatatcaaatgagatcaagagcatgctgaaatcaaactcaaaagttttcttgggaaaggaggtcccttactgtttcctgtctcatgtagaaggttcttatgcagaactaactgttggatgcaatctcagacatatggtaacctctcatcctcggtacttttcagatgcatcttgtatgagctnnntctacctaattaatctcaactctttttttttttttaaatttggg

SEQ ID NO: 3646 - DNA, 624 bp, Gossypium hirsutum
atagtctttttggaggaaccagctaacgaattacaaagtgatcattcaagtccagttactgtcttacctgaaagaatttttgcctcgagaattagtgatggaagggactccggtcggaaggaagagccaagcacataaggatgtggagatgatagacaatctagattgtcactgtccttgtctaatgctatctgactgatgatggttcatccttacattatgtaaaacaatactttgttgctcttcgttcatgatttgcttctgtaaatcgataaagttagtattgtttgaatcaaaggtttagtaatgaggctgaacttgtgtttgtgtttgaaatcgaagttctctaacattgcctattctatctaaatatggttgatttgcagggaattgggggaaagaaaggacaaaaaaacaaaacagaaaaagaacagcatctaagatgctagacaggtttcccagaacagcttgttcttttccatctcattcatggttgaatcaaaagaaacagctgatgctttcttgttttgttttaccacaactccattaatacatttcttacacaaatgaaccccattttggtccaccacctccccatcctcttcctcatcttcgtgatgatca

SEQ ID NO: 3647 - DNA, 497 bp, Gossypium hirsutum
  misc_feature (442)..(443): n is a, c, g, or t
  misc_feature (472)..(475): n is a, c, g, or t
ttatacctcaccaatctagttcaagtgccacttcttctgcccccatgcttaatgatgattctccataaaatcaaggagtaactgcggtgtgggagtgccaatcatgcactttattgaatccagtaagtgtttcatgcaccaatatcatttcattcaaatactttgcttataaagggatatcatattgtttaacatatatgttcatgttttatattgaattttatgtgctgaaacattttgatatttatattgataatgttcacgctggcatgcttggtcttgtttttgagatgtatattcttatcctgtatggtatttggcccacatatttttcactttgattgttcttaataatcatgaatttgtgctttttgaactccacaggccatgatatattaatattggtatggaccatgtttgcttttttttttttttaaaacannagattttttttttttctttgcttcccccnnnnaaaaaaaaaatttaaaattttt

SEQ ID NO: 3648 - DNA, 593 bp, Gossypium hirsutum
tgcttgtctgatatttctgattgatcaaaagaaatatgatgaggtacattagcaaataatttcatcaggatgtttcctgtttcttgaacatgatgttatcttgtttcaggcaaaggcatgttcctctgcaagcattgctcggctgaagaatttgaacaggaggactctcgatgttctagctgctaggctgtacttttattactctctttgctatgaactcactggtactctttctgaaattaggaggtgagctatacttgattcattcctaacttctgtcatatgctgtctttagcatcttttctgatgtgcgtttccttttaaataaacctcagcatgttatgtttcttttattcatgatcagaagcacatatgacattctgggtctaattaggatgatctttaatttgacagtaaccttctagccctgcaccggattgcaacattgcgccatgacgagctgggtcaggtaaattttcaaacatttgagcaattatgtctctgataggatcatatttttaaatattgttctcatgcaggagactcttcttaacctgctacttcgcaattacctcccattacaatttgtatga

SEQ ID NO: 3649 - DNA, 607 bp, Gossypium hirsutum
tttacttctcacacttctaaaccctaaatttttttttgaatttatgtctactatttatatttatattattgaattaaatttcatattttgtaatatttattttgtttaatcatacggaatcttttcttaaaattgaattattgataatgtcatcaaatattcgtgttaaaattttctattggtatcaatttcacattacctttaaaataacttttattaaaaaatcatattttttacatttaatttttttttaatttcaaaatacatgtaacaagaatcttaatataattgaaacaactaagcaagcaaagaagctaacccgtatataaaatattaataaataaattatgaaaggattaaagttaataacaaatttgataactgtggacaaatttgattgcagtggatgatagtagctataaggaccaaagccatttttttaatttaactcaagcaaatatatttgattccattcgaatcctatctcactcgactcgattcaaaaaatttcaaatcgagttagaatgatagaataaaattcaactcaattaactcaaaatttcttcattcgattcaattcgattgaacactcacccttaaacgtgat

SEQ ID NO: 3650 - DNA, 178 bp, Gossypium hirsutum
tcattttctacagtcgagtgagggtctttgtgcttgctatcttttgatgttgtctatatagagattctctcttctacaacaagttgctttctcccaggtttctttttcctattaaaatgatgttcgaatcaaatttgtcaattttttttcccgaagccatcatggtaccttttttttt

SEQ ID NO: 3651 - DNA, 656 bp, Gossypium hirsutum
gatctgtttcgattacgaactaaaaatgatgtggaaatccggttacccaggaaccattactgtttttaaagccgacatcatcttatttggaaagtggaggtacaattgaggttccacatccattgaattcattggattatgaagttgaacttgctgtcgtgatcggaaaaacggctcgggatgtgcctgaaaacactgccatgaactatgttggaggtaatttcgaatcatttttcattaaaaccgacggaatttgtgctgtgttttctgtgataaaagggaaagcttaggggctgataagcttgagatgaaagtgggtttaggatcttgcttcttgagatatccttttttctgctaaaatatgtgattttgttattaaataagaattggatcgcgtaattattagttaattaaagcatgtattagacttgattctataatgtttgatacatatgaataagaggttataagttcaatttcaatcacttgcaaaactaattttaataaaaaaattaccaaaaccccagtttttactggtttagtccgttcttttgtcgtttttattggttactttttttttttgaattttcttgccaattttaaaaccaaggtcccggtttctgggtgggttctgccccaaaggtcaaaacacggaa

SEQ ID NO: 3652 - DNA, 643 bp, Gossypium hirsutum
  misc_feature (10)..(10): n is a, c, g, or t
gacggaaagnatagttgtgctattctggcactttcccttccaccttgtaggaattggtggcattcctttttcattgaagctttcactctcaggccaaactcctgaatcaatcattcctatgatcacaccttcaccatacgatgacgcattccacagtccagaagaatgccttaatcccatgaattgaggggagtgcgtggtgaacaatttgccaattttctcctcgtgtatggcaatatgagctggagatttcttgagttttgacacttgagctggtgtcagcctagcactgaacccattcatgacatggtaataagagtaaagcaacatctctttgccatgaaccggttttgacaacgatttcaagatggtttggtgccaagtttcatgggtcaagaaagatgaaggtttttgtgaatggtccaaatggacaatgtatgtcttgtattcttcaggtttcgacaatacattgttgattccaaacaacaacgccagtagaaaagttagaatggagatgtagtaattgcagacactcatctttcgagtcttgctggactaatagctagactaggaagatttagcttgatgatcgtttatcattcccacatacatatatatatatgtgtgtgtgtgagagagagag

SEQ ID NO: 3653 - DNA, 637 bp, Gossypium hirsutum
gagctcacacttgatggcttttctgtggtttccacgagcatactcaagctgggctttcaagaggagggccgtagatgactctctccctcgagcaatattcgtagcatgcttgacttcacgctttgctagctttatatttcgagttagaagcagaaatcggaccttgtaaagttgcagcttaagcttcaaatcaacaccaaagatagatctatcaactgtggtcctaggaagttcttttggagatgtaagatcagcagaccgtgataagttctgtccagcaatatccagtgttgaaaacatttcatccagtgggtcctctgatagagttctggatagtggattctcggaagcattcacactagcagctaagtccggagtagaagcatctgagaccaatgagctgctcggaactgaggataattttccaactagattcgtggattgttgtaacaaaatgttaccattgtccccttggctcacattgccaacaccaaatgctttttccaaataatttaacacatcctgagcataattaaagttgttttagcatattaaaagatacaaacaataattgcaaataaaacaaaatatggtgaaacctgccactaaaaacatgtatgccaacagtggctggata

SEQ ID NO: 3654 - DNA, 632 bp, Gossypium hirsutum
tagccttgctattgtgtgcataagtttccactatgatctgaagaagaatttgtagcaaaacaattagatagtgcaattggtaaggtgttagttttcattgttaggaactggcttttatgcctaaatttgaaaaagtccaataggaaagttagctgagagttaagcgcatgaatgttttatattttagttttccttatgtcattttgttggatttatttcttgaaggttcttcttaaatgacattggtggctgtctaattttctattgttatagtttttgccatgcagacatattttttggttgacttcatggctttgcttgtgcactgcctttccttttattgagaaaagatatagtgtttcactggactaatccttgtttaaggcgatttccccctttcacctccaaaaccaatgcccctctttatccagttcatatccagtattaagaggttatagagtattattgattaatgcaaaagcagatggattgaaccattatctaattaataaattagatagtaacgtcatgctagaagagacatcatgggagataacagcacactgaaagtactagggcaaagtcagtaatgatagaatgcctagaccaatggtgcaacttactggatgtaa

SEQ ID NO: 3655 - DNA, 620 bp, Gossypium hirsutum
aattaaaccaacctaaaatcaaaattagggaattgaaacacagcaattaaacctttgcttttcagaccttgcaagaaagttgaacaagaaaagttaggaaagtgctgcaattttcttttgcaatggctgcgaaaactaaaaaagacttctcctcagtttctttcttatagttgttgtgtgtgaactgtgaaccagctctccttcgctaacccacgtttgaaatttggtcaaattctatgtaaggtccttgtactatgcatttctaccaatttagtctctctactataatttgatcatttctagtcctctactcttttaaaatatgtattttcaaaaccaatttttttccatccattctgtcaaataaattgacgtatattactttttacaacatggtgattatatgacaattaccttggcattttttgtataattggaaaacttttacatatttgaaagaagaagaaaaatgagaaaatgtaaaatagttgtgtcaacatgtacataattgcatttcttttacaaaataaaccacatcaagttattttactgaacttacagaaaaatttgacctcgagactgaaaatatacaattcaaaaagtaaaagatacagggactt

SEQ ID NO: 3656 - DNA, 621 bp, Gossypium hirsutum
aattatgtccgaaattcgtgagacatgtaatgacaataaaatatacctatcccctgcctattttaccatttatgcaccaaataagattaggaaaacagagatgttaattagaagctatattatataattaaatgtttcttatgtatttggctttggtttttcgacagatctaaaaggtatagaattgcagactggttccttcaccttaaggcaaattaaagacgcaacaaacaactttgatgctgctaataaggttggagaaggcggtttcggtcctgtttataaggtatctatcctgttctagctacacattcatttactggtcacttttttttatcactgaacctggtgtaatgcttttcaaaatgtagggcattctagcagatggcaaagaaatcgctgtcaagcagttatcggctagatcaaaccaaggaaatcgagagttcgtgacggagattggcatgatttcagctgtacaacatcctcatctagtaaagctatatggatgttgcattgaaggaaatcaactgatgcttatatatgagtacttggaaaacaacagccttgctcgtgcattatttggtacatctcggtcacctgatttactttaactccctttgg

SEQ ID NO: 3657 - DNA, 669 bp, Gossypium hirsutum
  misc_feature (652)..(655): n is a, c, g, or t
tctgaatgcctagtaattccattggctgcaagtagccaggaggtaccacttattaccctaaaatgctttctatacaattcaattgcagcccttccgtagttccttgatgctttggttaagcttgtacttcagatttacatcctccttttacttgtttcaggacggacttagtgatcttcatgagttggagagttcacttgcttcatttcctattaagccacttcaagcactcaagtatgacattttttatgctttcatgaccttactgcaaacaatttattgttataacgtaactaggaggatatagttattcacatttgtcagtcaaaaggacttgtaggtcgtaatttttgcaaatagaaagcagtatcttgtcacaagtttaataatttagttttgaagttattgacttttttgttttaccctcttctttatatactttatgaacatatacgttatctattagactaagtactacttcttttctggaaaaagaaagattgccagtctaagtggcttttggttattagcttctttccattgtttttccaactttttaattggtacagaggctgttttgacattggtgaagctgagggtacaaatggtccaaattggaaaggtgttacccagttggaaagaagctaatagnnnnaagccacttagact

SEQ ID NO: 3658 - DNA, 639 bp, Gossypium hirsutum
tttcgcaactgtcggtgtgttgctaattatggagaccctcagtgctttcctacatgctttgcgacttcactgggttgaattccagaacaaattctacgagggagacggttacaagttctatccattttcattcgcattactcgatgatgaggatgattgatgcgatgcaccgaatcgaatacaaaagaatgtatgttgaatggacttgagcgtggataggtaagaagttatgttgattttttcatttaaacatgacgaaaattggggatatagattaccctatatagttggagttgaggaggtttttattaaagccgcctaaggacacgctgcttctttacccctccagttgataaatagtttgttattggaagcaataaatggcctactgcttgggctggtatttatatgtggtattcagctatgtatgaaatatacttgatttaatttatttttctatttaaattttatgaaaatttctagttgctctggttgcatcaactaggtatcatgtctttatgacaaatgatattttatggaaaatatagtatatgatttttttttaaaaaatgtagataaatttgaaaagatacagtttagtatcatcatataataaaatagcgagggatgaatttcaaa

SEQ ID NO: 3659 - DNA, 627 bp, Gossypium hirsutum
tgtatggccctagctatgacctgttgcacgaaaatggcacaaaggttaaaccaatgtcgagcagcctatacggcaatttggtgctagttacctcagaggaaaaagatgcagtgacaaatgcaatgttgcctctccaaagggaaagtatgccttcatttctgattgttgtggcgaagcagtcgaatattccgttatatcgtttgggaagccggcctgaaatgatcatctcgttctggttttgcatcaagagcttcactcgctcaaatggagcacctgctgtcctcataacaccaagaaaagccaatccttttataaaagaagaagctttactgttctccattggggctccaacaaaagccggtggtgaaggttttacaacagatacggcacttccctggatcacagggaggacaggacttcgcgagatccgggtcagtgaggcaccactgcaacgaatattttccattatcgtagtgtagttaaaatgcctgaatgagaggccaggctgccaatgcatcttttgtgatataggtggatgcaatggctcatgctccattctgcaactcactcttgtaacctgcgatggaacaatcaaacaaatatgacaaaaaacaatagcattacgcc

SEQ ID NO: 3660 - DNA, 614 bp, Gossypium hirsutum
atggtttgtcttttgctgcttaatttatacatgtcaaaatgttaatacatatttggttgcttatccaagctaaacccgatttttctaaatttatttaggctgcaagagaaactggagctttgaaggcggcaaaggacaagctagagaagcgggtggaggaacttacatggcgtttgcaacttgaaaagcgattgagggtagcgtagttatattattgcttaccaaagccttttatctttttacttgaatagtttaatgctgtaggtggtattcttatagtttactagtctatgctattcttatttgaacttaattgcagactgatcttgaggaggcaaaagctcaagaaattgcaaaattgcaagatgcactgcatgaaatgcaatcacaagtggaagaagctaaatctatggttatcaaggaaagagaggcagcacgaaaagccattgaggaagcacctcctgttgtcaaagaaactcctgttattgttcaagatacagaaaagataaattcgttgacatctgaagttgagaagttgaaggtattcatccattcttgtctgagcatggtatataatttttccttaagtagagtgtggctgtttgattatgctg

SEQ ID NO: 3661 - DNA, 627 bp, Gossypium hirsutum
ttccttctggccctcttctttctcgttttcttaaccagagttccgacgattttatccgctgacgatccgcgggcctgcagggaaacgctaacatgcggaagcgtatcaagtatcggttacccattctggggaatgaaccgtccgagttattgtggccaaccaggatttgaactgaggtgcgagaataatgtaacggaaatcctgatgaatgaaaacaccttacgagttcttgacatagaccctgaacgacagagtcttaaggtagctagggaggattactggaatggttattgttccacgaaatttatcaacacctcaatcgacttcgatcacttcaattacggctcaaacattaggaacctcaccctattctacggatgcaacccgctgccaacctcgacatttcttcctaactgctccatgaatagtacacttattgatgtgtcatatgctgttacaaacatgttgggtgaccctcgctatggcatatgccgtgaaattgtcgtagttccggtttatgaagctgcagcaaaggacctggaggtgaaccctatgattatgcaagctgctttaagaggaggtttcgaattgcaatgggaagcggataatgatcagtgcagaagatgc

SEQ ID NO: 3662 - DNA, 611 bp, Gossypium hirsutum
tcttttggggactttttcccttcacggtttccaagactgggaactccaacaagtgatgcgccaaggaaaagcttgctagacttggcagacaacttagtttcaaatacttcagtttggggaaaacaatgttgccttgtatttcttcaccctcacatgctatgatttcttgtatcatctcacaatcatctatgctcaggctttctagtagcgtcaggctctttgctgtcgcgcatgccattagattgatgaatccatggcatcttgaaacttccatacttaatagatttttgaaagacaacaaaaatggctctaaagtctttaacgttagctctggaagttgagacaaccttaaggcctctaactgatcgcatgccgatgcgtgcctttcctcattgatgagtccttcaaacaaagtctttaatgtcaactctggaagttcagacaagcttaattcctttaactgagagaacgctgatgtatctatttcattgtggaagagtccttcagaccggactaattcagaaatggaagcattgtttataacaagcttctgaaggtttggtagtgagcgaatgaaggaatatgaagagtagtggatgtctcaggaaaga

SEQ ID NO: 3663 - DNA, 565 bp, Gossypium hirsutum
tttcgggcaagacaaaagaggtttgatagctgttatgtttttctccttatttcaggaaattatgggatcattgatctgaggcttgatagcttacaacagattcaacaccagataactgttatgtttttctccttatttcaggaagttgcacaggaatgccaagatatgaactggggcagatttaaaaccctcctgacagatgcattggttgatcatttacatcctatacaggttctcagcactatatgcaacattatttttatttttttatcgtgcatgataggaacatatacatggtattctttttatcttattgtgattaggcatgttattaccccaagtggacttaaggtgtgtacttttgtattagtactttatcctagaaatatatttcaccttaagattaatcatgttaaatcaaatgctggcttacaaataattcttatcatacagtcatgtttggggggaagaaatatatatttatggatcttctttgactaattattttcgctttcaaatgattataatttagtagtaaaagcattcttgatataattctgttctt

SEQ ID NO: 3664 - DNA, 640 bp, Gossypium hirsutum
tttcctggcatcaaatcattcgaggtcaatgaatttagaccagtacaggatgagaactgtgaaagattctctcttgaaaatgaaaatcctgcatcttctgataagtttgatgttatgaatttgaacagttccattcagttgcaatgtagtagggttgacacttcacctaaattacaacatgagaatgggtgttcttttggttcctttgactttctaaagcgtaatgagaagggtttttgcagtactttgctagcggaaagagctattttaagccattcccagaactctggagtggacgtggagatgtcagttgctcctagttctggagatggagtggtgaacattccatctgaaagtgaaattagatccaccattgaaagtactccaaaatgtgttatgttctctgacatcaaggatgatagcagtctctctagaatttttcgtgccactaaaacttgtatggttcaatgctctttgcctgcttggaaagagtttgttgtgcatagaatttcacatgctcttaaactggaagaggagcttttacccaggtaagtgttttgttgtcatcaagatatgctattgtgtctgctgttgaggactgtctatgagttctttacctcttgcttgattcattctgatg

SEQ ID NO: 3665 - DNA, 639 bp, Gossypium hirsutum
tcggtgttcattgttttgttcattgaagttgactctttacatgcagaaagtactctaattattaatcttgtgattattaaataacacacttgagcatctttatcacaggactggaattgcatacatatcaaatgttgcggttcgggagagattccgatgtaagggaatagctaaaaggctcatagccaaggctgaagctcaagcaaagagctggggcttccgtgccgttgcattgcactgcgatttgaacaaccccgatgcaaaaaaactgtacaaagaccagggtttcagatgcattacggtgtcggaaggagcaaactggccccagccgaagaccgcacccgatgtgaagttcaacttcatgatgaagcttctaaacacccctactaccactgcataaattctttcacaaacattgaaaaagagaatcggataaaactcatcaaagatgcaaatatatagggtgtctgaaattagttgtatataatttgaacatgatgggattcgcttcaaatatttgtaggtactgtatttattatctgtgagtgttggttacagatacgtttaatcttttctaaatgaatttctatatttaaagagtaatcatatcctcatactcgtgtccggataaatacttga

SEQ ID NO: 3666 - DNA, 656 bp, Gossypium hirsutum
tttatgatccgatttacaatgagagaggaacaacagtaactcagcagaaattataaacaaatattaaattggacgaataagaaacaagatttaaataaatgaaaaataaaagatacaaaagaataacatatccaccttatatgcagcatctttcaaggtctgtaagtgctccagttttagcttataagcctttatctcttgagcctgatccttgtgaagcttttttataacctccaaggctcttgtatatctgtttacaggcagccattagcaaaagaatatcctaaaacagtcacaataagaaaactaaacttttattgtggaaaaatcagcaaattaactaccacagttaagaactgtacatgtgttttaggaaagacatgcaaaatgtaaaccaaaaccatgcaaggaaatccatcatgctttactaaaagtaaagaagttgtaacagacattaaacaatatccagatttgcaatttcagatatataaacattttatcctgtaacacaaaagaaatatgaaaattatgattcaatcctaaagagattgggcattttccttagaatattagatgaaaattctcaacttgcaaccaaaacctcaaggagaaaagcactatgttagtaggcagtcttgcttcagataagttctctc

SEQ ID NO: 3667 - DNA, 599 bp, Gossypium hirsutum
tgttcgatccttagcacatggattgatcggacttgcacgtagactacgcaatgtatcatcatctactgagctatcttcatcagccacatgattcgatgagtcaactttttcatcctctatctgtccacaaagttgcacatatttttccctataattaaaacaaaaatcatatatgtgagaaggcatggccgaatatagcataaaaaccagccaaaataatgttttcaagtgaatgagttggtgatgaaagcataggctaaaatccgtatttagatttgccaatgaatttaactgaatagaacctattaacaaactgggggggggggggcagaaaaaaaaacgaacgtgactacaaattttggaataaaggttaacttactgtaatagtttttctattcgtcttccaaaagtttctacaacaagggcatctgccttcctatcttggatggcatattttagttcatccaggcgttcaagcataaactccaatgtattgtaatcacaatcatttgcattttcaacagaacgagcaatatctagcaacttttgtatctgcaaatttaagacaaaaactcaaaaatcaacaccagaatatgctc

SEQ ID NO: 3668 - DNA, 643 bp, Gossypium hirsutum
agaaattttcttgaagtgaccttcaaggccaaagcaagttgtttcccttaatcaaaaaggttgtctcggaaaagcaggctagtgttattttctaaaacacaagtatacctctgaaaaaggatgcttgacttctttgtttgcagtgcctctgcaagctcaagttccaatgcaagtactcgttctaatgcatttccagtttctgaatattcattaaacataggaaatatgcttcccagttcttcattcacctgtgcatgggcaaaaagtgagaacctgattgaattactttatcaaagttttatggaagaggtccatattgatccaccttatctaactgcattaattcttgctgtaaacctggaaacttggtgtcgaaatgatgagcatcttttgaaagaaccagattctcatttttcatcctttccagctaaaagcataaaaagaaaaagaaagaagagtaaattaatcaccattactaggtattatcctaaagaaattttatgccacaaatgtaatgattccccagctcaacaatgtaagaagaaattgcaattgaattcaagtgagatcatcactaactggcaccttatgctttgacaataaacatacctcactagttaggtggtccatgctagatcttaag

SEQ ID NO: 3669 - DNA, 588 bp, Gossypium hirsutum
  misc_feature (56)..(56): n is a, c, g, or t
  misc_feature (523)..(528): n is a, c, g, or t
  misc_feature (566)..(566): n is a, c, g, or t
  misc_feature (569)..(572): n is a, c, g, or t
ctgcaagacaaagcataaaattatatgaacaatagatctcattttgattctctgcnaataaataatctaaaatcagattatcttttgtttaatttgattgggtttttggttttatatataatataataggtggctcgtgcatctgctttttcttttggacttgtttatgggagctttaagctcaagtacctcaaggtacctccattttatttgcttttatatattttatgtttactgagtcttgattatgtttttcgcatttcatgttatcttattgtaattggattttgatgtggttcttcattatctgataagatgcattttcataaccctttttatttgttttagttttaattgttgttattagaacgaagatattaggctatgttgctccgactcattcggacttggtttcggaaatatgctcaattgggagggttgggttagttttggttggcttaatcagagtcgggtcaattcgagtttttaacaatttcaggtcattttagctatggatcatttnnnnnncaggtctgtttcatgttcgggtcatctaagtttggtanccnnnncttaaggaatagtttt

SEQ ID NO: 3670 - DNA, 623 bp, Gossypium hirsutum
aacaaattcacttatttgcttttattgcaatgaaataagcctcaagaatcaccaaggttacagaacacagattttttacaagcatgaagtatgcagcaggcttatcctccaatataatggttcaagccaaatgataaaatttcactggccagcagtcatattagcaaacattttcactggtctaatattatatatatatacactattatttaagcccctctggctgagttggtgtcacaagttaaccaggcaccaactcggtttggggaattttgtgaatgccttttcataattaaaataacttatactatttgagcgtatgttagtctcttaaaaaacaaataaaaaattgcatgtggttgaatttgagcccgtgctatttacattactaaaacattatctttaccactaaatagaacttttagtttagtataatatttacattttaattatattatgcatactttcatgtgatagaatttctactatatactgaagtacctatgttcaacaccccatgtctagccttctaaagtccatctaagtacatacaaaaattttgaaaacgattgaacatacccgtgttgggtacatatccatatttcacactcaaaccagagtcc

SEQ ID NO: 3671 - DNA, 654 bp, Gossypium hirsutum
gactagcacaaaaaagctttgcatctatactttaatttgtgtgtatggtacatggataagatcctataaggaccctttaattcttggggttgtgtgtacatgtatcgttatttgacacttacacttgattccgtaataatcattttgtcattactggtgtagccgccttctttggagagggtaattgcctcaactgtagtaccgaagaagtcttgtgctgtgatttctcctcagatgggaagcttctagctatagcagggcgtgaagcgaaggtggtacttttttcttcacaagattttaaatattgtataagtttaaagctaatttcagttttcttcttgcaggttatgttttggaataccgaagatcataataaatttgtaactgatgaaagccattctctgcccatcagcgatgttcgatttaaaccaaattcaaccatagttgcaacgtcttcctatgacaagactgtccaaatatgggattctgctgaagtaacaatgttcctcttgaacttcacatatttatttagtattgtcaacacatatcatatctggcattcaaatcatagaccgaatgtacaacatttgcttccctttttgatgatatgtcttcatttctttgacatggaaggctgggaaatctcctttaaag

SEQ ID NO: 3672 - DNA, 618 bp, Gossypium hirsutum
  misc_feature (61)..(65): n is a, c, g, or t
  misc_feature (67)..(67): n is a, c, g, or t
tgtttattttgggtgacaggtacgaggttttcattgtcgataaagttcttttataagtgtnnnnntnaacacattgaacacttttgagacataaactccaacaaatttaattaatggttctaatcaaccatctaagaaataatcattgacaaattgaaagatgaaaaatagaagaaaacaaaaataagatataatccttgataaattgaaatatgaaaaatagaagaaaacaaaaataagatataatccttgacaaatcgaaaataagatggatgatggaaagattgtctacacaaatggctctaggctacccctaaagttgaaccctagtaaattggctaaccaactctctaaggctgaaccctagtaaattgggggtgagagttctcccacggtttcaaaaaaaaaaatttataaaccagggcctttttatggaaaaaggaaaagcttaaatttacttcaaaaaaaaatggtggagaaaaaaaaaatggaattaatccaaaaaaaaaaaaataatatacaattggggccatatttcaaaaaaagtcaaaaattgaatccaaatatctttaaaccccaattaaaaccccaaaacactaatttccccgaataatccca

SEQ ID NO: 3673 - DNA, 654 bp, Gossypium hirsutum
  misc_feature (18)..(20): n is a, c, g, or t
  misc_feature (644)..(644): n is a, c, g, or t
  misc_feature (646)..(648): n is a, c, g, or t
tgagaaaaaggattgccnnnggagggattgcccataaatgcttacttttcctggtgtagaaattattattgtatctcaaaggagatctacacatgactcggactcggttgcaagggaattcaacagtgtgtcggtacaaaaatgtcacatttatgtaatgtttactattatggtaacaaagagaggataatacattgtcaaggaaagttaaatctatttctaatttatcaagttccgttgaaatatcaattgcaacacagataccgttaatgttgcaacatagctccataaaccatgaactaagctaaattaacacaatcagagcaatcaataccattttcattaaaaaaaaaaattttatggattttatggaaaaacctctttcaaaaaacatcatttttcactttccatattttataaaaatttaaaattcaaaattctaaaaaaaaggggaaactccccccctatccccatttttttcccccatctttcaccaaataaaaaaaccaaaaccctcaaaaaaaaaaaaaaaaagacccgggggcataaataatcgatcccccccccccaaaaaaaattgggggggcagggcccttgacccccctaaaatttttcctgaaaaaccttttctttttgccttcaanannnaaaaaa

SEQ ID NO: 3674 - DNA, 648 bp, Gossypium hirsutum
gctgcagtaggttttgtgagttaacagatgactttgcatctgttgtcttggagatgatggtgaatatgatggcttcaccagaaacactgccggctgtaaggttgggaggggcaagtgtttttactagaatggtttgctcatattcagtttcaaaaagagcttacaaggttttgtgcttcactctcctcccattcactcatatcctgaaacatgcatattccaatttgaatgtctaaatacatcttgccgctagtcatgcaaattatgacctggtctccaaaggacaattttatccagaaccatatcatggaatggtacatgttctttctaggcatttttgacatgtttttttgaagagaatgtatttattgttaaattagctattgtctcttgtgtctgttttaaagaatcgaatcttacacataaagtcatacacacatatgcattcaaaattttcaaacatatgatactccaatttggcacaaaagtgtgaccattgttgctatgaaagcaggaaaacccgtgcttgtgaggtactattggttataaaccttcctttttcttgtgctttaaaccaaaaattagagaaggcatgtttcacttagcacaaagttgggaatcaaggatattgtcctgatcatgtcctgg

SEQ ID NO: 3675 - DNA, 607 bp, Gossypium hirsutum
catttgactctgactcatacagctcttgaatatattgatcttatactgtaagctgcataatttgaaacgtaatcatgcctctgagggtgcatctatcttttgaatatattcagttgaatctaaaatcttattcttgaagcagttagtttgaagctaatgcatgctatgttgcagcttgatatgctacaagaagagaatgagaatctacttgacaaggtgagcctttatcattactgttgtgttatctaatgagaatctacttgacaggtgagcctttatcattactgttgtgttatctgcaacatgtagcatttatgcctgcgtatgttatacagcttcgttctgctgaagaaagacgtgaagaagctgaagcaagagctagggagctagagaagcaggtccgtttttcttcttctttggctgcaagatcttctccccctgtttggtacagcatggatggcttatcctatcaaattatgtagcatcatctgagttgtttcatcaaatacttctactatatgaagcacagttgttggtttgggacactttcatgatttagacatgatgcaacgttcataaatacatatgggttatgctttgctgtctt

SEQ ID NO: 3676 - DNA, 612 bp, Gossypium hirsutum
ctccgaaaaccgggttgtgccactgccaatagctcccgtagatggtccgtccttagagtcactcgagtttgtaatctttaatggttccctgctagagaattcaatattagttcaataatgtgttcttttagtacaaagttcattcaactgtggagaacaccatgggaatgccatatgaaacaaccaacataccctgatctatcgtaagcagcccagtaatcttccagacatatacataacagcttttggctgaaaatttcagataaccatatctttaatttccaatttactaaaaaaaaggatgacttaaaatattatggtagaaatattattgactacctctggagcaagaatgctaacaactgagaatctaagggctgctgagttgagcggctgaagtgagcaaacccagaaaacacatcatagcaaacagtaaaaacttttgacaatatgatttctttctctgcttgtatcgtgtgctgcttggaccttcctttatcagaataccttgtgcaagaaattgtatcataaaaatcaagccatccaatttcatcagttactacctgtacgtataatgttagccttcgggttagttctggattcaagggttgg

SEQ ID NO: 3677 - DNA, 648 bp, Gossypium hirsutum
  misc_feature (35)..(37): n is a, c, g, or t
  misc_feature (580)..(581): n is a, c, g, or t
  misc_feature (606)..(607): n is a, c, g, or t
  misc_feature (638)..(643): n is a, c, g, or t
tagtctgttacttaacttatgcaaccaccataacnnnttttggaaataaatgtataaaatatgaactccgaaaaacagcaaaaaaggatttggtttatttcaaagttcccccagatccatatttgtaccttagaattggcaacagtcgatttaaccttgttcttatgagctgcaatgaaacaaattttcaccaacagcaaaagcataattagttttaattcatattttatctgctactactactaatattaaaacaatgtaaacaaagagggcaaaaaacacaaattaaagtttacctgatttaccatgtcggggtaccaaaataaaagctccaagcaagacagccaaaatcaatgcaataattgctatttccatatctcaagaattcagattcctttcactgattaacctagattgatccaagtagcaatttaaagggtaaaaaaaaatcctcgatgaacataatttgttgagcttttttcaactaattcctctactccttggaggatgattagcatcatcccccccctaatattgttgaataataatactatccttgctgtttttttttttttttcannataattaaatgttttttttttcctnnccccatgattagtgtacacaaaatgtttttnnnnnnctttt

SEQ ID NO: 3678 - DNA, 622 bp, Gossypium hirsutum
acgtagtcattttgattaatgctttggtggagtcaattggaaacagagttgaatcagcaaccatgccttgtttctaaattagttccatttcatggatgctaatgctctatttgagatttcttctgcattgagaaatgatgaggtttgatatatcaatctgagctctagaaagtagaatgaattcatgttggggaaatcccaagtgtaactccaagggttcatgttgtgtgtactggccttttattcattgaagttcaatggagaaatcgaaattttaaaagattgcatatcatttctcaactttcatgggttgcatcccacgttacgagctatctatttgaagactttattagtttaaccaagctcaggccaagactaaatatgtgtcctctttaagtaattaatagtagttactccgagagaatgaacaggtacaaaactgttgtctatcttaaattaatagcacgaatgcagagcaaatgagagctacttgctaagggaagttctcaattagttgcaaagcataagttgatcaatatggtccatccaatcagttgggcatacttggggacagacattgttgtcctcagtttgagtagcagagtaatgagtcgagctgaat

SEQ ID NO: 3679 - DNA, 609 bp, Gossypium hirsutum
ttggttttctacactgatcctattgcatgtctaattagcagaaatctctattgcataaaaaattgcagtatatgattttaacattgttttgtactacaacctttaccaaaacccacgccacaaaggtgtgctactaaatgatttaaaaaaacaaaattggattttttctccttttaaatctaatagagaatatttaattgtaggaatagcttgtaatatgataaggaaaacttgcactataatgaggagaaaaataggacatttcagaaggctatcttctgagtttgatagaaaatgagttctacaattttaaaataattccaagttcatattagtttgaagagagtggcttttagtattgtaacatgaatgtctgttgaggaactagtaatatgctgtatagatcggtcacggaaggcaatatcatatttaaattgcagcattttctttgaggctggattgtgacaacaaccttctctaaacaaaattgttcaagttagcttagctcaaatcaaactaattcccacctaaaaggaagagagagagaaaagacaaagatggaaaaatgaagaacattttctttaactggtggactgttatgatcatgtc

SEQ ID NO: 3680 - DNA, 638 bp, Gossypium hirsutum
ggctcctctggattcaccaaacacggacgggatcgatccaggtgaattctttttaacttttcccagtttgccaagttaacctttaactctttttcttactgatacgatcaaatgcatctagattcttccgatgatgtttgcattgaagactgttacattagcactggtgatgatctaatttccatcaaaagtgggtgggatgagtatggcatttcatttgctcgtcccagcagaaatattatcatccgccggcttactggacacaaccaaaacggctctggaattgcaattggaagtgagatgtccggaggtgtttccgaagtttatgcagaaaatatctattttttcaattcaagcaccggtattatattaaaaacagctcgtggaaggggtggttacgtgagaaacatctatatatcaaatgttactttggttggtgtagacacagcgatattcttcaatagtaatttttctcagcatccagatgagttttacgatccaaattcgctccctgtgatagaaaggattacttttaaagatgtcataggagataacataaaagttgcaggcctcctcaaaggtatagaaggggacagttttcgtcatatttgcttattgaatattactctcgatgtacc

SEQ ID NO: 3681 - DNA, 570 bp, Gossypium hirsutum
tttttttgctcgccttagtgacaatgaaccttgtagctcatatgatcacaaacatataatcccatggactttcaaaacaataaacatagagaactaaactagtagtatagcttcagttcaatttggttttgcaaatttgtgattaatatgcagttttctggttttcttaaaggccaattgaatgccataattgatggaaccaacctgaatcgaataccacttatttggatcaattcagaccaccagtttctcttctttttttaagtatttttatatagtattttaatttttttcactaactagaaataaaatattctttttatattataaaaagattataaactaaatgacaaatataatttatttcagtttgaatagttactattttttaacttccaaacagaaaactataccaaactgaacattataatccaaattgatttcctagttttctcggtttgtttggtcgaccctaaactaaagcaccgaccctaaactaaagcacttctatgcatagataatgtactcaacaatctagagaattaccattatgcgtcaaccatactgtca

SEQ ID NO: 3682 - DNA, 566 bp, Gossypium hirsutum
tagattttttatggccacgtaattctgataatgatctgcaatattataaacaacagctacttaattatcgatcatgaaacaaggagattacatcaaatgtttttgaatcactttaccttcgatatctatgggtttaactttcccatgcgaatggttgaattgtagttggatttggtgtgcatctccaacagtgttacattttgatgacagtaataataataacaaagcaaatgcaaaaagcttggcaaagatgctactcgtttcttccaacatacctctgagtatagttgttgttcctatttctccttgaaaattgaattttggatcaacggttgtacttttcttggcatgttttcacattgttgaccacccctaattgtcttactctcttcattggaaagctcctagtaattgtgttaaggctatgttgaaatatgaagaaatatgattggaagaatattttattattaatttattataagatattttatattaaattgtaatattttattgaaagatatttgcatggaaacatgaagaaaggtcttcatgcttctaacgtcact

SEQ ID NO: 3683 - DNA, 599 bp, Gossypium hirsutum
gacgatgaagcagagaacccctgagctgctcgaactcagggcgtagggccataaggaactgcataagcgggtctcgttcctgtgatcctaaaaatctgtgctgccgcacccagcaaactccggctttcgagcctacaccctctattctcattcgctgctggaattcgacctccgttgatggatgtgcttggccggaagggtcctacacggggtcaatagctagaaagctcctttgggagagcaagcttcgagattcactcggctatatatccgcaggacctgctcgtgatcttgacttaggaacgaattctccaagtgcaccctcttccttccttgcctggcttcttagcctatcctgctcctacagctgctaggagttacatgagtaaggggttcagcccttctttacgtttacgtgcctatatcacgagtttacagcatgctgtcttttatggatggcttctccgcttacaatcaaatgttgatggcagaggaggacagagaaaggacatcatgaataactacatagggcaccttctcctaccgggtcatggccttttgacttcaaaatgccggagcaagatatcaaagggagctga

SEQ ID NO: 3684 - DNA, 622 bp, Gossypium hirsutum
acatgctgtcttctgtttcagcagcagaattccttctacgctttcttgtcataattcgagtggagttaccagaaacactttgaggtgcaacttgtgcacttccaggggagactgttggtataatatctcttctgccacccttaacacgtgcctcttcgcgcagattttgcagcctagtaacttcgtcagaaagtgctttatctgccataaattttagcattcagtaaaaatagaagagccatagaattgtttgatggtttcactagaaagttgaaacaaaaaaaggcaagtcatcagagaagttacaaattagatcctttttcccccaaaaaggtaaaatttctctgaaatttatatataattcagccaataattaccagtgtctgcacatttatttatcttattatgttttcgaatgcaccatttacaaattatgatactgtctttcaaattcgtatatgtctagtcaatgattgaggcgttcaaacaacacttgacttcgtatgctagaattttaagaatattatgaagaattcatgtagaattctaaagaagaacttaatgatgaaattttcttaatattttgaaatttaccgcctgatttaccagccttatataaaaa

SEQ ID NO: 3685 - DNA, 613 bp, Gossypium hirsutum
acaaagttcaaagttgtggttaagtgagcttagagaggtagcttttgatgctgacgacttgcttgaagagtttggtcctgaagcgatgatacaagaaaacgataatagcttgactgaacaggtgacaaacattgttccttctttgagacctttcataacatatcttaaaaagttgcctgaactaaaacagattagggagagattggatgtgttattggatgagaggtctaatttcaagctcaagagaaaagatggtgataaagcgattaaaagtcaacagaaaagagaaactggttcttttgtgattgaatccgaagttatagggagagaagaagataaagaaaagatagtagacatgctacagttaactgctgaaagtagagccaatgaggttgtctcagttattcccatagtgggtttagggggacttggtaaaaccacacttgctcaactggtctataatgatgaaagggtgatgggaaattttgaactcaggatgtgggtgtccgttaatgatgattttcatgtgagaaagattgttaatttgatggtagaatctgcaactaggagaaggtgtgatgatcccatagggatggatgttcttcagtcgaaa

SEQ ID NO: 3686 - DNA, 594 bp, Gossypium hirsutum
ctgctcacatgacgaatgactcgaccaaacttttcgatgctcggttgtacaatggaggaggtaaggtcattataggtaatggtctttctatacctattaagcatgttagtggtttatcaatcttggctgatgattctagtccattgttgcttaaggatttattgtatgttcctgatattagaaagaatttattgtccgtttctaagttttctaaagacaatggtgtattctttgaatttatcctaactactactgtgtcaaggatttgaagactcgtcagatgttgctttgcagaagtgagttgaataggttgtatcggtttgatactgtcaagtcagactttgcttttaatgctgagagtacatctcgtacagagtctcttccaccacagaggtcagatgttaggtttgactggtggcatcgaaggttgggtcatctatcaaatagtattgttagtagtgtcttatatgcttgtaatattagaatttcaagacataagagctaatcatgccttttcattcttctgactctgtgtatactactcatttagaacttggattgttgatgtataggggccagctccttgctactcct

SEQ ID NO: 3687 - DNA, 616 bp, Gossypium hirsutum
tcgttatcagtcctccccggtaattgtgcagcaataatagaccacctgttaacacgaccatgcaagttttgtttcaaatgaatcgaaaaatatagggtttgttgactttatgaatgatttttagaaccaaaaggtacctgctcccaatactgatatagaggctgcaaataattttatcttcttcttcggagaatcctccatgcttaatatttgggcggagatagtttaaccatctgaggcggcagctcttcccacatctcttaaggcctaagatacagggaaaaaaaaacccacccctttataaatctcatcatagaacacaaaactcaaaattaattttttgatgatcatcactatttctgctggaagtaaggaagaataaaaccaagcagagcagattgatggatggatggattgattttaggtttaaaaattaccaattttgtgaggcaaagcgatccactttccgccagtgccgtgctgctcgatgtatgccttgagcttgttgtcttcttcaggtgaccatggtcctttcttgacgttagctttgtcacagaaaggagctctccccatgcttttttttttttcccccttaaaattccttttttaacttttc

SEQ ID NO: 3688 - DNA, 618 bp, Gossypium hirsutum
attcaaatatgcatcagcaacaacagcagcagcagcagttaatggctcaacaaaacaacctttcaaatatgcatcagcaacagttgggtcctcagagtaatatttcaggactacagcaacagcagcagcaattggttggaacccagtcgggtaactcaagcatgcaaactaatcaacaatctttacacatgctatcccagcccaaggttgcactccaacaaacgcagcagactgcacctaatttactgccaactcaaggacagacatcccagcagccacaacagcagcagcaactgatgtctcagatgcaatcacagcctactcagttgcggcaacagttgggtttgcaacagcagcccaatcaagtacaacaaaatatgcagcagagacttcaagcatcaggtcaaacatcaagttccttgcttcaatcacaaaatttgatagatcagcaacagcagttgtatcaatcacagagagctgttccggagacatcatcaagtatgtttttgaatttttgcagttacatactgttgctctttgccttatttctttgttgctttctgatattgtgttatttaactgatctctaaatatttcctcagatagccctgaaattct

SEQ ID NO: 3689 - DNA, 633 bp, Gossypium hirsutum
  misc_feature (609)..(609): n is a, c, g, or t
tgaggaggactacgaaacttaagtgtgactagaactttgctaatggatattagaaccagcagcgcttccacaagcattttcagttgtcgaggcaataaacatggagaggtagcttcttgtcaggtatgaggaaccaagcaaagcctcaagatgaaactggaagccctgagatttttgttttgccttcgattttactcgcctgtaattggaagccctgatttagaatatagaaggtagctaaaatattaaacaactgtcattgttatacttctgttgtacttttgtccttgatccctttgcatatagatgtgttcaatgtaagaatttatgttaaatttccgttggatttgttttgttctttgtttcggggataaggaacttaaatcaaggaaatcgttaaatgggtgtgtttcttgttttttttttttaaaaattattttctttccgcaatttggcagttggcccatggttgatgtttctaatttccccctatttttggaaatttgggtttgggttggaaaaaaaatattttttgggggcaaagaatttaaaccccggaaaaaagaagaagggtggaaaaaaaaagggcgggggtggggttccacctgncaccccccccaaaaatgagggggg

SEQ ID NO: 3690 - DNA, 588 bp, Gossypium hirsutum
catctcctacagctctgcagatggcttgttatgtggatctgttggctatatagctcctggtatgcattttcttctttattgctctattttagctagaatcataactttcccatagaggattaatagcataaacttctactttttcctttagtttttacactactagtgttattagttaaactacgcagtctctgccatggctgacaacatcagcctgcgccatttgaatagctacttcattactaaaatactcactgctgttgatctttcacttggttaaatgcagaatatggaatgggaaaacgagcttccactcaaggagatgtatacagttttggggtccttttgttggaaatagtttcgggaaggcgccccacagatgatgatgaaggttcaagcttacatgagtgggtgaaaagtcactatcctcataatcttgaacccatagtaaagcaagcactgctgagatgcagccctggttcaatgccaacaaattatgataaaatatggcgtgatgttattttggaactggttgaacttggccttatgtgtacgcagtacaacccttctacaagaccaaccatgcta

SEQ ID NO: 3691 - DNA, 620 bp, Gossypium hirsutum
tttcgaaggaagtgtctgaaaagctggtatgatatcaatcttaaaaatctattgtgcatagatgctcttctttaatggttcttttatatatgtgtttggttttaataactaggatgctattaaccgccataaaagtgaaattgaagctagggttactgctgaaaagtcagttgcttctttgacagaagatcttcagaaagctcagcaggatatagcagctgcgaatgagagggtagggtaatatacatattgaatttgatgctattattaaattagtgtctacttacaggctgaattttgttgtattttgcaggctgcatcacttgacaatacacacaagcgattacaagagtacatcctgagtcttcaacagtacaattccaaattaatcactgaccttgaaacagtccgtgagtcgctcaaacgtgtagaaaaggagaaattgacaatagtggagaatcttagctctctaaggggccactgtagttcattgcaagagcaattaactttgtcaagagtatggtttttgctttagcctgctgtataatttttcttagcttattcagttgtttcttttgcttcccttcccctttttccctccatatgcttcattggagttg

SEQ ID NO: 3692 - DNA, 503 bp, Gossypium hirsutum
  misc_feature (432)..(433): n is a, c, g, or t
  misc_feature (436)..(436): n is a, c, g, or t
  misc_feature (481)..(484): n is a, c, g, or t
  misc_feature (487)..(487): n is a, c, g, or t
  misc_feature (498)..(498): n is a, c, g, or t
attagtgttaatatcaggtaaaactcatagttactttcagctacttacgccatccgtaacgtctaagcaagcaatctcccttagtttccaactagttttcaattgtttgatcattttaaaaaagaaataaataaaaagagtatactcatattgaacacatactcatgcccaaaactcatcaagtttgagtaacataataatatatcacgcttttgtacattatattgcggattcatgatttttagtcaagtgatagtaactgatccagaaaatttttgatgcagttaccatatggggaaggtctctcattagcggatgtttttgggcacttggagagaaacaggtaaacatctctcaaactgccttttcctttttcatttggctaaactaattaaaaatcccttacgctttaccactgttttttttaaatannccncgtgcacttctcgtgtgcctgagaatttaaacacacatacccatnnnnctncttattttttntttat

SEQ ID NO: 3693 - DNA, 603 bp, Gossypium hirsutum
ctatgtgcacgcaatgctgatgctgctcgctcctacattgacaaaaataaatcaaatgaaaatttgttttatctgataaaatatcagaagtgaagttgaatagaagaaagaatcaaacaagacgtcacagatcacatgcaaaataccttcctctcagcttccaacattgcatggtagttctttgctgcacgctgtaatgctcgtactgtatggttcctgttccaaaatgatgcaaatttatacctgactctacctgaaataagaaaagaaaaacaacagcaacataaacacacctttactcaattcatgctaaaaacggtcttgctcatgaaatattgggttattcctaacaaagcaataatctacgaaaagatctctgaatggataactagaaaagggaaaaagcccagtgtgtaagacatcaactaatactgtattttaaaagaaaaacatttcaaacgaccacaagagaagtatgtaaaattttaaatgataaagaagagcgtagacctattctgaacttggtaaaacaataaacactaaatttcaaaaaggaatcggtaataaataacatatgaagtttcagagcacagtgacacacct

SEQ ID NO: 3694 - DNA, 628 bp, Gossypium hirsutum
gctgcttaatgatatctccggtgaggctcgagacggtgagatactcgctgtgcttggagcgagtggttcaggtaagtcgacgctgatcgatgctttagccaacagaatagctaaagggagtttgaaaggaaacattactttaaagggcgaagctttggagtctcgaatgttgaaagtcatttcagcttacgttatgcaagatgatttacttttcccaatgcttactgtcgaagaaaccttaatgttcgcagctgagtttcgccttcctcggactttgtcgaaatctaagaagaaaatgagagttcaagccttgatcgatcaattaggcttaagaaatgcagccaaaactgtaatcggtgatgaaggtcatcgtggtgtttccggtggagagcgtcgtcgtgtatccatcggaatcgatataattcacgaccccattattcttttcttggatgagcctacatcagggctggattcaaccagtgctttcatggtggtgaaggttttacagaggatagctcagagtggaagcattgttgtaatgtcagttcatcagccaagttatcgtattctcggattgcttgaccgattgatatttttgtctcgtggacaaacagtttacagtggtaaa

SEQ ID NO: 3695 - DNA, 624 bp, Gossypium hirsutum
actacttggatgcggtgtacatcaatcctgctggaactgcctactggtccatcatcaaggcatatgatgcacttctaaagcagctagatgaggaagacgagggcaaacctggtggagatagttctgcatttaccccattatcagatgaagtactcaaccaattaaccaggaaaacacgaaagaagatggaaagggaaatgaaaaagaagcaaagatatgacagtgagagtgagaatgcacaagaagctgttgctcgaaaatcttcaagtaccaggcatgaagatgagagtatggatagcgcgattcatgaagagaaactaagttccttctttaagcctggtaagtcatccaaaaatggtgccttaagcgcaaacacaaaaggtcaaagttctcttcatgtgcctgatagctatgaaaacccatcctctacatccaattctcatcttattcgtggaagaaaaagcagaaaacttggcagatgcacattgttggtacgtggttccaatgcaggtctgagttcagagggggatgactttgttccatattctgggaaaagaacactgctttcctcactaattgattctggagaagtggagttgagctcaaaggtgcagtatatgaacc

SEQ ID NO: 3696 - DNA, 626 bp, Gossypium hirsutum
agaaggccaacccgaaactctcgactatagagtcttcttcgaggatacttcgggcaaaaaggtattttcacttttttcttcttttgtgttttttaaatgaagattgtaatttgagatttgatgggatgtggccttagatttctccttggcacgatgttccattgcacttgggagatggtgtttttagcttcattgttgagatacccaaagaatcaagtgctaaaatggaggttgctactgatgaactttacactcccattaaacaggatacaaaaaagggcaagcttcgatattacccgtaagaattttctggttttgattatgtttagatttttgctaaatctcaattcttgggttatttccagcatgggtttgtacttggatatttaattttttctaacaattttgcaattagattttacatttcaccattattatttttttgttcttagcattttgcaatgtcatattgtagaaattgtaagtgactgaaaataacttagttatgtttcaagtatacggtaaaagtagtatgaagtaggttgattaggactcagattgcattttgccctctttactcaaaaaatagcaaattagtccttatacgttaggtcaaagggcaaaac

SEQ ID NO: 3697 - DNA, 621 bp, Gossypium hirsutum
aaaggcttatcaatcaccttggcctcaaagatattaccataagaaaagtacttggcttggaaaaccttgtagtataaagacttcttatgatgcataaaatatataatcttttaaaatatcaaataagggctaaatatttcaagagtactcaaataaatttttttcagatgttgtatatttgactcaattatcatgtgttatattctaaacacgacaatattaattttatgctacaaattagatgaagtgcatgaaaagcctttattgaacacattcaaaaaagtttggctcttatttgctcatttaaaaatgttttatccttacatgataaacccctcatggatttaactctaaattgagcatttaataaaatcgctatttccaaatttaggcatcttttaaacttagggttaaatcacaaattgagacttaaacttgataatttttttcatattagggtttaaaccttttttttggtccaagttaggcctaaaaatggcaattgttcttccattggatcttgaactttttttttgtctaagttagttcttgaaaacctaaagtttatcccccagtgtaggaactattgtcaagtttaggctccaatatgaaaacaattgt

SEQ ID NO: 3698 - DNA, 583 bp, Gossypium hirsutum
  misc_feature (537)..(537): n is a, c, g, or t
tttattcgagtaattaagttattaaatttgatattttacatctcaaatatccaaattttcaaataacaaaacaatgttttggagtttaggctttttttttctttggtttaaattcctccttgattccatgttaatttttaaattaagtaaattaatccctcaaattcaaaaaaaaaatcaactaaacatttttataaaaattatatactattaaaaatatttttaaaaaattaaaaaattcaataaaatttttataaaaataaatataaagacaaatctttaaaaaaatcatttgaaaattgaaaataattacataaaattccaaataatcttcaaaaatccaaaaatttattaaattagaaaaattatgaaagaataaaaattatataatattaaaaaaaccttaaaaaaatctaaattctcttatttttcttttatgttaatacctgttctaacttggaatttagtcaaattgtcatcaaggttgtaatttaatttgtctatttttttttatttaactcaaaaaaagtttattcnatataaaataggactcgttttcaaattttttctttgaatttgacca

SEQ ID NO: 3699 - DNA, 606 bp, Gossypium hirsutum
atcccgatcttctttctgcaactagacgaaccatcaccaccgccattataatgaatgcaaatgtcagaccaagtgaaactgctataatgaccagaatcttctttctgggcttgggcggcacgaaagatgaatacgagttttccattagctgcataatctcaaggccattcaaaaaagcagtttcacttgtaccatttatatgaggaccgactgttatgtcgatatttccagttttgccagaagcaacaacaaaatcagcataaaatggagctgtcagctgattaactgcctcatttggactgatccactcacaaaaattttcattgatacagagattgagcccaggataactaagagaaggattaatgaaatcacagaaatgtgcccgaacaaagtacctggcattctcaccgactttaaaacgccaagtaatatttgaaaattttggattcaactctttggcagtcccatagacatcctctggggcgatatacttagttgaaccattagctccacgttcaaattctagttggtcatagctggtttgcttgttttcagcagagcctggaaggagcaaaaactggtcatctgctatccaatgcctca

SEQ ID NO: 3700 - DNA, 651 bp, Gossypium hirsutum
gattatagcttacgttcggtggtgttagttgggatgcggagaagaagatagagttgttggattgtgcagtgccgaaaaatgaaaacaaggtctttggggacgccgaggctagccggttgatgatggcgaggagtggagcagcgtgggtgccgtgagggaatgcgagaacagcaacatgggtatcaacaagttttgacatcactgctgcgcgggaaaggttgagtttggatgggtaagggcaggaaactgtgttattatatagccataggcccgtccaggttggtaaaggtggtgccgtacactgataatttgaatatacaagattgggggttagcatacgtcagtgtattcctccacgcctcttcaatcaatgattagttgacagagaaaatagagctgggatttgacatagttcgctcaccattgaattagtgtcatcgaacgatgcacatgccaacccccgttattttttgttgttggacagtgcgtctgctttccgccataattaggtttgttttttagataaaccaacccccacgaacaccagacttcagataagaaaattggaagcaagattttaaaagataaccaatgttcattaccttcacttgaaattgtgaagttaaaaacaaagacaaagcagttgtagcg

SEQ ID NO: 3701 - DNA, 641 bp, Gossypium hirsutum
aaatctcctgatgtttttcattttggggctcacttgcaaatccatccctggttacagccacatcctggaatcatttttaaatagtcaaattagtaataccaaaatgaaagatgaaataagtcacatttaccaagtttcaagtaccattcacaattatccaactgaaacaaactctttaaacgtatgaaagtcccacgcagactacttgaacttttatctttcaatagtaactggactagggatggaactccgaagaaaagaaaattagccaaacctttgctataatttgcacaagttctttgtcaggtataattaaaatctttgagggtgccttgctaacaaactctgtagtagccttgtaaccacacaaagtaccatcttttatcaagcgagccattttcaagatgattcctaaatgagcaagtggatgtcaagattatttgttttatttcaaagggaaccaaggccaatttgcaatgctaattacacatgcataattagtacaaagaaaacagataatggaccataccaaaatcattttctgcatcagttgcatgaaatattccagtgtaaattgatccgcttttcacatggacttccaccggatgcccaataagacatgttgtcagataaactaaccg

SEQ ID NO: 3702 - DNA, 607 bp, Gossypium hirsutum
ctcctagaagttgtttctggtcttgcatccaaattatcggggctgatattttgattggcagcaattcgcattcccgtggcagggaccagcattgaacccattgtccgttgccttagtagttgtgattcctgataatttagagcaaaaccctgagatgatctatcttttctttggcaacagcatggctgatcgtcatttttaaaaatcaaaggtctcttttcaaaagatattctatgtactctaagcttctctccttccaaagttctatccagtccagcgcttgaatggggaaatgcagcaccattttcggctaaaggctcagatttggtagtagagtagccagacctataattttctagcactgcaggagcatcaacaaatgctaacggttccgcatacttcaaatctaacttggcttccacagaattagagatagtagataccgcagatattggtgaatctgatgagtccccatcgacaaaatcaagctgatcttgagaggattgaattcggctggtggtcaatgatgaattcccttgaaaatcatccgaacccatgtccctagggctaggcaaaaatgatcctggaggaccaggaataggtattg

SEQ ID NO: 3703 - DNA, 631 bp, Gossypium hirsutum
acaagtccttgacacggcgacagtaccctggttcagccctttcctttgctgccagttcttggattcggggttctgtatagtaatcagaacgcctgagcttaggcattagagcctcgacgtcagccccgtgctcatacacaatagcagcctcaccagccctgtggccactgagtgtcatgaacgaatcctctttctgtacagaatgatcatgatggactccattagctttctggttatgatgaatccgctccttcacaagaccattttcagctgggttttctacaatgatcatatcaatcagaagaaattaaaattagtaaagatgctagcaaactgatttgctaatcagaataaaacactcatcatctttatgacaaagagaatcaccgtggcataaaggaaaaggcttattttaatgctttgttttttgtcccatatggatattagaaactccattggagttgacaacaggctaactgtgttttttgatgactgtctagaaggaagttagagaacaaacagagaatgttttataacctatgcaattttgacatcattaaacattaaatcaaagaaacattatgggcgacataaaattaatataatgatacgacagtgaattggcgagtaa

SEQ ID NO: 3704 - DNA, 635 bp, Gossypium hirsutum
ttactaatatatatatatttctcctagaaaactataacatttacatagaagaaggtaaagtatactaccggtcttcacatttccaatagtctccttcaaaagcagcaaaatgcctgcaaaaaaagttcaaaaacttcattaacaaacctcaacaggatcaaaattgaagctgaaccaagttgaattccacttcttaattatggaacagaaatgaattcaatcatatgtgatgggaaaatataaagccatacattgaaaaaaaaattatatctcttactacgacgtcggtccattactcttttgagcctttcaagcatatcttgttcagtgaatattctaccaagagagcttaaaaaggcacttctccgaaccgggggagaccaaattccactcttctcataatcaaagttgaattcagacacgtcgaggaacttctcgagaaggcgatcggaaacagatttaggaaccacttgaaccttaacaggagatgactacggcaaattagaaggtgaagatgaaaagacttgaaagtttgacattgataaacaatacaactcagtacaaaataaactccgaaaagataacaacaagataatgataattaaaacaagcctgggattggtgagaaggaggag

SEQ ID NO: 3705 - DNA, 580 bp, Gossypium hirsutum
gtcaagaaagtcaaactcaccattttgctggttcttttgggttctaagaagtttgctgatggttgggagtttgctttaaacaaatctgtatggcattttgctttattgcataaaaacatgtaaatcattatctaagatcgctaatatgtatatgttaggacttcatacgtttgctctgataagttcatgcaaagactgaaattcttatgatgggaacatgttagaagttaaaaaattaaaaaaaaaccaattccaaaataaattgttgctagaacatgctagcacaggactaaaactaatagagcatgatagctgaatttatgcaccctaacgaataacagtatataattcctggtgagttcattttgattatgtgatcgaaagggaacagctttgcctgctccgtttgacattattaacttttgactgctctcagcaggacacatagatgtgtttagcttatgtttgtgatttttgaaaatgagtgaaataactcttctgaggtatagttttagcaattaccccggaattaaaaaaaggaatttgaactcctaccaaaggaaaaacaaatggaaggcaa

SEQ ID NO: 3706 - DNA, 615 bp, Gossypium hirsutum
tttgcacaagtgaaaagcaccaacactcctgggctttttcttacttcaaggacatcccctgtatcactcagatactatggcctggggcttgagaatgggctttacactgtaaacttgttctttgcggaaacagcttatccagatagaatcactcggtcttggaaaagtttaggaagacgtgttttcgatatttatattcaggtaatgcttactttaacataaaaatgaaatcattctcaagtgtagatcataaattttgttacttccatagttctatttccagtgtttctatgaatacagttatgtttatatctcatcacgactttcacaggggggtcttcaagttaaggatttcgatatatcaaaggaggcaggcggggctgaaagagcaattactaggagattcgttactaatgtgacagataaccatcttgaaattcacttgctttgggctggtaaggggacctgctgtgtaccagaattaggttattatggtccatctatttcagctattagtgtggtcccaggtaagaatattaacacatatcagtctttctgacaagatccttaaaatgtgcttctattttctgcttctgatgcctctacttgtggcta

SEQ ID NO: 3707 - DNA, 628 bp, Gossypium hirsutum
ctaaggttaatcagcagaacatagagaaagattctactccgaatgctgtccataacttggtagacattgatgagaaaggagataataatgttacaaacgaatcagtcaagaatgattctacagaacaaaatgctgtcgctggaacttctgaagtacaggtaactcaagatgcgggttcaggctggaggattgtaatgcatgaagagagtcatcagtattactactggaacactgaaactggtgaaacttcatgggaggtgcctgctgttttgaatcagataaaccaatcaacttctgacgagaaagtgcctactgttgaagatatggaggcttctcaagtggatgcacgtgattttaatccaacaccaagtacccaaccagttgttgacaatgtgatttctcagagcaaggtgcatgataatgagccaaagttagaagagctggacagaggaagcaaaagtgaagctttgagggataaaatctctgatgtcaataggagtgattttcaaaatagcttagatgctgttgatacctgtttggctggtgagagtttagattgctctgggaactatgcccatgatgtgcttgctaatgatgataataaaacagggattgattgctctactca

SEQ ID NO: 3708 - DNA, 615 bp, Gossypium hirsutum
  misc_feature (605)..(609): n is a, c, g, or t
  misc_feature (611)..(611): n is a, c, g, or t
cataagctacaagcttttgtgactaaacaaattccaaaagcacaagaacaactaatttcaatgataataacaaaagaaagaaagaaactttactaaaaaaaaaggcggggatgacttactaaagagtatcaggtggtccgataattgtaacactccattcaaagatattgttttcatcaaccaatccggccgagaacccatcaaccggattcttacaaagatttgacaaaaaaacaacaaatcaaaaacccccattacgatgaataaaattgcattcgtcaagcaaagtgcttgatattagtttatactacagtaaataaaaattggctacaaatgctgattattttggaataaaacatttcaaaaataaagctaaagaaaattgaaagataagcatataatatataaagagataagcaaggaaacttacagtttctggtcatcgtcaatttctagcttcttctggcatcgtcgatttctagctaaaatataagagaaaaaaaaacaataataaaaagaaaagggtgcacggttaaattttaaacttcgtaaagcttatttttttatgtaagcaagatacattcatggttaaaagatagaacctnnnnngnctgg

SEQ ID NO: 3709 - DNA, 636 bp, Gossypium hirsutum
  misc_feature (19)..(19): n is a, c, g, or t
cagttgcagtcgcggcttnccaatcagggaaacacccgcatgtttaaaacattccttgttcgatgcttaaaacccagacggccaatataattattaactccactcgaagcaaaatatggtaatggtttgctattatactcacttactgacgcctgttggttgggtacggttttcgattgccaaaccttccgttttgagagccgagaccaacaaccccatggcttctgatctctcctctgaccgctctgtcttccgcggcgtatcctcctcttctcctatccgccgccgtgatctagtcttcatcgtcaatcctcgaggttcttattcctttcttcccttttactcttaaaaatgtctttgccacccggatttattacccttgttttaacaaggggatttggaggagcaggtgctaacgggagaaccggtaaagagtggaaaaaactgcttccttatcttcaatctcgcctcggcagtgattgtaatgtgagtgttcttttttcccttttttttttccttaaaccttggcccattaaaaaaaaaaatccctggcttttgccccaaatatggaaatctttaattccgggcccttccctggcattgaaatttacaaggaaggaaaaaataaggggctcc

SEQ ID NO: 3710 - DNA, 630 bp, Gossypium hirsutum
ggctttgtacttagctagccacgaaattatttgaatagcctgacaaattgaacaaaagtaaagatgcagagcatgaaaccaaaaacaaaggcatcacaataatggaccaaaggcatagcctatgaaagaattgcacatgatgattaattaacaatagctaatacttaaaattatcaaagtaaaaaataattaggaaaggaaccatcttttgcacctggtggcgagtattagattccaaattctggtttgaactaacttcaagagagaactggacaatggatttaacagaatcgccaagaagaggagcaggagactcaataagctcatcaaaaatttcaaaagcaataatagcaacatcctcctcaccagcagaaaggcattgtcttgatacatttaaaatgctaggaatgaattcccgaaacttgacctgcatggtaatagaacttgcattgtcaattgctggaccttgttcttttctattagaacttgcataaaaactgttaaagcgcaaacaaacaaccgctaaggagtaatatattccttagaataagattaatggaagaccattatgaaaatggtaactagttaaaacaaaaccaaccactaaacagaccttacattgccaaacag

SEQ ID NO: 3711 - DNA, 629 bp, Gossypium hirsutum
tattttggcttgtcttaggacacctggttttaccagtcccatgttgaagtgaagaatgttaaatttgattaatgtcgtgataaaacagaagtaaaatactaaaatgtccttttaattcttgttttgcaagtttcagaatctttagtgttcctaatcctaattgtgcattatctctggttgtaggcatttatggaggatgttggcccccttgaggaccttcaattggatggtccagctttagaaggtgttttacaaatattcaattcctatgttaatctgttgataagtgctttgcctaattcaatggaaaatgaagaacatttagatggttctgggagtaaaattcttaatatggcggagagtgaatcccaacagttggctttactggccaatgcatcattgctagctgatgaattgcttccacgggctgcattgaagcttttgccattgagccaggctaacagagtggatgccacccctaaaggcacttcagatagacaaagccgtgttccagaacaaagggaatggaagaggaaactacaacgttctgttgaacgcttgcgagatagcttttgtagacaacatgcccttgatcttatcttttacatcgatggggacatccgtctcat

SEQ ID NO: 3712 - DNA, 623 bp, Gossypium hirsutum
  misc_feature (619)..(619): n is a, c, g, or t
ttcttaggtctttttgtatgggtttaattctagttcctccaacttatatttgtatttgtaaactcttgaaaaaggttaaagtctactagaaatccctatactattatgtaaattcattttagtccctgtactaaaaattgcctcagattagtactgttaccttaatttcttatttaaataatgatattgttaaaattttctgttaagttgttggtaatttggataaaatatatcatgtccaattgatttatctatggcatgataatttaaaatacatgaatggttttttacgagtcaagtcaggataaattatatttttagtgtataaaaattaatttaaagcaatttttaataaaaaagattaaaataaactttacatcaggataaattatatttgtagtgtataaaaattaaattaaagcaatttttaataaaaaagattaaaataaactttacatattagtgtagtgacttttgaaaaactttaacccttaaaaaaataaaatatattaagcattttaaggctgaaattactgcatcaactaaatcaatactcaatccgcttcttactagtttcaaatacagttataattatttattttcctgtttaaaccataanaaaa

SEQ ID NO: 3713 - DNA, 597 bp, Gossypium hirsutum
  misc_feature (47)..(48): n is a, c, g, or t
  misc_feature (292)..(292): n is a, c, g, or t
  misc_feature (306)..(306): n is a, c, g, or t
  misc_feature (342)..(342): n is a, c, g, or t
  misc_feature (360)..(360): n is a, c, g, or t
  misc_feature (365)..(365): n is a, c, g, or t
  misc_feature (375)..(375): n is a, c, g, or t
  misc_feature (382)..(382): n is a, c, g, or t
  misc_feature (390)..(390): n is a, c, g, or t
  misc_feature (403)..(403): n is a, c, g, or t
  misc_feature (413)..(413): n is a, c, g, or t
  misc_feature (417)..(417): n is a, c, g, or t
  misc_feature (458)..(458): n is a, c, g, or t
  misc_feature (508)..(508): n is a, c, g, or t
  misc_feature (581)..(581): n is a, c, g, or t
  misc_feature (584)..(585): n is a, c, g, or t
ggctttcattcttgtaagtccttaaattttactgttttcaaattttnngccatattctgtcaatagatcatagcaaaaatgaactgcatctttgttatccaattaatcttctcctttatttcctgaccaatgaaggaaaattttcatctcgtgttcatttggtataaccaccaaaacattttacttgatgataatcacatttaaaaacaaactgcattcttactggaagtgctttgactcatttaacatgatccattgaatgtaccaaaattgatttcacagaaaacaaaanttttaagaaacccnaaaaaggcttaaacaaaaggccataaaaaaaaaccnggttttttttttttctcntttgntttcaaaaantttatcngatatatnaagtgtatctttntgcgcaaacntgcnaaagtctgttttccatctcagaaaaaaaaaaaccaacttantgctcactttctagtattgtccgtctctgaaactaccaaacaaaacaaantattttcctagtgttttttttagagaaagaaaaaaaaaaacccctctccctcttttataattatttttattgncannccaaacccgggg

SEQ ID NO: 3714 - DNA, 647 bp, Gossypium hirsutum
atagtagcaatataatggttccttgcaatttagcttgcacaatggggaagtgcttggagaaacatgaacacaaaatagtgcacaggaatcctttcaaataagaattcattgctcaagtggtgagaaataaattatgtcttctagttacaaccatttactgttgagtaggaatgtaacatataagccaaggtaattgagagctacttgggcttggcctgatgttaaaccaagcttaattgatgtaactatgagtcaaattgagctcatggggatgatgaattggttgagcaaagtttaagtattttgatgtttttacttgagcagtttgcaatcttaataggacattttatacttttaggataatataaacatatatgctaatacaaatactctccattttcattgcacctgtctcttcttttcttgatgcctcaaaaccacactattttttcatttttgtacctaatgctcttacagtttctttgctacctagttttttatttttattttttactttgtcttcatgttaacatatctgtgcaatttcagtatcaggtgcaccagttgcatcgccaagtgccggtgatgattataaaattggattagaacaacttgcatccatgacccgtgatcttaagttatcctgg

SEQ ID NO: 3715 - DNA, 1271 bp, Gossypium hirsutum
  misc_feature (618)..(623): n is a, c, g, or t
  misc_feature (627)..(628): n is a, c, g, or t
  misc_feature (630)..(631): n is a, c, g, or t
  misc_feature (633)..(644): n is a, c, g, or t
  misc_feature (646)..(655): n is a, c, g, or t
  misc_feature (657)..(671): n is a, c, g, or t
  misc_feature (674)..(683): n is a, c, g, or t
  misc_feature (692)..(702): n is a, c, g, or t
  misc_feature (707)..(721): n is a, c, g, or t
  misc_feature (724)..(728): n is a, c, g, or t
  misc_feature (734)..(746): n is a, c, g, or t
  misc_feature (765)..(772): n is a, c, g, or t
  misc_feature (774)..(782): n is a, c, g, or t
  misc_feature (786)..(792): n is a, c, g, or t
  misc_feature (795)..(800): n is a, c, g, or t
  misc_feature (806)..(806): n is a, c, g, or t
  misc_feature (810)..(813): n is a, c, g, or t
  misc_feature (816)..(842): n is a, c, g, or t
  misc_feature (844)..(858): n is a, c, g, or t
  misc_feature (862)..(862): n is a, c, g, or t
  misc_feature (868)..(870): n is a, c, g, or t
  misc_feature (874)..(881): n is a, c, g, or t
  misc_feature (887)..(891): n is a, c, g, or t
  misc_feature (900)..(902): n is a, c, g, or t
  misc_feature (904)..(910): n is a, c, g, or t
  misc_feature (914)..(923): n is a, c, g, or t
  misc_feature (928)..(933): n is a, c, g, or t
  misc_feature (936)..(942): n is a, c, g, or t
  misc_feature (948)..(953): n is a, c, g, or t
  misc_feature (955)..(957): n is a, c, g, or t
  misc_feature (962)..(962): n is a, c, g, or t
  misc_feature (965)..(967): n is a, c, g, or t
  misc_feature (969)..(1000): n is a, c, g, or t
  misc_feature (1003)..(1005): n is a, c, g, or t
  misc_feature (1007)..(1028): n is a, c, g, or t
  misc_feature (1030)..(1030): n is a, c, g, or t
  misc_feature (1042)..(1054): n is a, c, g, or t
  misc_feature (1057)..(1060): n is a, c, g, or t
  misc_feature (1070)..(1072): n is a, c, g, or t
  misc_feature (1076)..(1079): n is a, c, g, or t
  misc_feature (1081)..(1081): n is a, c, g, or t
  misc_feature (1085)..(1099): n is a, c, g, or t
  misc_feature (1103)..(1105): n is a, c, g, or t
  misc_feature (1121)..(1135): n is a, c, g, or t
  misc_feature (1140)..(1146): n is a, c, g, or t
  misc_feature (1154)..(1157): n is a, c, g, or t
  misc_feature (1161)..(1164): n is a, c, g, or t
  misc_feature (1169)..(1171): n is a, c, g, or t
  misc_feature (1177)..(1177): n is a, c, g, or t
  misc_feature (1183)..(1184): n is a, c, g, or t
  misc_feature (1189)..(1190): n is a, c, g, or t
  misc_feature (1193)..(1210): n is a, c, g, or t
  misc_feature (1225)..(1236): n is a, c, g, or t
  misc_feature (1238)..(1242): n is a, c, g, or t
  misc_feature (1244)..(1250): n is a, c, g, or t
  misc_feature (1252)..(1254): n is a, c, g, or t
  misc_feature (1256)..(1258): n is a, c, g, or t
  misc_feature (1265)..(1268): n is a, c, g, or t
gttggtcgttagaatcatatattattataaattactctgttaataattaaaatatatttaatttataattttttaaaaatttttagaaataatttttttaaaaaaagggtgtgagaatgtgagaatactagaaactaataaaaagtcactaaaaaactttataaaaataacaataacgagaataacaaaattttaactttaaatgaattgactctgattcaaactcatataaacaccaaaaatattaacaattttttttaaaaaattaactaaatttctaggaggtggttttggaggaggagccattttctttacaatttcacaaagaataacaaatgggatattagcaatgtggtaattgtggaaagcttgttaatgttgtgaattaaaggtcaatgttaggcacgtgagaatcagagatgagaaaattcgtacattgccttcttatttcctcagttgacctaccaaggcaacacaaagtacatacatatactaggattaaatttgacgttggtaatttctgctgcaaattaaatcgctgcaataaccgtccttcctcgattgtttgatttaaaaaaaaaaagggaattttgccctttttgcatcatttcgggttcnnnnnnccannannannnnnnnnnnnntnnnnnnnnnncnnnnnnnnnnnnnnnaannnnnnnnnnccctactcnnnnnnnnnnnttttnnnnnnnnnnnnnnntcnnnnncctctnnnnnnnnnnnnncacctacttaacttccctnnnnnnnncnnnnnnnnncctnnnnnnnccnnnnnnaccatnctcnnnnctnnnnnnnnnnnnnnnnnnnnnnnnnnnannnnnnnnnnnnnnntaanctcctnnntacnnnnnnnncccctnnnnnctttcactnnncnnnnnnncccnnnnnnnnnncccannnnnnccnnnnnnncccccnnnnnntnnnccccnccnnncnnnnnnnnnnnnnnnnnnnnnnnnnnnnnnnnctnnnannnnnnnnnnnnnnnnnnnnnnanactttatcatannnnnnnnnnnnnccnnnncccccccaannncccnnnncntctnnnnnnnnnnnnnnntccnnnctttctcctttacccnnnnnnnnnnnnnnnccttnnnnnnnccctcccnnnncccnnnntaacnnncctcanccaccnntaccnnttnnnnnnnnnnnnnnnnnnccccaacctctcccnnnnnnnnnnnntnnnnnannnnnnncnnncnnncccaccnnnntaa

SEQ ID NO: 3716 - DNA, 616 bp, Gossypium hirsutum
tcattatgtgctaattaaccctaataaataatttgatagaagaaaataacttcaattcttaaaacataccagcaaaaccaggactttacagtaaattatcatattaatcaagttcagagaagtaacaggttggcagtataaacctgtccagtgtcaaagaggttgcatatatatatgccaaagtcccgctgaagccacacaatatcccggtctgccccatgcataacctatgtaaactaagaatattaaaaagtgcagaaggaccaaaatgagaaaaaattgcagccattaaagaggccaacctttttcttggtgggatccttgaataattcccgaagatacgggccaatatgaattcgtagcttcaaagtatcgacaacaaaattctcatttctggtagaaatttgtatcaaacaagtcaatccttgaaatgatctatattggttatgctccaaatcaacctgagaacaattacaattttaaactacatgcaaagtggtaacatgttacaagaataaattttttaaaaatagaacacctatgtttgacgcatacaaggtcatgtcaaactggtagccccaatacccgagatacatataccgttcttcagaccagg

SEQ ID NO: 3717 - DNA, 639 bp, Gossypium hirsutum
agaaggtccggttatcagaagttcgcagttatgtgcctcatggagggtggatggatttgtaggaatggttctgagtttattaacaattcagtgttattgcatacacgaatagatagtttagaacatatcctaacaagttcttgatgctgagcatgatttgtctgtggttgcagaaggctgattgatacatgaaaaaatgttaaacaaaatcaagaaatcgaaaaactctccaaaaattgttaaagcaaattagataccagaatggataatcatatacacttcactattaatctaaaattatacgtttcaccaatatgctaaactaggcagtgaatcatgtaatatgtaacaaactataaattatttgtgaatgatacaaaccttgtaattagttcaataaaaacatatgtataccttgaactagatgcagcagaatatgtggggcacacttgattagtttcagcaagtgatttgaaagcggaatcggaatgaaaatctgcggaagtaggaagatatctatgtccagtaccagcattttatgcagcctgtgatattgacaaaaaacacatcactagacaagattgcaataaaaatgaacatgtatagcacaatatgatcttaagctccataaacaacctt

SEQ ID NO: 3718 - DNA, 729 bp, Gossypium hirsutum
  misc_feature (659)..(659): n is a, c, g, or t
  misc_feature (661)..(664): n is a, c, g, or t
  misc_feature (666)..(679): n is a, c, g, or t
  misc_feature (688)..(689): n is a, c, g, or t
  misc_feature (696)..(705): n is a, c, g, or t
  misc_feature (709)..(716): n is a, c, g, or t
  misc_feature (720)..(723): n is a, c, g, or t
  misc_feature (725)..(726): n is a, c, g, or t
gatgttcctcctaccagttggtgattgcttgaaaagatgatatattttttcattttgtttttttatgcaccattagcaatgattaagtaaatttaatctcaactgctgtttttatgcaccatggaaaagatgatagagattaagtaaatttaatctcaactgctgtttttatgcaccattgaaaagatgatagatttgatagtaactgccaacaacataaatttgacaagtgaaattgctatgaccggctcttctagtcataaagacattttaagtcatgcaaaagctttggagacagattcatatacatatgattaagtaaattataagctgtctatatgattcacttttgggggggaaaatgacacaggagataatctggtgggagaagtaagcagacttgtggttgctgaagcttgcatacaagcaatggacatagaatttactgaaggcaaaatttacgaaatcaactcggttgaggtaagtactgcaatttgttatagcaggtgtaggattccgtacatgcaatcatttacattttaggtttttttctaaaaccgaaacatggtgcgatttgaatctgtaatctaattgtgattatcgaaagatgagaaatgagtagagttatgtgaattccttgtttgagggtactgacatcncnnnncnnnnnnnnnnnnnnttttttatnnaaccccnnnnnnnnnntctnnnnnnnnctannnntnnaat

SEQ ID NO: 3719 - DNA, 594 bp, Gossypium hirsutum
  misc_feature (491)..(491): n is a, c, g, or t
attattatttatgttataaaacctgttaacacagatcagtactcaacaattttgttcatattatagttttatttctttaggctcaatctcacactttcaaaacaaattacctatttcctcttttttatcagattgaatttttaaatccaaaaaatgcatcaaatatactttttaactcataaatatagggtggttaaaggttgatgagtcaacccattttgtacatatatcatatggccactcttctgacactattttattttatatatcatattatcactagacgaattttagaaaaaaaaatcatgaaatatcaattttttctaaaaaagttcaattaaaaaatgagagtacacgttaatttttttttgaattacgaattaattaaacaattattatatcacatttaaaaaaattttaaaatatttttaaattataatttatagagtttatattgatgaatttctccttttcacctatgattttttttncccaaaaggacttttcacataaaatttgtttgttattatttttcttgttattgttttaaaattattcctattgcttttatggacgtctatatttttggcgatg

SEQ ID NO: 3720 - DNA, 624 bp, Gossypium hirsutum
gtagaaatgaggaatctgtttgaaaaacgtgcccgtcaatataattccgacgatgacgaggaggagcgtgaggagggggaggaagccctcggtgatacccggatcggccgcggcggtgataattcttctgaagaaagtgatggttcagaagaagttgaaattcaacctggggttatgaagtttactgacggtgttagagctttcaggttggcatttaagaacattataaagaggaacgttgctgatgattcattggtaaagctagtttatctacttgggtctttctcattttactataaataaataaattgttttccccccaaaagactgatttttttctgaaattttctcatagggtccagtattatcagggcataagcagcttgtggcaaagaagttagctgaggagaaagctgaaaggaaagttaagggagaggctaaaaaagaaaaacatttggtatttttcctataataattatacttaaggtttgtaccatgaattttgctgtttatgccattttattcatgtgttattaatgttacaggttgcagagaaggggcatgtcaagcctgctaattacttgggttcacatgaaaagtttctcattggtattgctacaaagg

SEQ ID NO: 3721 - DNA, 611 bp, Gossypium hirsutum
tgaaaactctcatgtaatgaaaatggcaaagtaactaaagcaaggatccatgtactgaaatagtgaaagaaaccttgaggctacacccacctgttcctttgaacatgagacaaaacattgagaactgtgtgatcaatggctatggcatccctttcaaagaccaaggtccttgttgctggggaaaaggtgaagttattacgtgcatatattgaagattcgatcatatgttgtattggaaaatattagaatataaaatttgataatgagatctaacatgagttgcaattgcgagaggttatgcatagtaaattatgatccaaaaggttggtatgaaattgggacgaattaatcaactcgatttggaatatagtatgctataatgttatattcttgaactagtttatggaacttattttaatgagcttaagcggaataaatgatgttcttggtagtatgctttgcataggtgtaattattgagtgttttcattaacttatttgtgttgatactaaatttgtagaaatactgttaagttgattactcagcgtacgatttgttttccgtgcgcaagttagaatatattaaagatcctaaatttcggtttcagtatc

SEQ ID NO: 3722 - DNA, 615 bp, Gossypium hirsutum
tgagaagtatcagctaccactaaagcatgatcagccatgactacatgaaatgaggcaacagactgatgtgattcaaagggctccctccatgcaataaacagaacagaaaatgcttccaaggaaaagcttcaaaaacagcatgtatatactcttagttaaattgcagtagagacaaaaaagaaaggaaactaatatacatacatatataatgaggtggcaggtcagcggaggttagccgaaacaagctagggaatcaaacaaaaatatgtataccagcataattaatcaacatataaatggaattttcttcttggcagaacataaacattggcagcaaaatccctttttaagttttcaattagtgaagcaacttatttagtacccaaaagtattatataacaaacctgtgataggaaaagaaactaatgagcagttgttacaagacaaccaaatttaacagtaatctcttcctctataatgggaaggggaagagaaattgaaagaaaaataatcaggtctatgatgaaatatcaaaaggaaaaagaaagtgaaaaaagtaaaaaatggaacaaaaaaaaaaggcaatttgcattatttgctatgtacgttaaacat

SEQ ID NO: 3723 - DNA, 360 bp, Gossypium hirsutum
  misc_feature (56)..(56): n is a, c, g, or t
atagagcaatacctatgccttctcgaatagaaaggtttggccttatgatctctttngagttcaccaggaagatatcaccaatgtatagatggtttgtcgggacaaaaacactgcatagctcttcatcttcattttctctctacatgcacaatcaacaagctgagctactaagggaacttgtagggaaaacaaaacttgtaaaaaggagctcttgctactacatgcctcaaaaactacaaccaagagcagtgcccattcatctaggatctcatagagtaagtggcacgtcataatcatccagtagaattaggacaactatcagtgaaatagacattaagtatctcatacaataaagttatt

SEQ ID NO: 3724 - DNA, 586 bp, Gossypium hirsutum
  misc_feature (53)..(57): n is a, c, g, or t
  misc_feature (561)..(561): n is a, c, g, or t
aactatttagattttgatttgcaaattcatgatgttcaatgttgtttcatggnnnnnataaaactagaagaaaaaggaaaaaagaactttcgattggcatagacggtaagaacaaagaaggtcatatagtagcgattttaataacccattaacttaaactttggaataattcggtcattagtttataactttttgaagttgggtgactaaaataaaattttactaatagcttagtgactttaggggtaatttacccaagctaaaaaaataaaataaaaaataaagttgcccaagttgagcattcaatcaattcatggccttcgtattgtacattgattattgagtagtccaactaaacaaacactgtaaactcccattaaaaaaaaaatcttttcacacctcattcaattcattctattactttcaagccccccccccccccttttttccccataattttcttcccccccaaaaagtttcaaaccaaaaatggcccacttttattttaaagcctcccccggccaaacccttggggggggccaccctaaggcccaaattttnaaaccaaaaaaagggaaaaaaaaac

SEQ ID NO: 3725 - DNA, 637 bp, Gossypium hirsutum
caattacttaccgctcacttatgcacttgtacttaatcaaaactaaaacctgtgtgcctctgctacgcaccacttcttaagcagcttcctctacgatcataatggtgtcggttactgtttctgtagccaaaccaacccttcaggttcattgtcgctcgtcttattaactagtgctgcgtatcccttttactgatcaaatcaacgttctttttcttccaggcaaatgcaaagggttttgcggaattctcaggtctgcgcaactcagctagccttacctttgccaggaaaacctcggatgactttcaatcagtcattgcttttcagacttctgctgtgagtttgacgctagctctatctatcagctttttctcagcatcttcatcctaggcttcacccaccgtcatattgttaccttaactctgaagagagaacttttttctctgctgcagaatgcagagttgacgatgccacacacgcacgcaatataatgatcaatatctatttatttcctatagcatttgcgttgtttatttataactagtgatagttgtgaagaaccggaaatcatcttaataatataatacaatgccaaagctcacggctgtcctttgaccttaattcctcagcagacttgcaa

SEQ ID NO: 3726 - DNA, 646 bp, Gossypium hirsutum
gcctgctcacggaggcgggaacggttcaatatggcatgacaaggatgtattagtgaaagattaggggaagtgttacgaagtaaatggatccttttgtttagtggagtctgtaaaaagtgaggaaagctagctttctcaggtaaaccataggctctaatgggaaaaatactacatgtcatacgtttaattttattatatagaataaaaataataataacactcttcgtccaatattaatgctattggtttaattacatgcaatgtaagattggtgatggatcatatacttgtgtttgattcaatcaataaaatttggtactatcatatcactgcgctatacactcatgcttggttcaattaatatatttttatgatagtggttcattctaacctattaccaaaaatatgaatttatatatttgtagattttaagtgaggtttgtttattgagtgaattaaacggtgtgatcaattcatttattcatgtttttgttaattaaataaatcatttaaaattagcttatttccggtttattgtataatttataaattatcattgtttatatttttattcatttattaatgtttttattcgacctcgaggcgaagcttctaagggtacccctcctacgtgcatgacactaaa

SEQ ID NO: 3727 - DNA, 603 bp, Gossypium hirsutum
gactgttactggaaggatgagaaaacaattgaagatgcttcggcaaaattgaagttggagatggaagaaaatttgcgtaaacaggaaattgagcgccttgctgagggaaacttcttgaaggggaacaaaatttttgtttatcctcagacagtaagaccagatgaagacatagaagtgttctttaataggagtttctccactttaaatgatgagaaagatattctaatcatgggagccttcaatgattggcgatggagatcattcactatgaggttgaataagacttatttcaaaggggattggtggtcttgccagattcatgttccaaaggaagcttacaagatggattttgtgttttttaatgggcagaatatctatgacaataacgacaaacaggatttttgcataattgtggagggtggaatggatgtgtttgcatttgaagatttcttgcttgaagagaaaagaagggaactagagaaacttgcaaaagagcaggcagaaaaggaaaggcaagaagaagagcaaagaagaatagaagcggagaaggctgcaagcgaagcagatagagcacaagcaaaggtggagactggaaagaggcga

SEQ ID NO: 3728 - DNA, 624 bp, Gossypium hirsutum
attttcttcgaaaccaaaacaatcatgaattgattgattaatcgaagcttgaacattcatcattgatctttcgtagccaatcctttaatacaaaaaacatacataacaagtaaaacaacttgctgaagaaagtataaagtattccagaatgtagtcttggtgcagctataatagggaaataagtacaatgtgaaaaataatataagcatgaatgtattaaaatttaggttatatgcaaagagcataaataaagtagtatcttacttttttcagcagtaccttcaatttgcataccgggattgttttgttgtagcaaaaatacaatctgactcgggttctcagcaaagataattgtgtttgattgggatatttaggactggtaggtgaccgtaaagaatattttcagaaagcattggttagtataatggcagattccaaacaaagttagttgaagcattcatgattattaaaattaagagaaaaaaaggggggaaatccataaaagtgcaagttttaatttacatttttacaggttaaattttgttaaatttagaaaaggtaccctcaacaacctttaaattgcatttgttggatatttgacttctcaattatgtatagagtctc

SEQ ID NO: 3729 - DNA, 491 bp, Gossypium hirsutum
tttaggaaatattttattgtcatatgaaatgatatataagtgtatatgtgttgttagtgacataaacttcatctttatcaggaacactggtgagttcatgatgtcaaggtacagagaagtagctgaaattgtgcttagatacctagagcatcgagatcgccttgttcgccttagcataacttctttgctacctcgcattgcacatttcctgcgtgacagatttgtcacaaactacttgacggtaagttgtttttgctccatatacgatcacattacttaaccggcatgtgaacccatttcagttatgtgcatttggattttttgatatcttgcagatatgcatgaatcatatccttacagtcttaagaataccagctgaacgtgccagtgggtttattgcccttggggagatggctggtgctttggatggagagctggtccactatttgccgacaattacttctcacttacgtgatgcagtgagtctcatg

SEQ ID NO: 3730 - DNA, 588 bp, Gossypium hirsutum
gagatcgcttcaaagtgaatggctcagctgagaagatgaaaaaagagaccactgtggcagtttcgaaatcacctgacattgaaactatgctggggccattagggatgaatgagacatcagatttatttcatgcagatccttctgttgctgattcaaagccttcgatagatagtatcgttaaggatgaaaataatcccatagcaaacgtggagctgaacaggaagggcgattcaaccaacaatgagaatcagaagtctggcaggaaagcttctaatcctgcaaaacaagatcatactgagaatgggcctcaaatcagtcctgcactgccaagctacatggcagcaactgaatctgccaaggctaagctgagactgcaaggctctcctcgatttagccaggacggaggtgaaaaacataacctcgctcgtcgccagtctctgccaatttcagccaatagtaaaatcaactcacagtcaccaaggacgcagagactggttcatgcagggaaggaagggagcaaaagcgacagaccactgtcatccagagacagaaatggtatgaagtgctgattcttggttaatacttacc

SEQ ID NO: 3731 - DNA, 648 bp, Gossypium hirsutum
tagtcttcattattaatgactttacattttggcatttaatatcaaaaagtttctcattaatttattggaaaagctacaagttggtcgcaaaggacatcagatgtgcatacgagtaaatttatagtctgatcatttgattataaatttgttattgagctattagtgtaagttcacaaactcaatcttgacaacgacaacaacttaaagcccaaatcctagtaaagtcaccgacaatcccatgccttatctataatccaatcaatttagcaactggagctattacataaataaaattttaaatattttaattattacttaattaatattagaattaattatgttaattaattattattttgaataatattattttagattatttcaataataatgaaagcgtaaactttttggtacaattgttattcgaactttaaaaataaaattatttttaagaatacaatttataattttatattaaaattacttattattcaaaatattattaaaaaaataccattcaaatgtggaatcaatgatatttaaagtttatctaaattaaaaaaaatattatttttatccatttaatttttttataatataaaatctaaataagttcatttattgtaacacttaatgaacacaaagaag

SEQ ID NO: 3732 - DNA, 584 bp, Gossypium hirsutum
tattttaactttaaaactaaatataaaaattaatgaatttaaatttagaatttaaaataataaattataacacaattaaaatccaaaaggtagaactcaaattatcttaaatattaaaataaaaataaaaaattagaatcaaaactaaaataaataataaaaaatcaacattgattatttaaattgattaaactgctaatgaatattctcttttctaagtcaaaattacaattcttgtttttcttctttcaactcaaataaaaataaaatgttgaaaacaaaacaattaaataagaaaatagaataattagttgacacgagattattattaaatatatgcaaatatgcaagtagactattacaaaactgggtgtagttgttgatcaaattctgctaatgaatattctattttctaagtcaaaattacaattcatgtttttcttctttcaactcaaataaaaataaaaggttgaaaacaaaaaaattaaataaaaaatagaataattagttgacgcgaaattattattaaatatatgcaaatatgcaagtagactattacaaaactgggtgtagttgttgatcaa

SEQ ID NO: 3733 - DNA, 659 bp, Gossypium hirsutum
atatcatgagaaacataatagagtataaataggaaaaaaaattcaagatagccacctacaatagactgagttaagtttttccaacccaaagtctttctcattaccattgagcagttaatgaaccccattgaggcaagaaacaccagaatcattttccaaagtgaacatttcagctcctaagtttttctaatattgtttatagtatacgttatatatgtgtgtatacacatatacatctacatatatatgctccaattttctactagaagactcagctagtgttcatatatgctctaacatatattgaaataaatggtgtggtttcaacaaattcttgtattaaaaaaagaagggataggactagcaacaagattatcatacctagttgctaaagcatcaatttcaccaatgaatataagtgatggtttatttacctgcaaacgataagaatttctcaacaaattacacaaagtacatagcacaaccaagtatttgtaaataaaataaaaggaatctgtacttataacataaaaaaaataacacagaaaatacagcaagctgatttataggtggcccaaccatctgcaacattttatttaagaacaggaaaagaacaacaaactcacaatttaatttaagaacccacttcccatttgaaa

SEQ ID NO: 3734 - DNA, 629 bp, Gossypium hirsutum
ttgtttcgctgatgagcttcgggaaagctctctcacttgcgacatgagaaggctttgattgttaaattggtgagtttatatagtttcaacttccagaccaaattaatggaatctttcgagaacttttatcatttacctgtgaattttggtgatatgataattgcatggaacttaccattttattgttagttaaaaaccgagttccttatccacccatttttttgtaatcaaagagtagctgaataaaatgcttataataataatgaatgccaagtaaataaacttattattataggctatcttctagtaagtgattgaatattttccatttgctccaatgatgacttcccttcacaaggatttaactatgtttcaaacttattgataaattcaatgttacacaaaatgatcaggatgttttcctgactccttgaccaattacttttaggttgatattgtggacttcaatggcagctttttatctcgtgtgcgtgatcttgctggtgcaaatcctataatactagttgtgactaaggtaataatctgcacttttgggctattatccaatcaataattttatgacatatgctttgcaacaatgcagaatatagggtgtgtgcttttctctc

SEQ ID NO: 3735 - DNA, 617 bp, Gossypium hirsutum
tgtcaagctacaatgtcttattcacttcacttccggtaatcgctcttggtgttttcgaacaggatttttcagcccgacactgccttaaggtaaacgattctttctattctttctttattcctcgaatataaatttgttacacattgacaattagaaaggaagttgggggccttaaaatgaaaccctaactcaatgttaacgacgagttacacgtaacgacatagttgtgaaacaatgatagttttctttatcaatctgaccattgctcttctcaaaatttaaacccggattttgatttgaactatgtttttctgcttcagaaaaattaaaccgtgtcaatctgttggcttagaattgttctatatctcgcatcaatttagtacattcgtaggaatacatggcatgtcaaccgaataccattatttacttttcttctatctatatgtaaatgttatagtcggaccgacaatcatttcatttttcttttgcagtatccttcattatacaaagagggcatagacaatgtcctcttccgctggatccacatactcggctggatgtttaatggagttcttagttccgtaattatattcttcttaactaccaactcaataact

SEQ ID NO: 3736 - DNA, 624 bp, Gossypium hirsutum
tctacaaaagaatattaatcccattcaaacaatttatcgaacatctaccctgcaaaaggaaaaatccgaatccatgacccacgatagtatacctgattcagaaatctaaatctagttatctgcaaaaggaaattgaattctataaatctgaatccataaaaaaaacaaataaaatatccacatatatttgaatttgcacgattcatcgtccatatctcacaatttaatgaacagattatagcaaagaagctaattaatgtcagtgtttagatttacagagcaaggagaccttattttcatttaactgggaaaggaaatatagaataagaaaaagaaggggggaatgtcctaagagtgctaagagtagtcccatctaagaaaggatttaccaggacatcactttaaacatatataattctcaaagttgaacgccatagctgctctgaaaccaatttaggccttagggcagcatatatagtaatcactaattgcttgttttctgccaaatttcccatgtaggaccagccagcttcattgcaatgattaggcggagcagaattctgattgtggaatacatatctttattgaaggatgaacaaatggcacccacctttaattgaacaa

SEQ ID NO: 3737 - DNA, 564 bp, Gossypium hirsutum
ggaatgtagaacgaaaataattttgagcttgttttgtaggcaagaaaaatgatgataaaaaaattaggaaaatttgttatttttcatcacaataaataaaaacaaataattctaaatttaaataacaagaggagaaaaaaaaatgagagatatataaatcaagtgtacttatttacagcattaaggaataataagagagaaaatgagagagatataagccaagcctgcctattacaacatcaatgtaagtcaagcgtgcttgttcacaacattaagaattttttttataatcttcatttctttctctcagttttcaacttgccaatcaatagatggaaacagaattattttttctttttatttatcatctttcctaccaagcctactgataaaaaatatatatattttctatcctttttactattctcatccattaatcgtttaccattccaatcttcctctaaattgctttgtaagttgtgttctgggatgcttaattagttgcctgttgcttcatttatgtcaattgtatgagcaggcggtaagcaattctatgatgcttga

SEQ ID NO: 3738 - DNA, 618 bp, Gossypium hirsutum
agagcctgagacaatagagaatcagttttacagaaattctcgtttgaaagcttcaatttttcttcgagttcactgcacgactccttcatccgtgctgcattgctgctgagatcagacatgtctatttctagaacttctttttcttttagcactttacttaattcttctttcaccacggagagctgaatttcttgatccttcatcttgttttcgaccaattcccttgcgttgacttcctcctccaattttaatttaatatcttccaactcagaaacctttacttgaagatcttctttagttgcagcaaaaatattctcgagcgttgagatattttccctcactctagattccgaagcttttttcaagtccaactcgttagccaattcactgataagagcttccttcgaagcaagcctttgctccaaatccaacactagtgatttagaaattgccaattcttcttgagcagcagaaagttcagctgttgtgctttgaagtgttgcattaaccttctgattttcagcaaccttctcatacaggccctcgatttcttcctttagggaggccatctgatcttccatttcttttgcaccaagtttcgcagtttcaagcaatctc

SEQ ID NO: 3739 - DNA, 630 bp, Gossypium hirsutum
tttatgataaaaacaagaagtgaccaagagatgaacatgtcaggaaatttcatgcaaaactaaaattgaaagaattagtaacaaagttttaattcccatttagattaataaataatatatttatatctttcaaacagagcaacctttaatttttgctttatcaattagtagattcttatttcttacaactctttcattggcatttggcaacctattaatgccactgctaaatccgaactcaaagaatggaagagaatttaaaactttttgagatcatcaaaaagcagaaactgtctttttattagttgcaaaaattatcccttcctttcaacatgagctctacaaccagctcataggaacatatatccacacagaatttgagaccaaaattaactaaataaatccttctctacaaccagaactatcgctcaacagttaagatcaacatcatctcattgccataacagtctatttagtgatgcacaaacttctagaacaaaagcactggcaagcacaagcaattagaggatataagaggccaaatcagaataccacatagaaggcgcccagcacaaccagtaagagaagtgaaatcacagatgcctccaaaggtaaagcaagaagcctctt

SEQ ID NO: 3740 - DNA, 642 bp, Gossypium hirsutum
ccatcattggtggcactttcaagacatccaggagagaaataagacacctaagccacccagagacccgtaattttgaatatactgatgcttcttttgtgatatttatttccatcaccctgaatggttatcttgcaggcgtctgccaaaaccgaagggccaaacagttggatcttttaggaagggacttaccatgctgcctgaggcaattgctaacaggtggccttgtctctataatagctatagcctctgtagtggttctaaattgtcaatatgcttttatgcccatctttacatttcaggaatgagggtcctaattagttgtcttgagttggcagtttgggtagcaatgtaaaattatcttggaagctctccagtattaccaaattgggtaatggagggtataacttgacatttgaaacacctgaaggaatggtatctcttcagagtagaagtgttgtcatgaccattccatcccatgttgccagtaacttgttgcatcctctctcggtatgtttcatatcttcctactccttgctagacaactttttatagatgttgttagcatctagcatagaggattcactcatttatgttgcaatgtctaggatgctaaattattaaaaagcaagttcgtctgcctct

SEQ ID NO: 3741 - DNA, 702 bp, Gossypium hirsutum
catatgcagagatttatcttacagagaacaaaaaggaactagaacaccgggtagtttgacaaagagaatagctcaatcctaacaattatgttcattactttttttatgcttttctacaaaggaaaacaattcaaacataaagatataaaggaaaacgaaaaccacaagaatttattccccatgttggccttcattatcaattaagttgtcaccaagatgccattctagcactaaggccattctagcattaagggtgtgcttgattgaatggacaagcgaagggaggaagagtggaagaagacaatggaaaagagtaaagaaaataatcttttaagtgtgcttggtaggaaagaaaagtgagaagaaagaatataggacagatgatcatttttcatttcattttaatgtatgaaaacaaatcattccaaattggaataataagaggagaaaacgagagagaagtaagttaagtgttcaaaattatacatttcttataattttcattttctttcctctcatttttttaactctaccaagcaatgaatggaaagaaaattactttttctttcaaattttccatattttccacccagcacaccaatggaaagaatatacatatttgctatctttccacttttgcacttcaatttttcatctttccaactttcttttcatcttagaaagcaaagcttaaggatgtgc

SEQ ID NO: 3742 - DNA, 546 bp, Gossypium hirsutum
ctttgatgactgctttagcatgttggctttgttcatccaatttaaccttttctgtcagctttccatacaatcagttagcatgcaaggtgttcctattttcatctttgtcaatttaccttttacgatatatttcttctttttattcccttgtatgtaccctatattctactcaaaactcaataaattgtgattgtttagtcttcatgtaactcaagaaaaaaaattttacaaaaaaagcaagtatgaagtgagacactatgtttactcggactcgggtatgaatgggtatgtgtccaagatagattggtcagattttttgagtttttccatgtatttggaagattattggaggtcatatgcctataaccatatctcaaacactagagtttcaagaaaaatgaagagtcagaataccatagttacaatcaatgctatattcatggtattttgatttgactagctcatatgtcagattgccttcatatatccactttttccatgcagttcgtttcaatggagagaaagcttctcaagtggaaaacacca

SEQ ID NO: 3743 - DNA, 634 bp, Gossypium hirsutum
ggtcttctctatgatattgagtgctggttttgataattttttcctcaatgttacagataccagaggaagagaaaaatcttggtccaaatgatcgcctaattcatgtataccactttactaaggaaacagctcagaaccagatggtaacaagcttgttatagtttcacatatctgattttctgttgccctgtttcctggtcactattatgttttccttaccacttctattgcctcttgttttgacagcaaattctgaattttggagaaccctttttcttggtgattcatgaaggtgagactttggccgaaataaaagtccgtatacagaggaagctgcaagttcccgatgaggagtttgctaaggtttgtcccaattgggcttgtgctcactgatttactcgagtcctactctcttttctcctctttttgatttggggcaaatcagttatagattgatgcatgctaggaacttcaatggatacgtacactgttgatatataatttttaagtagccatttttccctttccttttccttttccttttcacttttgttttagtttttctatttcctttcttatttaaatttatttgaaacctattttcttcagtggaagtttgcattcctctcacttg

SEQ ID NO: 3744 - DNA, 599 bp, Gossypium hirsutum
ctaatccacactttccacatccaagtgcttatgtacataaaacatatgccataacctcattaatgctcataccatcatttatgatattttaacccttaccatcaaaagaataagaagcaaaatttaggtaaaacaacacacccaaatcaacaagagcgggtagcaataaatgtatttaatcagcttgagcttgctatgttttcctctaaaacaactatggaatcagaatttttgatcagtgtaaaagcaaaaaaaaaatagagaaaacaagataattggaggaatttctctttcaaaacaattcgaaccaaccaattttcacaatgaagccatgtttgatttcataccagccataaaccatgttttccatttttaagattatctaagtgcattcatcttgttcctgagatagtaaagcttggctcttctcactttcttcttgtccaccacctttatgtcctttatgttaggggaatacttgtcacacatcctccatttttattttaccaatttgtaaatggttaagtatatgcaaactaaacagatagtgaaaactcagtatcattttaacttttaaaatagcaaagagaaggcattag

SEQ ID NO: 3745 - DNA, 551 bp, Gossypium hirsutum
  misc_feature (499)..(499): n is a, c, g, or t
cattaccaaggatgctttccatttgaccatccttcccaactagtctcacgaaatgctctcaacgggcaatgcagaaacgggaaaacgagataccatacaaaggttttgtttacacttgtctgcagattactctgttttactgctacaaggtaagtacatcaacgattggtaatgctcttccacttgatttaggtatcagttgggtttcgagtctccttcgatgacagttaaatacaattcttggccatctttcctacaataatgaacatgaaaaatctcaatgcacttgtgcagtgtcttgttagatgagtcagccccggaggccaaaacatggaaaaggaaaatatgaaagaggtaatacagctaaaagagcttggtttttcattatgttgtttgttttcctgtatattctttcttctcacttcaatgatgaatatactggaattcaagttaatataaaattacttttatttccatgtagatttttagcatgtcatangcaaaacaaaaaagaaaaaaaatttagcatttactttgattacttgaaaaag

SEQ ID NO: 3746 - DNA, 629 bp, Gossypium hirsutum
aatgagccaacaacatctgggaggaaatcctccccaggctctccattaccatcatcgccacattttatagaatcatgtgaacagcctgcgatattggatgtgtactcaccagatcgtttggttggagaattgttctttctggatacttctttaaaattcactattgaggagttatctcgagctccagcagaagttcttggcagaggcagccatggaactctatataaagctactctgtgtgatgggcatatgttgactgtgaagtggttgcgtgtagggttggttaaaaataagaaagaatttgctaaggaagtaaaaaagataggatctgtaaggcagcctaactttgtccccgtccgagcatactattgggggccgagggaacaagagagacttctcctagcagattatattgactgtgatagtttggctttgcatctctatggtaagagcttttaatttttcttttccttttttgaatgtttgtgattgtttaactaagtcctagtgcctgttggctttttatttcctttaagtttcgaagttatcttatgaaatggattatgatgtttgtggtcttctttgtcatctctttttctaccttttgtgctagatttggtcatggtttg

SEQ ID NO: 3747 - DNA, 628 bp, Gossypium hirsutum
taattctagatattactttttttctggaactctccaagtctcatgttcaacatgttccatgcttttctattgtcaattcatcatatctattcccttaaaactatgcagatgaattataaacagtgacactgaaatctcacatttactcgcccaaaaaattaaaaatagatcatgtatgaaacataacaggcattatgaaggcagcagcagtatcctatttcaacattttggtttgattcttctgctgttgtgttcatcaacaaagaaagaagaattgcaattcacatcctgagtccagatttaatagctttgttatttacattacgagtctaggtttaatagctttactttgcttttgatgctccctcccctgatttcttagagcaattgttctgacacgctaatttactgattctgtttgatatcagtcgaaactcttctgacatctccagtcttgtcaaatccagattttgcttcttcaactgatattgaggttatcattctccattttcttgttccatgagatggaaaaaaaattctttcttctcatttatgttcctagatttgttgttgcttattgaaaaaataaggtagacctcaattagctctattgcatgggtaattcttg

SEQ ID NO: 3748 - DNA, 547 bp, Gossypium hirsutum
  misc_feature (320)..(320): n is a, c, g, or t
  misc_feature (363)..(364): n is a, c, g, or t
  misc_feature (409)..(409): n is a, c, g, or t
  misc_feature (544)..(544): n is a, c, g, or t
tcacttgacgtaacaatatcagtaataaggtcatacacggtatgagttccacggattccgaatattacaagtttctttcgaggatcaattcctatataatatccaggcctcatcacactagaattctttacgaatttcaaaacattgctttctctaagcatgctagtccttgcaaggatggcagcattatccttataacatcctttggctaattcaatgtggtatatcagatcctgaacctacatcacaaaaaaaaaaaaaaaaaaaaaaaaaaaaaacttaaaccaaaacaaaaaaaaaaaaaaaaaaaaattttttanattttgggggaggggattgggaaataaaaaacaaaacgacctnnatcttcccccccttaaaccccaaaaagggtttaaaaagccccggngaaaaagggaaaaaaaaaaaagccctaaaaaaaaaacccttaagccccacccttaatttatgatttttcttttttaaatgcaaaaaaaaatttcaaaaacaaatggggcttttttttgggtttttaaaccccttnttt

SEQ ID NO: 3749 - DNA, 619 bp, Gossypium hirsutum
tgagatcactgatgatatgcaaacatcaagtgtaatccacaaatttactggcttctccacttacatggctcatcaccattgaacaaggtgaaactgagtctctatagtgctgacagacatatctaagaatagtcataggaggtgaatattttgtaggtcacttttgatatcaatccgaagccattcttagaaccatcaagtgtgaaaatccatcaatgggctttcatgggctcaacacttgggcttataaagctcacgtgaagtcagaaaattcatttggtttctcatagggataagggatcactcacatccttagacaataaccgaggtgtatgaacttaagcacacagttctctccctattcagtgagagctacgtgaccggtaactttgtgcaaataggaaaagttacttggccacgaacttgggtataaataggagaatctacatatctcatacacaactcattttacaaatctcgttcttaaaatcttcactcattttcacattcttctctattttaagagtacctctctttagtgctctctatctttctaaaattctaggcccctacgaacaaaatccattactttaggctttaagcatcggtcgagggtatc

SEQ ID NO: 3750 - DNA, 633 bp, Gossypium hirsutum
gacctaaataacatgaacttttatgattgttttcttctgtaagaatttaaatggtaatattggaacttaaataaacttaagccagtctcaatgttaactagaaatagttacatctgccatgattcttaaacatacttctgtgaaatctgctttatattaacttgaaggaatttccgctataggttacttaccagactgagctcttcctggataagaacaaagattatgttgtttcagagcatcaagctctgctgaatgcttcagaatgctcttttgtttcaagcttgtttcctccttcacccgaggaatcttccaaaacaacaaagttctcctcaataggttcctccttcaaggtctgtttctgctctaatgtatatgttaaagggagattacatgcttcatctattttcattcattttcatgcatgccatgtactttgaacagcaacaactccaagctttgcttgagactttgagtgccactgaaccacactacattcgttgtgtgaagcccaataatgctcttaagccaggaatatttgagaaccaaaatgtactacaacaacttcgatgtggggtaagtttctatattttggtcaatccttgcttttgttgataagcagtctgtctgtat

SEQ ID NO: 3751 - DNA, 647 bp, Gossypium hirsutum
tatgtatgcatgggtgcctagcaaatctaaagagtaggaatatctgcttgtgtatataacttttatatcgaaaaacatgtcataaatgcatagagagaagtgtttgaaaaagatataaacttggtttttatttggaattttatttaataaagcagaatataatttaaaaaagatatttaataccaaataacttggagatggatggaagagtgaatataattgactatatgtctacaacaataaaaccgacaagacaaaggttataagcttccttcacaccaagataaaagctttaatcaaaatataaaataaacaaaatccgacttagcaccaaaaacaatcaggtgatcacctgatataaaagatcatagcagaattttttcccaagacaacatgaacaaactttgcataaatcttcatgatagttaaacacatcgcttgaagatgtaatacgcaagacagctgcctccaattgagaaacgacaggtggtgatgcatttcccgacgaaagaaaaccaagatcttcgccaatatggatttttgtaaaggacagcaaaaatcgtcaacaacacaactacataagaaataaaaaaactcacacaaaaatcataagtatcaaacaaaccatcttctcctttatcgtctga

SEQ ID NO: 3752 - DNA, 640 bp, Gossypium hirsutum
tgaagtaaaattaccttttcatgagtccttccaaggccctattgcttgtttttggatcaatcctcatgttcatcttctgaatctgtaaaaagacaataaaaaagagaaattgaagataaaatagccagctatgaagttcaaaatggaaagccacttgaaagcacattctggggaataacaacatggatgtatattatacaagggtatgaaactcttttttaaagttattacatatgagaaaagaatgatgtagcatcctaaagtgcgtaaaatagatgcagtaagaatgattcgtatggcctccattcagcagcaatcattatttatcagtcaggaagtaagccaattaacaacataaatatacagacacaaattcacacatacacacaacaaatccatgtttttaaagtcagaagttactactgagatttatttatcactttatatagttaatctgtgttcttacgtgcagttatttccaagaacaaatacatatatatatgctgtacttaccagatctaacatcttcactaattttgcctccagcttggatttggttgactagcattcgatacatcagaacaagcaggcaaaatagaagtgtgttgaacagataataacaaattggtccaaccactgg

SEQ ID NO: 3753 - DNA, 602 bp, Gossypium hirsutum
cacacagcagcaattgcaacaacaactccagcgcttttgggcgaatcagtatcaagaaattgagcaggctacggattttaaaaaccatagcttaccgttggccaggattaagaagatcatgaaggcagatgaggatgttaggatgatatcagctgaagctccggtcgtgtttgctagggcctgtgaaatgttcattctcgagttgacactgaggtcgtggaatcacaccgaggaaaacaagaggaggacccttcagaagaatgacatcggagcagcaataacaaggaccgatatattcgattttctggttgatatcgtcccgagagaggatataaaagatgaggttctcgcatctgttccgagagttgaaggatcggctgatggtcttccttactattacatgccgcctcaacttgctccccaggctggtgctccgggtatgactgtaggtaagccggtgatggatcccaccttttatggccaaaagtctggcccttatgccggtcagccggtatggccgccacagcagcagcagcaaccgcctccggattcataaatgtgatcttaatgtctacttaagagcttaaaggacagtgcaagtg

SEQ ID NO: 3754 - DNA, 619 bp, Gossypium hirsutum
ttttgtttaagtaacccttccaagaaccctccaaatacaagaaaaaacttggaaaaagattaagcatgcccatgtcagacacatattcgtattcatcactcacactcaagtccaagtaacgcagtccgtaaacacaatatagtgaaaaaagtttccattaatagattttcttcacaaatttattcttagaaactacaagtatggcaccatgttaaactgttgaagacatccaaatactgagtatatgtagcaggaaaggcagctaaaatttggtgctcatggttgttgaaagccaccacatgtattgacctatgttactagaacttggttttgtcaaacacaggtatgtgtcctacataggcatgatcaatcctttccaagatttttatgtatttgaaagattcttgaaggatcacatcctcatacccatgttcatatatgtattggacaggtcttggacacagacacagtccttcaagaaaaatgaaaatttgaagcaacataggtattgattgacaagcaagtcgccaaaaatgttagttggaaagaaggattaccactttgtgatttgaatgtcaagaaaacataaacattgtgcggcattgataagtagcataca

SEQ ID NO: 3755 - DNA, 576 bp, Gossypium hirsutum
  misc_feature (523)..(524): n is a, c, g, or t
accaactttggcacaaccttagcactttcatcggttgtttgcgtttgatcttcaattattgccgtttcactcgcatttccaaaccggaagataacgctgccatcagaatgctctgcacatttcaccaacgctcacaattatcctaacgaacaaaatttaatctaagcttcttttacttgaaattcaccagttactaaaaatgcaacacactttcaaacatcataacattatgctgttcttaacaatagttgattcaacaaacagtagattcgaattcgatcattcgaaagtaaacaaaaaaaagaaacgaaaagaaaggaattaaagtgatcattttaaacggcgtaccggttgctgaaaggatatctacatcagcagaaacggaatcggaacttgagcacttggaaacgacgaactggtgattgaatttaagtttgggaggagagaagcgaagtgtgtgaaaatgcaatggagggaagcggaagctccagaagagtgagttgttgcagctgggaaaactcanngagcgagcttcaagagaggcgaagaagaaaggatcggcagccattgcataat

SEQ ID NO: 3756 - DNA, 515 bp, Gossypium hirsutum
  misc_feature (507)..(509): n is a, c, g, or t
ttaaagataaatatgatcgtaagcatactttgtcggtccttcctcctgtttattgtacatttgacatcctctcataacttgcattgctgattgttctacgtatggatgtttgcagttattggggatgttagaggaagaggattgatgcttggagttgaacttgtcactgatcacaagctcaagactcctgcaaagcttgaaactcttcatataatggaacagctgaaaggttgggttacttccaatccccacatttgtccaggcatggaatatactcacttcatatgtcactaatgaaccccattttcgtatcatagaaatcggagtattggtcggaaaagggggattttatggaaatgtgttcagaatgacccctccgctctgctttactaaagaagatgcaggtcagttgatcctcttaacttgaatgttttcttttatcatagatagggacaaaatccttttgccggtccttcctgaattcctggtggcaaattcctaataaannncatggg

SEQ ID NO: 3757 - DNA, 648 bp, Gossypium hirsutum
gggctggggcagttaaccccgatccggattggcttcggcgaggggattaatacgtgacgaaagggtcaagtgagttaagggtcttttgctgaaaatagggacatcaaatagcgtacaagctgaactctggagcgttgatgaaggactacaacttgcgaaaaatctaggcatctccaagcagatagttgaattgaatgcttcacttgtggtacgtttcttggctgggccatttgaggacgaccaaattggcaccttgattttagattgtctaaagttcataaatgagggtggattctctagcaagagagggaaacatgcgccaacaaacctggccaaattagcataggcacttagaagttggggtactggttcttctcaactttccgccaacaaacactaaaacaataataataataattgtagggcatttgatataattaatttgatgaatgtattattattaattattttcaaataatacgtttcattatttattatgcaacacacattatattctatatatatagtttctaaatatatagtatgctaataataaaatttctagaaaaacatgattaatgagggtaaaagtacaaaaaacccccttactatacttcaaattgcattttaacccctttattttaaaaa

SEQ ID NO: 3758 - DNA, 578 bp, Gossypium hirsutum
  misc_feature (54)..(54): n is a, c, g, or t
  misc_feature (514)..(514): n is a, c, g, or t
  misc_feature (569)..(575): n is a, c, g, or t
tgtaaggaagaaagattaaaggtagatatcaattctttcaagcttcaattcttntttaatagaatctacttgaaagtcatttctcaaaaattcattgctttgcaacaaaagaatatgtaacttcagaattgtaaggaggataaaattaagttactaagaaatattctctttctttttttctttttaatttatctggattttagaactgtatacagccaagataaggttcaatggcgttaatcagctttgattgattaaagatgatcaaaaggtcagcatctttaaaagaatctgcttttataaatagacaaagaagaaaagaaagtcgaaactacaatttacaatagacaattttttttttaaaaaaaaaagggaaagtttatccgttcataccacaaggaggttagcctccagcacctcttccaaggttgaatgaaatgcttccaccaactataagagcaatatccattagtgaatgaagaccgaaaatagcaaaaagggggaaaatataaanaatgacacatatactcaatgattttcagttacctgtactggcagatcagatatgnnnnnnnaca

SEQ ID NO: 3759 - DNA, 601 bp, Gossypium hirsutum
gatccttttgggatctgatcatttcaaaatacaaaatggttaatgctggatgccttgatgcatgtcaactgttgaaaaattaataaatatttcgggctctagacagtgggctaaaaaattataacgtctctttataaacatgagaagttcattccaggtttcatactttaacatgtccaaatttggataagactgaggctcatgtccaatgatcttaaaaactcagaacattattttgcataactagattagctactctagtaacagaaatttacttttgccttcaatcaactctaacagaagggtaaattgtgtaatacaaataaaaaagtggtacaaaaccaaaattattactttcacttgaatctttcctgatagtgtaggcacctccactgcaccaccaagaattgcctgtaagaaatccaatattgatagaattatttgaattttttaaacaaatcaatagaagttccttgataaggtaagagaaacaacataaagtttagttcaagaagggagaaagtatgcacacacttagaaaccgactgagatgtttttactaataataagagataatatatagtataagcacataaaaaag

SEQ ID NO: 3760 - DNA, 636 bp, Gossypium hirsutum
gactgtgatctattttcttttgatcaataattagccataccatattaatattcctcaaagattcttcaatcatatatattcgcttctatatttgaaaaaagttgtctttctttttgtgttaaattgtttgtagggtatgtgtgtggactgcagccttgctgttcttactgtctatcttgggagcatgttccattatcaacaggtttacccgtgtggcaggcgaattgttcggtctgcttatagctatgctgtttatgcagcaagctatcaaagtaagatcaataatttatcatctcatgtttattttctactgtaaaccataccctttttaagttgtttgttctcataaatttcatatacagggcattgtggaagagttccgaattccacaacacgaaaatcccaaactcacagagtttacacctgcatggaggtttgccaatgggatgtttgctctggttttgtcatttggccttcttttttcggcattaagaagccgaaaagcaaggtcttggcgctacgggactggtaagcttactttttccttgatcaccttttggttgtatatatggcaccatttgcttttgacaacttacaaagaagcttttttgacaggttggcttaaaaaaactttaa

SEQ ID NO: 3761 - DNA, 606 bp, Gossypium hirsutum
tttttgttcagtgtgatagagaatatgatgtgctatttgtctgcaacattaggagtacatagatgcaagaatagatagtgtggctgtcccaaaacaaatgataaagtccctagcagcttgtaggagtagcaaaccatttgctaaattgtcctatgtagaaacagtccattctcgaattaaaatctgcaaactgaaagaaaattcttacatctatggatccgccaggcatttcaatagctatttagctaagtctcataatacatagaagatgtttgcagttcagatgatgatgctgcaatggctgtgtggatataccagaaagacaggacaagaaacagacgatttgggaaatatggggttaacgaaatcaaggaaaaggtaagggagatgcgttgaaagttggtaatcgccttgtttcttattgttagataaagaaatataaatggtttgagaaatggaaattgaaggaactaaatactgttgagataaccaaaaagttcgatagttgtttcatccagtctaaaatactaatcgagttcggggaaaattaataaaagcactactgaaggcatctttttatttcacgtaaaaaaggagtaacaagct

SEQ ID NO: 3762 - DNA, 653 bp, Gossypium hirsutum
ctgaagccgtagctcttgcacgagcagctgttaaggtttcaaaggatgctgtcttgatgtttaagaactacagttctgctaaatcagaaagaaaatccgcaactgatacttccacttccaattgggccatgtttactgaagccgagagggctggcattgttggagattccctcgaagatgactgtgaatttgaagaaggtgattcagggaaaaattccacaaaagaatctgatgaaccagagccaacaaatgaagaacttgaacttcttgaggaacaattatctggaaacatagcagtgaggtcaaagcgccaacctgaacgaaaagccagaagaatgaaagcagcagagaaggctgctgccaatgttgtttctgtgaaatccggttccaccaataaaaaaaggcatggtgctgtccgagatggcaattctgatccattgcgttttttgagagggactaatgttacttccaggcttctcactgctaatgaagaacacgagttgtcggaaggaatacaggtatgataatttaagactcttaggaagataacgatcttgtaatcatgtaatctgtcaccgagagtatatttcttatcttgatatttatctgagatgaagccataattggcttgagatttctgaatgttctacctg

SEQ ID NO: 3763 - DNA, 599 bp, Gossypium hirsutum
agtctcatgttaaggactcaaaaaactatatctacaaatatttgacaaagctattgatctaactgaaagcgtaaaacaaattcttctttgatcttcatctagatgatcagaacacaacataaattcttaataaaatttctcaacaaaagggtaatctgcattgtcatacaataatccgaaaaatttcgttgtatgtgtcggacatggaaacttaacaaacaacaaacataatgaataaagtgtcctatcttggtctattcccactttgctatatctcttctaaaatttcaaaatagtacataaagtgtcacattttaatcaaaacctgcatactcttacacccactaggataaaattcatggtttcttgcatgctacattaaaaaccaaacacccaagaacatgaaagatcgccactgtcccaccgtcaaacttgctgtttattttcacacaccttcagtggaaacaccaatcgccaccattttcatgttttggaaacaaaggctgcttcctttgcttagtgcccccaagtaagaatgtcaccactagaggacattaatgtcaatgaatgcacgacagtggcgccgatattcccattag

SEQ ID NO: 3764 - DNA, 639 bp, Gossypium hirsutum
agttttctgctgggattcagatggtaatctctgctgttgtcccatcttaagtatatttatcagcatggtaggatttactgcaatatctttcaacaaagcaggcaaggaagggttactcatgcctgtcagtggcacctgctcatttttgttgacaatcgtattggtttttccacttagagtacttgaacaagttactccatgttccattttccaggaattggaatccaaagtctccatggtttggtttctgtttgttatctgagactcacaattatcagtgtcctctaaccacccaccatttccagacacagcttgaacatccctaaccccaagattttccaactcgttcttctgtcttttgggtgcaggaccatctaaaacaggttcttccgtgctctttttctttcttggatccattattccactaacaggtggcactttagatgcattatgcaagggcctttggtttagatccaaagcactcacattagagttggcaaaccgaagtctaggatctctgctttttgctgaagcttttgacagtatattagatgcagaactcacagtcacaggtgtggcattttgagttgtaaactgtccctgcatgctggaagtcgaactggcactgtcaatatgagg

SEQ ID NO: 3765 - DNA, 634 bp, Gossypium hirsutum
aagcttggctgcagatgttgcagaactagtggcaaaatctagaaaggtgattcttgaatatcaagaaaaattggaagtttcctgatttctgaaaattatatcaagagaaatgcaagccacctcttgtactttattacttattgttaagatagacatggaaggcaatatctaaaatgctaaaatgaaaatgcaaaacaaactataaatggtaccacacgtaatagctggattgcatgcacttaattcttgatctctatttcagctgacttttgccactatggcttgatgcaaagtttgtctttcttttttaattatgagcattgttctaagcttagcaattagcatgttgcaagatgtaattcttatgtccaaccatgatcgtctttagattatggtacttatctttttaagatatattgtttccagaaatctttcctctattttagcttgtttttctcttcttttttgtttgcttttgttatattaacaggagaggcaacaaaagcgagctgctgaagaaaaagatgcaggtcctgctcagactgctgccgaggcaacccggcgaatgctggtgaagaaggtattagatagcctttctttcttgttttggcctagggggtaccgcgtggctgat

SEQ ID NO: 3766 - DNA, 640 bp, Gossypium hirsutum
atggatcctgtattttacatatccatacgattgagtccttgggtttccgaaatagtgtaaaaagaagtgcttcgaatcattgctatttgacccggacctgttctaaaagagtcgaggcatttcgaattgtttgttgacacggacaaagtcagggaaaacctctgaaattatttcaatattggaccttggacatataatagttccgaatcgaatctctttagaaagaagatcttttgtctcatggtagcctgctccagtccccttacgaaactttcgttattgggttagccatacacttcacatgtttctagcgattcacatggcatcatcaaatgatacaagtcttggataagaatctacaacgcactagaacgcccttgttgacgatcctttactccgacagcatctagggttcctcgaacaatgtgatatctcacaccgggtaaatccttaacccttccccctcttactaagactacagaatgttcttgtgaattatggccaataccaggtatataagcagtgatttcaaacccagaggttaatcgtactctggcaactttacgtaaggcagagtttggttttttgggggtgatagtggaaaagttgacagataagtcacccttactggcactctaca

SEQ ID NO: 3767 - DNA, 653 bp, Gossypium hirsutum
  misc_feature (20)..(20): n is a, c, g, or t
ataattggcgtttgggaganagcttttatatgaatgaaataagataaccaagtaaggtgcgtggccttaaaagtcgtcgtcgtcgtcgtcttccagaaatataaaggagatactgtgattgggaaagggcgtgtgtgaaagcgaaaacttttgagttgaggctggcaggggagaaagacacgttgaatcgaagtgttgggttagggctaggttgcttagccatcttggtttgcccttattttactttattcatgtttgaaaaaacttactttctgatgttgaaatgatgaagtgaggatgctcattggcttttgtcatttgtgcccttttcatccttctttcttgatggagcaatctgtgttaacttaaaaaagagtaggcattctatttgttaactgctcacttttgaaagcacattcatctccataaccctcacaattgaattggttagtttagctttcaggctttagcattaaaaaaaaaatcatgaatatatagttttataatggtctaatttttcccccagtccttgtacttttgggttattgaaatttaatctctctaattttaattcgaagaattctagtgtatcaagtttttctgatttagtatatttgataatgttgttaaacggattcattaccaatgctacc

SEQ ID NO: 3768 - DNA, 607 bp, Gossypium hirsutum
gttctcatgtttaatcaattcatgcttctttcgcatattagatgacataaacctgaattctgttcctcacctttcaaatttcttagcattaaatgcagcttatagacatgggtaccttattctattcaacttgttagtggtacagataagaattttaaggtactccatatggtttaatctaaaagtggttttgtttgtgacttgactcattgctaggcttttttttctccctttaatatgttctttttcatttttttggttgtctggaggggttgagatgttgttcatctatgatttttgtttttgttttttttttgcgggttcattttgatttcttgttccatgtgtataatctaagctaaaggtgttatctatgctgtctttactttctgttaaaatcaagaaggacatgccaatcttttaacctcctttttgagtcctttgtgtcgtttgattatcattgtttattatcttggtgtatgaaatcaattttgcttttctaatcgttatgctgagctaacctttttattgcatcagacttcagattcaacaaaagttgctcagcatagctccctgcacaacagtttttctttccctgcatcacttt

SEQ ID NO: 3769 - DNA, 618 bp, Gossypium hirsutum
agctcaatgctttcaacaaattcaccatagcaattatccaccatgaccaagcagtttgggttctgcatctgttcaaacaaaagagaattaagagggaacattaaacagatgaaggtattacgaatctacgatctatgaactaaaatgaaaaacagaaacggttgtaattaaacaagctgctagtgtataaagaaatttcaagataatatcccatatctactttttctatgaaaaggttggaactaaacaggatgctaatgcatatagaaatttcaagataataatatcccacgtcttgtcagtggtttaatgaactaatatcaacattcatgcaaagcaaaacaatataatttgtcagtggtttaaactcatctaaacatttataataggaaaatatgcaagttgtaattaggtcattccaagcctggaccatcagagactttattactgcaaggtcatttcggtgactaaatcgaatagagttcccatcatattttctgaatatgaacagtttaccttaattatctttattgctctccctatctcttctacacttaaactccgacgccatgaataaccacatgacctctgtatgagagcacattttgtataaggtct

SEQ ID NO: 3770 - DNA, 639 bp, Gossypium hirsutum
tacaatgtgttctctgaccaaccacagccatatttttgttagcagcggaataagagtatcccgcagttgtgccggactgcctcccgaaaagcccattcaaatttggccctgcaaatttaaaaattctcaacttattcttccctgaacttcaaaaagtagtaaaagctaaaacatcaaattgtatcaagaatagatctatatcaacatagaatccagtgtgaatcgccttgtttcaatgcaaatctaagtaatctaggcacttaaaaagttctttttttttcaaattcaagagcctctatcagttcacatatacgatctaaaaagttactgaatctgagaatagaaaatgaccaaataattcttactaaacatttaaaagatatgaacatgaaataaatttgatataagattgctagcatatgattaactaataaaagcaaaaagttgagaagtttgataaaaataactgaattcaaagaagaacaaaatcagatctgaccgaccttgcttgtgaccagcgcctttatctacggtgtgacactgcgcgcacttggttttgaagatcttctccccagctttcgcatttccggggggggcttgctcgaatgaagccattgcttttcgttcttcaaatgggtc

SEQ ID NO: 3771 - DNA, 661 bp, Gossypium hirsutum
tttgccttttcatgtattttttagtttcagatctatgctctttttttttctgagttttttggttttcatctttagaataagtttgtctttgccttttaatctctgttttagttttcagatctatgcttctttccttgtttttcagtcggtttttgttttgagtttttggttttcagccttatgaaatactgttttggttcgtcttttcaaatctatggatgttgggtgccattgttctttttccttaacatttgtcttcttgctttttcatctctgttttgggggtgtggtttgtttaactgggtcggtttctaggttgttggttcgggttcgttttctttgttctgggcctttggggccattggtttggggtgacttgggatggtgggcctgtttttttgggcgtgggatagtgggcatgattttggggtttctgtttgggtcctgtggcttgtgataatgggcatattttcatagttttttctttccacaatttccttttttttcctgacgtttctttccccttaattctctccgtctgccccgtttttcaatttttcttctcatactttagctttgggtaaccgacggccgaaaaaaggcacagacactatacagtaattttctctgccgtttctgttttggtgattcttggaatccc

SEQ ID NO: 3772 - DNA, 404 bp, Gossypium hirsutum
tggaaagaagaaagaaataaacttgagttttcttggtaggaaagaaaataggaaagataatcattttctatcctaatgtataaaaacaaattataccaaattggaatgataagaggagagaaaatgagagagatgtaagttaagtttcagatttatgtattttttttaaaaattcattttcttttctctcatttttccactcttccgagcaatgaatgggaagaaaattactttttcttttaaattttcaattttttgtaccaagcacgccgatggaaagaaaaaatatgttttgtttctacttttctactctttcaatcttttgacgcaaatccttagttttaggttctagtttggagtagaaagttaaaactgcgtggattaggcttctagttttttttttt

SEQ ID NO: 3773 - DNA, 638 bp, Gossypium hirsutum
agagaaggttgtttagtcatattcggccacacattgcttctgctttgaatgaaactttccaggttcgatctcagccactcctcaaagctgaaaccaaccaggagacaaagaaaactaatagttcaaggatgccgggagttcgagaagactttgataagatagattttcacatgtctacttctgcaaagtatcttcttatttcagcgttccttgcttcaagaaaccctgctactcttgatgcatcattatttgattcaactggggtttctgatagtcacaaacgaaagaggaagtaagcacaacaataacttttgttttacgaatatacttctaggccatggagctacaattgactatattggaaacaactagtatggtaatgggctaatggcatatagctgttaattagagctcccttattattctggaatgagtttcttcaactcttctattggacatgcttttttgttttatatgcctgttatgtggaaactgcagttgtgcttactggaaaaacttcaagtacagtccaagagcctgccataatcttactcttgaatatatggtatagtattaactgatttagtcatgtttgcacagctaattgaatgaaatgggattgtgttatatgagctgct

SEQ ID NO: 3774 - DNA, 948 bp, Gossypium hirsutum
  misc_feature (45)..(48): n is a, c, g, or t
  misc_feature (504)..(504): n is a, c, g, or t
  misc_feature (520)..(521): n is a, c, g, or t
  misc_feature (525)..(526): n is a, c, g, or t
  misc_feature (530)..(530): n is a, c, g, or t
  misc_feature (532)..(533): n is a, c, g, or t
  misc_feature (535)..(536): n is a, c, g, or t
  misc_feature (573)..(584): n is a, c, g, or t
  misc_feature (604)..(606): n is a, c, g, or t
  misc_feature (608)..(620): n is a, c, g, or t
  misc_feature (636)..(648): n is a, c, g, or t
  misc_feature (650)..(668): n is a, c, g, or t
  misc_feature (672)..(684): n is a, c, g, or t
  misc_feature (692)..(700): n is a, c, g, or t
  misc_feature (702)..(702): n is a, c, g, or t
  misc_feature (704)..(710): n is a, c, g, or t
  misc_feature (712)..(724): n is a, c, g, or t
  misc_feature (726)..(729): n is a, c, g, or t
  misc_feature (731)..(756): n is a, c, g, or t
  misc_feature (758)..(762): n is a, c, g, or t
  misc_feature (770)..(788): n is a, c, g, or t
  misc_feature (790)..(792): n is a, c, g, or t
  misc_feature (794)..(795): n is a, c, g, or t
  misc_feature (797)..(808): n is a, c, g, or t
  misc_feature (810)..(813): n is a, c, g, or t
  misc_feature (816)..(823): n is a, c, g, or t
  misc_feature (827)..(840): n is a, c, g, or t
  misc_feature (843)..(845): n is a, c, g, or t
  misc_feature (849)..(851): n is a, c, g, or t
  misc_feature (853)..(858): n is a, c, g, or t
  misc_feature (863)..(872): n is a, c, g, or t
  misc_feature (880)..(886): n is a, c, g, or t
  misc_feature (888)..(888): n is a, c, g, or t
  misc_feature (890)..(892): n is a, c, g, or t
  misc_feature (900)..(911): n is a, c, g, or t
  misc_feature (919)..(931): n is a, c, g, or t
  misc_feature (934)..(934): n is a, c, g, or t
  misc_feature (938)..(944): n is a, c, g, or t
ctcttataaacataaaattttacttgtattgattcttgatactgnnnnattttaagtctgtttctagaatcttatatatgtcgcatgacagtgacaatgcaagggcgcaaatggataacaataacagtcccaactcacaatttaaaaacttaatgtatgcttttatgtaatcattttctttttcctatttcccagtgccacgacggttggtattttggacttaacaattgaagctgaggataagaaacatggagacttcttgaggctgctaggctgttttaaccactattgatctctttttataggcttttctacattaaaaatatgttcttcaagaacaccccactacaatttactgcgaagaaaaaaaaaaaaaaaaaaaccagagaaatgttgttttatatatcaccacgaccccgtttaaagggatatttagatttttgcgaaaacccaaaaatatttttttactgctctctctttttatgggacacaaatttttttgtnaaagaggatgaaaatnntgtnnaatntnnannattttttatatatatctcaaccaaagtttttatatannnnnnnnnnnnaaatatccctttttttttgnnntnnnnnnnnnnnnncatacccctttggggnnnnnnnnnnnnncnnnnnnnnnnnnnnnnnnnacannnnnnnnnnnnnaaaaaaannnnnnnnncncnnnnnnnannnnnnnnnnnnnannnncnnnnnnnnnnnnnnnnnnnnnnnnnnannnnnaaaaaaannnnnnnnnnnnnnnnnnnannncnncnnnnnnnnnnnnannnncannnnnnnnacannnnnnnnnnnnnnaannnaaannnannnnnnacatnnnnnnnnnnaaccccannnnnnnancnnnaaacaccnnnnnnnnnnnnccccacannnnnnnnnnnnnccnacannnnnnncaaa

SEQ ID NO: 3775 - DNA, 687 bp, Gossypium hirsutum
  misc_feature (675)..(678): n is a, c, g, or t
ctttaatctgaatcctctatcaaactttcagcttcttccagcaacccagcacagcccaacagatcagccatattccccggtcattaagttaaaatatcgtcttcatctaccaacccagtatgactacaagtgtaaagaaccccggtaaaacttatacaatcaggctccatgccctccatctcattaaatgttgttagagcttctccacctcttccattctgaccaaacccatagatcattgagctccgtgttatcaagtttctatcagacatctgcatgaagatgcgatgcgctacatcaatagcgctggatcttgcgtaaagatccaccaaggctgattctacaaccacatttctccaaccaatccttcttacatactggcaatgaacttgtttcccttgtgttaaagcagccgcaattgcacttgcacttgcacgaattaatttcatcacgcatttccctaaattttctaataacagattcacattctttattctgacagtagacaccaagtaaggcagcccaagcaagtgaatccttctttgacatcctatcgaaaacatgctgagactcctcagccaacccacacttgccatacatgtcaagaagagaccgttctagaaccgcatcaccaagtctacaagtaaccaacttgtcaagaaaagaccgttctannnncgcatcacc

SEQ ID NO: 3776 - DNA, 628 bp, Gossypium hirsutum
  misc_feature (503)..(504): n is a, c, g, or t
  misc_feature (513)..(514): n is a, c, g, or t
  misc_feature (535)..(536): n is a, c, g, or t
  misc_feature (539)..(539): n is a, c, g, or t
  misc_feature (542)..(545): n is a, c, g, or t
  misc_feature (554)..(557): n is a, c, g, or t
  misc_feature (566)..(568): n is a, c, g, or t
  misc_feature (570)..(573): n is a, c, g, or t
  misc_feature (583)..(583): n is a, c, g, or t
  misc_feature (585)..(588): n is a, c, g, or t
  misc_feature (593)..(593): n is a, c, g, or t
  misc_feature (595)..(608): n is a, c, g, or t
  misc_feature (612)..(614): n is a, c, g, or t
  misc_feature (616)..(617): n is a, c, g, or t
  misc_feature (619)..(624): n is a, c, g, or t
gagggttcccccaacgatagctttgaactgataaattcaaaaagttgctttcagatttcttgtcaaaaggctgctgaaataccttgatttgttcttgcttcaacctgtttagaagctcatctggaaccccatggttcacaatctgaaagaaaccccattcaatagcagcttgacccatcttttctatgcattcttgtctctcaagtggtccaagattcaagtgactaagatcaatcagaggtagttcaagttcatcaaagccttcaaccgtggaaggtttctccttttcatttgcagagctctgcaaaatggccttgtatttctcaaaaaatggtggttcaattgccattgcctcactatcttctcgatcctgctcagacaaataaaaatggagtaagtagttaaaactcaatcaaaagaactactactgtttatatgaattgtaaaatcaaatgttcataaaaaaatttttgaaattgcaaaaaagggcccaaggacccctnnaaaatgctnnaaacctacaaggaataacttnnagntcnnnnatcttaaannnnattgaaaannntnnnnctttccaagngnnnncctgncnnnnnnnnnnnnnnaatnnntnngnnnnnncaaa

SEQ ID NO: 3777 - DNA, 634 bp, Gossypium hirsutum
ctgatctgatgaagattccgaggggaatgatatagatgaagtggacattgaaggatttaagctagccctttgtcaagctgattcacaagtgaagaatctgcctgcaacagctcaggtatttgtcttttggtatacaagttggactaggttgggtttgttaggtattgcatagagaccacacgatctcattgcttgatctttaggttgcggcacaacaaggtgcatatctttctaaatgcttcaaccgcaagtctaagtggaaagataatcctgaaggcccacggcgttttagagggtctggtcgtcatcaattccatccatttcagtatgtgctcttagttgtttcctatgcaagtaactagatgcaattaaatttgaatgcatccataaatgctaatggttcttggacaaatcctaattttaatgtttttttcatttcaactgcaagatacaaacaccttgggcaatttgctcctttaggaggggagcaagcagctgctgagctgcctggggactgggtttccatgggtcgtagcacacagtggctctggtactctgtatatgcaaggtgaaatcctggccatcttcctattgttttacatttacttgcttagcacatgcacgttacattgag

SEQ ID NO: 3778 - DNA, 606 bp, Gossypium hirsutum
tttcccttttcttgtaattgtgttttttttttcttggtcttgaagtttataacgcaagtgtgggcttatgcttcttaagttgatgcacaaacttatgctttcattttttctgtttacaatttgattgtgggatgataacgttatacatgtacttattgctttcactccaacctccagatggatgcacgtttatttaatgtaatttgatgcaggtaacacatgttgccacccagtatggtcagactgctttcctgtatcatattgtttcaaaatggaatgctgaccctgatattccagattatagtgggcgaagtcctttgcactggtaagaggaagttcatttaccttgctctttattcacttgaatggtccaagatatgtctgcataatgtgaagtcagatctgttatatttatttctttgcactgcttaagtattgtaactattttgttcatttctttcctacaaattgcttgattgcataatgcagttttacaagaatcagatctgttatatttattctaacttccttgcaatatgcataattctagggccgcttataaaggttttgccaattgcatacgtcttcttttatttctaaatgcaa

SEQ ID NO: 3779 - DNA, 628 bp, Gossypium hirsutum
tactctttcttttataccttaggatcttgttttggagaagcattttattttattgtgcattcatttctccatttgacaatgctttataatttggttaaaaaatagtcagaagttaatggcaaaataacatttgtgaaaaatagtggaatgttccacaaaatattttagcttttgactatctttgagtcaaatttgaaatagcagtaaaattgcacctgcacctgttcaaagttgagctgtaaatttgatccatcatcttaagtagagtaggaatattgaaccttataccaaaactaataacatatgccttgttagactaaagattttcaatatctctttgctggataaaaagtaagactagagtattttggatgtttctgtacatctggagagaaagggagagctccttattgtatatacaacttctgctctaattctagctgcatcagcaattgctgcgacatctgctcctggtggccggccatgattctcccacctgctctatatttacaattacaacacataagccatactgtatattagagtctgctattgaaatctgaatctcatttatagactggcatataagaattgagtcatcaatggtcgcaacgaatgaagttctcta

SEQ ID NO: 3780 - DNA, 658 bp, Gossypium hirsutum
aaagaagaaagtggagtgtaaaatctaaagcagtgtaaaatataaagcacataatgaaagatagaacaaaagaccaattagaatcctaaaaaaatctctgcataccaaagattctaagaaattcactcctatgaactgcacatccactccatgagctccaagaatggcctggttaacctgtagtcatgaaacttttaagacattcctattcacaactggtgacctgaaatgagttcgaacagtggaaaaacttgacatagtttaagttgtatgagacattacttatatactaaaccacatacagcttagaggtaaacataattaaataagtttactttgtcaccctccgaaatgttattgaacctctgcacctctatgtaatggagagagaaggatataagcagaacatatatgatctatatctttctttaagtaactaagcaagtaaaataaacaaatagaacatcattagaaagacaacatgtaagttaaatcacaactacatcagcagaaaggctaatggatgatgacaatgggactcatacctgataaaagaatgcctccttctcagcttctgtaaagtcaagcctacaaataaaatattcatttaaataattacaacgttccaatatctcggagcatatgtggaattcaatag

SEQ ID NO: 3781 - DNA, 525 bp, Gossypium hirsutum
tgattatgttaatttaaaaaaaaatagtgatgatatagttcagtttattgaatgtaagaagagatgaggtttcacaacttcttatacattattactttaaggttgtttttagattttctaaagtttatatattattaattttatttatttttattttatttattttaatattatattattctttacaaattagttattgtttaaaaatttaaaatttaaaattttaaaaataaaatgtaaaatataatttatcaactaatttaattatattttattattgttgaattttgagcttgaactccaatggaggaaatagataaatattgtctgcaaaccctaagttataaagaagaaaatagagtttttagtcatttaaaaagataatttaaacttttatcactaaaaatataaagaattaaaaaaacttttgttcactttatttccataattaacttacttgtcaataaattatagactaaaattcttgtctctcctttttaatcgggaatagagcaaacttggtaa

SEQ ID NO: 3782 - DNA, 609 bp, Gossypium hirsutum
ctcagctttgatgatcagttcgaatcttgaagtgtctccccactagatatacatgccatcttctcactaccataaacacaactaacatctctttctcatatatcgacaatgcttgatgtctaacgcccagcccattgctaaaaaatgctattggtttgccttgttgctggaaaacagctcctacaccaaagccaaaggcatcagtgtccatgcaaaattccagttgaaagtcaagcaaggtcaacataggtgctgaacatagagcatctttcagctgctaaaatgcaagggtagcttgattgtcccattgccaagcattttttttaagaagataggtgaggggtctagccaaaattccataatatctgatgaattgcttgtaacatccagtgaagcctaaaaaactcctcaattccttaatacatgtgggtgtaagccaattggcaacacaggccactttccttttgtccatggctatagtccctcgtgctatcacatgacctagatactcaacttgttcagttccaaacgaacatttgctttgcttgacaaagagtgtgtgttgccttaggatttggaaaaccaccctaaagtgctctatgtgttcat

SEQ ID NO: 3783 - DNA, 657 bp, Gossypium hirsutum
tatttgcactttgttgggaaaaattatagaagctgaaatcactcatttctgttattagcttttacagtttcacaatgaaacctccccctattcacattttccacagagagaataagaagaaaaaagctatccaaagatatcatgtctcaagactttgccttaatttcatggaactccttcaggaatatcctacaaaatccaagtatctaacaagcatttacaagcgcaactctgtaaatatatatactatatgataagaaaatatcaattaacagtttataacacattaaattgattattaggtaaaatactaaagatcccacactttaatttgtcaatatcatcctcttgtacccaattaagccttggaagtatatttttgtttaatgaagcttttactatgcacaaaaacctctaaaatctggtagagaactttgagggtttaattaaaataaaagaattttagaaggtttaattggatactctaaaagaatatggacttatcaaggaaattcaaaacggtattttttagtatttaagggttgattctgtaagatcactaaatatgcaatattacaaatccataagatgcagacaggcacccaatatacatgtctggttcccaaagcaactgcctaagttgctacatcttgctga

SEQ ID NO: 3784 - DNA, 624 bp, Gossypium hirsutum
gttgctgtaaaatacaggtctcagtttgagccttattttaacttgaaatgattatgcaggtgcaccccaggcacttatacagagctgtctcacatttggggcattctcatttatcgttgaagggcttaacaagcagcagccagcattggcacattcattttctgtgagaaacaagagcgggcactacgaggggcctcatcctatagcgctccctctttcactccctattccagatgagctgaaaggagctttttcttctttctgcaagtccttaagtaaaccaaatgaaggcaagttttctactggtaactgatgggaaggggccattcatcattgttaattgtctgttatatgtagattgttgattgttgcgactgttggagttacaatgtaagaatgtagaatcaaaattatctgagagctaggaaatgggaaattgttttttgtcctatgttgcatttccatttctaatgcctgattttggatcaaaataaagaatatttgattgaagatcaatgtctctccaaactcctgaaaaacttggatgacttatcttttaggttccagtgaagggttgatccacttgcttaagtagattatagatcaagctatgtgtttgtagca

SEQ ID NO: 3785 - DNA, 616 bp, Gossypium hirsutum
accaggaaatacaaagctaggtatgctcctacgttttacatgagatacatggatttccattccaggcttccataaagtgtacgtattaacagagtgtttaaactcctcgacagttaaccttatatcaaattgttcgccttcatttactggaactccttgtttgcgttgcaagcccataaagtaactgcaatggaagggcctagaattgtcttgaaaatcgccaggatgtgggtggcattgaagcatgttatatgtgtgcctttcaatctagatttaaaaataaaaaattgaaaaggattacgatagactagaagcataaagaagacaaaaaacaggtagggtaccaaaaaccacttcagaattttataagaagtgagttgtttgattttcaagagggtataaatagaactctagtcatgccctctcttgtacaaaaaagaaaactattttcaccttcaatgtgagttgacggagacgggactcaacccagcctttccaatttcttaaatcatcatcattttcagcagagatatctatttgtagataattcttgtatgcttcaaagaaggcataagcctcaaaaagggcatcccagtcagctttgtttgcctccata

SEQ ID NO: 3786 - DNA, 609 bp, Gossypium hirsutum
atcctcctctctgccttttcctaatttattttcctttgtgtcaccagcacagggtgcttgaaaaaccgaagaaaatctctacacctagtaccttcatttagtcatctaagcctacatgtatagtcacctaaaaaatgggctatggctacaatacaagatggttttgaaggttactgagaaaaaaaacagaaaaagaaaaataatcatctatctccgaacaaataatagaacctagaagaaaattagcatactgagaacttcaagttactgtaaagtgataaaagcataatacacgtaccaaaattaacctattggcctttgatgtttacattgctcaacaatcacttaagaagttaaatgtgcatcaagactactttcatatgtccatgtacatagtagcagtttccatcataagtcatcacgacaaaaagcaacagacatgtagataattaatttcataaagggaaggaaacttacatctttcctgtatatagctccttggaaaaagactaatattgggcgtttgtcaaatggagctgagtcagcactcggaatcgtcctcacgacatgcctataaggagcaattatatccttctcaatgtttgctat

SEQ ID NO: 3787 - DNA, 640 bp, Gossypium hirsutum
atatcagggctcgaacctgcccagcggagggacaaatgatggtgcattttggatagatttgccaggagataataatggaagagagaatgttaagaaaggaaacttggagagtgcagagctatatgttcatgtcaaaccagcagtgggtggaacatttacggatattgtgatgtggatattttgtcccttcaatggaccagctaacctcaagatcgggttaatgaacatacagatgaacaaactcgggcaacatgtaagtgactgggaacacttcactctccggataagcaacttcacaggggaactgtggcaagtttatttctcacagcatagcggtggcgagtgggtcgatgctttcgacctggaatatattgaaggtaataagccaattgtttactcatccagacatggacatgctagttttccgcatcccgggacttaccttcaagggtcagtgaaacttgggatagggattaggaacgatgctgcgcgaagcaagtattttgtagactcaagcactaggtacaagattattgcagcagagtatcttggagatggagtcgttacagaaccatgttggttgaattacatgagagaatggggtccaaccatagtatacgattcacgatctgaaactgga

SEQ ID NO: 3788 - DNA, 655 bp, Gossypium hirsutum
aggcttctagcatacaatctcagatgctagtatccaagagaacaatttcacctgcaaacattttagacttctgtacttagagagagagcaagaggttggagggaaagaatgaaatgcaaaattaattacaaatagtgaattaaagcataacctcctagtatcacaaatcaataggacagtaaaaacccagtaccttagaaacacagtaaaaggaagctcaaatttgacgccacaacctttttagtatgaggttcataagtagataaagatctaaccatagttcctgggatatttaagtgaaactctgctacttcaagtaataaaacaagaaaagtacagagctaagagtcccattcagtaccaaaagcatttattcctgattgaagaaacgcattcaattattgaattaagatctggattaaacctctctaattcatgaataaacctggggaaaactgatacatatgatatagcaacttgtaactgcggttgcagttggcaaagtgaaataaagatccataaaccaaatatatgattatgtttgcatggtataattaaactggacaaaaagctaattttattaggaatataaatctatgtacaagaagagcattgctctctggtttgtaaaagctacagccaggatacagggttt

SEQ ID NO: 3789 - DNA, 605 bp, Gossypium hirsutum
aattttaaggatgatgaaatgattgcggaaatctatctttaattttcttttcttttttgttttgaatttagtaatagatgaatttggagatattctggttctttccttcatttttcctgataattttctgccttacctgaggaagtgactttctttttcgctttgtgtaaatacatcttgctaagtttgagaacacagtttgggccttgagagggtattttggatgccaaaaggttaaattagatgttttccatttcactacttgaatattattatgcagtgctgtcaaggtctgctccttaatgccagacaataaaacgactcagaccttttggtttaggcacattgatcaggcaggcacttagtgcgtataagcatacttactttaacatcagtttcaccttagtagtctcacacttcaaaatgtttagtcattcaacaacaaacaagggatcatcagaaaatcatgcatttctgccaaccaaaaaagaacaaaaactctgcatgtattgtaggataaattggacaactgtttagagtttatcaattatatgccttaagcttatttacatatatctacacaaacacaacaaaaaaccatgctg

SEQ ID NO: 3790 - DNA, 630 bp, Gossypium hirsutum
gaagagggtaatggagtcattaacaaaatttaactacgcattgcattatacgtttagttcaactccatgagaaattgaaacaaatgctattgtgaaacaagcgcaacattttgtctggattggatacacccgcaagaagacaaaggaacaagtgcatcgtattcatcccaaagtaatcgcaatttggtaaaatatacagagatagaggcagtaccttaaatatgaaaagtggtctcacgatgcaagaaataaattcttgaaccatcaattttgtggaactgctcagtaaagtcactccatattggtactgcactagatgcgaaaacaattccagctaagagttctttactgtcagtatttaaaatccaagacagtacgatcgcattacaccgctcccattgataacccatttcttctggcaatgaatctttagaacaagtgtcgtccacaaactctaacttgttttttgctaacaatgcgattctcatcgcccgactccaaacattgtagttttcaattccaagcaactggtgagacaccaacaaagtgcttggggtatcagaaggatgcaagtaacgtggatgattgaaattgatagttgattcagagagattcaccatgattcaccac

SEQ ID NO: 3791 - DNA, 632 bp, Gossypium hirsutum
tcccacttaactcatctgttcacctaccatatctccatagaacatttaaccaacctaaaacaagttattttcgggtaaaaaaaagcataaaacttccatttactgacatttatgtacttaaaaatgcctatctcctccttatcttctccaaacctctaaagtgaccattggaaacaattttaaagtgaaaaaaaaacatcaaagagcattcagaaatggagttaggcaatatactgcgagtatagatcataatgaaacatatgcaccagaaaagctcaaatctatcttacaccttaatgttattgacaattattttctaccatgttcaaatatcatccatcatacttcaattttatattttgcgttttatacataattcaggttataagatacacttattttaaagtacagtaaaagatagtagttcaattacattcaatttctaaatttccaaaataaactcaacagtttgtcacataaatgaaatgcaataatagtttaaccttcatgattttaaatcatagtgaattaagacttgaacctgatcacattttagaacagaaaaaaattttcaagacaatcatgggggatcaaaaaggataataaagagtactcaccactagttcttgtcc

SEQ ID NO: 3792 - DNA, 513 bp, Gossypium hirsutum
tgctgtttcacataatccattagaaagggttgcagttcagcatgctcaaaggagagtaatgctttgtgcaaactaaatagctaatacggccaggatgacaaacaaagtatttctcttaaattgcccatcattacggctgttgcatttgatttaaaaaaataaaagtggggtggcacatgtgcgccttgtaggttggcatttgagatctctttaataccaataaaaaatttacaagtcatggtctttcaccttcatctatcataaatgatgaaacctttggtcagaacaaacaaaagcatactaaaaattaatgatagtaaatcgaaaatgtcaaaagcaatcctaaccaaattactctgacagaaaggtccttcaaatttgcatttcatcatcatttctccaaattcattaagcaaataaaaaaattcttcaaatgtttcaacatgaaaaactcaacattccactatactattttgatactctttttagtattgtctatgcactcaaccaacc

SEQ ID NO: 3793 - DNA, 432 bp, Gossypium hirsutum
ctgtagttaggtttgctctgctgcttgttgattgatttttcatgcttggaaaagcttcgtattttacctagaaattcaggttttactatatccttttctgtctctacagaaattgctaatgactaccgttttgattttgtgtttacttcaatttggtgagaactgaggggtttgggtaggagagaaagtagaggagaaagaatggatggttgaaattatctactgccctcccttagtttaagttagtggttgctttcttataagcactggctatagtctaacttggaagtttcatttgttctcgcttgaagtaggtggatcttggctggtctcctgatgactcaatattggccagcgggagtttggacaacactgtctgtctatggaatatgatgaatggcatctgtacagcggtggctgaaggttccttcc

SEQ ID NO: 3794 - DNA, 620 bp, Gossypium hirsutum
  misc_feature (590)..(591): n is a, c, g, or t
tttatactttcagatttgtttctggcaagctatttatctcatcttatctttggcatttccttttttgcatgctttgtagagatatgtcaaatacttcgaacgcatgttaacatacttcaatggtgaaaacccgcctgggcggaggtattatctggctgtagaatgtttatgttgcatttttggtcttcatttagtgctgatccactttttatgcaggtgtatgcttagggggttccggctccatcgctgcccttattggatcaggccctccgtcactatctctgatcataatggtatatcttatttgtctctgcaaacaattccctttatttgattgctggcttgttcttattgttttatgctgaacttctcattgcatatgggtgttttagatgttctcaacacagacaaatgccttgtaggtttgaatacaagataattggttcaaccttcacggtgcaggcaggcactagtatctcaaactcctgtttattatgtactggtggtgttttatggtataatgctggcgtaaatgtgtttaaatacatagccatagtctgaaactcctatgttgtatttgaatcttcccnnatagcaactaagtaatctcataatttcat

SEQ ID NO: 3795 - DNA, 564 bp, Gossypium hirsutum
  misc_feature (517)..(518): n is a, c, g, or t
gcatgctaacttaacaggactcatattcctttcatcaccctttttgaaccttcttttggggtggggtatttcttggtggaatgaaagagaaagggaggggcggtcttggttataaagtaaattgtgctatgttgacacgttgtagtaatttgacctgttgaattatttcagcgttccttatagtgcccccaatgctgttgctggtgaaactatcgacggatctagtcaggtttgttctaaacataggataataataaacagtaacacatctctaatggtttagttatttgtttgagcggtggaaactgtgggtgtaatacattgatctgaatttatgaatattatgaggctttattatttacgataataaagttcaaaatagccatttttagttttatgggtttaataatgttttttcttgtggatttacttgagcaatagtggaaatcatcttatatcttcttattatcattaatagtcaggattctatgtactgataattcaattatgtgattgnncaggcactagataaagtggcatgtactgacttgaaacatgccacgc

SEQ ID NO: 3796 - DNA, 623 bp, Gossypium hirsutum
cacgggtcactgccacctgctcaatcttgagttccctttcagcaagttctacccagttgaatttctccctcacttcccattcctcagttcttcttttctctggcaggaaccattttttcttcaaggcttgaacaaggtgagctctgaggatcagtccatgcagttcggttgcaccggtggctaccgtgcctggcaccagcacaccctggtctacaatggggaatgcattatgtgtagtgttcctcaatacgtccatgatccgtgaaaccttttccaccccacaaagagtgactaccggtggcttgacatcagcaagctcgccaactgtgagatttctcatccagggttcaggatttgcatctaggaaaggaaggcctttaagttctagtataatctcatagatactggggttgaagcagtctccaacagttttggcaatcaaaaggactatcatagttattggcagcaaaagaaggttgtttgtgagttcaaggaatatgacacaaagtgacacagtcatcctcattgagccagccataagggaggctgcaccaagaacagcaaaaagaccctcgtctaagtttgtatatgatcccatggccatactgagaagtcgaccataa

SEQ ID NO: 3797 - DNA, 658 bp, Gossypium hirsutum
atttattgacaaagggtttgagtattccacaacacaaatatctagttaacaagttgggagtgaaagacattttttcacccatcaacttgagggggcatgtagaaaataactaaattagttatttagatatttgtgcacagttagttacaatagtgagttgtatagtgtaattagcaatgtaattagttacaccttagctgtatatattctatagctctattcaattgtaaatatgattgattgaataaagaaaatattctttacatttctttttcatcatcttaacatatgtctggggctactatgggtatgtagtttgatgaaaaaatacatgtataattaaggtttgtgtgtatgtaattgattatataagattcagatctcagatctattaaatgtctcattttaaaaggggttatatgaactttaatattctttactagttcatgatttccctttaacaatggcatttgaggttgatataatttactgaagtttggatcgaagtatgttttgattatgtatgaatatgttttgtcgtacttcaaaatgtttttcaacaaaaaatgttaaaaaacagtttgaagtgtttgataaattccttcagttgattagcttaataattgagtagacgtggcagtcataaatctggtcttcc

SEQ ID NO: 3798 - DNA, 612 bp, Gossypium hirsutum
agaaaggtcagtaatgatctgtttatattattagttagagcttttgatttctgatgccttgatgaaaattatgtgcatgaatgatgcaaagtgtttgataaaggctttcttcggacagctcctttcggatggtcttttttaattttatattaggggtgacagtcaagtaggtttgggtatttttaatggattatgggttctggttcattttgtcacacctctaattacgagtccttagaaacaaatcaataatcccccttttttttgttcaaaatacggtagaattctcataagagaacatgtacaaatatgaaaatcaccctaatcgtgaggtgtggtactattcctcacctcattccttaattatatggttgggggtttgatctttgctcgtgggaatgtaacatattatgggtagtcgtttatctttttggagaatacttgtggtaagggattaattattactattggcggtggatatcttgattacaacagaaaaaaaaaaccgaaaatagctcaaataaaaatgagtaagccaaccggcttaaagtgggtgagagctcagttctaacaaaccctaaagtaacaagcaagtaaaacctaccccccatg

SEQ ID NO: 3799 - DNA, 603 bp, Gossypium hirsutum
caggaatgcagcacctcctgtcagattgacggcttacgaccgaaaacttttgtaactgatgaggcgaagaacgtagcgactagcccagctatgtatagtgaagatgtaaatgaggttaacagttggctatcaaatttgcagtagttactgattttggtgtccaccttcatctttctatatacttctgggaagaacttcttgagaaatggctccatagatgtcactccaccttcacacagataatcattgtaactatcttaagacatactaaaaagaagacatcaaagattatggcatgtagtttggcttcttgcatgtacaaattgatgctatgtcagttcagttcacttcaatcaagaacccttttcacttattttctcttttacttcagactaacaagaagacataaataagcaattaagctcatgttttagtggctggacagagagctttcaagctgactttttaaatcatacttgtaagcatgtaagattagtaaatttagccataaatcgtcaacgcaaagaaggaaatatatatattatacaaacgaattttgcggaggcaaacctgaaatcccaatatcataaccaaagatgacgc

SEQ ID NO: 3800 - DNA, 619 bp, Gossypium hirsutum
gatgtttgaaactgaagagtcaggaacaagaaggtagtatatttcaagtctttgtccattttttattattgattagtatctctgaattagccatatattgagttataaaactggatgttaactatggctctcatgttggcaaactcaaatagagatgtttaagcatttaaattactgtttgccttacttgttattgaacttggaaattgtaaaccttggtttagatgtgacttgagcattaagaagtctaattgctttcttggatcagaaacttttgatttgtccgtttgttgaaaaaatggtggaaataactctttttcccttcaggtatatgggtacaattacaggaatcagcgatattgaccctgtaagatggaaaaactcacaatggcgtaatttgcaggtaattttttcataactatttgtagtttttgttttcattatatttatgatagcaatacagtgttttccttttagtgatgatgtttttaactcaataggttggctgggacgagtcaactgctggggaaagacgtaatagagtatccatttgggaaatcgaaccagttacagctccatttttcatctgtccatctccattgttcaaaaccaaacgtca

SEQ ID NO: 3801 - DNA, 648 bp, Gossypium hirsutum
ctgagaactgttggagtcatcagtactcattccatgatcagaacctgccgaccaagcctcgtagatcgttgttgaggcaactgatgttggttttggagtagatgaggtgttactcatagatggcagataaggagggtcctgatagatgctgtcattccttattccatttccaagttcccgtggagtatcaagtccagagctactatcagaacttgaaatggtagtatcacatccattagatcctctatggttctcatgcatttcatcattgtggggggttttgctgaaaggcacatcctatcagatcgataacaaacaaaaaaataagtaaaacatgcatatccattctcaatcaccaattatattaagcacatattaggatacaaaaaatgttaagagaagaagaaaatggtctgaatattgaacaaaacagcaataagcaaatccaaaatgaacactttcactaaatggaataggaacatacttcaattgaagcgttcttaatgctttcatctgcttcaccattactcaagtgggccttcaagcttctaccttgtgatttaataattgcatcttcaatatcttccacttctctgaaaaaacaatcccaataaaatcaaactcacaagcaaacactacagcattcca

SEQ ID NO: 3802 - DNA, 648 bp, Gossypium hirsutum
tctcttcatattaaaaacaaaatttgatttttggaatgtgacattttttgcctttgaatccagttcaataaagaaagttctaaggatataagggagtgcaagcttaaagttcaatatatatctccttcggctcaagggaattctggagacgaaggaagctctgattcaaactctgtaagttttgttggtcatctgctttgttttgtctttatttatattccttcgatggaaggggttggtttggcgttgaggcttttagtaaaaggttcaattggtaccttaagagtttaactcctctgccttgtgactcaaggaaaaaatattatgcatacatatcaaaccttctgatcagattatctggaatttgcaaatgaatactcgaagcccgagtgaagtaggcatatcgatatgcactgcatcaactcatttccgttaattttgtccggttaccatgagcaaatgattccgatattctcgtatgatttgtacaaacacatggtttcagttagctattgcaatacatgatgttaacttcttgttatattttgccattttgcctttccggtgaagctaactcgaaaatgcaaacccggaatccaatttctttccctccatcttttaaatttcctttccctatccatgaattaa

SEQ ID NO: 3803 - DNA, 615 bp, Gossypium hirsutum
tttctatgcttctcttggatgaaagcttaatgctaaaatgtttatatgaaacttcttaaaaatagttacacacgtaagatgtaactcgagttaacttagctcacatctaataggtcaatgtaatgatttggtatcttttgaccaaatttgatttaaagagatttgatttacaaaaaatattatattaataagacctctgctgattcattccatattgaagattttgttgagttaaatttaaagaattaaatattcatactgcttgtacttttccaagccattacatgataatttaatagatggcttgttatagttttatgtatgagattataagagagcttatcttgttcatgtaaggaacttattttagtgcaaaattgttgtaagtaatatcttgttgttgtttagtttgcaattaagcttgcaacttggtgagttatttgaacttaaataatgtcttgtactaggagatttattgtgaattactctttaaacaagacttgcaaacataggacatttccaaattgcgtaacaaattttttgtatccatctcttatttttatactgttagttagtaagtccaattgcaaattgaacatgaatctggaaggcaaa

SEQ ID NO: 3804 - DNA, 613 bp, Gossypium hirsutum
cagtacacattctaagaaaaggctattagctgttataggtatcatcacaacattcggtcgaaagaaaaaccgagacgcaattcggaaagcatggatgggatcaggtaatgcccttcctttctcttggcaagttacttgtggtattttaagcaaatatgctttgcattgcaagagtttctgtcacttgggcatagtcacatgtaccggtagtaagttaaaagctgagatttgcttctgttaatctatgaaaccacacgacagattaatactattgtgttgtaagtttagatggcttggcatcaatagcaataaatgtgctgaaattaggatgaaaatttgagcaacattaatctaaacttagatggatattgaaataatgctttgattgtttactaatgttgatggatatttgcattccatttactatgtgtaggcgcagctttgagaaaactagaagagaaaggaatcgttgtacggttcgtgataggaagaaggtctctaactgatttatccatgcttctgaagttttttctttttccatttttctcattgaaatttatattacttgcagtgcgaatcgcagagatagtttagacagggagattgacgatga

SEQ ID NO: 3805 - DNA, 621 bp, Gossypium hirsutum
aaccagtcaacagatacacagacataaagcattaaatgtcatgacaaataacaatcttcaacttcatatcaatgacactttcaagaacgaccaaccatttaaatttctacttttattttaaaaattgcaatagaaacggcaaagaacagcacagtttatcttaaagcaaaaggcagaccctcatttacaatatgaaaaactaggtgcatcatgtacaataatattgaacaaaagatctgaagaaaacacctcatatgaaaatagacttacctgcaatatgttcaacacagttcttatcacatcctggtctttaaggaagtcgacactttgacgtgcctgcccaataatttcaccccatttctgcataacaagcagcatcataaaaatgggcttccagaacaacctcaccctaatgtaagagaaaccaaaaaccaactgttcctctatcagtgacaaacctggttggggagttccatcagtctctgcaagtattcattcctcttatgggggtcagattctgcttgaatcatatgaccaacctaaaatttaaaattaaaaaggggaaaattgagcgcatccactaacataacagagatgcaaagatcagatagaaggcatgga

SEQ ID NO: 3806 - DNA, 592 bp, Gossypium hirsutum
  misc_feature (530)..(532): n is a, c, g, or t
  misc_feature (585)..(589): n is a, c, g, or t
atcttatattacttattgcactaccagttcaacctgtgccacatatcctacgaagaatgtgacaactccctataaaagctaagaaatacaaaaattctattacaaaagaacctgtccaattcaaaatcaccacatcagccagactagaatagcaaagacatgtgttacacaaccgatttccatttcagttgaaagtagatatgtggtatcggcccttaactacccaggctttttttgctttatctttttatttttaaacactagactctcttgtgaacaacattccttactctaaactgctaaattccaagagcaactctctaaatcttagctgcttaaagaaccagaaggtaaccttcagaagagtccttcagagttcagacatttaatattattgattcaccatcacaaggcactgctcctcaaacttttcctaataaaaatcaatcaaatttgatgaaatcccaattgattgggtccttaagaaaaggtaatcttaatggaaaatattcaaccttataatctggggnnntcagtgacgcattacacctgtacatgcagaaatcaactggaaagaatagtcannnnncag

SEQ ID NO: 3807 - DNA, 616 bp, Gossypium hirsutum
ttctttgtaagggagaaagtagtagcgggtgtgcttcaagttgttcatttgtccagtgtagatcaagttgctgatgttttgacaaaaccgttatctgcaatgctgttcaataagtttaggaggcatcttcatgttgctccatataaaagttaagttcagggagaaaggaagtcaaaagagcacggggaatgttatgagtatttcataaacagtattgctgttaaagtctgttatgaatactagagttgttatctttgtcagttagttgttaagaaacagttatgggctgcatgtattaaatacgttagtgaacctctctcttattcaatgaagaaagaaataagttgtttctactaaattcattctatacttcaacactttttatacaaaggtctgggaatcaattattgtatgttctagtgtttgtggatgacatcatagtcactggttctaattcgaatgctataaaccagtttgttaaggatcttaatcatcagttttctctaaaggatttggggaagttgaactattttctaggcattgaggccaactataccttaaatgggctatttctcaatcaaaggaaatatatcctgaatctgcttaagaaggcttc

SEQ ID NO: 3808 - DNA, 658 bp, Gossypium hirsutum
aaaactgcttctaaaatacatgtcggaagtatctttttgatttcagcaacatctacaaatattttaggtagttccataacaagtaaagatcgaacaagtcttaggatcagcagttccagcatacaaaagccttcataacaagtaaagatcagaggaactgtagtatataaaagtccagtccacggccacgcctgtgtgattaagaaaaaaagaacactagcagtaccagtagcagggaaatagcttgtggcttcacctgccacggtaatatctaatctcagattgaacaccatatgtgaatttggaaataccaaggacttcattaccatagtttttgtttgtattgccattctgacgacttctcacaaacataaaaatttaaaactgcccccatcccattccattcccgcgtcatatccctaagagagtatgttttcaacattcaatgtcgattctggcaagatcataaagccattacaaatttagaaaagaactacacaaaaaagaatctacaagtaatctatgtttacaaagcatgcatgttaaaaatgggattccttcacatcccgtttttcaacacaataatcatcgttcaaacatgtattacttatattgtgaaaattataatttataatcctccttacattgtgaacaccgt

SEQ ID NO: 3809 - DNA, 637 bp, Gossypium hirsutum
actgcacttcatctttttgtttagaaaccaacggcttaccctctatgtgaggtgaaaaatctgcatcactgtccttcctaaccaaagtcccttgaagttccatttcatatattttgtgccttaaaggagaattgagttcgttggaagtctcatctgtgctttctatatctttaacagttttagaagaacgacgtcttagcaagttacatacccaatcctttataaaggctattggaaggtaaattaccataagagaagctccaagatatgtaaccgcaaatggctgcttatagtcagcaaagatatcctgtatgcaagatatcagttagtctgaattgacttagctttgaaactgcgcaatgcattctagaaacatgataatatgcaagaatttggagttcgaaaaagaacacaaagccccaaaaatgttctaatcaacaaccatataaagccctcaaaattgcatttagatattataaatgcatggatttttcattttgatagctaaatagaacagaatttttacaggtttcaatcattcattggcattaagtaataattgcatctatgagcttggaatagctgacatcgtgaaataccattaaatgctattctttcctgaaaagcattaagaaac

SEQ ID NO: 3810 - DNA, 647 bp, Gossypium hirsutum
gccttttattctatttgcacatcaattaagtttatttatccactaaataactactctatgcacatacacgtactactagaagtttaaggaattcattccaatcctttcaaataattgtatgagttaacaggttttcttaatcccatcaatatattatgtattaatttttaggcaaagttctataatagtttcacaaattcactcctcctttggatggtgttttaatacagtgaaagaactcgggcgttattgactagtactgcatatgtgcaattaaaacacagtgatgtctctaggcacacgcggaacctttctcctgtcagcaaagctattttgctctcaggacctgctggtatgtttctggaattgtttctctaattctatattaagatattcatcttttggagttcatttttaacttaaagtgctaccctttgttcttgtgaagagctttaccagcaaatgcttgccaaggctttggcacattactttgaatcaaagctactgcttttggacattactgatttttctcttaaggtgaatagacacaacttttgttgtcattaggtttctactgtcataaagtcctacttattctttctacaatttcattgtcacagatgcagagcaaatacggttgtaccaag

SEQ ID NO: 3811 - DNA, 634 bp, Gossypium hirsutum
  misc_feature (626)..(627): n is a, c, g, or t
  misc_feature (629)..(629): n is a, c, g, or t
aaaggggtgtgaaacctggtggccgaccacttgagtaggataaaaactccatttgatgatgatcccataaaggatgagttccccgacgaaagcttattctcaaccgaggcttactatccgtggtatgcagacatagttaatctcttaaccacgggatcgctgcccactgagttagctcaatccgtaaaaaacaagcttagacgcgaagctcggaattacatatgggacgatccatacttgtggaaacattgctcagatcagataatacgacgatgtgttccagaaactgaggtaacctctatccttactttttgtcacacagaagcttgtggaggtcactttggccctaagcggacagctcacaaggtattggagtgtgggctatattggcctacaatctttcgcgacgcgtttaacttctgtaagtcttgcgataaatgtcagcatacaggtaatatcactaaacgaaatcaaatgcccctatccccgattcatgtatgtgagatttttgatgtatggggcattgatttcatgggcccctttatttcttcgtttggaaacgtatatatacttcttgcagtagactatgtttctaagtggatagaagcaaagcctactcgcaatgnnanatgct

SEQ ID NO: 3812 - DNA, 560 bp, Gossypium hirsutum
tctgattttttttagaatttaaatctcgttgtttcagagagagagagagaaagcaaggttatttcttttatgcatgagtgccattttgattgttaaatcttttatgcacgacgattcatccgataatcacttcccaacctactcttactttttgaaattggaacacaaagctagctatctctccttgaacttacccaggacttgctcatgtatggtgtttgacaatttctttatgtaatgttgcttctgatgcagtttccatcaatggcttccttacaaggtgcactaccaaatatgtcacctccttctggcccagtgcgtacttctggccttggtactccatcaccagcatggatgtcacctcagtctttaccttatgcatcagggatgtcattgcagttaccttatgcatcatcagtggcacaacgtaacgctttttacccctgcccccctttcttctttttgcttatttttattttgatctttttgacaagctgaatttctcaaaaacttatagggccgtaccaaggagcacagttacctaatagcttgccaccttc

SEQ ID NO: 3813 - DNA, 608 bp, Gossypium hirsutum
aaatggtaaaaattcttgcaagcaagcatcagaattactcaatttaaactctcaagattttcatagggaataacaatagctctgttctttttgttgaaagctaataacaatagttattgaatataaaacaaggggaataaatcttacatggcagacacaatatgcaagtatgactgaatcaacatttagtttatatgcaaaaattgacctatgcataataagagaaatttccacatgtaatggacctcaataagccacatccattacctaatccaattctttcaccaatatccaagtcttcccaaggaatttcgcattcacctacatccacatcatcaaatagttgttcaaccttgcctttgccagaatcaagtgatgagctaggactttccggatccttcaatttaaggttattctccacatatctctcctgggtgtactttctatgattatagaaaccaatctcattatcttgctctttagctaaatcccctgttttattctgtaaatcatgtccattcctgaaattctcttccctaaaattattgtttgcgtcctcaaccagttgtgaactattaaactgactggtactggatgccacatatcaa

SEQ ID NO: 3814 - DNA, 609 bp, Gossypium hirsutum
agggtttctgggcagagcttcaacagattgtatttaatgaaatcgttgcacgataactgaaactcgcaatgtcgtctgcaattttttgcaggtataaatgatgcattgtctagattagctgaaaatttttgcaatatctgagtagaattataatttatggttgtgatttttatttgaagatgaatgtgattgaaaatttttcccatgctgttaatgttttacatttaatctgtaagcctgatcatttgcccgcattaaatcttagtattactatttgaatatgaaatgacatttttcgttggatttcactaaatatttgaatatatgtttaattattttctttgcatatttgaattttagtttatttttaattttaggaatttagcccctatttgaatttataattaatcttaaattgagaacattcgcaaaagaattttgttaaattagattgtggtatttttaaaatgaaaaattgaagtcgtcgatgttatgttgatttaagaaaaaaaataggatttccactttgcttttctaagtggtgcttaagaatttatataaccatatatttagaatcgagaattttgcaatttcagaatcaacagtcat

SEQ ID NO: 3815 - DNA, 588 bp, Gossypium hirsutum
gtcctagagccggccattacattgcttgtttagctttcatcgaaggctcgaagctcattagaccagaaacattgttcctttgcctgtgtatctttgacatattctcttaaggaagagctacttataacaaggctccatctttttgagttgcagggcaaaagtccgttctccatgaaaaactacccatttccactaaagcacacgacctttcgccatcccatccgcgaaaaaacctgaaatgatagaccagaaactccctcaagacagcatagcgaagccactttctcgctaatcccctccactcaagcaaagccatttcatatttcaaaatctacaattgccatacaaaatctacaaattaaaatgcaaaagtaatacagaaaaatacacagccaaagctccaaaatgcaagaaagtccatttaaaatacgagcgaaatttggattccaccttttaagtcttcagcctggcacgattcatttttaattttgtaatataatatattacaaaatatgaattgtcaaccttaaaatttattgctaaatgttgtattacctttactacaattttattgtaaccaaaaaaaaa

SEQ ID NO: 3816 - DNA, 499 bp, Gossypium hirsutum
gatgtgaggagaatatcatagctggaccgattgcttcccagcctcggtattctctttgtttggtgaagaaaacatatcatctgcattagttggacccatgtatggcacacaattgagaggcgccacatcgagaaccggctgctgaggattcatgcgattaggttcataattttcaccttttgtcctttcagacctgctaaaagacatgtagactgtcacatctgcacattaacaccagagctgagccctggaatacaaaaactaactctcacaagcaaatctaccacttaatcttctccctccggcccaaccatttctaccatatattatcaaagttctttttaaagaaatcagcaataaaatttgtcttgtaaataataaatccattcaaaaaacatgtaaagagtcttatggaaacaaaacatggagaaacacataccacaaacttcatttatttctcaaacaacattaaaaaaccaaaaattgaagccaattacgg

SEQ ID NO: 3817 - DNA, 627 bp, Gossypium hirsutum
tggcagctgttataatcaatacttgataacatgacagctttgtaacaaaagatatctaccaccaattggataaatatatcttaagtttaatccaaaaagggggtcaaacaatgaaaacaaattaccttcttggatgaacataactcataatctcgagggacactcccgcgcaagctttctggcacttccaatagatacgaatcttttccaatcgtgacgtaggtgatctatagcagatatcaaaccaaagtttagtaaaacattacaagaactaaactacttatatcattggaacctccaagaacttgttgttaacaaaattcttactgatgaatctccaagtaacttctgctgctccttgaggtgttttgtcaaactagattcaatctccttaactctttcacatgctgagtcatattccagatcaactcccttgtgaggtattatacgtccagaattgttggcatcaacccaatcaaaggcatctttgaaatgcttaagaatggaattgatatttggaagacctttacctgtgcagcattaaaaacataagaggccagatatctttgagtaactatataaaaggatatatttcatattaccagttgttaacaaatgatgaagctg

SEQ ID NO: 3818 - DNA, 945 bp, Gossypium hirsutum
  misc_feature (355)..(355): n is a, c, g, or t
  misc_feature (898)..(898): n is a, c, g, or t
  misc_feature (906)..(906): n is a, c, g, or t
  misc_feature (925)..(925): n is a, c, g, or t
caaacagcctacttgaaaattgcaactgaggaaagcgtaacccatctgcataacacatatgaccaagcaaaaagcttgcttgcagctgttataatcaatacttgataacatgacagctttgtaacaaaagatatctaccaccaattggataaatatatcttaagtttaatccaaaaagggggtcaaacaatgaaaacaaattaccttcttggatgaacataactcataatctcgagggacactcccgcgcaagctttctggcacttccaatagatacgaatcttttccaatcgtgacgtaggtgatctatagcagatatcaaaccaaagtttagtaaaacattacaagaactaanctacttatatcattggaacctccaagaacttgttgttaacaaaattcttactgatgaatctccaagtaacttctgctgctccttgaggtgttttgtcaaactagattcaatctccttaactctttcacatgctgagtcatattccagatcaactcccttgtgaggtattatacgtccagaattgttggcatcaacccaatcaaaggcatctttgaaatgcttaagaatggaattgatatttggaagacctttacctgtgcagcattaaaaacataagaggccagatatctttgagtaactatataaaaggatatatttcacattaccagttgttaacaaatgatgaagctgcgtagattccacatttttcagaataacactaagggaagaacatgcttgaaccattaattcacaacctcgtagtgctgatatgaattgctgaagttgcttctttgccgcatcttcatataaaacaactgtatgtgcatttcttccattagcctcactgcattcaagcacaacaacagtttaaatattattaangaacgctncatatatttcccataccangtgaatgggtacacatgaac

SEQ ID NO: 3819 - DNA, 633 bp, Gossypium hirsutum
acctaccttgttgaaatgtaggaatccaattaatactaggatttttgaagttatattcattttgtcagatcattgaatcagttccacaaagaataaattaagtgatggtttctccaaattggatattttacagatgcttaatttgtcaaactgtcaaaatgttactcacacgggcttgtcatctctgataaatggtactgaacaactacagcagattatattggcatatggctcttcagtaagtccaaaactccctaaggtaattccctgttaattctatattaatcctttggctcattgcttatgtatgtctgatgatgtttcaggttacttctgatctagtcaaatgcttgaatgcttattcaaagctgcaatcaattaaattagatggttgtactgttacttggtctgggatcaaagccatggcaagtttgcattccccagtcaaggaactgagcctcagtaaatgcttaggactgacagatgatgggctttctttccttgtccagtcacacaaagacctgaggaaactggacatcacctgctgtcgtaaaataacttatacctctatagacatcataacaaattcatgcacctcccttacttctctcatgatggaatcctgtagcttgg

SEQ ID NO: 3820 - DNA, 770 bp, Gossypium hirsutum
  misc_feature (675)..(677): n is a, c, g, or t
  misc_feature (693)..(695): n is a, c, g, or t
  misc_feature (697)..(697): n is a, c, g, or t
  misc_feature (712)..(714): n is a, c, g, or t
  misc_feature (719)..(721): n is a, c, g, or t
  misc_feature (733)..(739): n is a, c, g, or t
  misc_feature (743)..(744): n is a, c, g, or t
  misc_feature (746)..(749): n is a, c, g, or t
  misc_feature (751)..(751): n is a, c, g, or t
  misc_feature (757)..(759): n is a, c, g, or t
  misc_feature (761)..(763): n is a, c, g, or t
  misc_feature (765)..(765): n is a, c, g, or t
agagtctgaccaaacaacatgaccaagttggatcatcctcttatttaaagagacaactggcgatgagcaaagagagagagctttcgtatgaagctgctcttctagagaaggatcaacgtgaagctgagctacaaagaaaggttgaagaatcaaagcaaagagaagcttatctagaaaatgaacttgcaaatatgtgggttctcgttgccaaattaaaaaaatccaatggagttgatacttaaactgtagtttccgaatcaactaaagggaacgactggttcagttcagggcacagtttattcacaaacaataattcggcttcggctttgatttagtatttggtttcagagagtagtgtcctgagaatgttgtgcattgcatgtagaggggccattgtacattccataggagttttttcttattcatcaaatttgttgcatcttttgggttctcttatccattggggcattgtatatgaaaagcttcagtttttgtacatatgagttttgaagcagtgcagctctcaaatgtgtagttttgcttttcatcagttaattttcatatctgtttcgctgtaaatgtcttatgctttagattgatatggttgcagtgaaccagatatgaaaattaactgatgaagagcaaaactacacatttgagagctgcactgcttcnnnactcatatgtacaaannncngaagcttttcatatnnnatgcnnnaatggataagannnnnnnaagnngnnnnanatttgnnnannnanaaaaa

SEQ ID NO: 3821 - DNA, 646 bp, Gossypium hirsutum
gtctgtgtgtcaggaagttctaaatctaaaattccccacagaacttgcataagcccatccaccacttcagaacctacatcaacaaaaatggtttaaaaaaaataaaacaactctccttaccctaaccccactatgaaaaatacctgcaaaccacaaacccatttgcatatggaaattctttgcatatttataaggtgtaaacaaacttaaacctaaataacagtttgtgaaccaaaatacacacatgtaatatatgggaacaccaagagacgaaaaaccaacagccagtcaacaagcattcaagcttcaggaacctgttttttcttccagttacaagcagagaggacattcaatatgcataaggcctctagctaaaaggtcactattacttactaaatacacaataatatgccccatttaccaatgagagaaacaatgcataaagactataccattcatctccaagaaattagctaagttggagcgacggtgaagtgcaattttagacactgcacgcatctgggcggtgaactcttcaataagccactgtcctgtagcaccaccaattccaagccttgacgaaagaacagatgttgacttaaccacgccaagaagacgcatggtgtccttgatctaaaagcaaatg

SEQ ID NO: 3822 - DNA, 470 bp, Gossypium hirsutum
ttttggtttgttctttttgttgtagactgatattctttaatgctgtctttatgaaagttggcattgaagtcatcgacataactgtattttttttatcccatttgttatttttcgtttgttatgataaaatggtggtaagggcgaaaaaaaacttaaaaataaaggaccattttacttacaatttgtggaatagctcaagtttcaacttgcttgttggtacgttggccagtggcttattgtatgcgagtcacttgtttgtattggtttaagtccggtgtaggctgaaaagctcaatttttggggccttatatttaactaacttacatgtcttatgggctattaggtgtcgtaggaattcggccgtacatctgtcgtccttaatatggatccataagctcaaaaccggcagagcgctcaaacattgttgtttgggaggctggtggttcgaatccacctggatccttaatttc

SEQ ID NO: 3823 - DNA, 700 bp, Gossypium hirsutum
  misc_feature (615)..(615): n is a, c, g, or t
  misc_feature (623)..(625): n is a, c, g, or t
  misc_feature (631)..(633): n is a, c, g, or t
atccatgaccgaagtcggcataaacgagtgaaaaccgatacatactcggtatattatctacatcaagcctcatgattttgccaagcactgatttcttgttttgagcaaagttgtatggatcaccgtcaccaccaccatcccccatcataaagtatagatacccatctgtaggtccaaaaagaatctgtccaccatgttgtgaagtaaaaggaagtcccatagtgaatatccttctcacttctgatggcctagcattttctgcctgaaaaaaaggtttaattcaattagaatattggatctaaaaaaagaagttttaagtgcataaagatctgtaccgaggaagactgcgtcgcggaaccattgctggtatactctgcaacaacactttgatactgacatggttgagcaccattgtctgtacctagttttgaaggatcacagttcacatccgagttacaggaacatcttccggtacatcctggcgatttacccttgttacaattaaatgaagcaaagaatcggccgttctgcgtgaagttaggatgaaaagcaatccccatcatcccaaatgcagtatcaaaatgaacttcatcagtaaggtctatgaagggatgngactcatnnnaaagannntactgatgaagttcatttttgatactgcatttgggatgatggggattgcttttcatccctaacttcc

SEQ ID NO: 3824 - DNA, 614 bp, Gossypium hirsutum
ttgacttggtaaaattacatcatgtaaacaatgaataaaaacctaataaggaaaactcaagtaaatatgattcctaccatcaaaattttcaattcctgtaaaagttaaaattaccaaattaatgaaccaacaaacgaaataaaactttttaactttaactggatgaaatttaatgttaagacttgataatgtctgttttagcttaaataacttctaaatcattatgatgtcaaataatggccaaacatctaaatctttttggttattgatcttgacaattcctctcatccgtgtcttctacctctaacatttagcttcaactcacgacttgtgcttacttttctacgtacatcagttatatttgacagacttgacaacaagagaaagtatattgctttgcaaaaaggaacacccaattttgcagttggcattggatgatgatagtatatgggttgcaacaacagattcttcatttcatagatggcctgctgaaggacaaaatcctcagaaggtctttcaaagaggtggttcattcttggctggaaacttgtctttctcgagggcaagagtttgtttagaagggacagccccagtaagtgtagtgtctgtgtatg

SEQ ID NO: 3825 - DNA, 569 bp, Gossypium hirsutum
  misc_feature (530)..(532): n is a, c, g, or t
  misc_feature (544)..(544): n is a, c, g, or t
  misc_feature (556)..(556): n is a, c, g, or t
  misc_feature (559)..(562): n is a, c, g, or t
ttgtgctaaatctaaaacctcgataatttaaacatccatgcagcatttactcatcaaagaaaccattttttctttcccggatacctcctctaacaaaatagcatcaataaatctacttcaaagttcaaaagcaagcgaccattcaattagagaacagtcacatcctttttttttttttgcaaagtttagtgttttatcacttcattgaaataaacctcccaatttctccacaaaaaaaaaaaattttcacaaataaacccactgaattagtgaaattggagtcaaaaacctaagtcaaatcacaattccaccaacaaaaataaaattgtcaccttaacaaacattttatgttcaccgatccccaaccccctttcccaaacgttaacaacattaacttacaaactccaattttaaatcagatactaagaaaaaagaagcccatcaagcagcaacatttacccctcaaaaaaatctaaaaccaaagccaaaaagaagagtaatatttatcaaaagagaaagattacttgagnnngggaagaagaanaaaagggggcancannnnaaggaat

SEQ ID NO: 3826 - DNA, 605 bp, Gossypium hirsutum
aaatcattcagactcacaaataaatggttttctttaacctaaaactaaaatttaatcttatcatgggctaattggtttatttggtgtcacattaattaccataatttaagataaggttgtccacagcccaattaatttgttgataagcatgcattaataacactaaacgttggtgaacaaactagaaattgttcttgtcttactttcttaacctattgtgagtttaaagtattataaaggaattatatcagaaatagatgaaagagtaaattaatttttttattaaaaaattatttatttgtattgttaaaagttgatgtgcttgacggaataaccaaataatggcacgtggtgtgtcatgtgtatgtcatgttgacgtttatggactaacttttaacaataaaaacggatggaatttttaataaaaagattgatttgccttttgatctaatgtacaataattaatctatctattgttttttaataaaaagagcaaaatataatctaacttccattacagatgctttcataatacttttatcgattttgaaaggaaaaataaaataaaataaaatatgtatttatcaaatataatcgtttgccat

SEQ ID NO: 3827 - DNA, 648 bp, Gossypium hirsutum
gagaggaaaatataaaggctgagacatatctaaatttgaggtatgaaggtacagatacggcaatcatggtaaagcgacgtattgctgaagatggatctggatctgactatgctgaggaatttgagaagcttttccagcaagaatacggatttaagctacagaatagaaatatccttgtttgcgatgtcagggttcgtgggataggagttgctaatatattgaaaccacagaccctagaacctgcttctggttctcccaaaatcgaaggccactacaaggtcttttttgggaatgggaggcacgatacaccattgttcaagcttgagaatctgggatatgggcatgttatacctggccctgcgatcatcatgaatgggagtagtacagtgatagtagaaccaaaatgtaaagctattataaccaaatatagaaacattaagattgaaattgagtctagtgtaaacacagtgaaagttgctgaaaaagttgcagatgttgtgcaactttctatcttcaatcacagatttatgggaatagctgaacagatgggacggacgttgcagcggatttctatctcgacaaatatcaaggaaaggctagacttttcttgtgctctttttggtccagatggaggactagttgccaatg

SEQ ID NO: 3828 - DNA, 615 bp, Gossypium hirsutum
aggtcgtgatttgtttttgttataattgtgttttaaggtattatgatcgtgttgtgtttttgtttcataattgcgtttgaggtattcatgttaataactggatttatataagttttgatttgttgagggtgttgatgttttgctttagatagtttttggttcttggtgttcatatcctttttcaaatttaagcttattacagtgatctctgaagatgaaatttaccttctgcaatttgtaggtccgtgtcatgtttgagtttttgtttgacatatttaagtattcatatcatatatttttattgtgttcatattcaaaattttcagctgcacgacattcatctcacatcattaaatttacattttaccatttctgtatccatattatgatcggttttatataattacatgaaattttgtgtccataatttaaattttaaatcacatattttttcatgttttaatttttttatatcaagtccaaacttccatttttcttaatttagtaaaagagttctgacaatataaaagggaatgtacatgtagcaagttttacttttgcatctgcacatgtagcaggagtatctgcagtggttgatgtacgctcctctacaca

SEQ ID NO: 3829 - DNA, 622 bp, Gossypium hirsutum
taactgtttctgacaatctcgtaaagagtggccctcggtcgtcctttatttgtgtttatccttgcaataactataaaaacggaaagagagaaatgtactcgttatgttctaaattcacgatggtagattgcataatgcagatcctcgagatgacgaaaagtagaaaatcatacggtttcaataccaaattctgaactgaatgttgcatccctagggcgtcggagctgaaaccatatgctgtccttgaagaagcgttagccggagaaggaatctcagttccatatgctgtccttgaagagtcgttagtcggagaaggaatctcagctatcctctgcttcttgcacatttttggctctaacaaatcatcatcagtggttccactcgaaccggcatgatcctgtttcgttctctttcgggagatccctctatcctgaaaaatacttatggatcaattgttgatctcaacatgactaccctcactcattttccttatcttggaaagctttaaatcgtaataggcacatacctcgagttccttcaatagatataaagctgcttttccttttgctacctttttgcttcgattgaatgcctctccgaccaacaaatatcatccagctgt

SEQ ID NO: 3830 - DNA, 602 bp, Gossypium hirsutum
atttagattgagtccatacgtcacagctaacccggcaatagctaaacgaacgaaaaacacatcaaatcattctcctagaacatttgttatctagtagtcaacaaaggtgccaatatgaatctgcatttacttaccaggatcaataactccctccggtaaagagattaaaatgaataaagagaaggcaaaagtaacagaagacaataagtccaggcggaagctcagccattccattgcaccagcaacataaaattttggacgagaatacgagtcggtcagtgccatgtttgtgtcttggaaccttttttcttgatcaaagctccttatagttgttgctcctaaaattgtttcagcaaaattctgtattactggagcttggcatactccaaccagccgcgaaagttctcgtccagaagatatgtaatattgctgcgagattacaagtttatgagcattcctttgttcagcaataaggcaatgattaaatgagttttacaaagtagaaaattcgagattttcgatatgttgctgcattgtaataagttcatgatttcatgcattgcatagccacaattcggcaagagttacctgataccaaatgc

SEQ ID NO: 3831 - DNA, 618 bp, Gossypium hirsutum
  misc_feature (610)..(611): n is a, c, g, or t
tgtgctctcatttgcaaaattaagtccctcaagtttttacgatttgcatcctaaattgattatttattaatgagaccacaacttgcttcattgttaatcccattccttaatcagtttccaaggctacggatgtttgatacaattactgctatcggctttcaactctaatttatcaagtaaaatttcccatgtttttgcaggagtctattttagctattagctttagcaacaaggggtccagatacatatgttcagggggaagtagtcaagttgtacggatatgggatttgcaaaggaagcgttgcatcaaatggttaaggggtcataccagcacaattacaggtgttatgtacaattgcaaagatgagcacttggcctccatcagccaaagtggggatctcattcttcataaccttgcttctggggcaagggctgctgaactaaaagatcctaatgaacaggttgtttattttgttgcacttgagtgcctatgttaagttctaattcttgtttgcgagttaatcctattatggaatttaagaccaggtactgagtgtacttgattattctcggatcagccgacacattttggtggctgctggtgacgatnnatctatc

SEQ ID NO: 3832 - DNA, 650 bp, Gossypium hirsutum
attgtcttcatgacctacgaaacattgaagatgcttctatcaagcatcccaaccggttattagcttaagttcggttaatcatcttagtcaatttggttctcaagaagacaaggaaccccgaaagaaatggtagaaaagtgaaagcagtcagttaaacatagaaaagataggaaaacaaatggttctttacttgtttctactgtattagatgtgaaacctgggtggtaaattttgcagtttgctgccatgggcatttttgtttattgtataggtaattggcactgcaagagtgaagataagtgtaataactacctagtttcagcacacttaggccttaacatttagttaattaacaattattgatgatcatgccatcatcgcagttttgtatgcgacttgtttgttaactgccctcgtgcaggttgacagtgttcgattcctttgtatttgaatgatattaaagtacaagcggtgtggacagtggagaaaagctgtgtgattaatttctatatggaaaatgaaatgtagttcgatgttatgtgttagagattaactgtaggaatcaattacggatcttgatgtaactacaaagtcatgtaagaatagcatttactctgttccatttatatggcttcttgaatttgagcttg

SEQ ID NO: 3833 - DNA, 561 bp, Gossypium hirsutum
gtgggttttttttcttctttgtctttcctttcttgagaagggagaggagaatagctttaagacagcttttatatccttttttttgtcccacccctctcatcctgtgttttcttgtttagattctcttagatcgatcaaggtctctgatttttaccctttaggtgagctctttggttgtatttcatgtttatttctgcttgatcggttgatggtcagatgagatgtggatgatattctcactgggttcccccccttttaatttcttggttttggcttaaaaagtgttcctttatttttttgttcaaagttttgattttgattttatttttggttttgttttggaaatccgcatattcctgttggagatttttcctgtctaaggtctgtagcttttgctatgttttttctggatttcttttgttattgagaccgtctctcgtaatagctgatatgtagagagatggcgtttatggttaccatgtttgacccttgcggttgtgtttgatttagttgttttttccttcttctttgctttatttctgtggtaaggggggtttgggg

SEQ ID NO: 3834 - DNA, 621 bp, Gossypium hirsutum
ttttatctataaatgtcaaggtctaagatggtcgtcaaccgactagactttcttttagacattatggaaaactgttactacttctcaccattgctctccttcctaggaacacattttaacctacagctatgattttttcccctttattattttcttgttacaaactaatagactttggcattctcaagatcagtactagtgattcttgaataagctaataaaatatgattcatggatttacaatcaatacggactgtgtctaaatcatgtgaactgataagcttgatgtccatcaaaggattgatactacttgatttttttaagttttcagagtccatcaatccatttctatcttcagtggaaggttatatagtacagatcatttctccagctgacaagctaccactaacttggcaagtttaccactgtacataagaaaccaggtcttggctggtttggagtcagccattttctgaaacaaatgtgtcttatatatcaaacatgcacaaccaatttacagaacagtaactaaaaacttttgagatttgggcaaaatcaaaattaccatcaacacagaagaaaactaaaccttatcttcagatactctggattgtagagagg

SEQ ID NO: 3835 - DNA, 192 bp, Gossypium hirsutum
attggactgtcgaagagtaaaatgatgcttgacacctatgtgcaaggaaccaaactgtcaattttggttgctgactggaaatgacgctgcacaccttcccaaggtggtgatgagaagcaaatgataatggagaggggacattcgaaacctttttggactgacggaaaagattacataaaacaaaaaaaaaaa

SEQ ID NO: 3836 - DNA, 649 bp, Gossypium hirsutum
aacgctcggagtctaaatagcttaaataattaccggtaggtttgattctcttcatcaagtctttataatttataaaaagttagaagtcattgctactttctctatgttgctttcttggtttgaatgtttctttgaaaacgacatttatgtcataggagattggttgttacgtttttttcccaatgacttcggcttttttttgcttttgtttttaagcaagaagcaatggacttgcatgtttcaatataccatacaaattcaattggcgggctccagctattttgtaacaaaacaaaccatcctgtgccactaagctttttcttgatctcatctattcaagtcctagctaaacagcattgactttggcatcgtttacctctgttgcatgtagcaataaagggacatgaaaggccaagatttttattctaatcccactgggactatttgcaacttttttagatccattcaaagtagttcatttcttaccttttcttctttttgacatatagattatgttctcatttgaatataaggaagttgcttcatgaattgcgaattggttgatgtcaaatggatgctgttctttgttatgcaaatttagaagcagaaaccaaataatttcctggtcttttactcttgaactccctga

SEQ ID NO: 3837 - DNA, 652 bp, Gossypium hirsutum
aactttgtgaagtatcaaataaagcatagaagggtacattttttaaggaaaagaaagctgtaatctgaactttctattagtgtaaaaagttaatgttctgtgtgagaagaacaatacttgaaagctcttccttacaatcggattatcagggagtctaggatctgtgatcacaaaattcttttcaatacgttccaatgtggttgctagatccatcccttggcgtatgtccatttccctttcacaatgttccaaactgtcgacgcgttcaatgtctttggtcattaactcctccagttcaacaagtggttgtttttcattcttggctgcaaagctgaaaggcctgcctttaaacctggggggaagataccatgtttcagataaggaacaaaatgctctcatttcgtagccgaaattgagctaattgttaaatgggttttgagtagcaaattaatgaaaacttaaccaaaaggactcaccccatcaatgaaaagcgttctgattttctagttttcttgctagtttcgtgcattggggtagtagtactgctgatgtctgatcggggagtgtatcttccaggggtcctaatgttttcagtttcggcagattgaggcagaaggaaatcaaggttgaatttatgctgatctttcatctg

SEQ ID NO: 3838 - DNA, 653 bp, Gossypium hirsutum
  misc_feature (432)..(432): n is a, c, g, or t
ttttcatcttcactttcattttcataattttcggcgtattcagcacaacgacgcatgatatcagcagttagctccttgcttttaggacttttactaccatgcaataaatcagcaggagctttatatacatcatcatgctccaaatcatccatatcattttcatttagaacatttttcaggttgtctgccagaaactcttcttcttcagccatgtaaccctcacaatcatcatcgtcgtcatcggagccatattctttaagttcaagctgcaataaccagagaattcgataaaattatcattagtaccatgttcttgaagttcaatcaaaaggaagcaagcaaaaggtaaaatcttcatgcaacattctaattcaaggaaatacactaaacaaaatagacataactaaaatttctcgaaataaaactcctaanttgaaaggaaatcttcaattccataagttctaaacgcacaaattacaatgaaatcaagaaaaccaaaatagactataaattactctaaaaagactcacaatgtcgaattgctcatccaaaaggcgccgggagcgtggcttttcttccccttggtaattccttacttcatttgcaatctcttgattgccggattttgtatcagcattcttaacactggcatc

SEQ ID NO: 3839 - DNA, 620 bp, Gossypium hirsutum
tttatgttgttttccttcaggtattcttgacatgagaagcagagccaaaggccaagcctcaaccatgaacaatggtgtaaattggctgaactgagtatgcattcaagcatggcattcttattccttgtaatagaaaattaattgtctttttcgccaatggtcgacatacttcatggcaacattagggtcaacgagcttcaaacttttttaacttcaattttaagtggttgccttaatccaatactttttgtcataggataagaagagtatattttatgtaaaaaatcaatttgatttatgtatttggttcgagcttccatatacaaacttcgtcagatctgtgtgaattggtcattgatgatccctatgaaaaatatggaaataccaaatcatttatagtcgaagatcaatgtaagtttaattatatagcccaaagtgctatcttcatggatcttacaagaaaaaatattgataagcatacacaaagacaaggaaacagcataatgaagagagtaaaagcttacatatatatccatacggatggtaatactcatgtacaacagatgcaatgcaagcaccatatgaatgacgattgaatgaaatattattacgaggttctc

SEQ ID NO: 3840 - DNA, 553 bp, Gossypium hirsutum
  misc_feature (464)..(464): n is a, c, g, or t
  misc_feature (501)..(501): n is a, c, g, or t
  misc_feature (504)..(504): n is a, c, g, or t
ttggatgtgatagcaactagggaatggggtcagtcagtggactattatatataatataatgtgtatcactctgctgcttctctttagcatatatatgacctggttaagggtttcctgttcgatatagtgtacgataaaaaaattatataaaaccaaaaaaacctgttatttttaaatattttattataaaatatcgattcaataattaaatagaaaaatggagatattattcgattgccttttgacttgaaaaaaaaaaacaatttgggtttaagcaagcacctagttttggcaattgtatttagactcagattttaagattaaagcagtctagctacttgcaatggcacaagatttgtaaacaaaactgatgaaacattatatatacatattatatatttatgggctagattatatagatggagataataacgtaatcttaaaacataaatttattatttatntataatttttttcatttttaagggactaaaatgattnttnaaggggtcaagtgcaatttcattatatataaatttgtaatattattatt

SEQ ID NO: 3841 - DNA, 587 bp, Gossypium hirsutum
  misc_feature (485)..(485): n is a, c, g, or t
  misc_feature (489)..(489): n is a, c, g, or t
  misc_feature (492)..(492): n is a, c, g, or t
  misc_feature (496)..(496): n is a, c, g, or t
  misc_feature (530)..(530): n is a, c, g, or t
aaatgacccaatgcgtatccgcatgaggaaacttgccttgaaaacaaggttcccttctgatttcactttatttatttatatggttttgatgtttgtgttgaatttagtagatgaaagtcatagaaaagaactttatttcctagaacaatgatgcttgctaaaagcttctgacttaaatttcattttcttcctccaggcctggttaattggttggtggaacttggcttggggtttactggggagctttttattggaggccggggaggaggaaggccggcatttttggaacatttcttaaaaattccagggaattagggctaattttccccctatcctcctaatttcgtgggttttggaacaaaagaaaggaaaagggaaattttccttaattccggccttttttttctggattaaaaaaaccaacaaaattaaaagtatatgggctaaatttaataaaattgaagtacaattattaagttcagctntganccntganatattcaataggggcaattttgttcttgattccnaaacttatttttaattgactttttttttgtggggggtttttttttttgccccccccc

SEQ ID NO: 3842 - DNA, 634 bp, Gossypium hirsutum
tggtgagtgacgtagaagccttctttgtttccatcaaaatcgacgcttaaaagccatttccactcgcatctctaaccccgacttcgatagagaagacaaggatctcatcgatgcatccgcgaaggtaaatttctcatttctctttctttttttttagaaaaatgttctaaaagaaaacaaggtacatgcaaaggaaaaaaaaatattgaagacgaaaaagattcaaatcaccttctgattttttttgctggttctttgtattgaatttgtgtagtgtgcgtaaaaaaatatggtatggctattacatggctttcatagccggaaacagagaaaaatgaaaaagaaaatacaagtttcttgtcgtttttttttctttctctttgctgtgctggtgttttcgtatttgcttgcaggtacggagttcgctggcatgcgttggcccttggcgtggggcatacagaggcgcggacgtggtcgtacggtgctgaaggcgcatggaggctgggactgctgcggcgcaagcagaaactgctagggttctgccctgatttttttgtttttgggctgtagtgtatttgggtctaggtttgggcttgtaatatagggtattagtttaggtattgggttagtgatt

SEQ ID NO: 3843 - DNA, 610 bp, Gossypium hirsutum
gatattggtgaattatatttaagacccccactaataagcacgattattagacctcaatttgatgagttggagggccaggattttaccaactttattcccactttgtttttttttaccaaccagtcaatgtaatttgtaaataagaagcattacagattacagcaggagaaaaaaacatttattaacttacattttgattaaacatgttttttttaatgaaatatttgggtggtggtgtgtgagcttttaggagacttagggttaaaacatagaatttggaggggtgcacttttaggcataggaaagttatgaggcgatggacacataccatgcacactaaactcaacctcgccccaactctcattataagggttaatatgtttaataagtttttaattggtatctaattttttttacttagttagtacttaaatttatattccgttatacatattgttttaatttgttatcaaagttaaattgttaagagttaacatgtagtttgccccttaaatttgtcaaaaaaaaatacctaatttgatacataaacttgcctaaaaaattatatatatttaaaattaatttatatttatatttttttattttttaa

SEQ ID NO: 3844 - DNA, 609 bp, Gossypium hirsutum
tgtatgcgcagcacaatgcatcaatacaagttatttgattgcattcagatattaaaattgattcattttgttcttgtttttgcacccatttatatattttaaaaattttattaaatcaattcacaaatctcaaactagtgttatttaatgggttatttgattgcttagtgtttcaacaatcttggcttctgtaccagcattcatgattttctcttagcagtgaggactctgtatatgtttctttgagtctcttctgcatgtacttatatttgatcattttcatttaagatttgccccccccccccaacataattttggagatatatttcatatcaataagcttggacaatatttttaaccgaaagtatgcatctgtatgtcaggctcgcatgctcaaacttgtgatactttggaggacaacagtggtggtcaatcatgtatgctcagcccatcagcagaggacaatatcatggacactgtgggagtcatttgtgttgacactgaaggaaatatagcatcaggagcctccagcggtggtgttgcactgaaggtgataattactggatgaaactgtatttcttagttcattcctctctgaggctatataat

SEQ ID NO: 3845 - DNA, 623 bp, Gossypium hirsutum
gttgctctctcactggttttcttggctgtagtgttagcttttgtgcctttgagattcttgatattgtttgtattcgtagaagcttttacgagagaactgccatataggagagacagcaatgaccggtggctgcgaaggcttagagaatggtggtttaggataccagcagcaccagttcagcttgttagagccgataaaaagaaaaagaaattatgaaaaatgctgtgaacaacactcagattgcaaaatcgttcaggtctttctcttctatatatatctatatatttcatttctgcttataattgttctccattgatagtccacataatgcatatggtacccatggtggatctccgccacaaatcgacccgccctaatcctctctttacttatctagcattgaacctatgacaacttgcatgtatcatacctttagcttaagccaggaaatcatggtcttcaatggagtttaaatgtaaactagcaaagagaaaattagttgttttgtgacaagaagaatgaattacttgtctataaatagaattgctggttataacgcgtatggactgtattcccctgccattgctatggaagcttcaatggagttggcataaatctcatct

SEQ ID NO: 3846 - DNA, 630 bp, Gossypium hirsutum
aaattattgaaaaaaggttcctcaagtttttattgcataaacctaatgtttatttcattgttatagacgaataaagtccaatagacagaattgttaaattatcattgctcaaatatttctcatctagttcatccaaataacttcaagcattttctaattgtgataaacaaattttttattgaagtatgtaatattccacaacatcaagtttctaataaattagagtttgtaggcttaattcaatgcaattaaagattgaggtcttctgttattttttctgaaaatttccggattatttgggcaggatttctattaggtattatttggtttttaaacatttttctggtgttatgctgattgaaactttgaactgtttatcagcctgctaacaagaaagggacttcagcgaagtcaggcaacagtaaaaaggtagatggagctggacggatggaaacagcaaagtcgagtgagtcgccagaggacattgaggtaaacttatttgttaaagtttctttattgtcattactttaatagcttgaaatatcttaatatctttgatttgtctgataattacagccagcagaaatgagtcttgaagagattgaaagcagaataggttccctcattcag

SEQ ID NO: 3847 - DNA, 679 bp, Gossypium hirsutum
aaaagttgcgaggtatcggtggtaatgctgaagatggaaatgaacgcaagaagaagaaatcaaaatcagtggaaaatgattccaaggatggacatcataacggtgatgcaagaaccccaactgttgaaaatgctgctacacttgaagagaaatataagaaagtgagtttcgttgatcaggttaaggtgtttccttctacggatgttgcagatgaggcaaagaaggatcgcaaagaaggcttagtatatggtaattgttactcaaaagaagaaggtgagattgttatgaatgctgttgccgaatacatcgagtctcgtaatctaggcgatgaaggtttagacatggttctaaactgtggatctcacaaagaagtgagaaagtgttggaaggaaattcaagcagcattccttggaggccagttgggagcgtataccatcgagctcatgttcttttagagagggatgagaaacatccatggactcctgtgttggaaggaaattcaagcagcattccttggaggccagttgggagcgtataccatcgagctcatgttcttttagagagggatgagaaacatccatggactcctgaagagttagagatggtgaagaagttagtcgaaaaacacggaccgaattggagattgttgggtgattcacttggcaagcataggcatcac

SEQ ID NO: 3848 - DNA, 586 bp, Gossypium hirsutum
  misc_feature (113)..(113): n is a, c, g, or t
tctcagaatgtcgcttcactagatccaactgaagaaaagattttgtttggttcagatgacagtgtgtgggatatctttggaaagagcaccaacacgagcgcagtgttggatgntacagattcttttggggcatttccttctctgcaaagtggaagttggagtgctcttatgcaggctgctgtagcagaaacatccagcaatgatataggggtacaggaagagtggagtggtttagctttgcagactagcgaacctcctagcggaaacatgccatcattaattgccaatgatggcagccaacagcaattgcctggagttgataacaacttgcagaatgcctcaacagtgaactttaaaccttttcccatgtctatggatgccaatatcaatcatgattttggtagtactcttggggttcagcaatcaggtgtccagactgcaaatgaacagactgggagaatgcataatgattcttgtcaaaggtttgttcaacatttaacagaagaaagaagcaaatggttagatcgcagtcctcttgaaaagcctgcagctgaaagtgcctcactctttggaaatgttgcacact

SEQ ID NO: 3849 - DNA, 641 bp, Gossypium hirsutum
gactctttgctatccaaaagtgcagtttgcgcacatgagatgtagatgaaaacatcacactgcaaaaatgtaataatttttagattaacctcaaagtctttgacttcctaacatagagactatctacaagcatgtctgagaggttacttcaggaaaattagcaagtttggcagggtttggtcttcccatgacaagagtgtaggcctttttcccagcaagcatgatcagttccttcatctgatgaatcatgtgaaggtagccagctgcacaaaagttaccaccttattttggacactttgatgcatgtagaaagttccaagaaaatataaaatcttagatgagcctcaataaaataaaaattctaaagaacatctccgacaaatgcaaaataaaaaataacagaactatggatttagggcagtatacacacatctaatgtaaacaaaagtaagcattacttccggaccaatatattaaaaatgtttggatgaagagttatatgtgcatggatactaaaaaacaacactattaacatggtcaaaatgattttaaaaaggtaaccatgtaaacccaacaaagacacttcacatccataatccaattcctaaaaataacaattacaaggaaaggaggagtgtcct

SEQ ID NO: 3850 - DNA, 596 bp, Gossypium hirsutum
actactttttctgctacatcaccatctttggtttcttgatttaactgcattgaagaacagaaaatctaaataagcatgaagctaaaactttcttttaaaaaattaatccaaccatatcacacaagtatagacactgcaaaaagcgaatttccatgcacagtattgacactcctaatcttgttactcactacattgaaagctctcctaaatatattttatatataattgtaatcgttacagtccaatatatttgtctcgtacacttattgatgacttgcaactagggtatgcacacaagcaatattggagtaaaatgcatgcaggtcatgcataggttgacataccatatcgtccaatgcaatggaagcattataggtacggaagactttcgctgtgagaccaggcatgagttccttcaaatgagcatttagtttactcgtatcaagctcatcaaaaagatcatcacttttgcttttccctgcataaaacagagatcacaccctttggcttaagtcatatcatatatgtatcaattctagtcacaggtagtcaacaacttactagtttgaaactgtccaattgccttgtatacagga

SEQ ID NO: 3851 - DNA, 634 bp, Gossypium hirsutum
attttcttcagaattttgttcactgtgaggtttttccgactgattttttgctgctattgttgttttttcaggctgaagagattgccactgctagagatggtgagcctgtaatatgcaggtgcatcaacacatttcccttcttgatgtttattgtttgttattattgttgttgtgtgtgtgcgttttagcaggtgggaaattagactggtcctgttcggtctaaggatcaagtttactttgccaatgggcattaaatgcattaattttgttttttacagaggaaaaccgaagaagggaagaggtagagaagcaaagaaaatgcgacacttcagtgaaccagattatgactatgatgatgatcctgatgtgactttatgaaatgagttgaatctaacaaagtactttttggccttgccttaatgctttcaagctttaatgtccaatcttagatgtttttcgtatcataacaaccggtgatagcagatgttatttacatgattttcaagtatgccagatgaaaaaatgattttggtttttcatggtgctcaaaatcgaatcaggggttcatatgggcagaatgttgagtgataatgtgaaggaccctttacggtctgaatcttctgggctagttcaa

SEQ ID NO: 3852 - DNA, 613 bp, Gossypium hirsutum
  misc_feature (592)..(596): n is a, c, g, or t
tctcaactcccgtttgcagacagcaatagctaaaaatcagtttaaccccacgtaatcgtttcaggatagtcataagtaatacaactgatcaaatccagtgataagtagagttgcttatcaagtgataggttgttgtgtaacgcagataccctgcaaaaaacgcatcgaaaaaagttaaaagaactcaacttctctctcttcgttatttttttcgctttttcaatttctttttcttattggtttggcagcttttttttcttttactgttttcgttgaacgcttagcatgaaattggaaccgctaaccctagaaatctgtcaaaagtacgaccgattcctcaccttaaacaccaccaccagccgctaacttccaagagacgccgtcgtttcaaccacctctttttcatcttcttcaatttacctttcattcatcctcagacttcacttctctcgcttttgctctgtttatatttcttttggtcaaaataaaaaaccttagcccctaatttaaattctcaatttctcgattgattaagtttttttttgttcaaaataattgggaagaaatgtcttctctcagcagagaattagtnnnnnatctccagtcctaagag

SEQ ID NO: 3853 - DNA, 644 bp, Gossypium hirsutum
tcgaatttatttaggcaggattggaatctaactacataattcgtcatcaagaaccacatttgcagaagtgtagactagagagaaaatgcaatactattaaccttatccttcttttttttgggttcagaattaaccttataagcattctttcttgatcatgttgttgagataaccatgtatcatagatctatgaacattacggaaaacaagaatgtgtaaaagaacaagctggcacaaagctttatagagcaacgtgataccttgtgataggtctttctgtcctacaataataacaactacttaactacaatccctcttagtcttcttcccactctcttgtccaacacagcacaatgaagaaggtaaaggaggaaggaaaaaaaaataaaagagacttctttcactattaccaacactgccaacagagaacagggagtcaattggccacaaaaggaagaggaaaaggaaaataaaacagaattaagtaaaaccagaagtcaattgctcccttaagtatggaagacatcaaggagttttcgcaagggaaagcaaggaggttatgaaaaaagaaaatggagtaccattcaagagatggaagcaaaaagatggaaaagaaataagagaacacacgacatggctgaaga

SEQ ID NO: 3854 - DNA, 609 bp, Gossypium hirsutum
ttttcttttgtcgaatttatttcaagatgaagtgaaggcccttaatccaaaggttagtgatctgcaagttactctttcacttcttgtccctgacctttcaattgtttcatttatataatagatctctttaaattgttcccattgtgtgttatctgccaatggcactgttaaaaaaacagaaataacagttccagtgaggtggttgtctatgtcagcacctttgatccatttttaaccaaataatctaaaggactaaattatagtgatttaaagaggtttggaattaaaataaaccaatttaaagtttatggatcaaatgaaactttgtggtaaaattcaggaccactgtccattttatgttttaattattttttactgataaatagaatattacttcccataaaattcttcaccccttttattgttcctctgtgcgcaaagacatttgctttcattactggaataggcaatgaattcttcctattgcagtgggcagcagcaatagaaagcttggactatggtaatgctggatcagataagagctttggcatgaagcaaagacctgatggtgacattgagatcgatgagaaattttgggaagaggatttc

SEQ ID NO: 3855 - DNA, 600 bp, Gossypium hirsutum
tgaactattttaatccgttacgactgcatgaaactattttaatccgttacgacggcttgcagttggttgctaccattcgaaatagagtgcttaagctacaacttggtcataaaggtgggttgggggataaccacacaactgttgttccctatcaagattcaagtcaataaacaaaaatggatatgcagctgaaaacaacaatgatacatgatgtgaaatacttacagcggtgcaacgtaagtttggcgaatactgaagcagccttgacacaagatccaatgcttcaggaggtattttccggttaaatatctaaaaattgtaacttgagttagatatccactattattgcacaacatatatggataattagaagacgatccaataagcacaccttatgccatggatgagctttgatctgagggaatttgaactctgtatattttggattcatacatttgatttcttccctagtgggagttcccaatttctgatatgataaagcaaaatgaagtgaaaaaattaaaaagcagataaaatgcaaagtaaaactacgagtaacaaaaaagccatagatgtgcacctttatgatttccactagct

SEQ ID NO: 3856 - DNA, 624 bp, Gossypium hirsutum
gggggggcttctatctttgtgtataaaacctttgtttaccttactgtcagcttatttacaattattcttttttgcagagatcaactctgtgctcctttctcacaaccgtaatcaggttaatataacactttccatattttaaaacttatctgtggctaagggtttgatgttgatgactataagtttccatcccttcggttttctaaaacataattagctttgctgcatgtgttaatgttcattagtgtgcggtatatctttagtttgtgaaggcagtaaagaaaagttcaagttgtctaacagcttgcttttttatatgcagtggtgcagtggtagcattctatatgtataagcttctatcaaaggacaagcctcgcttggaacctgggacaggaaattgatgtgtgctcttttgaggttagtttattttgatatgcatgttctgcgccctctgttttttcccaacatgtacatatacgacatgttttatcaccatctatggccactgtctggttcattgttgggaacttgtctgttcattacctcttttcttttatcataagagctcaaatgtgctgcatatagagctggttttgagtattgagcaaaccaatatgcgcctat

SEQ ID NO: 3857 - DNA, 580 bp, Gossypium hirsutum
aaattattaccctatcttacctttttttactctattggggttgttcaaaatccagctaaataaataatctcacccaataattaaagttactatgattagaactgtttaaatttttttcaaattttatttaaatatcaaattgttaattctttcgagttattcatttgacgcgttaaatatattattagaaattaaaaatttatcacatgcatatatgtgtgaaaaatctcatatttagaaaacagtaaagtaatagtgtgcatgataacataaaagtattagaataaattttaatattttattaatctaattagcatgaattttaaatctcattaacctaatcattattgtgcataaaatatttatgaatttattataaatatatatttgttattgtaataatttataaacgacctcatctattataccaaaacaagactacttaatacaatatcatgccttatatgtcacactttaaacttatttaaatttttatttattatatttaaagctaccataattacactttcttttctttttataacttcgaacttgaaaaatcagtgaatgagtgcaatca

SEQ ID NO: 3858 - DNA, 596 bp, Gossypium hirsutum
aaaaatatgtaaatcccctctaatctgtaatgaaattgtagttcattaaaattctattgctctgtcgaataaaaaaatatataacgaaagtaaacataaggtaaattaaatgtggtaaataaagaacaaaggagattctttaggcggggaaagtaatgggaataacgtcacattgctcataagcatagctcattctataattagaaagatttgcctaatcttgtagagaaccttactagtgtggaaaagtgataaacaggaaaatggccgccaacaaataaactacaagaaagcataaaaggacatattaccttcatcccatcctttagcttccgataaggagctcccaccagaagaagaagcaatgcttttttaacatattcatgtccataaatttcaggagctaataattgtgccaacttgttatatatattgccatcctcagctaattttgctatttgctcttcctcatctcccctaagttcatacctgaagtagagctcacaattgattataaatacaggcacactcgtattgtctagctcatgatttgtttcagtcaatcgaaattcaagaaccaatatttgatgccttct

SEQ ID NO: 3859 - DNA, 568 bp, Gossypium hirsutum
tgtgtgatctttagtaagttcttgactgtgtcaaattatttacaagcttttgtatgagaaatttatttagatacttggtgggtatcttttgctgcttgttctacattaagacatcattgaattatatttttacaaagccaaaggcataattatttatttagccctctaattttataagaaaaattattttagctgttcatttaatttttcactttttttaatgcttgaatttacattttttttatcaaatcacctcaaaattaataaaaaaaagttaaagtctattaactttattgatgtgacatctatagtatgatatttcacgtgtgccacatttacaattaattaaaatttaacaatttaacaattttaaattttaaaataatttttataatttagggtttagaattaagagtatttgagaagcagcaagcaagcaagagtatgggttgtgagattgaggcaaaagacaccaaactacatcactggtcacagcacatgggataatcaattttctttatatcttttacagacaaaaacagtcaatgtgcctgtgtacctttgaaac

SEQ ID NO: 3860 - DNA, 573 bp, Gossypium hirsutum
ctttaccaccttcaatgtggctaaatactagaatctttgaatacaatagattaagtagataacctatcttgtgcaaccctaaactcaattaaacaaggacaaaagtacctcaaatttaccaaaatagaccacaggtatctacctttaactggtaattaatatttctttaaaataaaatagtagcaacccttccacatgattctgccagaaaagattcgatcattcaatgaacacacaattaaactctaaattaaagccaaatttcgtctcaaaatgccaattaaatatactaaatatcgtagcagcttaaaagttactacaaccttaaccatttcaactaagaactaacatttagattctcatcgaaaattcaaacaaaatagacctacatgatcaaactaaccaattaacgccaaaaaatgatcaaagaaatactacagattcaacaatcttcccttaaaactaaaaattaaaaaaaaagtcaactaaaataaattcataaagaaacaaactaaaaaagatcggtgagaacgtgagaaatcaatgatcggagagagattattaaaaaataaa

SEQ ID NO: 3861 - DNA, 660 bp, Gossypium hirsutum
cgaaatttgaaaagttttaaataaaaatattaaacctaaaaaattaagctaaatttagacttaaacgtttaaggcttcgttcgacttaattttaagtttataatattttatattatattatttttatatattatgtaatttaaaatacatgagaatatataataccaaataccaactgtatttttttataatatttttcaaatatattattttaccaaatgtaacttttgaatacacagtaagagcaatgcaaaattgagtcttaaagctattgacttttttgttttcttttttcttttattaatttcgtttgctgtttgccaactatttaaaagtttaaatgataagaaaggagattttagggtaaaaactagtatattgagaaaataattaaatagtgacaggtaaggtgtcatgttgagaacttgtttttaaccataaaaaaaaattaacaaaaaaaattattttttaatctaatatatataaatttatttttttatttttttaaataaaaaaataaaatataattaatttaactctgaactccatattacttttatggatgagaaccgagacaatattggactttttcaatgaagttaccaatcatctttttcttttcttccaaacttctagcatgaaaaaggttgtcaaaaaaaa

SEQ ID NO: 3862 - DNA, 621 bp, Gossypium hirsutum
atgcctgatgagtagattttggtgcattattctgatgttcagtagttgccgatgcagctggatttgcaaacaggttaggtccatgaacatcgcccatagggtgaaatacggaatcttgaaatgacatacccagggaaggattttgaacacatgttctaaggcttccatctaggacatgcacagcaacatgccgaggataattttgagcagcttgcatctcatctgcacaaaaagcaccatccaaatcatcttttctctggccttgagctgatttctcatatgaagtgcaagacttctccaagtttgaagccttacttgtaccattatcatgaaatatctgttggacattaagtttataaggttcacaaatttctttaagttcaagaataacatagaattcatgtttttcatgatttactacctcttttggcaaaggtacaaactccctgaatgtacaagagcttttgagtgctgctgacattggtataaaattcttattcatggaagacgcagaggagcagttttgttcgtggagaagggtaaaaacctcagagcaactctcgtcttgattttctttcagatttgtagccttttcatctccagtaggtctctgacaaacac

SEQ ID NO: 3863 - DNA, 566 bp, Gossypium hirsutum
  misc_feature (555)..(559): n is a, c, g, or t
acatagaaaagatatatgaatatctcgaaattcacatatttgcctggggcgaccctccattgatcttcgcttgcttctttgtccttggctactgcttggttaactactgcgaattatttaatggtagaaagaaatccttcttccttcccgcatcgcatcctagaggggccgctcggacgaataaagtagggaatgccagaatgggatagagttcttctgaggcatcaaccatagattgcggaactttcaagatgcttccttgcgaaagccaacggagcctgtaactcaaccttctcatccatgggaggattccatattcgatgataaatgtcaatcgagggcaacctcatttccagagatagaatcaggctgcacagaaggggagaagccctcctactgagcaagattattaatgaataaggaagcacttaacttagggcagccagtctcacttttcgcagcatagcgccttgctatatgctttcatccttgtaacttacccaagtgaggaaagccacattgggtatcgcgagtcgggatggtggcgaagatatnnnnncagcgaa

SEQ ID NO: 3864 - DNA, 653 bp, Gossypium hirsutum
ttttgattattttcattagtctatgctccattaattggggaaaagaaaaaaagaaaatatattgttcgccaatggcaaagttaaaatattatatctattacaattttttatttaaaataaaaaataatgattatgaataaattggattaaaatatttaaatctaaaaaacaaagagtattatttttacttcatcagctaaaccttaaaacatagttaaaagaaacaacatatgttgacaagatttggatgtttttctttttgattatatttcaagtccatgttggcgggttggtcctgatggatgggtcttctttcctgttacggtcttgtaaaaatctctttaattacatatttttttcatttcgtgggaaaaaaacaaactcccaatctgaaatgagcattgctgttctatatgaacttgttttgttgttcatccgattatgccgctaaaactaggctttgtttttaaattttcctggagaaatgagtgagtctaaaagtcttccttttttaaagaaaaagtcaaaatccataggcatgctatgttctcattgcgcttcctcttttaactgctaccatactctcttcctccaatttggctgaaaactttttccctctaaccaaccatctaatctcactgttcagggttaga

SEQ ID NO: 3865 - DNA, 638 bp, Gossypium hirsutum
actcaagtgagcattgccttttccaacttacaaacactattggcatcggctccagtattacaactgtcaaatttctccaaacccttcactttggaaaccgatgcctccagggtgggtattagcgtcgtcctctctcaagattgccatctcattgcattctttagttagaaaataagtccccatttacagtcgacatccacctaccggcgtgagatgtacgcaatcactcaggccgtagcaaagtggcattagtacctgctaggtcgtcgtttctccattattatcaatcaacagtccttaaagaatatcaccaaccaagtgcttcaaaatcctgaacaacagaaatggttcggaaagttagtgggttatgatttcgaaatattatatcaacttggcaaccataatcaggccgctgatgctctctatcgtataccctctgcctctctatttgctatatcttgccctgagcttacagtggtgacaacggtatgtgtagctaaccaatctcatcctgaatgccttacagagtcgtttacagtcccatcccgaatctcttctcgggtatacttataaagatggtcttctactctttcactgtcgcttggttattccttctgattccatactccgctagcaac

SEQ ID NO: 3866 - DNA, 736 bp, Gossypium hirsutum
  misc_feature (635)..(638): n is a, c, g, or t
  misc_feature (649)..(651): n is a, c, g, or t
  misc_feature (663)..(665): n is a, c, g, or t
  misc_feature (678)..(686): n is a, c, g, or t
  misc_feature (694)..(694): n is a, c, g, or t
  misc_feature (696)..(706): n is a, c, g, or t
  misc_feature (708)..(721): n is a, c, g, or t
aaaggattaaaaagtaccttttcactcctaaaacttcagacaaaagtaaaaagcaatagccatccacaaacttttaccttgttcattaaacctaatcaagaatcactcttgtaatttagacaatcttcgttataaagtctaaacaagtatcacaggtgtctttatatcattcttcatgcttaattaacccatattataaatgatcaaatcagctagtaatatgatcacaaacctgtgaaaaagttgaaagcataccgcgcgtgctttgatcaagaacagtacggatttcctccaccggagaaagcctagcagccttctcctgaaaatggatcgaccacatttcagtaagttccaatcccaatttgattacagtatatatagacaaaacaaagagggaaacattacatatataaaattaaacaaacctggtgagcttgaattaactgaaatatattggtttctttattaacatcctcaggagagacagcctagtaaaacaaacagaaaacccattaattttcctaaacagaaaaagaatattttccaatcaattactacctttcagataaaaatcaataaaaaaaatagaaaacccaaatttccttttttaaaggtatagaaaggaacagaaagcnnnntgtgtaaaaannncccccccctccnnnttcccttcccctnnnnnnnnnccctcccncnnnnnnnnnnncnnnnnnnnnnnnnntcctctttctttttc

SEQ ID NO: 3867 - DNA, 528 bp, Gossypium hirsutum
  misc_feature (496)..(496): n is a, c, g, or t
  misc_feature (499)..(500): n is a, c, g, or t
  misc_feature (502)..(503): n is a, c, g, or t
ttctctttcttcctactatgttttctgattctcatgcatgcctatgttgctccacatcatatatatacttccatattttttcgtttgattgcccgagagacttttcacagtctttatttgtatacatttacaatccaaacgatcttcattcgttttctttactttgattcctcacttgcaattgcgtttgcgtgcatttttattgagcgaaacaccctttattattattattattatcaagatttgctcttcccatgttcttcattgaggttaacttgtttttttttttaattctctctttgtttttctttttattcctgatcttatcgggttttcaatttttgttttgtttttttcaggatatctggccgctctgctgcactgattccttcggatcaaaggctaggtttttctcaggtaattttgaatacccttttctgggattattgactgctgggaattgggaagcttttgctaatgaaattttaaaaaaaanggnnannatctttgattttttttatttttata

SEQ ID NO: 3868 - DNA, 591 bp, Gossypium hirsutum
ggcaaaaaaaattccaccacttaaaaaatagaaaaatccacaacctaaataaattatttttatcaaaaaaatagacagattccgtttcttatccgacacagagaagtggattgaagtgaagaaagaaacaaccaccgaaaatgtcggcagcgcttcctccaccagcttcatctctcaaactaacggcgacaacctctttcccatccccacgggcactcttcctcgctttacgcaaaccccaaatttccattatcccgcgtgccactcctgactccgacgctgactcatcaaccgaacccgactccgccccctcctcggacacctcagccgaatccgacccattcgaatcccgtctctcccaagtccgcctccgttaccgaatcggagccggcaagaaagcggagcgccgaaaatcaaagaaatccggatccgtgtccacttcgttgtcttcctcctccatctacctccctccggtgcctttaaaagaggcgatttcaaatgggttgaaagtggatttcgggtttagcccatatggcgagagaataaacggacggatcgcgattctcgggttgacggctttgggtttagtgg

SEQ ID NO: 3869 - DNA, 384 bp, Gossypium hirsutum
ctttgtgttcgattcggccgccttcatctgttttttgggctgttctgtcagtgtaagcttttcatattcttctctcattcttcttctctgttgtgcttccaactttgctttctttcctttatgatttggattttcttccgtcattcttctattatctgccgcagcacagccagatctcaccatatctatgattgccaaaaagaaatcataacacaaatttaaaaacaaaaacagccagattgaccaccattttaccagcccatcttcaatcaccagtttgaatctttgtagactcacccacataaacagattcaattaatcaaaatttaaacaaaaaagcaaccaaccaagccatgattgattcataacaaactaaaaaaaaaa

SEQ ID NO: 3870 - DNA, 1167 bp, Gossypium hirsutum
  misc_feature (615)..(618): n is a, c, g, or t
  misc_feature (620)..(625): n is a, c, g, or t
  misc_feature (628)..(647): n is a, c, g, or t
  misc_feature (652)..(661): n is a, c, g, or t
  misc_feature (664)..(672): n is a, c, g, or t
  misc_feature (675)..(676): n is a, c, g, or t
  misc_feature (679)..(679): n is a, c, g, or t
  misc_feature (681)..(681): n is a, c, g, or t
  misc_feature (684)..(690): n is a, c, g, or t
  misc_feature (693)..(694): n is a, c, g, or t
  misc_feature (702)..(704): n is a, c, g, or t
  misc_feature (706)..(708): n is a, c, g, or t
  misc_feature (712)..(739): n is a, c, g, or t
  misc_feature (743)..(745): n is a, c, g, or t
  misc_feature (747)..(772): n is a, c, g, or t
  misc_feature (776)..(776): n is a, c, g, or t
  misc_feature (783)..(792): n is a, c, g, or t
  misc_feature (795)..(801): n is a, c, g, or t
  misc_feature (803)..(811): n is a, c, g, or t
  misc_feature (814)..(817): n is a, c, g, or t
  misc_feature (820)..(828): n is a, c, g, or t
  misc_feature (832)..(834): n is a, c, g, or t
  misc_feature (836)..(837): n is a, c, g, or t
  misc_feature (842)..(844): n is a, c, g, or t
  misc_feature (848)..(856): n is a, c, g, or t
  misc_feature (861)..(864): n is a, c, g, or t
  misc_feature (875)..(875): n is a, c, g, or t
  misc_feature (879)..(883): n is a, c, g, or t
  misc_feature (886)..(891): n is a, c, g, or t
  misc_feature (894)..(894): n is a, c, g, or t
  misc_feature (896)..(903): n is a, c, g, or t
  misc_feature (905)..(910): n is a, c, g, or t
  misc_feature (912)..(915): n is a, c, g, or t
  misc_feature (917)..(917): n is a, c, g, or t
  misc_feature (919)..(921): n is a, c, g, or t
  misc_feature (923)..(923): n is a, c, g, or t
  misc_feature (925)..(932): n is a, c, g, or t
  misc_feature (934)..(956): n is a, c, g, or t
  misc_feature (961)..(963): n is a, c, g, or t
  misc_feature (966)..(968): n is a, c, g, or t
  misc_feature (970)..(972): n is a, c, g, or t
  misc_feature (974)..(986): n is a, c, g, or t
  misc_feature (988)..(993): n is a, c, g, or t
  misc_feature (995)..(995): n is a, c, g, or t
  misc_feature (997)..(1009): n is a, c, g, or t
  misc_feature (1019)..(1022): n is a, c, g, or t
  misc_feature (1025)..(1046): n is a, c, g, or t
  misc_feature (1048)..(1053): n is a, c, g, or t
  misc_feature (1056)..(1056): n is a, c, g, or t
  misc_feature (1058)..(1068): n is a, c, g, or t
  misc_feature (1072)..(1076): n is a, c, g, or t
  misc_feature (1078)..(1080): n is a, c, g, or t
  misc_feature (1086)..(1087): n is a, c, g, or t
  misc_feature (1089)..(1093): n is a, c, g, or t
  misc_feature (1095)..(1105): n is a, c, g, or t
  misc_feature (1110)..(1110): n is a, c, g, or t
  misc_feature (1113)..(1118): n is a, c, g, or t
  misc_feature (1124)..(1134): n is a, c, g, or t
  misc_feature (1136)..(1146): n is a, c, g, or t
  misc_feature (1148)..(1150): n is a, c, g, or t
  misc_feature (1152)..(1156): n is a, c, g, or t
  misc_feature (1158)..(1159): n is a, c, g, or t
tctttcaacagcatgctgctccagtggcatctcaacaaaatcaagtacgaaaagtagatatggttttgcacaaagaaattcattgttttctatgattatggcaataatttgtcttgtattataaaatgtcattatttctttgccatgtcaatgcgtcactgctgacaacattagtatttaaaatgatatttcaaacattgataaatttgggtagtcaatgtacctgactttgcaacagcttttggctttaggtgatttttttttacgtgatatttcaagcatatggaccaaatatttgtaaggacatgttttaattgtttcttcccttccttcttaattgccactagtatatttttattgatatttctgcttggattgtttcatatatggagagttcatctgatcaaaatgactgctggcttttgtattcggtcatagggtatcccaagaactgttatatgcagggaatttttatttattttctttttgatgatttattttgtacatgttttttattacttgcatatttacaaatttgttaattgtataatttatttgtgcattttgtttgtacaattttatagactaaaatccaggaggaataagtgattgcannnnannnnnntcnnnnnnnnnnnnnnnnnnnntatannnnnnnnnncannnnnnnnncannttncnccnnnnnnnctnnccaaaccnnntnnntatnnnnnnnnnnnnnnnnnnnnnnnnnnnnattnnnannnnnnnnnnnnnnnnnnnnnnnnnncagnttatctnnnnnnnnnntannnnnnncnnnnnnnnntcnnnntannnnnnnnncatnnnannaacannncatnnnnnnnnnccctnnnncataaatatcntctnnnnncannnnnnatnannnnnnnnannnnnnannnnanannntnannnnnnnncnnnnnnnnnnnnnnnnnnnnnnnactcnnngcnnnannntnnnnnnnnnnnnncnnnnnntntnnnnnnnnnnnnnttcactatannnnatnnnnnnnnnnnnnnnnnnnnnntnnnnnnttntnnnnnnnnnnnatcnnnnncnnnaccaannannnnntnnnnnnnnnnnattanatnnnnnntccatnnnnnnnnnnntnnnnnnnnnnnannncnnnnncnnctccccca

SEQ ID NO: 3871 - DNA, 529 bp, Gossypium hirsutum
  misc_feature (523)..(524): n is a, c, g, or t
gcttaggtatatatatgtgtatatatggatatatgtgttttagtgcgtggacacatataggtgcatctatggatgcatcagtttttaaatactgttcaaacttctgaattttgattattgacaagtttttaaggtttgcttttcttattgagggaaaattttaaagttgctaagatcgacctaacatagtttctctatcctagtaagttgtggagcttatttagtgctcctaccttaagagtttagggttgtcaaatagtatttggatcttgcttggtgcttgtattggacctgagtgttggcagtcggtatgagtaatgctttttgagttctatgctataggttcttatttgactagaggtaacctctctcccccactgatatcttcatctattaaaaaccaaaattttgtccagaaattaaatttctcgctgttcacatggtttgttcattgctcattaacacttccaaaccataattcaatattatgtacaatgatgactgtatacctgctatatcttcnnaaaat

SEQ ID NO: 3872 - DNA, 606 bp, Gossypium hirsutum
gccgccttcttttactccttttcttcctagatgtaaaaacattcctcttcttagccaaaatcacatcaatctttctatcaacatggacctgagttttgttagttatattattaacagctaccaaactgtcatcagtaagcagatctcgtcgtgtgttctgttcagcatccacaagcttatctcttggatcgccattgaaacctaaaaattcctccttcttatgtccatgagcccacctggattggacataaaatccaaggtaagcccaaagagtaattaaaagcaaccaatagactacacggttgctcctaaaccattgagtgccaccagcaccacttctagcttctcttcttggagttcggcttgaattcaatctccgatatgtaggagaaccctttggagttgatcttcctgacagactggacttaaggctgccttgccttaatgatgatggtcccttgctcagacgttcctccattagcttcaggctataatatattgctgacaagctaaatcagtactcttcacatgttagccaacaccaaagacaaacagccctaaaggtctgtgttcattctatctccaaaatgcttagtagcacctcct

SEQ ID NO: 3873 - DNA, 653 bp, Gossypium hirsutum
aggggagtatatttctccaagttcgaaatgttcgataagcaggaatccgagtcatcaatttggtggagcttcaaaaaggcttctgctttacaagcaatgagctgtgaattcatttcaacaggttcagatattctgcacttaatttctataagcagctagctagtgcaaatatacaaaggccaggagccgtacctggggagacgagtctgcaccaacagctattgctgcatcaatttcccttattacagtcttccaatcaccaatctttcgagcatctgcgcatcgattaatatgattttccaacaactgcaacttaagtaactcagctggatctgattgttgccctggaaaacataggtggcgtctaacattatcaggcaaacctaacctggaagtaagaaatttgaggtttgttaatattcagtccaaaatccattgccaatttgaacatccattcaaagggcttttttcctttttagtggaaattgagaaaggaaagtgatgtagtaagaacttgaatggttcaaatagaagaagccaaaggactaaatcaatcaaataataagatgattatggacaacaaaaagtacaatcccttaaaatctatcatatatatgaaaagcacaccttgacaagctagcaacaaagagaca

SEQ ID NO: 3874 - DNA, 619 bp, Gossypium hirsutum
gacagaaagggagcaccgcttactcaagcactagtaccgtctaagcatcccacagctgatgaaatagtaccggcaactgcttgagctgatacgcaaacaagacctgaaagaacggttacgcttacaccaacagcggataggcaaacaacggatatgactaaaagacttgcagcggcaacaatcactctaactccagatatggagacattagcccctaatggaacacttacaaaatttgatgcaccgcttcctcctataagaccgctaatgccgcatctaagatcacgagatggcatgagcttcttcagtcccacagctctcttctatattttccttttttttataagggaattggctgccatcattcattcctatcccatccttaggtcaatcaacgtaatcccgaacagctgattctcaagcaggaagcagtcccgtccttaggctatttgccttgttaggacagccagaaagaaatcccctcttccgcttaaggaacagagaacagttgagaatggtctgttcacatgaaaaaatcgtctctttgacacttgtactatatctaacgtattctagccttcgtcgaaaacaagcccaaggaattatcctctccgttctg

SEQ ID NO: 3875 - DNA, 564 bp, Gossypium hirsutum
  misc_feature (523)..(523): n is a, c, g, or t
  misc_feature (558)..(559): n is a, c, g, or t
cctgtcacctctgattttggattcaaatccatgatttacccacagggatgatgactaaagtaatgcccaagaaatttggaaattttctggggcagtttgtggaatatgatgcccctatcccgacaatggggattcagaaattcatgtgcattagaggccgcctggatgtgactatgccattgaaacgaaaaaagaaaatcttgattgggaaggaacgagtggtttatgcacggttccaatatgagaagttgagtttattttgtttcatttactgtaggcttgggcaagaggaaagcttttgcccattaagaacaaaaactgatccctcaagaattatttttggctgggatatttcgctcagggcggtagagaaacgtcggaattcctcgataactaagtggctacgggaagctgatggctagaccagtaaacaattggaaaaaaaaagtggatctattgggaataattttgggatggagagagatactgggcatgattggaggagggatgttgagaaatcttntactaatcttaattttatgcctctttgatatgggnnaggag

SEQ ID NO: 3876 - DNA, 635 bp, Gossypium hirsutum
taattgacgaaataaattattgtcgcgggagttgctttcttaatgatgatatatccttagatgtaatgtaagcagttaaattattattatttttaaaaattatagttaaattaagaagttgttatatatttttatatatatttttgaaaaaaaaactctaaaattgagataattttcgtggcagtgcatgaaccgcagacgtcgaacttgacatcctgtcccctcgtctcgtgctgcttagcccgaggccgatattagtgcatgacttcgtatctgacccaaaaaggccacgtaccggttgcccatgctacgctggcgcaatgccatccactttttcatacttggtggtacggatacaaccggggaaatctggcaggcggcgaagtcacacgtcgaaagagggtcccacgtggcaaatgtggaggcgcttttacggacttaacctcacagaatgggaacttgtggctgagatttgaaatgaatggtaagaagcaaagcaaacaagttgaaaaaaaatagagaaaaagcgcaaaggtgggctatacctaaatcagccactaaattactgccaattggcagcatcctgttgcctctctcatttctgtttaccgttcaccgttcattctctttctcag

SEQ ID NO: 3877 - DNA, 620 bp, Gossypium hirsutum
attcaaccacagttgtagatgacttgaagagtcgcttgatgagcaccacgaaagagttcaaagatgttctcaccatgcgaacagaggtaaggccaagtttttcagcctatttacttagatatttttctagtattccttgtcattatgtccttggtaattcattcccttgacaattggtggtaattgatttgccttgtacagaatttaaaggttcatgagaatagaagacagttattttcttccaatgctacaaaggattctccaaatccttttgtacggcagcgtcccctggctgtcaaatcagcggctggagctgcaaacaaccttcctaagtgggctaatgggtctgcatcttcatctcagttgtttcccaggtaacagcttattagattgtattagatgtatcgcagtaatatacctatgacttcctgcttcaattttttttataaatggtgactccttaactggagaaaataaatttgcacttagaagacttgaatttctttaggagcttcgaagtccatttattgacaatttgttactgaatgccaacaaaacatttcttacactgcttttgtacatttttagcagtttgtaacaattgcatcctgtcattccaa

SEQ ID NO: 3878 - DNA, 616 bp, Gossypium hirsutum
gtaagttcatgaataagttccactttctcctatatttcctcttgtaagcaaacatggtaatctctttgtttcagaagaaaactacagtttcttaattagtagtttttattcgatttttttactatttggaatcaaggttttcaaatccattgataattcctactatcactagctaggcaaacatccacaattactttcatttgtttttctgttgatcttattaccaattataaaattctttcttcaacctcatcagatcttcaagaaaaatggctgaacttgttgtctctgtttcttccaacaccgtgggaaacttggcaacggaatacgcctcaccttatcttagctactttttccgttttggaaaaattgttgaagaattcaaaaatcaacgtaaggcacttgaattgaagaaagatagggtgaaaaatgatgttgacgcagctataaggcaaactgaggcaatcgagaaggatgttgaggactggttaacaagggctgaaaatgagttgggagtaacccagatcctggaagatgaaataggtcacatcaactgttccaaatggtgtcctaattggggctggagatattgcttaagtaagaaacttgcaaaaaa

SEQ ID NO: 3879 - DNA, 653 bp, Gossypium hirsutum
tctgatattaccaggtaaagatggaaaatgctccatttggacactactttggaccatgttgtagttactagagccagatggttcagccttattcatcttccctttccttggatcaatcggagcattactagaatcaagttgctgggaagtgtcaaattttggttccattggatcacccctctttcgcttagatgcagcctttttattatcattttgactcatttgtttttcttgggattgtgagttagcagaccgagtgtccaaactagatggactttcatgatccaaagactgactactcctatgagttccagctccttgatagtagtcatgtccagcaatgcttggaccaacaggctgcctgccggatgaaaatggatcaaatttaggcatctcaatttgggccaatcctgctttagaatcctttggaactgcaacaccctgggaagatcctggacagaagagtctcatttgtaaatgattagctcagtatgccacttaacaaggacacatttgcaaaatgttttttcaagctaactgaagtttgattaacagcaatttaccagaatattgtccagatgtagcatctaatgtttgcggtcccgctgttggaggaagccgtgatgacttcaaagcttcaagatcaagaccat

SEQ ID NO: 3880 - DNA, 425 bp, Gossypium hirsutum
agagtgatagattgatttctccgttttcccttcaggaattaaagaaaatatggtttactcactgaacttaatctcgacaatttagaacatcagtcctcaatgcatctcatgtgcaagaggaaaatataagcatatgttacataatctataaaaagctgataaaagatgaccatcaagtaacattatttaaagttcaaacagaccttaaggttccattgctcaaactgatctccaatagtccgcaatagattgtcccgttgaagcaatccagcatctatggtggtttttagctctgaaattcttccagaaacctgaaatgaaaaaaagattcaagttcccatgatgcatcaaaataattggaacaagaggggaggagtggatgttcctcgtcaagaagtaatattgaaagagtggtctgtggaaga

SEQ ID NO: 3881 - DNA, 1132 bp, Gossypium hirsutum
  misc_feature (618)..(646): n is a, c, g, or t
  misc_feature (648)..(653): n is a, c, g, or t
  misc_feature (656)..(658): n is a, c, g, or t
  misc_feature (660)..(678): n is a, c, g, or t
  misc_feature (682)..(682): n is a, c, g, or t
  misc_feature (686)..(691): n is a, c, g, or t
  misc_feature (695)..(714): n is a, c, g, or t
  misc_feature (722)..(724): n is a, c, g, or t
  misc_feature (726)..(729): n is a, c, g, or t
  misc_feature (734)..(735): n is a, c, g, or t
  misc_feature (738)..(744): n is a, c, g, or t
  misc_feature (748)..(750): n is a, c, g, or t
  misc_feature (759)..(763): n is a, c, g, or t
  misc_feature (766)..(773): n is a, c, g, or t
  misc_feature (775)..(775): n is a, c, g, or t
  misc_feature (777)..(783): n is a, c, g, or t
  misc_feature (785)..(785): n is a, c, g, or t
  misc_feature (789)..(794): n is a, c, g, or t
  misc_feature (796)..(798): n is a, c, g, or t
  misc_feature (811)..(814): n is a, c, g, or t
  misc_feature (822)..(822): n is a, c, g, or t
  misc_feature (824)..(835): n is a, c, g, or t
  misc_feature (842)..(845): n is a, c, g, or t
  misc_feature (849)..(851): n is a, c, g, or t
  misc_feature (853)..(853): n is a, c, g, or t
  misc_feature (862)..(862): n is a, c, g, or t
  misc_feature (868)..(874): n is a, c, g, or t
  misc_feature (877)..(881): n is a, c, g, or t
  misc_feature (884)..(891): n is a, c, g, or t
  misc_feature (893)..(896): n is a, c, g, or t
  misc_feature (899)..(902): n is a, c, g, or t
  misc_feature (906)..(913): n is a, c, g, or t
  misc_feature (924)..(926): n is a, c, g, or t
  misc_feature (938)..(938): n is a, c, g, or t
  misc_feature (940)..(940): n is a, c, g, or t
  misc_feature (945)..(946): n is a, c, g, or t
  misc_feature (949)..(967): n is a, c, g, or t
  misc_feature (976)..(977): n is a, c, g, or t
  misc_feature (979)..(993): n is a, c, g, or t
  misc_feature (995)..(1003): n is a, c, g, or t
  misc_feature (1005)..(1032): n is a, c, g, or t
  misc_feature (1034)..(1034): n is a, c, g, or t
  misc_feature (1036)..(1057): n is a, c, g, or t
  misc_feature (1067)..(1068): n is a, c, g, or t
  misc_feature (1070)..(1079): n is a, c, g, or t
  misc_feature (1090)..(1092): n is a, c, g, or t
  misc_feature (1096)..(1105): n is a, c, g, or t
  misc_feature (1108)..(1124): n is a, c, g, or t
  misc_feature (1126)..(1129): n is a, c, g, or t
gccagcattacctaaaaaaattttggagtttagttctcctgcaagttacaaaaagaataactataaaaacaccagaaaaaggtacagagaggccacgaggcagcaccctagacttaaatattgtcaaagaacatgtgcatatcagtaatgcaccaaattaccaaggcccgagcaactaactaggttcatactccaaattaccaagcacatttcaatttcaacttaactatatcaccagattcaatacaacttgaggaagaatgatattagtattgaggaccagcttaaaatgcttaaaagagtcatggtcttctacaagggcaaatcttctttttatctacttcgacactagaaaatatgaaaaatacccttcaacccaaaaaggtcgccatgatattaactaaaaggaatatatccttgaatacaccatacaaattaagagtagttctgctttgcgcttattatggttgttaaataaatagaaaagtcacttacaaattgtagatcatcttccataagttctggaattgcccagtggatcaggtcaatgcctttctggtagtccagtctcccgataaatccaatctgtaaatacgagcttagtgagacatgaagaannnnnnnnnnnnnnnnnnnnnnnnnnnnntnnnnnnggnnnannnnnnnnnnnnnnnnnnnttgnaacnnnnnnaaannnnnnnnnnnnnnnnnnnnaaaaagannnannnnttgannaannnnnnnttannnaataaacannnnnaannnnnnnnanannnnnnntnaaannnnnngnnngaaatcaaagatnnnnttcctttntnnnnnnnnnnnngggagannnntttnnngnataaaggantttttnnnnnnnttnnnnnggnnnnnnnnannnnaannnnaaannnnnnnntaaaaaaaaannnattttaaaaaantntaagnngcnnnnnnnnnnnnnnnnnnntggaaaaannannnnnnnnnnnnnnnannnnnnnnnannnnnnnnnnnnnnnnnnnnnnnnnnnngnannnnnnnnnnnnnnnnnnnnnncccgggtgannannnnnnnnnnaataaaaaatnnnaaannnnnnnnnnaannnnnnnnnnnnnnnnncnnnnttt

SEQ ID NO: 3882 - DNA, 645 bp, Gossypium hirsutum
gttttaatttattcgttcactaatttttctcaatagagttcagtttatcattctgttaatacaatcaatgtttatagaattcaggaattcttttatggtttatttggctctaaagaaatccttagagtatgatggttttgcagtttgggattagtttattacagttttgtgattcaagactttgatgacaaaatactcccagaagatatttttctttttattttgctttatgcttgcatatcccaatgattcttcattgaaaatataatattagtcatccaaaattttattattgagtcggtaaatgacttgctatgtatagtagattggcttttggattttggcttttacttgattttcttttgagagctagttttgattttatttcttggcacctcagctagcagattttgtgagaattccactggagagtgcaggtggaatgattaaccttatagatgcctattgtctcttcaatcgtgctcgtggcacaggtttggtttaacactaacttcatctcttgtggtcattgtatttaggttggtttagttacattgtgaacttggaatttcttaatctaatttgtgttgttgaaaatattataacctacaaaataagtgttttggccaacatagttcttccttc

SEQ ID NO: 3883 - DNA, 627 bp, Gossypium hirsutum
atattttatcactttcttaattccttcattagaaatagaacacatcaatagatatatgcaaattacggaaaaagaaaaatgaatggagaattaaggagaaatcatggagttggtaaaatcatctttgaaaagcacaaaagcaaaggaatatggattgactgaaaaggtatgcacaactttcttgcaagttaaccagggagttaatgcactttgcagttataattattgtcgttattaacagaatcaatcaagttagcaagggtactatgccacgcatcaaaccattgaaataacccgaaagtaccaaaagccaaaggtgattgagattattgctaagaaatgggaatgtatagtgttcggattaaatggtctcaaccctacccttgtgctggaaaagtttgcaacaaggaccaacaggctcactcattagcgacagtgagctaggggaaagtaatccttttctctatttacatacctacatacctccagtcaactcctaataactaaattggaattacaaacaataaaaataaaaaaaatagaagaaaagaaaagaaaagaaaggaaagaagaagaagagaaggaaatcaaataccaactccattagtctacaatcaacttaccgct

SEQ ID NO: 3884 - DNA, 632 bp, Gossypium hirsutum
  misc_feature (53)..(53): n is a, c, g, or t
  misc_feature (55)..(56): n is a, c, g, or t
  misc_feature (58)..(58): n is a, c, g, or t
acagtatgttttattccatgaaataaaaatcaaatataattgctttcttcaananntnttgtttgtgcagagcattacagttgccaacaagaatatacgtgaatgtgcaatctagtaaggggaaaaaaacccaaaattaaatggtcaccatcctcctcttctttttccttttttccccccttttttatagataatttagatagccaacctagccattaagtatatcttatgaaatgcaatccatctagattgacatccaatcttgtagctctgttcttccaaggacagttcacatacctcatggattctaaatccaatctagtagcatgcccaactctggtaccaagctgattaaccaagaatagctctcagtaaaccagtataactataaagcacattaattttcatatctgagaacataatggtttagaaggttagagagagatacagacggagaaaagacgaacaagggaaaggcccttcctgacaagggaagcagagcagcaaacttatcctatcacaggctctggcctaacataaaaatctcatcatcatatatcttttctgaagtaataggaacatcctatgcagcatatttctcatagatctacacgggaggtaggctctttagt

SEQ ID NO: 3885 - DNA, 613 bp, Gossypium hirsutum
gcatccttcactttgttcatctttcaacagtatctctggtacatgcagaaaatcgtactttgatagagcctaccccactcccgcctccagaaacattagaaagaccaaaagcaaaaggaaaatctgtaattgtagtttccttcacattttttctaagtcaataggaatattatttgtttttctgactctcctttttttctggaagtattcatgttttacatcttaaacaagataaccattaaccctccaatgaccttcgaaaggcatggaaaaacttcaaaaagaattgaacatactcgcattagttacattcttgtatttaacatttacacccgagtatgagtaatatagagaatattatgctccaagtctataaatgcaatccttatgaagttatacacttagcaaaagacatacctgttccgttccgttcttgtatgtgagcaaatcctacagtttcagaaagtttaggttttgtatctcaggttaaatagtaggcataaacattcgaaaaataatgataacataccactgctcctgagactagaatgtagaaatctgtaggtatttcattttgtaatataatttccacctttggaggaaagtattctgc

SEQ ID NO: 3886 - DNA, 406 bp, Gossypium hirsutum
  misc_feature (54)..(54): n is a, c, g, or t
gaggcacttgtcaattctatggatgcactaaagaaacaagctgctttatctganctaaacctggcttcacttcaggtttgactctaatattcagttattgttcggtataaaatctcctgcttcccaagctgttataaaatttggtctctagtttcatctaacttaataagttttaacttaagcaacagttcctatcaccacggaatctgtatatctgactattaatagctttgtaagctaaataaaaagatatagatccttttgattctgttagttacacttttgtcatgatagagaaacctaaagagcttatttactgtcccttataagaagagttccttttaaccttctaagcaaattatagtatgcaggtctgcttttgtatccctctcctactttttttttt

SEQ ID NO: 3887 - DNA, 619 bp, Gossypium hirsutum
  misc_feature (613)..(614): n is a, c, g, or t
agtactgatattctcttgttgagtttttgactcacttcaccactccctttcctactgcaccattcttgattgtaaaatctagtactaattgaatcctccacagctaggggtggggatgtttgtttaattctagcagatgtatcattctctgcctctccagaggataaagcactcccttgaggaatctttaaatatggtggatgcctatagcccttatttcgaaggccacctatcaacttcccaaagttcaattccttactttcttccggactagaatcattagaaagttcagtatcttccatgcccccagccaaccgttgattgaaaacactgttttcagcttggtgggaatccatattccttttctgactccctatactaggattgttgttcctatcagacttgtctacttcatcttcactttctgagctagggccatacttatcaaaagttggaggcaagtcatttccatgtgaaggaactgtcgagcttgatgaactttcaaagaagacaggagtagaccgctgctctgagaaaatatgcgattgtgaatagggctctttttgtgatccaaccttctgcttaaagcccaaagaatttgtacatggacatnngatga

SEQ ID NO: 3888 - DNA, 626 bp, Gossypium hirsutum
tttgattcatacttaaactggtgtggatatgaatcagtaagcttcaaactattagaaacaccaacagttttcctactacatcgcttcttttcctctaatttaaagaatttttaaaagttagctgatgatactatcaaaccgcttatctcaattcttgtaagattctatgagtattgagtgcattgttaaagtatatcaaaattttcttaaccatatagtgtaataacttgggcggatatgaaccattcagcttaatttctgcatattccttgtaagataaaaatgttgattgccaaactggatacttcaaatatctgttttacttttttgtcccttcttttctttttcgaaaggccttaattgtttaatgtccacattgatgcatgttattggcttattgctgtatgacttaccatttcactaaataaggtgatgtctgataatgattctccacttgtttttagtgctcatgatgataacttatttcagggtaccatctgaaacacatgtaaagactgaaccagaacatgctagcaccccaccaagaggttggaactcttatgattccttttgctggaccatatccgaggaagaattcttgcaaaatgctgaaattgtttctaacc

SEQ ID NO: 3889 - DNA, 581 bp, Gossypium hirsutum
ataaatttttccaaaagaaaacaaagatttgagaaatggttatgtaatttcatgtaatgattgaaggttaatatggacgaaaaagcaaatacatataacaaggcatgaacttgatcaagaattgccatgtgaaatcaacattataataaccacttgccattacacaaaaacctataggaaaaaccttggaccacatcaaaagcaacaaatgaggaaccacttcaaacatctcaaagctcaacaaataaacgtattgaaagttgtcaaccttgaacttcaagggaaaaacaaaagaaaaaaaaaacagaaggaaagttgtttaccttgattacaagatcattgacagaaatacgcttcccgcctgaagcttcctgtaatgagttgagttggcttcgcaaactgcatgcaaagaaacaattcaaaattatcagatatatcatataattgcataccatttaaaagatcaaagcaggtaaaagtatcttgaagtcagattgcattttgcctcccctactcaaaaaatgggcaaattagtccctataagttaaatcaaagagcaaagagcaaattagtcaggtttt

SEQ ID NO: 3890 - DNA, 861 bp, Gossypium hirsutum
  misc_feature (622)..(622): n is a, c, g, or t
  misc_feature (624)..(624): n is a, c, g, or t
  misc_feature (626)..(657): n is a, c, g, or t
  misc_feature (659)..(692): n is a, c, g, or t
  misc_feature (694)..(695): n is a, c, g, or t
  misc_feature (698)..(704): n is a, c, g, or t
  misc_feature (708)..(714): n is a, c, g, or t
  misc_feature (719)..(724): n is a, c, g, or t
  misc_feature (730)..(737): n is a, c, g, or t
  misc_feature (739)..(762): n is a, c, g, or t
  misc_feature (764)..(771): n is a, c, g, or t
  misc_feature (773)..(775): n is a, c, g, or t
  misc_feature (784)..(792): n is a, c, g, or t
  misc_feature (794)..(799): n is a, c, g, or t
  misc_feature (801)..(815): n is a, c, g, or t
  misc_feature (820)..(822): n is a, c, g, or t
  misc_feature (824)..(828): n is a, c, g, or t
  misc_feature (830)..(855): n is a, c, g, or t
tttcttttgtcaattatttcatagcatagcgttgtatatgttttttgcaacaaacctgaatattgtggtgtgtttaactcaagcgttttattcatgcttttctctcatttcttatgttatatgaatagctgtattgctatcattgtctttgtccatgtgtttgtttctcttcaacaaaagatgaaggctgttgcttatattagctattcatgaaagttcaaagaaatgataccttggagagctgctgctgttctgataacgtgacttattttgactcatttcagttatgtgctgtactgcttgagggtcagtacatgcagaatgtttggcgtgttggttttcgtctacggtctactctggtaatatagttccttcctcctaaaatagacacaaacaagcacatggagcctcttttgcttttcaagtagaggctgagttatccatttcaatttggtgacttaattgcattttactgtttctgtcataggtggcagctatatttcacaaatctttgagattgactcatgaggctcgcaagaatttcccttctggaaagataacaaatatgattacaacagatgctactgcacttcaggtatggtcgttgtctgattgttgtgananannnnnnnnnnnnnnnnnnnnnnnnnnnnnnnnannnnnnnnnnnnnnnnnnnnnnnnnnnnnnnnnntnnacnnnnnnncccnnnnnnnttccnnnnnntacaannnnnnnntnnnnnnnnnnnnnnnnnnnnnnnntnnnnnnnncnnncatatccannnnnnnnntnnnnnnannnnnnnnnnnnnnncttcnnntnnnnncnnnnnnnnnnnnnnnnnnnnnnnnnnctctct

SEQ ID NO: 3891 - DNA, 601 bp, Gossypium hirsutum
gataacttcaatcccattcattttcaaaagaaaaggaaataattaagacctgaaagattggggtttggaccttctagttgaagaaattttaatcagttataggcaggataggatggcaactaacccctttagaatgaagtccagaaatataagaaaagaacttagatgctggaactgagagtttttatgtgaattttggaagttgaaaaaagatactttctcatgatttatgttacactttacaaatgcaattattgagaaattaggaagtctgatgattttttcatcatcatggacagcacacaaatgattaagcaatactgtctcccatagagtagtaatttcgagtttcgattctaattgctgtatgatatatatatttcacatgtagggtaaccttaattgctttcgtgttttgggctttggcttcttaaaagcaagttttttagtttgtaagatgttggctgatagaatattgtaaaatgtaattgatcgcccgcctgtacattgcctgcacttacctacgcatgattaagtatgcttgtcaaaccattctttatccgctcaccacttgcttgctctctctccttgcatgcaaccc

SEQ ID NO: 3892 - DNA, 599 bp, Gossypium hirsutum
atcaagatactcaggaaaatttctgatcagatcacaggtcttctccaaaagagagacattctgtttctggactgagacctggtttttattcacattttgcctgcaagaaaccaatatagtttaggactgttaggataagcgtaaagagataccaaaaaaacaaaagagaatgagagaaaaagaaagcacatcaaagcctcctgccttccagtgaacacaaagagatcaagattggtccataaaaaggttgaagcaaaatagaagaaacgcttgctaaaaccagcaagcatatatggaagtttatattttctagtttcccaaaagctaaaaaaatgcaacattaggattccatcaaaatgcacacacagacacagcagtcatttcaagctctagagtcaaaaggtccattaacatttagcttaacaaaaatatcttggacagtcatttttccaagttaaataataccttgaaatctcagcatcaaatacagtgaaaagaagccactctaaacaatgtgaaaaatgaggcttctcagctgatatttgtgccaaacgcaaagcctcctcgcttttgttcctctgcaagaagcaggaacagaa

SEQ ID NO: 3893 - DNA, 595 bp, Gossypium hirsutum
gaagattcagcacaactcttgttctctttgaagaaaatactgaggcttataatcaagagatgtttgtggatgagaagcagtctgatagccacaaaggaaaggtaaatccaactttctctccctcactttcatttgcattttttgagctctagttttctgtcaatctgtatgttcacatttattgtttgtggatgtacacccaaatacatgaaaaatcttgtactatgtcccttactaaactaagtaagcactttgatttgattctcaggagttgaatttcaacggtgctattgaaagtggtgagaaattctcattggtacctactttcttccgtcctcaagctgctattggatattttacaagcattgcttctagcattcttggatctcttggtcccaattcactgataagccaagacccatctggttgtatttctcgcaatgcaaaagaatatgacattctccttgagaaagaggtggctgaaactttccatcactgtgctgaacaagatatgagtgagttgcagatatttgaaatgacaaacataagacaggaagttggagagattgaagaaaacaaagttagtatgatgcct

SEQ ID NO: 3894 - DNA, 613 bp, Gossypium hirsutum
agttctggaggtcaagtgattctggagaagaaaacctactctactatggagtgcgttgtatagtcaggagctaactttggtatgtttcttatggtcgctttcctaaggggaacctcctaattaacaaaaatttgggaatgggaacttgggcccttatgttgtggtgcttcttcttctttttttttaaaaaaaaaacctggttccttttccaaaaaatttttaaaacttgggaaaagggtttaaaaggaagaaaacagccggccaaaaagtggtaagaattgggagttttgttaatgtgctgtgttgattgtagtgcccttttcaacagaaatatattttgttttcagggtcaagttgattttatctgttcaactcccatgccagatggtaaactgaactacaatgatctcatagatacgacttttaaggtactcagtttgctaatgttcatgaaatttaaaattatattctatatgagtgtgcaatgtttataattcttctggcacaatctctacacatacaattatcctgttggggttgctttatttgatctttttatgtgcgatctttgttctttgggatgaaatttcaaattcactcatgctacatttgg

SEQ ID NO: 3895 - DNA, 563 bp, Gossypium hirsutum
tttttcactaacctagcaggcttaaaacttgcagaatgtggaccatctatcatactagtggtccaatttggaatccagtctcaaatgtgaatgagctttttctggtgaccccgccagccataccgtcatcttctattggcattaccttacacgtcgatatttgctttgtcctcattgctcactttacaatcatacaaaatcttaatctcccccctttgaagatatagaaattggacccgatctatcggtttaaataaaaatcgtctggtccactacttccacaagacatctaatctgaaatgcaaggaataggtgaaaatgggtacgaagcagttaaaagtgtttcttgaattaaaagctttatttaaaggctttttgagaggaaaatggttggcggttggcggtttgcggttggcagttggcatataatgatttcatacaagttcgacagcctcatttgtgggccataacaggaccagtaaaatgggctattgaagttgggttagaatttctaacgtattgaaaattataggtgttttggacttgcgaatttaatccgattc

SEQ ID NO: 3896 - DNA, 641 bp, Gossypium hirsutum
tatttgttatatctgcagtgaaaaaatatctataaaacggaaacacttaaaagaaagtgcaatcaaaagtatctatattggatgagaagcatttgaataaaacctgaattctaaaacatccccacttttaaaactttaaaaagaaattggtttaattttgttgaatgcccatttcttccccttttgctttctttagccaaaacattgtccccaaatcaaaaataattgtactccccacaaatacaaactcccctctctttgtcatgtaaatcatctgaaaaatgattatccacaacacaaattgcatttcctctgtttatgtatgtgggaaaagttcaatgatgcgtatatatacatgcatgtgatgtgttagtaaacatggtataagtaccattttctatatgtgcataaacattatgtttttttgagtctgatatgcactcatcaatacatgatgtttacatgatattgattcaagtcaaaaaagaactaagctttaagtaatcttcactgttcctattaaatttgcaagagtgggagtgggtccatctcaacttttttccatgtctataagaacctcttctcctccaacaagagcttattaggtgtttcattttctcctccaagatttagtggcctta

SEQ ID NO: 3897 - DNA, 600 bp, Gossypium hirsutum
ttctctttctagaaatacctagaagttgttaaactataaccaaaaacagtaaagaacgaaggaaaaataaagaactaagaaaattcttcctgttcttgatgcatgcagaaacccatgcatttatagtcaaatgtacgtaactgttgtttaacagactaactgaatactaactgcttaaacagtaaccgttataacaactgctttagttactactctaacattccctctgcttgtttgtgttttgagttacaaagttcttttgacgttaaaactctaagagcatgtctgaagtttgaaaacagcttcggtgtgattggttttgtgaggacatctgcaatttgttgagtagaaggaacaaaattaacttgtaggcacccagcaagaatcttctctcgaataaagtgatggtcaatttcaacatgcttcatcttggtgtgatgggtgggattctcagcaacagacaccgtggaggaattgtcgcaccagatgattggtaccttggacactgacattttaacttcattcagcaactgttgaatccataatagctcagacacgcagttagccaatctgcgatattctgcttcagcagatgatcga

SEQ ID NO: 3898 - DNA, 639 bp, Gossypium hirsutum
gtaagaggaaacacaacattagaccaggccatttattctagtgatgaaacagttactttccaagcaatactgttaacaatctgatctcaggttgggtcgtacaggtcggaaaaaggcaacttttaaaaccagcatccttacgaccaaagaccacgttcatggtttcaccttgatacttcaaatttcaatctgcaagaagacggtatgttctcaatgtaaaggctatcttggaggagttaaagtaatttacactagctttcaataatttacattcattttcacgaacctgaggtaggcagattccgacaaaggaagagaaacatggtcacccaagggatgaaaacaaatgtacaattaattccctattcttgccattccatggaaccatacccgaccagaaaatgtgtccttcaagtcctttgacttgatttccttctttcacaaacccaactccgtaaggagaaatgctcgcaaacccaactccataaggagaaatgctgcaacatatacaactcaaatattcacttctgactcaaaataaagatacttggaactgctaaaagaatattattgtacgtacatcaagcatggttcaaatttcttgactccaattatcagaaatcatacaatctgaagtcg

SEQ ID NO: 3899 - DNA, 644 bp, Gossypium hirsutum
gcatcagctagtatattgggcacacttgcctctttcatttttttgttcctctgtgcagcattggtgggaacattagggtttttggtacaggatttcatgattttacttacacattatgggtcttaaacctatagttaagactaaaggtgttcataattcggttaaaattgaattgatctaattcagttaatctttcggtggccgaatttagttcgatcggaaattgattaatgactttttgaaattttggttataagctaatttagtttgaaatcgagtaattaaccaaaataaatcatatatattatatataatgttaactttttgcttggttgttaactttaaaaatttattttgtgtttctaatgtcttatttattgttctcacccctttaaaacaaaaatttaactattaaaaagaaaataaatattagcagtgtattttatattttttaatatttattttaatcaaaagacaaaaaatatataaattttggttaattcaattaacgatcaaattaaccaaaatatttcaatttgattaatgtgtttgaaaaaaatttcgattcaattaacggttaaaaatttttatatttcaaataattcaattaataataattcgatttgagtattaccgggatcata

SEQ ID NO: 3900 - DNA, 635 bp, Gossypium hirsutum
caaacaacagatatccctttcttaacagcatgaaaggaaccaatcgcaataccgtcttcaaaaaactcagccggttcgccacccaacgacacggaaagcacatcaacaccgtcacttatcgcagcatcaaaagcagccatgatatccgcatcgaaacattggttaccattaacagggggccaacaaactttataagctgcaacacgagctttaggcgatcctcctttcgcagtaccatttccataaccgaaaacactagccccatcaacaaagttaccaccagctgttgatagagtatgagaaccatgaccctcgtggtccctaacagtcttgaacgtcgcgttgagcttttcgccgaggtaagccttgtaccctcggttgaaatacttggctccgatcaacttcctgaaatatttaacaatgggaaagttgcagccataggacaaaaacaaatcataagctccattgatgataacttttaaccaaagttacctttaaatttataacttttaacaaaagaaactaataaatacaatagacatttgactttatgctttctatgggggagagaatcaagtagaaaataaaaagaattttttttatcatagtcagaaaagaaatgcccttattccctt

SEQ ID NO: 3901 - DNA, 153 bp, Gossypium hirsutum
agatgtctatggaatacaacgatttagccagcaaatgtcaagatagatgagttgaaatttgagttttgcgttgtttcctttttttcagtataaagctattgaaggtatttaagtggaggattgtaaattcttgtgatggtcgctgctgcgttt

SEQ ID NO: 3902 - DNA, 663 bp, Gossypium hirsutum
catatgcgattccccctgtgaataggtaaaatagataagtaacaactttattccaggtaggaaaatgacaattgtttcgtggcctagacatgtcataccatgtggaggagcacccatgtctaaagcttccagaagatacccaaacttatcttcagcctgtaaataacataaaacccacatttctttttatttggactgtaaaagaactgagacctcagacatattaatctgagcttttctatgatctaaaagcattctggtcttttacgttctttcaggccacaggccatcacattgacactagttagaaaacagaacaaatttgtgtaacagacacaagacttgcccagtcacatgacgctaacaataaccgttggtttacaaattgttgaataacttaaggttttctcacctgttcaggagagatgccaatagtttccaatactttctgttggatctcacgtttataaattcttaaacttcctccaccaatctgaaaatgcaagaggcaataataattcattcagttacaccatctataagagatagacaaccaaatctttaccctttaaagtttctaaaaaccacataatataaatacctcaactccattatagaccatgtcataagctaaggcacgtgcagaggaaagatctcccatat

SEQ ID NO: 3903 - DNA, 603 bp, Gossypium hirsutum
aaagttttagctgtggggctctaaagtcaggtaatagatttgcaattttatggagtggtgtaggcagtttcctggctatcttctggatctcaagagttaggagtggttgtcttagcttatgattattagagcaaaaatctagagaaaatagcttagttattttgcactagctgtgatgtttgtattagttgtgaaaacttctttcgataaagcatgaaggcttacagttggatttctcccaatgtgatgaaatattacatgagaactgttttctaccacctgatgtgtttactttctctctggggattgtatatacaagattcaatgagtagataaagaaggtagaacttgtaaattttgatgaccaatgagattttatgtaaggttactctaattttaaaaggagggtaacaatctcatgccaacctcggagttacaaaaggaaaagcggaaaaattcttaagttataaaagagaaagaaggattgactttaacttttagttgatttggtatatagatggtgaactcatggtacattgattttcttttcttttttttttatccataaaattctttccttttggggatatgctaataggtagg

SEQ ID NO: 3904 - DNA, 524 bp, Gossypium hirsutum
ctctcactgaaccacaaggcgcctcttccattctcgttgctcagggtgacggttttgtctatctgaagttcttctacggtggtcatccttgtgactagcctgacttggggacagcttcatggctgcacggggaagaagttcatctgccaacaatgaagcatttgctagcaatgcaatttgttgaccctcagtctcagccattcgcacaattttatttccagtacccccaaagtctgcttcttcatccatcgaaccaggtaatgctcttatgagcatgtttacatatgagtcaaacacctgaaacaaaccttccagtgtttgccctcccaactgcatgcttaacagcggtccgacatcctcaaagaagtcctataagagcaagcagaatataaatcaaatgaatgacagtatataatgtcattaaatctgaaatatgacgtaagagaggtcaagcatccataaagaatctaacaagtaaaatcataaaattatggccaaaacacacttccataactttctgtagg

SEQ ID NO: 3905 - DNA, 631 bp, Gossypium hirsutum
  misc_feature (597)..(620): n is a, c, g, or t
  misc_feature (622)..(627): n is a, c, g, or t
ctatttaatctctttattcttcgttttattgatgagtttctcctgtaataccggtctacattgccacaaattctgggttatgcattacgcgtattaagtttataattgtattccgagaatcccatgccatgaacatgttctaataaataactatttgatgaatcattagtttcacaattaggttttgctccatattccatgatcgtaacttttgccatgtctttttcttgcagcttttatgcattggggcaagctaccccagcaagcagtgttgcaactaatggagcaagcaagcctcaatcggcttctccagtttcatcaacgaattcttcacaagcaggaaaggattatgatttttcatcattgacacaggggatgttcacgaaacgctgagttgcagccaggtgatgattttggcttttgtttttgtcatagtaaacctaaaaacaaaaagttattttacagggaatttacctctaccggggcacaattgtaaactatttgtagatgcagcaatttcagttttgtttcccatttttttatagtttctttttatatctccatatctgagtgatggctttatttgtatgaataatnnnnnnnnnnnnnnnnnnnnnnnncnnnnnnaaaa

SEQ ID NO: 3906 - DNA, 646 bp, Gossypium hirsutum
  misc_feature (11)..(12): n is a, c, g, or t
ttttatttttnnaggaatgttcgaagcccataaatcagtgtaaaatcctttgtaatacgcaccactagtagactgatgtaaattgctttgtaaacattctgtaatgagaacccgatacccactcctaacagagtactcgcctgaaccctcatatttccatactagaacatcctccgatccgctttcagagagaggaatcgagaagatacgatttgctgtatcatcatccacgaaactttgtactaactctctattccaggtacaatccccattattaataagctgattaaccgttgtccagttaggccaaatttcctgaactgggattctgttattttcctttccaggtaactaggggtcattctagatatggactcgaacactagtttctacccgccacaaaagtccatctccaatcagttcccgagcactgcaaatgcttctctaggtaaatgaagggtaagaaccaacctttgctgttaaaaatcagtgaaaggaaaataacgggcttttaaaacctttgcaagaagacaatgaggctgggataagatgcgtcatacctgcttcgctaataaggccttattaaataagaacaaatttttaaaccccagacctcccaaccattttggtttactaacatggccca

SEQ ID NO: 3907 - DNA, 586 bp, Gossypium hirsutum
  misc_feature (576)..(577): n is a, c, g, or t
gactatgaattatgcaacagaaacttctttgttaacgcaaaactacttaccttttcttcaagttccatcctcagctgctcttccattttttcttgaagtgattttagagcagctgctgcctttgttctttctctctttaattcctggaagtgataaactgaaactcttagcagcttaaatccacaaaataatagaataacttctcttctcttttacttcattttttacccctttagagggcataaagacaagtatactccatttgaactaaactgtgactttccaaggtaatcaccacaaaagaagcatgcgcttaaagaatagcttaagttgattgataaaggtacttgtgtactttccctaaccagcataataattcagagaaactgataaagacggattgtcccaggttaattcatagttttagctttacttaagccttacaaacagatcgacattgttccaaactgatacaaataacactttcttccggcaatatgacactcaagacaggaaatccaaattcatagccatctaaaacaagaattacattgtctctgttatatgggataagtnnttcttaaga

SEQ ID NO: 3908 - DNA, 650 bp, Gossypium hirsutum
tttgcgacttggagaaggacgcatgcatccactagtttactgtcagacaagatatttttgttgcctttatttttacttaatagtctaatattatcagggataatatatgttttggaccctgacatggtaattaagtttattttggtactgaaatgtggcaattggatccttttttattcttgaacttggtttttgtgcagttttgatgatgtgaccggtgttattgaaataggaatagattggataaaaaatggatcagtatattagttcaaataacagggttgaatcgattgaatcaaaaattgtttgaaatcgataaaaattagaaactaagacaaaaatcaatagttgaataaggtgaatcgatttaataaaaaaattatgaatttttaattattattggtctaacaattaaattgatcaaaccaactgaattaaaaaactagtaatcttatcaatttaatgattataatactgtatgttacacactcccatgaatttcacgtagtaacagcatgctctaccattggaattgctaaattgttcaaagtatatccaatcgatactgtatttatttgttctttttttaattactatgattgttttggttgattacacgttaaaagatcaattttataatccttccaata

SEQ ID NO: 3909 - DNA, 614 bp, Gossypium hirsutum
aataaagaagacaagatagaggaagttctataataggatctagaccattggatctgtggtacaacatttctaaaccaaagaacatttttctttcttgagcaatcaggttttatttattttaaaacaaaatttggaagatactgttacaggccaaaatgagactagtgctcatattaagtttagttaatggccaaaatttgaaaacagtagaccagtgtttcctatgtccatgttcttctcatcaaagaaaaaaacttgacgagaagtcaaaggggaggttgcatccataaataagccaaactttgaagggctcctacacgggcagaaccagattctaggaaaagtgcaattttgacccatgatgtttggcttagcactaatgagctacagttaaaattttaatcttcaacttatgagtttcaagccattgttttggcttcaacaaatagttcaataggggatcatgtttggcttagagctcacttaactgagtcaagccaagttcaaaactcttatgctcagtttaaccgacttaaatttagcaagccagacctcaacaaggcaaaacttatctaagctagatactgcattttggcaattagggaaagatttgg

SEQ ID NO: 3910 - DNA, 621 bp, Gossypium hirsutum
acagcacctgtattctatttaagtgttttctcaagtttaactctatttggattccacatgtcattacttttttcaatccttgggactacggttgcaggcaatgaaagtacctagttatgtgtcaacttcaagaaatgaaaacacaggcctcagaaggtaatggcactttggcttttaacttcactcagttattttctacaaagctttcattccttctagtgcttgatgttcttttttctcatgtggtgaactatcacttggttaatagccaaaattaaactttttgatatataaccattgagatgatttcattttgcttgctgaagtagccctcttttcctttgctttgcgtacatagcttcaagcccatcagttcattaaaggaggagaaacatgaagctgttaacaaatttaaagcttgtgctcttaataagaaggttaagcgaatatattgattgtcctcgttatttagatattttattaaaaacaatcatcacatgccgaaccatgttgttgggttttcaggcaatttctagtaaaggtgaaaacggtgtcctccagaatatgaaccaaacaacagccacaatgaagcttccggatgaagcaccagtagaactatta

SEQ ID NO: 3911 - DNA, 649 bp, Gossypium hirsutum
acaagggtaggctcactaggaatactacagtactaaagtattctttcatcagatataattctattcttcatattgcaaatattccataccattgaagctcgcaatatatttagattgagtccatacgtcacagctaacccgacactagctaaacaaatgaaaaatgcatcaagtcattctactaaaatatttgttatatagtattaaataaaggtgccaatatgcatttacttactgagatcgataattccctccggtataaagattaaagagaaggaaaaggtaacaaaagacagtaagtctaaacggaagcacaaccattccattgtactggcaacatggaattttagatgagaatacgagtcagtcagtaacatggaatggctatttttttatctcaaattgtttagtaaaatctcctaccatccaaaagaataatcaagatactcaaagctcatacataactatttcaactaaattaactacagcaactcttaaaatacatgccatgtgataataggaagacattaccttaaataaatgagatttggtgtgagcatccaccgtattgaaaagatcatcaaacagatagatatcaacatattggtatagagcacgagcagtttatattctttacttttttccacaa

SEQ ID NO: 3912 - DNA, 659 bp, Gossypium hirsutum
tgaagatgcttgagattgctgaaacggatatactgacaaccgtgcgtaaagcccggttcaggtgttgcatgactcaaccaatgacaattgactgatccagaatggaagagtggagaacagacgacaataaacggaaagatgcaagggaagcagtaagaaattaaatataattcatgtatgtatcagtattttacatttatttatttttcaccctttacgtaatattttccagatagaaggtaactactgggttcagaatgctggattttggtgtgaacttgtacttggactagtggtgatggtagttgtagaagtaaggggaccattgatgtggtttccttatgtatctatatttatatatgtgggactgccatatctcttactcttgattgtttaaatgcaggttcacaattggatgaacctgttctgtttttctttttcatttttttgtgcgtggtagttgtatttggggtgtgttttggcggcacatacttacatacatacatacgcttgcatctcaaacaataacgaatacgttacattccattacatgttgacctattattttctttatgcaaaaccgggaaggttctcaacgttgagtacgcgagttgtagtaaacggacagctgtaactatgaactggtgtttaatcggtgg

SEQ ID NO: 3913 - DNA, 597 bp, Gossypium hirsutum
  misc_feature (9)..(9): n is a, c, g, or t
  misc_feature (558)..(559): n is a, c, g, or t
  misc_feature (562)..(562): n is a, c, g, or t
  misc_feature (572)..(572): n is a, c, g, or t
  misc_feature (576)..(577): n is a, c, g, or t
  misc_feature (587)..(589): n is a, c, g, or t
tgaggactnatacttaacttgatcctggcataaaagaaaaaaagattaaaataatggtttacatttttgttggttatattctcgtgcttgtaccattgcactcagtaacatgcatatactatagttccgttggccttagaaacatatgaatttgcaggttcaaaaatcgtttttacaaatggctcacaggatccatggcgccatgcttccaaacagacatcatctccagacagtaagtttccattaacattaccaattactttgatgaatacccagattccaaattaatagaagaggcttaatgaaatctcacaatgtgagaaaaaaaaaagcgattttctttaggttgtgaggttattgagaaaatggagaaaatggaaaagtattgatcattaatatcaataatttcacctttttatcatagttcactctaagaacttactgtggaacatttcagtgccttcgtacattattacttgtcataattgcggccatggaactgatatgcgaggatgtccccaatcgcctttaagcattgaaggtaagaactgggtggtnnagnaattttaggnaagnngaaaaacccnnntaagttaa

SEQ ID NO: 3914 - DNA, 592 bp, Gossypium hirsutum
agcaataaacctaagaataccaggtccaggagccaaatgattcaccttgatttcacagtaggactcttttaacctgttcagcatcaatagatctataggctttgtcaaaatatcagtacgaatttgtggccatgtctgatggtgcctctgggtccaaagaagacatcttgatatatcctggaagagtaaatacaaatgatgaaatagccaacaaaaagaaacgtacattgacaaacattcaataatgaagcttcttcctctgcatgaagaaagctgagaggcagaaagaatgatgagaattcaaacctctccaccaaatggtaaagtcttctctgtattaggtagagccactccatcctggaccttaaaaaaatttcttataaaagaaaaaccccacccctctcaattaatccttttcccagttatgccccaattaaaaaaaccaacctggaattcattaaaaaaaaataatttggcaagaaaagaattcccttcaccaaaaaaaaaaaatggatggaccccaatttatataaaaaattgatttaagtttgaattacttaactgcatgtaaatgatgaaagatgattgccca

SEQ ID NO: 3915 - DNA, 658 bp, Gossypium hirsutum
atgttgggccaatcctctcctctcactttcttacaccgtcttttcaggtgggggcatcctctgattcttagtgtttccagagcattgaggttacgtaccccttggggcaatgacatcaaattagagcaaccatttatatccaataatgaaagcaaggtgaggtgttgtatctcatctgggagagaaattaaacctctacaattccaaatccgcaggtatcgaagagaagagaggtgttgaatactccttggcaatgaggttaaccttggacatccattaataaataagtcttggagagaagtcagatattgcagcccctcagataaagaggctaatgaattaccacttagaatatacagtgaagacaaggaacataagccttgcaatccatttaccggaagggatacaaggctgtcacaatctaaatccaaagattttaaagagctgaggttttgtagacccgcaggcaagctttcaattgagcaaccttgaatattcaagtatttaaggcaggatagattatccagcagatcggatgaagactttagactacaagaaagaacagacaacgtatcaagttgcttttgattttgcagtagtccatccggtaactcgttgaagtcactaatctggagagaggtaagaacagtggcattca

SEQ ID NO: 3916 - DNA, 653 bp, Gossypium hirsutum
  misc_feature (9)..(9): n is a, c, g, or t
ttttcttcnattttctctcttagtgcacaataccatgcccattggtcatcaggttatgtagagattttttttgtataaccttactcatatggctggtttatgaattgttcataaccttctgcttgaattttgtgtttcaggactcccttcagttcctatttactaccatgcttctggcagatcttgccgttacccttcttactttgattcagttctattggatatctcttggggcattccttgctgtcttacttattcttcctttatcactactttctccatccccagctggtttgaatgccttgttcagtaaagagcctcggagagcttcgcatacccgtatatattccttgtggaatgctacatctctgacaaacatcgtaagcagctctaaattccgggtttctgttactttcttgttgtgtgaaatatactgatgcaaagaactaatgtgtatcacccaaaattttataaaggtgatatttttgtctacaaagcactaaacagtttagagaaaaggtagattcttttccatggttttttaaattgctatgtatttccaatatggaaaaaggagaaattttgcaatataccataaagcactgaatctgatattacttactagtcaaggagaaaacctctacaccctcaaa

SEQ ID NO: 3917 - DNA, 623 bp, Gossypium hirsutum
  misc_feature (615)..(615): n is a, c, g, or t
  misc_feature (617)..(618): n is a, c, g, or t
ttcacggaagtagaaaaagtgtagatattagggagatttttttcttctgggttctttttgtaatttcgtagtttttattagttttataaataattctgtacaattagatatatgtggaggcgtgcatcctcacgtcaggccaaaacttttgtgcactgcctcgaatctagctaatctctcactttaaaagagaaataaaattaaaatatgtcaatgacaccttgaattctcctttttctttaagataacaccttgattaaaattaaatgccgagtggttaagaattttgtgattttagtgaaggataagttcaacggcttggttggatggaattgcaattttatttctgccctattccgcctgttatagtaattttcaagtttagttcatcgtttaggtaactttacagctttgctattatacttatattccctcagctgttgtaataagtattcacgggtggggcctttgaattgttattcaacaccacacgcctaaaatttatcctcaaaatagcctgctttcttctccccaaatttttactctagatttcttccaacatttatccctaaatcaagggtgcattcgcccttcatcttcatctccctaaaaganannaaaaa

SEQ ID NO: 3918 - DNA, 639 bp, Gossypium hirsutum
ttgttttaccaaactcacaaaagcttctgaaactagctcatcaaaccattatgctctgagtagaagaggaagtatgaatcagggaccagatgacagtgttgagaaggtggagaagttggattcaagaacccctgcccaacttagtcgaaatgcttcaattgaatcatctaaagaactggatggtggatcttccaaaagaaacaagagattggattttaatagtactcgagtttcaccattcccaaatggagtttctcaatgtgctcctctaaacaaccccaaaacgtcaaatgctctatttgggtcatccaagaaatttttttccacttctcttcctgcatcacgaattgtatcccgagcaacatcacctacatctagacgagctagtccacatcgtgctactacacctacaccaactctgtcaagcttttcatcaaagaaggttgttgtggacgatgttaaaaggacaaatgaaggtctaagcgaagaaattgttaaattaagaactcaggtaattttacaagttaaattatttgcagggaaatgtgtttttccttatagttcttaggtttccctttttctttttctgcattagttgtttgcagaaaatgtgctgcggaaggatggaagtttaagtta

SEQ ID NO: 3919 - DNA, 510 bp, Gossypium hirsutum
  misc_feature (15)..(15): n is a, c, g, or t
cccctttgattccancaacacattccgagaatctccttcgtacacatttcttaactttatataggaataagaaagtttaaataaattgtgtgtgacataactacattctgcttatataaattattaatttattataaaatgcctcccattgattcatctttgcaaaacaaagatatatctttgaatcttataattcttaaataaataaaatcattatttattatcttcataccatctctaagaccccaaaatccatgtatttctccatgtttcgggtttagagagcttaacatgttgagtaatccatagtgttagagttatggtctccctggtgagcgagatgtaattactatttttcctcttctgtttgtattcattgaaatcatccttcctcacctaaacagcaacttttgtcatattttgattaaatagatttagacatgttgaatgtcaaagattgttagtagctcgtttcagaaaaattttgggtggaagaatgcaatcaaagtt

SEQ ID NO: 3920 - DNA, 652 bp, Gossypium hirsutum
ggataaatataatctttaactgttgatttttaaaatgataactgaatatttcatttatcctatttaacaaataaaatatatgcggctctaagtcaagtcctaaaaaagatcatgaaaaaacctttggactagcagcggtaatgtttccatatgcttccgagaagatggccatggcaaacactactaactgcaatggggttaggggagaaaaaaattaagaaatggctttgctgcacatctgtaaatttcctttttaattcttatcacttaaactgcaatagcaagaacatgtagcaacaggtctacagttctatttagaattgtaaatgtcgaccacataagttaaaaaaacacaaccaagagtcagtattttcactaccagggttgtcattaaaccactctaagctaaggaaaaatagagatattttacaaactaactattttgtataaatgtagcctaataacaactggatgatgtcactctgaaagtaataacagcagcatccctccacctttgactaataaattctttacaaagctgcaactttggttcttaattaaatttaccccatgtcgtgtctttgttttaagagtgaacaatgcagataaacataatctttgaagattccttgtggttccgtgaaactcacta

SEQ ID NO: 3921 - DNA, 636 bp, Gossypium hirsutum
gacacttgtcatctgaatagtaaattccaggaaccacaatagcagggcaaaatgcaagctgttcattttcagcaaagaagttgtcaatgttcttatttaaaaccaagcgaccaacaggctgaaggggcaagatgtcctcaggccaggtcttggtcacatcaagtgggtcaaagtcaaatctttgttcgtggtcaggatctattgtctggataaaaagcttccactcaggataattgccagctgcaattgagtcatagagatcctgagtggcatggctgtgattagatcctccaaccttgattacctcttcttctagcaagcatttgactccacaagtgggcttccagtggaatttcacatagtgcgctttcccagccttgttgatcagagtataggtattcacaccagaaccttccatgtgtctataatcttgaggaacacctaagtcgtcaaacaggaaagtgaacatgtgcaagctctcgggatggtgtgagaagaaatcaaggatcctccaattctcctggatgtgagacttggggttgggcttaagagcgtggaccatatcagggaatttcattccatcacgaataaaaaagacagggaaattgtttccaacgagatcgaaattaccctgag

SEQ ID NO: 3922 - DNA, 639 bp, Gossypium hirsutum
cgttctttgcacaatcagctatgcgaggaagtacacgagcaactttgcagttacgcaacatctgcaaaattgaaaagacaacatcaaaaacagaagggaagatagaaaagggaaggggagataaataaatcattaccgtttttatgcaattatcagcagactctgcaattacaagcacagtaatcacaaccaacttgaaaaggacctgattatcataacatgagattaagaaatgcttacaagaataaacatcatgttacactacacaagaaagttgaacttactggaatgaagatctcagcacatgcttcaaaatctcccaatagctccttcgataagaatgataataaatggcaagcctgaaaaagaaacatgctcagaaacaaccatatgtccaaagccaaaaaaaagcacttatggaagagggaaataatctactgtcttcaactcaaccaccagtaatattttaactctctcaagattactgactaccactatattaaattccattcaaaagtgttaagagacagaagcttaaacactatgcacaaacatggaatctcaccaacaaagaccatgtaactatgacctccgctcaagtaaaagttttcagctcatatcatcctctaccaggtggaa

SEQ ID NO: 3923 - DNA, 569 bp, Gossypium hirsutum
tcgggtccaattccaaaagggtagggaacgctaacatttccgcagctgtctttgcaccaatcttttgctccagaaatagctgtagaagtagttgctaatactaatgctatgttgataattagcaaaagcaagaaagtgaaacttaaagcaattatcacaaccatttttgcttcttttggtcctattttcatcatttaaccctattttatagggaaaacaaatgaataacaaaggatgtttctttgcactttcccaagttaatcaccttgactgacttaaaagtattgaaatgtcaactttatattctcttttttatgtatgtattgttttattgagttgatactaacaccaaccttattaagaaattacttaaaagctttcttttaataaaaaaattaatatctatataaatttatatacaatgttttattgaaattagtatcccatgttaaatcgataccgatttagttaaaaaattacactttaaaaaaaaattagggcttgagattaaataaacaaaaacaggaactagtacaaaagaaaacaaaaaacaaaacaaaaaagaaaag

SEQ ID NO: 3924 - DNA, 617 bp, Gossypium hirsutum
taactcatcatggaaataaaatactgcaacctgattaagtaatagaaaaagaattagaaaaacaactacagataatggcggaaaaataagcaacagccccaatcagcattaacaagcaaaacaacaaaataacgttatgcatgtgaagactgtcaccagataaactaaagaagattttgttggataaaataaagagggttagaattccactcccaacccaaatacaagccaaagaattactgaaaataaagggaagctggaactcctgaaataaatgtgtaacatttgtatcttaaatggataaaataaatgtgtaacacctaaaataaatgtccaattacagatgactgctatctcaaagtaagctatctgtagcatgcacaagtagataataattgtttgaactaccagcgactcacaagttatatcttaaattgatcctttagtaaaaaaccaagatgtagtaaaaaccattaaacaaatatatatccaaaatatataccaatatggtgacagcctccttcactactccagctattgtcactgtaactgcactggttacagaaacaaggatgtactctgttaaaacctgcaagaacaaaaaatgcttagcttct

SEQ ID NO: 3925 - DNA, 583 bp, Gossypium hirsutum
atccgaaattgttattattacctgtgattagtgatgattatttagctctaatgaaaatttggaagttcgtttttgttggaaaatttgtgttttttaccgatggctgtgagctacttggcaatctcagcagcgtccacagctttaagcttcataggtcttcaagtttgggcagaattttcacttgataaacttcagaatgatgggttaattagcgagaatttcattcatacggaaaatgtcgaccgtgcacttgagcttcttttaggttcttatgcctccttggttctgctcgcaaattttgtgctcaatgtatttattctactcatcctttctctaaaggtcagttttctctttttccacgagccttaaggtatttgaaaatttgactttacaatgagataaattccatgctatgattaaaaaggcaggttaaatgaagtttgcgtatatataaaattatatatattaatgactattgactgttgatgtaaatttgttctgttttatttttacagaaccttgtcccattattgtggtttcttttttgctgtgcagactgtattttttggtgacttatacccct

SEQ ID NO: 3926 - DNA, 555 bp, Gossypium hirsutum
acttcagctgattgagcaaaattccttcttgagaccttaaaacttcaatcccaagaaagtatattaattctcctaaatccttcatcttaaaatttcggttcagaatccctttcaagtcagtaatcatatttatgttatttctagtgataagaagatcatcaacatatactagtataataaccatcttgccctctttctttttagtgaaaagagaatagtcatgcttgttttgctcaaaaccagccaacttaagagcttcagtaagcttggcattccactgcctagatgcctgcttcaacccatacaatgatttctgcattcaacataccatatgctccccctggctgcggaaaccctcaggcaaagtcataaagatctcttcataaaggtcaccttgaagaaatacagtggatacatccatttgatagatgggccagctaaaagaagcaacaagagctaaaatagtgcgaatagtgaccattttagcgacaggggaaaaagtgtccaaataatcaatccccctttttttattgtaccctttaacaaacaatcgag

SEQ ID NO: 3927 - DNA, 737 bp, Gossypium hirsutum
  misc_feature (617)..(628): n is a, c, g, or t
  misc_feature (630)..(633): n is a, c, g, or t
  misc_feature (635)..(640): n is a, c, g, or t
  misc_feature (643)..(644): n is a, c, g, or t
  misc_feature (646)..(654): n is a, c, g, or t
  misc_feature (656)..(663): n is a, c, g, or t
  misc_feature (667)..(669): n is a, c, g, or t
  misc_feature (671)..(672): n is a, c, g, or t
  misc_feature (679)..(681): n is a, c, g, or t
  misc_feature (688)..(690): n is a, c, g, or t
  misc_feature (700)..(702): n is a, c, g, or t
  misc_feature (705)..(706): n is a, c, g, or t
  misc_feature (708)..(712): n is a, c, g, or t
  misc_feature (722)..(731): n is a, c, g, or t
ccttttttccccctcaccccccattgtcacaccccatataacaacccctcctcccttccttttcttcccattcctcagcagcttcaaaaccctttgttccctttgttcatttcatgatgttttagctttggtgttgaagtttagggttcttagttgtttttggttccaggtttttaagggttttgaaaatggacagttaccatcattttgacaatggtgatacacatttgcctcctggttttcgtttccatcctactgatgaagagcttattacttactacctgttgaagaaagttcttgatagtagctttactggtagagctatagctgaagttgaccttaacaagtgtgagccttgggaacttcctggtatgtaatcattaacacttctctggactaccttttcattttttacacaaaattcgttaatgtaatcatactgtttataactctcttttctttcttttatgcattggacatggaatatggcagagaaagcaaagatgggagagaaagagtggtatttttttagtttaagagataggaaatacccaactgggttgagaactaaccgagctactgaagctggttattggaaagctactgggaaagatagnnnnnnnnnnnncnnnngnnnnnnccnnannnnnnnnntnnnnnnnntttnnntnnccccccnnntttccannnctcccccccnnncanntnnnnncccccccccnnnnnnnnnnttttcc

SEQ ID NO: 3928 - DNA, 625 bp, Gossypium hirsutum
ctaaatgccaaactcgggacaggcaccgagaagaagcaccatgttcggatggcgaatgcagctcaatacttcgatctgcgcaacgatactcgaatgttacagattgtatgggacacaatgtaggttgttccggttcatgtataactcaatgcaatccgaaaacctaccatacaatcatcaaataatacatgtcgtttaaagtagtacatacctcttgcataaattgtaacctcccttgagcagcatctggacgtaaaacctttaccgcaaccggtgtatgatcaaggtaacacttataaacaggcccgtaacctccttctccgatcttccgagatggagaaaagttgtcggtagcttcctcgatttcctcaatcgtatatttccggtattggattttgctatcggataaagcttccaacattttcttgatttccattgtttctcttagagtttcaccatctaaagtggatgattttcgggtttcaacatgtttctgtgctgcttcagctgcttgaatagcggccttacactttgctctctctgcttctacagctgacattgctgcttcctcagcttgtcttgcctctaccaatttttgttcttcttcgttcttgtatttgtgcag

SEQ ID NO: 3929 - DNA, 418 bp, Gossypium hirsutum
gattttatacttagtactaacaaacattgattttggttgtgttttatggtgattataaatttccagggaagctagaagagttaggaaatggaggaaaatgattggggttggtgggagtgattggaaacattatgtaaggagaaagcctcatgttgttaaaaggcgtataaggaaaggaattcccgattgtttaaggggtcttgtttggcagttgatctctggaagccgagaccttttgctgatgaacccaggggtctatgaggtacttctttttatttcttgtagggtttagcgttgtttcgttaacaaactgtatattattctgaatgctatagccttcacttgactttcctttccgtcttaacatgtaatattacttatttctgctaagttctctaacaggaattgaaaaaaaaaa

SEQ ID NO: 3930 - DNA, 607 bp, Gossypium hirsutum
  misc_feature (521)..(522): n is a, c, g, or t
  misc_feature (536)..(542): n is a, c, g, or t
  misc_feature (546)..(551): n is a, c, g, or t
  misc_feature (579)..(580): n is a, c, g, or t
  misc_feature (586)..(587): n is a, c, g, or t
  misc_feature (589)..(590): n is a, c, g, or t
ttgagctaagagaggagacatggactgtgagggaggcattgtagatattggaattggagagacagatgttgaagtggtattagtagagctgacagtaggtgagctgctatgatgagctacctgactaggatgtatgacaataagctttggatggatttttgaagtagcattaggtgaagggctgacttttggactaggagtgttgtaaggaaaaatagcttcattaaatgtgacatgacgggtaatgaagattctaccagtaggatcacgacatttgtaacctttgtacaaaggagaatagccaagaaaaacacaagggacaaatctaaactgtagtttcgttttggtgaaagggcgaatattaggaaagcataggcagccaaaagttcgaaggaatgaataatttggtttcgttttaaaaagtttttcatatggggataaatcacctaagggttgggagggtaatctgttaatcagaaacactgcactacaagcctccttcctcaacatcatcggcgtgnnggcttgatgaactnnnnnnnaacnnnnnncttcacctgcctgtgtatcctttctttnngtccgnntnnatcggactgacatggac

SEQ ID NO: 3931 - DNA, 624 bp, Gossypium hirsutum
ttcttgcttagcattaaaattttggagagttcacattgctgttttttagagttcctttgtttctttttactgattttgtcaaattattatatctaaggatggtttgcttgtgatccatctattctacatcgtgttgggaatgttttattgcaactaaaagcagtggaacccagaaggggaaggcaccttgtctttgctgatgacttattccagctttcaaaggttcccaagcaaaagacagtgcatgttattagcaaagcagttgaaaagctttctggctgtaagttgtatggccttcaattttattcatatcagttgcatattttctggtctgaaaatcttaattatagtctactgctacctcttctgttacaatgatgtgaatcttgcttcttgatgtgtcgacctcttgctaattgcacagatcagctgccaaagcatgtcaacttttgtctgttcattgcttcaaatgtacccagtctaaagggtttttgtcaacattccacaaacctgcaaaatggaatttctgctttgcaagccctttcatctgcaatggtgtcattacaaaggtatctgagaatactttgtcattacatgcaggaccatatacctcttgcacctgct

SEQ ID NO: 3932 - DNA, 398 bp, Gossypium hirsutum
gtcagcgaatcaacgtgatggattcacatagtgaatgaaacgaggatccgaaggtttgcctatgttttgcccattcatgtttgtctgtcttatgatataacatacaagttgcatatcaacttgaattcaatttgaataatttaagcttaattataaaagtacgtaaaatatcaattaaaaataatttttgatatattattatttttgaatagccgaaaacagacttttaacttgaattttttcttaaaattgtgcttccatccgactccacccggccaaggagaagatggaaattgttgctcccacaggataggggcttaattacctcgactgctacactaagctacatcctgttaatttccctctccaagaaacaaaagaaaggaagtttcgatggg

SEQ ID NO: 3933 - DNA, 599 bp, Gossypium hirsutum
tttgataacatatcacgtgaagccatgcagattttcaaatagaaagaaatcatagatactagacccacaagtatcccatagcttttcgtgctgataggaactaatcatctttcttaacctttattcctctaaaatttctcttttccaacaaggcactattaggaatgttaaaatcaggtggtggtggaatatttcgactattgaaaacatggtaaagaatctatttctaccatcaaacaaaaacatgggaaaaagagaaacttataaaattaactaaataggagaaagaatcttgaaaaggctagtcaagtattattgcttcttttctgatcggcccattataaaattgaaaattttttgcatccgtttcggctgcggcccttcttcctctgtttcctcgtgggtattgcgttttcgttttacacgggaagtgctacctgcggatccatcgttgtcagtagagtgatgatggatatgttccaagtttggagaagattgagtggaatggcagtgcacctcttttatttcttccaaatctttctcatacattattctaacaccacacttcttcaccttaagagaaggataaccaagtgtgc

SEQ ID NO: 3934 - DNA, 641 bp, Gossypium hirsutum
tcttaaggcctgaccttggcaaaacccaaacaatgaatacaagaggaataaaaggagatgaccttttaaaggttattacaaatttatggatagatttgtaatgttcttacaagtgaaaataaatactggattcgtgattgggaaactagctaacagtgtaaagtaggaaagaaaatcataatatttgtttgaagaaaaaactaaagaaatcaccttcaacctggtgtcaactttaaacaatcttggcggcttgctttctacatctattcggatctaatgccagtttctattatatcatttcagttcatatagctaataattttctctaataatgtataaaagatgcagatttaggccttcatctgactgtagcaacctgatggggagtttaagatgattgcagaaataactagaaggaaaatgtgagcaacctgtaaactgtcatcatatcaactctaccagattcaatctgggtactgcctgccgtagggtttatcctgtcatcgatgaaactatcatcatatgaatcactctcatcatcagtttcttcagtagagacttcagcttctgtcgacaccctgaggcaaagattaatagatatatgaaatattaattaaccaaccataatgggagacgtataa

SEQ ID NO: 3935 - DNA, 606 bp, Gossypium hirsutum
gtgcacaccaccgttaaatcaatatttgtatgttcattcaacaataatctgaatgagactcgtaatcacttgggtaaggcgacatgacctcttgttccagtaactgaagtacctggcacattgttggccgttcatctggatttgcatcagtacacttcgctgctatttcgagaattgcttcgacagtttccatgatagcatcagtacaccctttatcaactatgtcttccagacggttctctctcaataaagtgtttgtctgcaaatgttcgagcaaaacagaaaaaaggttatgtgtacattctcggacaaatgaaaaactattagtttttcatcgaactcgaacaagttcaagtccttacccagccgacaacattcaagcccctctttgcaaaagttggatcagttggccttttcccggttaccagctccagtaagagaactccaaagctgtagacatccgtcttttctgacgctatcccactttgcagatattctgttccgtagaaacataacagtaagtggataatttctatgttctcggaacaacaatgttggtttacacatgcatatcacaagattttacacatgccaagaggcaccact

SEQ ID NO: 3936 - DNA, 641 bp, Gossypium hirsutum
ctcatcaatatcttcatagtcaatagcattttcatacttctcatcataatctatcatagagaaaccacattgaacacataatcagaatattagacgagtgatagacaccagattgttgtgaggcataaaaccctttgagcaacacaacttgtccaagcaatgacatatagcctccatagccttttaataaaaagattaaaaatgagtaatctacattccagaaaataacaaatataggagaaacacatcacacatagaggcacgtatcctgatgaaaggaaaaaaactaagaaaatcactcagaattatgaggattaccaataggagacaagaccaaaatagtaggctccgctggggcattaaatttgaaaccctttttgattttcaatctcaagaactggcttatgcaagcatgatagcaaatattctatgcttcattatatcattcttatggtttttggctgagggtaattgctcatgaatgcaaagcagcctttacaaggccacctagccaccagttcagtagtagttagggaaagcaaatcatggaatctatacccaatcaaaagttactctgtaagcactaagtttcctagaaacattatggtttgcagttgaaactagctctcactctatgcccg

SEQ ID NO: 3937 - DNA, 660 bp, Gossypium hirsutum
gaaataaagatcctgcaatacaattcttatgtttttaggcaagacaccatcaaggcacgccaaatggactaaaatggaaaactattaaagagtaggagacatcaataaaacattcaggcaaaagacatactgtttcagaagtctcaaattcgggaatggttgaaaacccggagttccctagacatgattgctcttccataaatgtcctaggtgtatcgatgtcagaccaacgagttgcagttgatgctgcaaagtttgttgtgctagcagttcctgctgtaggtgcccactctgattctaaactgcgagctgagaaaggagtgtcctcccttctgaacggagaagccatggatccagctgggaaagactcaaattcagggaaaacattgtcggcagcattgccttcaatatgccgaagacattcagtttccatatccattccaggtgctgaacccggatataatccagctctaggatctggtgtagcgggcccaaccctgagctcggagctggcttcagttgtaggaacagtggactgtggtaccataggttcggggacaatttcctctggcaccaccaactgggattttatagagataccatctcttttgaacatattacatatatcttcactcagccctgcaagtgtacaagtaccaa

SEQ ID NO: 3938 - DNA, 612 bp, Gossypium hirsutum
attgccaacccaacatgtaagacttgaaagcttggtttatttgaatattagaaagtgcccgcgtttgaaatcactcttttcactttctcttgctcaaagtctcgtactcttggaaaaactttacatattgttctgtgatgagttgaagcaaatagtgacagaattggaaggtgatgagggagaaatatcatcggccatcaattctcatacttctttgtgtttcccaaagttaacagtgctctacatatatacttgtgatggtttggagtacatttttccgacatcactggcatcacatgggcttcagggtttgactctgaacatacatggttgccctaaattaaagcaagtgtttggagttgccaatgatagtatgctccaatatcagcagtcctggagatcgttatcgtccttttcaatgtctggttgccctctattaactgattcagttgttcatttagaagctgggaatgcttccatagaggtacattctttttctccctttctaattacatgattgaattttttctttcataaaggattcataactcatattgattttacagcaaaatgttgaagatattttaaccatactacaattggcactgttat

SEQ ID NO: 3939 - DNA, 696 bp, Gossypium hirsutum
  misc_feature (609)..(610): n is a, c, g, or t
  misc_feature (612)..(627): n is a, c, g, or t
  misc_feature (629)..(637): n is a, c, g, or t
  misc_feature (644)..(644): n is a, c, g, or t
  misc_feature (647)..(664): n is a, c, g, or t
  misc_feature (670)..(673): n is a, c, g, or t
  misc_feature (677)..(687): n is a, c, g, or t
agtcgaaaagaaaccaatcacatgctgaggagttcggtcctgaggcaattattgagtatctcaaggtcagtttgtcggttggtaggaatctttgttgctctttttgcattaaatgtgtttgtgttttgggagcattgggatttttgggcaatccatgttgtgtgggatgtgagaagacataactttgctgttgcttggttttacaaaccacaaccaacttcttttagaattaagcgtatatattgctcttatttgatgcgatgtttattcttttggctcgataacattctgtgattgatgaaaacttttgctggttttatctgcagcctctctgtggcaccgatccgatgcttgtgcttgagttctcgttgtttgttctcgaaaaccatccaacacaaaccattgagctatttttgtctggaaatattccagcagacatggtcaatgcttatttgaagcagcatgctccaaacatgcagggcaggtacttggaacttatgctcgcgatgaatgaaaataggatctcagcgaacctgcagaatgaaatggtaaagccattttgttgttatcaaaagggttaaatcactttgagtctaaatttagcaactnncnnnnnnnnnnnnnnnngnnnnnnnnnggggggnggnnnnnnnnnnnnnnnnnngggggnnnngggnnnnnnnnnnnaaaaaaaaa

SEQ ID NO: 3940 - DNA, 607 bp, Gossypium hirsutum
gattgttttctggatggtgaaaaaaaaaccctcaataaatagatgagatatgatttcatgctggaaattatcgaagtataccagggtactagcacacaggctaataaaatataaccaaccatgcttttctgatttgtaagttgcacgtgcagttaagacaggcagggacttattgctagaacaataatccaaacattcatagtaagtattcaacaaatgacgaatggaagtaaaaccagttgcataactttctgttagaagttacttagtgctaagcactttatatagtgacttattctacctgaacaactaactatgcatggcaagtgcatatatgcatatacacatgtataaaaaatgaaaaacaggaaaggaaccagagatgcatgacatacatattcatgattccacatttgatgaagtagatagtcatatcgaccaccaacagcaagcaatgcgccttcagtaagtgctccaggatgactctcctttcccaagtatatctggagaatgaattagaaaattcattatgtaaatactggcagatgtgataaacatctatatacacctttacaggaagaactagaaaaacagaacatactaaatt

SEQ ID NO: 3941 - DNA, 618 bp, Gossypium hirsutum
  misc_feature (11)..(11): n is a, c, g, or t
  misc_feature (577)..(578): n is a, c, g, or t
  misc_feature (584)..(586): n is a, c, g, or t
  misc_feature (600)..(602): n is a, c, g, or t
  misc_feature (604)..(604): n is a, c, g, or t
gcactctgagncatttgttgggcacaaaggagtccttttataaagaaatggaatatcgagtggtgaaactagagcaagaaaatcaggagttgttggcttctttaaaagaactccaggaaactagaattcaagaagctggaaactcctcttctctttcaaaactgaaaaacaagctcaaaagtgtggagcagatgcacaaggattgttcatcgaatctcagaactaaagaagctgaatggaattctcaacgggaggaaatgatgaagaaattaaatgattacagctctcagttaaagactaaagatgccgcacttaacgtgcttgagacggaacttgaaagttgcctttcttcagccgttcaattgaaattgcagaatgaggagatttccataatgatggtactattgaagtcggggatgtttgaggcccaactgaaacttgcaaatgctgaggctgagcttggtctccatcagaaagaggggatggagaatctttctgttctgaggcagcaactggagatgagaaatactgctctggccaatgctcagagagacattacagaagaacgtgagagganngcaatnnntccaggaaggttgnnncntagctcaactcgag

SEQ ID NO: 3942 - DNA, 653 bp, Gossypium hirsutum
ccttttccatgtttcgtgggctgatacccatcaccctttgtaaattgtagccttgaattaaaacctgttgcccatctcgtgcagagtgcacttgcacaaggcattgccacagctgtaaatgtatttgccatgctttttgtaataatagctggtggttatctgggtttcaagactggatggaccggatatgaagttcctactgggtaatggcatttcattctgtttttccatgcctatatgattatttcaaaaattgttattgaactttttcattcgtataggtattttccctttggggtggatggaatgcttgcgggatctgcaacagtcttcttttcttatattggttttgatacggttgcaagcacggctgaggaggtatatggtttcttttcttttggcagtttgccctttattaaaagctgtcttttctggcgatctaaggaacttcaaactgtgcatgacaggcgaagaatcccaaacgagatttgccactgggtattgcattatctctctccatttgttgttgtttgtacatgctggtttctattgtaattgtgggtctggtcccatattatgcaatggatcctgacacccccatctcctctgcatttgctagcaatgggatgcaatgggctgcgtgagtattcttg

SEQ ID NO: 3943 - DNA, 611 bp, Gossypium hirsutum
  misc_feature (598)..(600): n is a, c, g, or t
ggagtcgcaccatcagatgctcctccatcaaatgatgggaaggctgtgttagagggagagaacaccagtagtcagcagagtgaagatcagcagcaagaaaataacaatggaatttcacaggaacttaatccaacaggtgaaagtgttacatgtcaagggcagctgaatcctcagtctggtgacatggctgaatctattcaaagacatgaagggatattaactcaaacgttttctttgaacaatgcaccagatgagcatgataacatggaaattggagatgggaatggcacaacagctgctgatcaagtagagcaaatttctgaaatggttaacttgcctgaggggggttctgttgtgcctggaaacctttcaccacaggccatgggtgatgatggattgtcaggaggagatggtcaggcaggtaatcgtattttgacaggttctggttcggagatgcctagcccaggtgattctaatgggtcttcggttcatgagcgtattgatgtggacatgaatactgctaatgctgaagagaaccaaactgatcaatcaattcctcatgaaattggtgcagaggagccaggcacacttgattctnnngatgctaaaaa

SEQ ID NO: 3944 - DNA, 602 bp, Gossypium hirsutum
ggacataagttgaaccactagactttgttacatctgccagagcaggctgtggaactctaagagcccagccatcagtaatttcagcaggagtgaacatcccaccacacaaattcactcgattttctcttggaagctcaacatagcactgtatgatggcccttagagggaacagaccaaaatatttcacttctaaagaaatgtaacgggaaaaacataccatcgctcaaacaaacagctggttcagtagtctcttcgaaaccagaacagatggccttcagaacagcacctttggccacctttcctgtatgctgatatgtcagaagggaaagcattcaaaatgggatctttggaaatacaggcatgaatacgaacctctgtattggcgattgttgacaacaagcgtaggcaatatagtaacatcacctctagatcctttccccacctatggacaactttctattaattagcttcccacaattaagagcaccggaaagaccaaggatgacaaaaaaatataaaagagtaataaaatataaacatctaagcacgagataattacttgggcattttgttcttcttttagaacaggattatctgcatca

SEQ ID NO: 3945 - DNA, 585 bp, Gossypium hirsutum
aggtctagcattagtttccagggtagatatcaacttggaataggaaccaataacatctgccactgatctgtaaacctagttaagagaaaattcctcctgagcaaaatcattttttaacaaacatacattaagaaataatattcattgcaaattaaccaataacaaactgacatacaatgcacatgaatcccttgaggtcatcagaaggccaggaagacagcactgtaaccaactgcataaccactgagaaatcaaaagtttggcctccttgcagaactacatcagaaacctgtaattgcaggattcccacattattaatgttacaagaaaatatgagaaaccatacacttgtgaagagtcaaaaaagattcctccagtcatatctcttatgaaacatattacataacctattgaggagttgcacaaggatataacattaggttgatgccacattaacagatgcttggaaaagctagagcttttcgaacatcaaaacagtgaactgtgacaagtgtgacttaggcttcgtttggggcggcggtgcggtgcgtttagcttactttttgtctcacgctacagtatcac

SEQ ID NO: 3946 - DNA, 617 bp, Gossypium hirsutum
tgtagggggttattttgttgatagaggatttggtttagtgaggactccccttgtaagggaggaagatatggtaatgcctgttgaagctgttacttgtggggatgctattggcaagaagattgatggtcgaaggtggaatcgtggccgacccaaaggttcaaagaataagagaaaacgtccatatttcttgatgaaaaagagttgtagcattaagtctcaggctgagagaaaacggtttgtaggaaatactttgaagatgaacaagggtatttcaagtaagcatcttcgagacaatttaggcatgcggaagaaagtgttaacagctggtgttcgaggccatttaaacaagagaagaaatgtattaacagctaattttggcaatgctcaaaggaagagtagaacgaggaaaaagaattctagcagtcaatcagaaagttcagattcaacagtgagttttacttgaactattttttcagattactgatgagatttgtaactgggaaaactaaaccactaagcattacgcacaatatgctaattcattaacttataaattagaccatgctttgttgttaaaaggaaagctctaaacttcaaagaactgaattgaagatttt

SEQ ID NO: 3947 - DNA, 628 bp, Gossypium hirsutum
atatgatctggaagttattgaattttctgaggtatagcattgaagcatatgcctaggcagagaaaagtgttctaagttcaagcacgtggtagctagcagttgaaactaaacaaaaaatgtccaaacttaacaggttaccctcagtgaataccggaggcggtaagaaatatgggattgaagttcaactgtctttttgagtactttagtagtagcttcacgaagagcttcatctctcagtcgaatgtcctttttaaaaataacatagaaaaatagtaaaagccttgaggttaaacttcttatgtctataaaatataaacaaatgtacatcaacctattagaaacagtgaggacaggatgatcagaagatttctttcataagtaaaggcattgaagatccaataactaggtctgagcagaaacacaatgctggaacattttgcttctcacagtatattactaaaattatactacaagaaaaatctcacacagatctcatagcttacagcaccatgcacttacctcatcatcatcatcaaaagccagttcatatatgccttcatcattcagccataagttgtatattattatttttgttccatgtggtccaatatcatcaaactgggaatac

SEQ ID NO: 3948 - DNA, 622 bp, Gossypium hirsutum
gctagtttcactgttttaggggatgcattctgtatatatcttgcctgatatggatacatttaatgattggacaggtccgttttttttactcctttacatgtagagaaaatctttacttggttatggagtatctaaatggtggagatctttactctttattgcgaaatctaggatgcttagacgaagatatggggcgtgtatacattgcagaagttgtaagggcccctaagcattttataagactgcttacctttgttggactcaatatagttctctcattggcacacattgtattatatttcacaggttcttgcattggagtatttgcattctttaaatgtcatacatagggatctgaagccagacaacttgttgattggtcaagatgggcacatcaaggtcagtatctttaattttatttattatataattgttgctatacaaagtctatgcaatattttagtttgctttcagtgttgttgaactctcataatgtttatgctgccatgagaaaactacataacttctcatgaagctgtaatcccttctattacagttgacagattttgggctctcaaaggtcggtcttatcaacagtacagatgacttatcaggtccttca

SEQ ID NO: 3949 - DNA, 1039 bp, Gossypium hirsutum
  misc_feature (936)..(936): n is a, c, g, or t
  misc_feature (966)..(978): n is a, c, g, or t
  misc_feature (980)..(980): n is a, c, g, or t
  misc_feature (1011)..(1013): n is a, c, g, or t
  misc_feature (1021)..(1025): n is a, c, g, or t
  misc_feature (1032)..(1035): n is a, c, g, or t
ataggaagctaaatttttaacattaagtttgggtgtaccactacttagaataaggaaaaatgcacagtgctcaagcaaccaatttcatttagaaggctagaatgagcaacatgtttatactacattcaacaggaaatgacaaacaagaacagagattcacacatattatgcgcatagtatgaaaacaaatgaagataaaagttatatgtggagatactggggtgggtgctcaaattaaatccagagggaatgaaatgctctgaagctgggacaattattctcatttatgcaagttcagttacatattttatgctaatatatacaaattccaattggatatttacacccaacctcaagagcattattaacagcagaaaatagaagaaaatgaagtttgcaagttctagtcccgctggcacataatacatcataagttaatgatagcacaagaatatgaagtgctccattcatgcttttgaatcatggccacataaaaaccactgcatgcagtatatattggtaacacgattaaaaaacaaactagaagcaaagtgcatattactaaggctattggtttctgttaggatcgtcccgaataagcaacgaacaagtaaaaatagtagaagaaattgagaagatgaacacacaaatttaacgtggaaaaacccctcaaaagaggataaaaaaccccgggcaaagataattttactataatggcaaaagaatgaagagtacaaaagatggagataaaaactaaaccccgaaaacccgaaaaacaaagaaccctcaaacgtaaacacaaaattctctgaatgtgttatgagttctaatctaatgggtgtctcattaattctaagattgtaaaggagcctatttataggctaaattagtaagtcaaataaactatactaataaatgctaaatatattatactanaaaatactaaatcttctagaaagaaaatannnnnnnnnnnnnantgcaagcatctcttagaatttgggtcacatnnnctaacagnnnnnataaaannnnaaaa

SEQ ID NO: 3950 - DNA, 614 bp, Gossypium hirsutum
acatttttacttgaatgttatttgctaactagcctcaggctagattaacataatatatatcctgtgggggctggcagttatttaggtgtgagcaaaactcgattcgactcaaaaaaatcgaaaaaattttcaaatttcaagttaatcgaatcaggttatttggtttttttgagtcaacttgaataagtagttcgagtttcagtttcgagtcgagttgaattttacaatttgaataacttgaataattcaaataactcaaataagatattgatgtaaatacccatttggtccctttcaattttaaaaaagagcaaattggtctattacaaaaaaattcaaaataattaaaaatttcaatttttttaaaatataaaaactaaaaattctaaaaacattctaaagaatataaaaaagctaaaaaattttaaaaacttctaaaataataattttggacctaaataagtaaattaatgattttgaaagagttttcaaacatatatggtttcaaatttatatactttgacatggaattagttatactggaacaagattttaatttgacatgtttaatttttaatttaactcaaacaatttcactccattccacttgaatc

SEQ ID NO: 3951 - DNA, 593 bp, Gossypium hirsutum
cttaactcccctctttctaatgggatgggatattagtcaatctggacaatgaaattcaatatcttataattagaccattttataatctttatttttatcaaattttaattgttgttgaactcataattcaaccataattttcggggaccggcagtttttgaaaattttctttaaagcttttaagaaatttaatcaaacctttaaagattttaaattagttaagctcaaaacttaagcttaatttaagaatattctcaaaaatacttttgaagagaaactaaaattttcaatttttaaaaaaaaaaaaaaatacttttaagctaattttcgacttgggagaatcactttatctctaaaaaattagtttatcccaaaaatgcttttgagaagtattcctaaactaggctttaatgttacaaaataggaaccaaaacaagatgaaacaagcatgtcactagaacagtgaatttgtatgaatggaggcttccaaaataatttttaatattaccccctaccaacaaaattcactttacaacaatttgatatgaaaccatgatttttttttattcccctttttaaaaaatttaaacagg

SEQ ID NO: 3952 - DNA, 612 bp, Gossypium hirsutum
aatggggcacatagtctttgataagacgcaaaaaatgaatctttagtttagaaggaatctgtaagtcccaaagcaatttgtagaactttttgtaattggctgtaaggtcttgattacattcagaatgttgccttgttgttgtaagtaagacccgatacccactcttcaccgaatagtctctcgtagcctcgtgatgctacactaacgtatcctgatctccaaagtttgcaaggggaatgtttagaatgcaagtagcctgcacttgatcaacaatctgaccaaggacttccttattttaggtacccaagttggcatcaaataattgattaacaatagtccaattaatattgatgtcctgaactaaaattctactattaccaggtccaggcagccaagggtcattccatatatttacagccacaccactaccgatacgccaaatcacaccttctgaaatcagctctcaagcactgtacaaacttctctaggtaaatgaggggtaataaccaattctagctgacaaaatatcagaaaaaggataataacgagctttaaatactttagcaaaaagacaatcgggctgcgataacaaccgccatacttgcttagcta

SEQ ID NO: 3953 - DNA, 640 bp, Gossypium hirsutum
ctctggtattcctacatgttctcatatttcaatatgcctgttgaagtaatgcatatcctaatctacacaataaggttcagaataagactagccataaaatcttggataagtaattggaaacacgaacaagggagtgttggaagtcagtcaaggaaataccatgcgtatacgagcaatattgtaataactgatctcgacaagcttctgcaagctgaaaacacgggctgggatttgtctcagttcttctgctgatacaccacagagagcagtgaagaactccacaacagaatcactaggcaatttttcactatttgtaaaaacctgttcagcaggtttcccagccaactctttcagtgactgcacaacagcatccctggagatctgatttgatccatgcatgacacttgcagcaatgacaggagttgtcgttataaattcaagccgagaaacacattcaagaacagcattccacgtgtcttgaagagaatctggttctgagtcacataaacccaatagagtccgcaatgcttccacatttttactacgcatatcctttggggcatgcaagaaagtaaacctaacatccaaaaattcacagactaagcattacagctaaactactgcctgaggaattacaatg

SEQ ID NO: 3954 - DNA, 618 bp, Gossypium hirsutum
attacaaaaaaaccatgtgattaaattaaccatagcaaacaaaatcttatagaatctggactcaaaccaaaccctttgaaaagtagaatattaattttgagcaaacaatagtagagacagtaaattcactcatttggtctttttagaaaatgcaaaacatataaaattagtttaatatttcatacatttgtaatatactttttatctttataaatagattttaaaaattattatatatctcatttattatatattatacttaaaaagggtatttttcattaccaccatccgaagactatcaaattttttttcataaaactaatattatatttggttattaaggtaacgagaaaaaaaacttttttaacacttatattttataataattagacataaaataaagaataattaaagtaactttaaacattcagttagaaaaactctgataaaaagtaagacttcttccaaataaatgatttatttatttttcccaaacaagttatataaattactaaaaattaccaataattaaaatatatgaaaaaatactactaacataaattaattggtgtaagtagggatggaaagaaaaattaattggggtaagtagggatggaa

SEQ ID NO: 3955 - DNA, 643 bp, Gossypium hirsutum
ttacctaaagctgattgctaaattgatgaaaggaattaattgatatactatcgatactttaaagactcttgaagttggtggagaaaaatgtgattcacggggtgtatttttctagtaagtgttgagacacgcatattatagtagagcttaatcgatttacgcaaatcaaaagcaaatgaagggagaggcatgactgattaatcaacaatgagctcccttcgactgtttctaattgtcttttcaagtgaaatgtgaaaaaggtgatggaactggtggaggggggcactgaccccataaaagtagctgacaaggagaaagtgttagaagcctggaaatggaaagcagggagtaaaatgaaaacaaacaatgtattatgtgacaaaatatttcacgtgggatgctgctgctcatcaaccaaaacactattattcctttccttaacaattcaacgacagcttctctctctttatatcaaccatgcagtgtatttttcttttttttcatatccgttttattgtttatctttagagtttatggtcattctttttaataatatcgtttaacatacgttctcccttaagagtataatgtattttactattacattcaatatatatttcttgatacaagacgttaccacttt

SEQ ID NO: 3956 - DNA, 313 bp, Gossypium hirsutum
gcagtgaattagataatgtagcgtgagacaaaaagtaagctacacgcatcgcatcacaccgtattccaccgttcatccaaacccaccttaaataaacaagcaattgagatgggaaatgataatcccaagaatgttggatccaatccaccaattatttataaccaatcatgttaagtaaattcacgttagaaatcaagaatgtaccaacaacttaaaggagtcaatggttaagagtttttcgttgacatttgaagtctaagcttcaagtcccggcaaaaaatcccctccccaatatgttttgtacaaaaaaaaa

SEQ ID NO: 3957 - DNA, 640 bp, Gossypium hirsutum
caggtcctgactttggcttcgccaggctggccgcagatacggactctggtgcaacccatgtgtcaacccaggtaaaaggcactgctggctacctggacccagaatacctaagaacctatcaacttacagaaaagagtgatgtttattcatttggagtattattagttgaactagtcacaggcaggcgccccattgaaccaaaacgggaaatcaaggagcggataacaccaaaatgggtgtgcattgaaaccctttcccttctctcttgatatcttcaatcatccttttcatgaatgaagttactgatgcattttttttttgtaattccaggcaatgaaaaagtttacagacggtgatgccatatcaactttggaccctaggctagaactgactgctgggattaacttagccctcgaaaagattcttgaactagccttgcaatgcctggctccccgtaggcagagtcggcctagtatgaggaggtgtggggaggtcttatggagcatccgtaaggattttagagaacaatcagctttagactttcgctctctttcatcaaactctcaaaggagtgcttcagttaaagagcaataaacaaaggtatgatttacttgcaaacctagtacaaatcgtcctctgt

SEQ ID NO: 3958 - DNA, 646 bp, Gossypium hirsutum
ggggaatcctccaatgcatgtcaacaccagcaataatgaatactcaagtgctccaggcatggaaatacaacctcaactccctccttgctatcgtctataatagtttcaaggtatgggctttcactaattatacaatatttcaacttgctaaggttgccaatcccctactatgatagcctgataatgttgaggtgatgatctaaatagaaagcagtacatcgagccaacacttcaagaacaacatctggaatctccccaccgttgacaaatctcaagctttgagccgatactaagccataattcagctctacggacggtgggactcatggcgtattaaacttaacatcatggccaacaataagttcaaattctgttactctttctttcttccatgatgcactttctcgaaggaacagcttaagaaacttcactcaaggaaaatagaagagaagtcaagtttttcaaattgctcacttcctttatgaaagacaacactcttgtgccatcaaatatctcctgggtacacactgatgccgagtgtttccaatgctccaagtgtggaaaacaattggcttggcagcttagcatgcttactattggtgctacatccataaaaggatactcccaagtggcttagagagtctag

SEQ ID NO: 3959 - DNA, 626 bp, Gossypium hirsutum
ttatctcaaattctatatcttttttttcgatagaaagctcacagaaaaaaactggtaaaacatgttaaagtaggagggtctaaggatgttctccctgtctgcttcagctgctccgacctatatagtttctcacaccaaacactgtaagttttgccaggcaaaagcctaaggtgataagtttccttctggtaaccctaatcattattgaagacttcactatccatccacaaggagtgattacccattgatttcaatagtaaggttacttccatagctgaattatgctgcttacaaccgataaacaaatcattacatccattagaagtgtgttgtggatggcttaatactctttaagtttccaattgtgtctttgatcaccttactttcgaaggcactcactgtggctaggatggatttggatgcttgtatgacagaaattgggttacattgagatccttccaagaccattttatttctatgaggctattacgataaaatcctttaaaagtctcgatttgttctctatccaattcgatgttcagacaaattttcaagcaagtgtttagacaaacgtttgaatatatgtgtgaacagaacaatttaaacaaggcaagaagcgaagtaag

SEQ ID NO: 3960 - DNA, 631 bp, Gossypium hirsutum
aaaggaaacttaaaacagaattctcattggaccaatcacaacataatagcaactataggaatcaataggaatataggataacgcataaagatacctctagggccatagtatgtatactatgtcatcatttatcaacacaggtcaacttactgaaggcttaattaggaaagctacggaaatatacaagatacatgataccatcagacaagggacaaaaggttgattcatcgacacagaataaaactgtaagacagaacatttgtacacgacagaaaatgaagacaaaaatataccttctgtttggttctcagctcatttatgaggtccattgagtccctaagtttatgaagctcttcgttagccttcgaatactcggtaggtgaggcttctggctgtcttcaaacaacacccacaagctcaatttcaacaaaaatcaaaatagaattaaacagaagcataaaagaatttaaaattaaaagatattacctggttcatgaaattctcgagaaaagcactcctatgctcaatagcggctaatctttgttccattattttcaggaggtcagtagaaagctgaggttgcagctctgcccattacgagaatattgttccaatgaatccaaagtgacac

SEQ ID NO: 3961 - DNA, 606 bp, Gossypium hirsutum
  misc_feature (368)..(368): n is a, c, g, or t
  misc_feature (437)..(437): n is a, c, g, or t
tacgggaaatcgaaggcaagaatgtcttttattggtttcagaaccacaaggctcgtgagaggcagaagaaaaggttcacctccacacctgatattctccccatgcaaacacccattcttgcaaatgctaccaggaaacctgatgattctcttcataatcataaatatcccaccataactcctggttggtttctctaattattttctctttccctacctttgcttgttatttataaaaacctttaattttccaattcccaaggaatttttgaataaattttgaaggtaatcccccttcttctcctccttcactgggggggttaacggtggggaaaatagaacacatgggttatgaatctataaccatgnaaaaaaattttaagggaaaaaaataataatcataaaacttttgaaaaggcataacttttatttatttantttttaaaactactgtatctatgttttttaaaacccagaatgccccaaatccaccggggggaacaacaatgggggggcaaaccccaacttttggggggttgggatggaacccggatatacaaaatccttttatgcttttttttaaaaaaaaaaatttttttgaaaaaaa

SEQ ID NO: 3962 - DNA, 601 bp, Gossypium hirsutum
cactgataggaaaacatctcaatccaattaagaaatcagtaatttatccttctattttcccattattttttctcatctctccaattttttcattccctttgccatatatatttaaattgtctttattttgtttactattttatcctcttatttaacaaactttatttctatagctcaatttaatttccatgagcgtctttgatcttaataattttaaagacttggtgttgccttatacacatctaatactatatgaattttctattctatttcttctctgttttagcaaactttgtttctatagctcaattaaggtccatcgatgtctctgatcttaagaattttaaagacttggcattgccttagacacttctttgttatatgattacactctggtttcacaaaccattttctttatcatttgaaaaattttaccttaaaaacacagttttaattagtgtgggtgtgacgggtgagaatttagaagttaaaataggtgcaaaatatagtatatctatggaattggtgatacaataagttcgatcatatatgaacatggaaataatcgaatcaatggttgcaaaatttctgatatcatcct

SEQ ID NO: 3963 - DNA, 647 bp, Gossypium hirsutum
tctcattgagtggatattcaaccgggttggatagacaggcattcacttcagcaggagttttctcaagcaagccctcaaactcagatcgagcccatgtcaagcagtggtcaatattatgtggaaatgagtgcactgtgcacatgggtgcttgtttttcaggtggatctcttgaggctccatagttctcagtcagataaggaatcaccatctgagtgttgcatttagcaccaagagttcctgattcaagaagtggtttctggaaatacaagcacctctgatcaacatacagcctagcatcaacattatctaatgcattgatggccactgttaagttttcccagaaggcatcattaaacacactctcaatttcaggacccacgcaattttgcaaagcttcaattttaagctgagaatttatggatgcagcagcagaagcagcaatagttgatttagcctgcccaatgttccaatcatggaacaaaaattgcctgctgaggttgcttttctcgattacatcatcatcagtgattgttagcttgccctggctcccacatgaaacacccatcaatgctagattttttaggaactcacagcctagagcaccagatccaactataaaaacttttgcatcctccagcttcttctga

SEQ ID NO: 3964 - DNA, 611 bp, Gossypium hirsutum
aagattattgacaattaaacatcaagtgcacaagagtaacgaagtgcgaggggaaacatttaccttttactttcattaacaaactattgtacgatgacaaaagttctgcctccttttccttccatctgtcttctttggcttgataatcctctatcttaagcctcatttctctgcatgaaccttccaatccttctacatcactctccaacttgaaaaccctgctttgagattcatctctttgttcaattgttttctgcaactctatttctatattctttttaccagtttccatctcgtttttctctccagcaagttgagccaaatcatttttcactgtattcaatgcgtcttcaagtaatttcatagttgctcgggcctctgctaacttgccagccaggatgctagcctcttccttcacttccctcaactcttgttcagtctgtttcttggcagtctgacaatcataaatatactcagaaagcaagttcagcttctgtacaggctctagaaatgctgagtcaactggaataacaatgcaattaatagattcaactaccgtatgcaatcttctattgctctcaaacaataacttttcaagttgatccttctcc

SEQ ID NO: 3965 - DNA, 664 bp, Gossypium hirsutum
tttattatataagctcatatatgttaaaattgagttaatttcataaaacatccctaaactattgatcaaattctaaattaatccataaactttaaaatatatattttttctaattgagtcctcaagatatcaatattacatcaatcgggtctttctgttagcataacaatcaattttagcattaaaaactagtcggatattacgttaagtactttaaagtacgtggatcaaattacaaatatgtacatattgttgtatggttagtttggacctaatatgttttaaaaaataaggacaataggggcatggtaaatttattcctttagttcctttaaaaattgcaaaactttaagttaatccaatggtaatttttcattttagccccactaaattttaaaattcaattttgaccctttcaaaaatgaaaagtgtatagtttaatccgtcaagaaattataaaatttcacgttaagagataaaattacattttagctctcttgaaaatttataattcaaatccaacaccccgaaaaatttctcactttgtctatgtatgagggctattcttttagcatacaaaaattaaactagcatttaatgcacaagctaatgattaggttagtaaaataacatatcatatacaatgccgatactttgaggacta

SEQ ID NO: 3966 - DNA, 570 bp, Gossypium hirsutum
ctgaaagatgaaagagtggccaaataccaggtgtgctggttagagaaagctttgggcatggcagaaatgtccatatggacaatataattgtcagattttgctagtttgataaacacaaacaagacacaaaaagaaacccaccaataaacatacaggtgtttgccaatatcagctgccatggcaatgaattatgagatatttttgcttttgaggattctcatgaatttggcaaagcttatatagggaattggtaaagtttgggaacaagaaatctttgctattaagtaatttcactgtgtctgactgagatccaagtaatgtggttttgggattcatccataattaatcgaaataaaatatgattaaaacaagtatatagtgccgatttaattaagacgattcgatttcatcctctaatatccttccttttgttaaacgattagagggtagtggagaaggaatggggcatcctattttgcttccataattaaggaccacatagcactattaaaggatgccaaaagaagaaagatagaagaggttgaggtgaatttttcgcctatccattgt

SEQ ID NO: 3967 - DNA, 615 bp, Gossypium hirsutum
gtttgcaggagaagtcccatcccgagtctcccacctgtcaaaattggtttcacttgatctctcctcttcgatttattactatgagcaatttacatttgacaaacatgctctggagggacttgttcaaaacctaaccgaggtcagacatctgtttttggatggaatcaacatgtcttctgttaatgctcatgtcttcatgaatctatcctcttctctaaggtctctcagtcttgctggttgtgatttgcaaggaaaattcccaaaaaacatttttgatttgccaaacctcaatctcctcaacttgggaggcaaccaaaacctcaatcttgatcctttgaagttcaatcggagcagcaatcttgagcatttggatctgtcgtggatgtcctcctctacagaattcattgattcagttgacaatctacaggccttagagtacttggatttatcaggaaattcttcctttcaaggattgtctgtctcaatcacaaatttatcatctttggagcaattgataatttcaggcgcaaattttttggaggattgcccgactcgatggggaatcttgtgtccttgaagtttttagatctctccaattccaacttatcaacaacg

SEQ ID NO: 3968 - DNA, 623 bp, Gossypium hirsutum
gtgaaaaaaaggatctttgtctattttctaatacaaggagctagtaattatagatattttatatgtatttactctaacagtggcctgcacttctctttatctgccgtggttttacctcaatgccttactattatgtgaatgcagtatttatagcagcctgctttatggtacattttatttgtgttgcaggaggatgtcaaggctatggttgaaaggtttcttgaatatgttatgaataatcatctggtcaataaggaaccagcaaccattttacaggcatttcaaatttctctggttagagacttattctcatgtattcttaaattcatactgcaactgtcgataatggtgtcttttatatgcttgattgaatgttttaggcagtcctgtatgcactagaggatcatgttttgcttttatttatgcttgtctgtttcttcaagtttcatgtactttgacttctatgttcactcatagttttcatagaaagcttccacagaatttgcaattgtacctttttctacaagtttcgtgcaatttgacctcaaatttgtccactcatctttctcatagacagcttttgtagaatttgcaattgtgtctttgtactgcaagtgctggac

SEQ ID NO: 3969 - DNA, 590 bp, Gossypium hirsutum
taatgttgacagaaggctaaatctagttttgttctacctctatcggatataaacatatatataaatatatatctgacatgagaaaaagaagaagaattaagggagtgtttaaattttcaggtcggctaaacaattgtatttgaacattttcaggtaagattgtccaaacaaaccaaggatcaaaagtttgatgttgttgccaagttggtcggtaggttgaatggtcaaaaaaatgggtccatctgtccattttatccattggctacgctgatgcaagatttacataattcaaaaaggcgtggtccatgaagttgaaaaccaccacgctacgtctattttatttgatgatcactgttaaaacaaatttatcttcaaacatctattttatatttcttaatctaacctaacaatgtagtacagtaattatgtgatttggaatgtttcatatgagagcttaaatgaatcctaatttttgccttgtatgaaaagacccacaatttgattgaaaatggcatggatttagacactgatacaaacaaaagctgatgccattatttctcctttgggaaaaaagtagagagaaacagaca

SEQ ID NO: 3970 - DNA, 632 bp, Gossypium hirsutum
catagctaacagtggaattcagacgaattggatgttgtccatccgtgtaaatgaagaacaatagacacactccgtcagtcagaattgaagagtgtctgccctgctgcattttctttttcatgtgtgtaaatttagataaaaaggaaagaatattgcattattgtcgaaagccgtaaaaattaaaaataaaaataaaaaaactcaaataaataaaattttatagttgaattcatagagatggataataattttattccttcaattaaaataaatatttctaaagaaaacttaaaattaaaactaaaaatgaaaaaaaaaaactaaattaaaaacttacaaaaaaaataaaacaataattaaaatttgaaaaaatcaattagatgaaactttagtttaagcaaaatctacatttgattcaagggtttgatcactaatataaagataattttcagtactcttcaataaatcggttatagttgtcaacgattgcttactaagctaatcacttcttaccttcttgataatcaagaaggtcgtcattaataacttactttattggcaaataaccttacaatgatccttaggatttaatttatcaataacattaaaaacaaaaaaggctcatttctaca

SEQ ID NO: 3971 - DNA, 609 bp, Gossypium hirsutum
tctgctagtagcattttgctgcaagttaaagctttctcattagcagcctcacggtttttctggccaagtgctgagaagaagttgttggatatcccaagggaaaggtgtggctggtgtcattcttgtaaggtcccaggttcaagcaagaggggatgcatgttgaattctgctgtctccactgccaccaaaagtgccaataagatccttggtggccttccttctttaaagaatggagagggtagtcttcctagcattgtgacatatattttatacatggaggagactttgcgtggtcttgtagttggctccttcttaaacccagattataggaaacaatggcgtagaaaagtagaagaagcttcaacctgtagagcaataaaagtcctcttgcttgatgtgagttttaaatattaacactcttgcttgatgtgagttttacatattaacacgcttgcttgatgtgagttttacatattaacactcttgcttgatatgagttttacatatttgttaattttctccatgctaatctgttaaaatcaccttaaccttatccctcccttgtcaaggtttcctggcatactgccaaccaggaactgaagaacgtgt

SEQ ID NO: 3972 - DNA, 623 bp, Gossypium hirsutum
tatgcttattgagaatgatacgtacttgaacaatctagtagttcttatacttgatcattcaatttttattgttttacttgtaggtttgtgtaagctggagagtataaacctgtcattcactgttgtttctgatggtggattaagagagctgtctggactaacgtctcttaaatcacttaatctggatgctcgtcaaatcacagatgctggacttgcagctcttacaagtaagactatacaaagcagttgtcaaggacaattctctaaagcttttcatgcttctttcaattttttgagtaggcacttgtatctgtaaactatgatttgattatgagatatgttcacgtttctgccaacaagctaattgtcagaaaaccagtcaacaagaaacacatgtttcatgttaaagctctaaaaggcaactaaggatatacatcaactgttctttggctttggctagcaacttaggatgctttacttttggatcatgtgcatatagtcagtacactcagttttctaggtttattgtattgctcttattttcttctcttcttgaggcaggtttgactgggctgactcatcttgatctttttggagcccgtatcacagattctgggacaagt

SEQ ID NO: 3973 - DNA, 641 bp, Gossypium hirsutum
gagcagttaggtcagtcgtaaagtgtctgaagagcctgttgttcttcctccaaaactgcgactgccaccatcttctgagaatttgaatttggatgggatttccgtacttgatattttttctatttatgcttttttgagatcatttagtactttattgtttttaagtccctttgagttggaggattttgtggctgcactgaagtgccagtctcccagctcattatttgattgtattcatgtttccattttgcaaactctgaaaacgcatttggtgtacctatctagtgaaggttctgagtctgcttctgaatgtttaaggtatttttattctttccatttcttttccctctcttgcccttgccttttaaacattgttttttgtttgccagttatcagtgttcaatatttcttgttgatctgataatgtaggagtcttaattggggtttcttggactctattacatggcccgttttcatggtcgagtatctactcattcattgttcggggttggattatggttttgatcttactagtttgaaactattcagatgtgactattataaacaacctgcatctgttaaggttgaaatactcaggtgtttgtgtgatgatatgattgaggtggaagctgtaagatctg

SEQ ID NO: 3974 - DNA, 641 bp, Gossypium hirsutum
  misc_feature (7)..(7): n is a, c, g, or t
ctcagantggtggagcacctccattgcgattaatggacacccttcatactgacaagggtaatccattattgtcatatcgtactcggatagtaattcggccatatagcttttgctttctccttcgcggaaattaaagaccaagaatgaagcgtccgggaagtgaccatgaagattattaactattccgtttacatggactgtgtagttttcttcttcccaagcatcaatagtgaagcagcaatcaaaaactatttgccaccatagcacacattttgtcagctactatttcaagtcataaaattaccctatatgctcttacactttaaacagagaattcaaaatgcaaacttccaattttgttcccaaattttctaaccaaccaaacagaacccagaatctaaaaagcagcaatcttttcaaaattcatatctaatcacctaaatactaatcatttcctgagtgaccaatttttccagaatcaaatatatacattgaatttctatttttagcaatccataatcccaattatatatataaagaggaaagaacatgaaatgaaacaaagggaagaggagaaaacacaccatggacacgttcacagatctccagaagggcatcaggtggcttctttgtaaagaaaa

SEQ ID NO: 3975 - DNA, 622 bp, Gossypium hirsutum
gattcgttcttcaccacagcatgaccagagcccatcaatgacattccaaagtccagacaatgttatttgattatcaccctgattgctatgagtttcagcctcctccgattctcggttttctagctcgatagagcagtcgatatcctcgacgactagtatggaccggctagaaatggagagcaacaaaaaccgaagatccgagttattacggacgtcagtaagatccaagtcatagatatcatatttcaagtgattagccattgctgctatcaaacttgatttgcctgtccctggaggaccatacaacagatatccacgtttccaagctttaccaactctttttatagtattcttccccatttgtaaacatttcaagatcctccattacagcccttttcagcttccaatccatagccaaactgttgaacgtcattgggtgtttgaatatgacctcctcgtcatccctcttccataaacaactgtgtggagttttatactcttattctcttctctcatcaactttgccgtttctaatatgtaaggcaagtatgaatcaatcactaaatctttgttcctcttatgaaaacttagctcatagtgtctaacttcagaccttcgagat

SEQ ID NO: 3976 - DNA, 459 bp, Gossypium hirsutum
  misc_feature (448)..(450): n is a, c, g, or t
tgcatccgttgaccttgatactaaggatgctaccgaaagggctaaattggtacttgaccatgcagagagaatgggatgtaaacggtatttaagcccagaagacatagttgaggggtggacgaatttgaatcttgcatttgtagctcaaatcttccatgaaaggtgagaaatcacaaacctggcagtcgtaacacatactttccatgctcgttgctcattgcgtggtatctccagtgatataatcaggtaataaaaacatgtgtgcttttgcaggaatggcctgagtgtagatagcaaaaagatttcttttgcagaaaggataacagatgatgtgcaactgtccagagatgagagatgtttccgactatggatgaatagtcttggacttgagaattatgttaataacgtctttgaagatgtcagaaacgggtaagttttcctctgcacnnnggttgttaa

SEQ ID NO: 3977 - DNA, 554 bp, Gossypium hirsutum
agtttgaagatagagttatatgtggaaattctgaatttcaatagttgtgtaacaacttataatgtctagtaaagtactaattgagaaaattagattaattgaggggttaattgagaaaggaccgaattgtataaactgtgaaatttggggcaaaatggaaatcaacattttgcactaaagcagttttggacagcagcagtagtgtaactttgaaaaatcaccaaaaattgtagagattgaattagaggatgaataaaatatgaaactaaagcttattgagtctagtttcttataaaagaaatgatgtgagcaatggaattgtaaatcatgagatataatagattttgtgagacaaggtcagaatgaattcgggttcccctgttctgactttggaaaatcattaaaaattgtacaaaaatgattatgagttatagtttatatggttagaatccttaatgagtctatttttagaagaaacaagctaaaacatcatccgaattctgtacaatgagataattaatttttagtgaagagtggtcggaactgttagacag

SEQ ID NO: 3978 - DNA, 630 bp, Gossypium hirsutum
aggatagcaatgcatacggtgacatcataggaaaataataaccaacttgctaacctgattaacactagtaattcttttactggatattagtattaggtcggcagtcagctgaatcaaattaaccacctacttgcacaaattttctaccaaacatggaaatttttaaccataaaaggagtacttaaaaagaaattggtaatttcatcagacaatagaacattgaaattgttgaaaatataataaaatacgattcgggatatttttcttcagttaagtacttaacagctctgacatgacaaaaagtttatctaaaagcaatccttttctattatatttagcactataggttaataactatacatatgtcacgaagtacaagtctgtaatgcattttggcttaaaaacagcatatttattgcaaaccagaaaccagatggcagggcaaacatttaatatgaagccaaaaagaagactgaacttcacctccaaaagtggttagttttcaagcccaaatgaatcatcagtctaattcttcatattaactaaacatcacagactttctaaacacttaaaaattactaatttgagagtattaatgcatgtaatcaaatttatttaacactattcatg

SEQ ID NO: 3979 - DNA, 607 bp, Gossypium hirsutum
gcatgcttcatggctgcattggcactggcatacatgtttgatggaaggtaatcgttgctatccttaattgcataaagtttaactaacatatctttctctattttctgtctagattgttttcaggaccttgtagtgttaagtttacttgtatgctgatcactataatatgtaattgatattatattgttgtagtgttccttatcatgatgaagtttaaggttaaagaccatttttaacaaaggctgaaagctggaatttatctctatccttataacagcttaaaaacagagcaaatcagtaaagttatatatggataaaaattatatgtttctattcatagatctttcagttaagttcagagaaaaaaaagacaatagctttgttacaggttttgttagagcctgatgtggatgctgaccattattcctacctaagtaatgagttaagatcaattagaacttgtggaagctacattcacattttatggagtgtaaacagtgatagttaaattttggtttttaccttcaaatcttggggcatatgtggttttcctttatatatcctccttggttgaataagaggtgcacattaaagattaagccaaccg

SEQ ID NO: 3980 - DNA, 654 bp, Gossypium hirsutum
tattcttgctcaataaccttgtaataatgaactaatcccaaagataatgcatgtgtttgatccgagagtatcattggtaaaggttctttgctttcctctaacttcttatagcagtcagagaggaggctatagatgtaagcaaggcggtgcttattacaaccatcaactgcagggtatacgatcaatgatacggttttgatagtttcagcagcattatcaagtatttctcccttaatttctgagatctcagccatgatgtcatcattggtccagatctcagaaataaggattgaagttaagtacctgagtattacctgcaaaagaaaaaaaaaggtcatttaatggcttagaagggcataccataataatctaccattttgagctaagaaacatatacatgcacggccacatacctcagctctgtttaggccataggtatcagccattctcaaagtatcctttaaaatgtgcttcttctccaatgtcaaagattcaattagagaaaaaatgacactctcaatgtaactggcatcaccagacagaaaacgtgtagtttcaaccccaggaattatttgctctaagaatctagaatgttctgtgacacgctttttctcttctaattttagtttccattccctccaaaatgaggattga

SEQ ID NO: 3981 - DNA, 648 bp, Gossypium hirsutum
tcttcctcgttaaactttataattctgagtaatgatgccatctacttcaaatgtttacaatcacatgcccacctttacttcttctatggcaactgtacttggaacacgccggtgctcctttcgacggggtcgtccttgtccctcaatgtcttccattcggagccgaggatccgctgtcagtaccacccttacccactccatatcactagcacgcgcatcttttagtttttgagttaaatcttgtccaccttgaactgaaacagcactcaaattgcaacgatgcatgctacactgtggatcaggtgcatcaatactccccaactggctgattgatagcttttctacagagaaactcacattgacaaatttcactttcgcatcagacttatgtgtcattgcttggtcaatggcttgcacagtggaacttgacatcctatcactactatttcggtacgcctcttgagcagtccataaaggataagcccatggaggcggcttttggagtaacgcatcaccatttgctagagggattcctcctctagaaagtttctgagcattagatgtatcctttgtactgataagataagatacaggaaaaggatttagaaaccacactttgttcctttgagatacgtacatggtttctgg

SEQ ID NO: 3982 - DNA, 623 bp, Gossypium hirsutum
ctgccccactatgctttgcattattttcggaaatctgttttctttcagcctattgattctcggttatggattgctatggctcaatgctatgaatctgagcagctgcacatgcttgaggaagccatcaaatgttacaaacgtgccgcaaattgtaatgacacagaagcaatcgccctgcatcgactagcaatattacatagagaactcgatcaacctgaggaggctgcattctattataagaaggatttagaaagaatggaagctgaagagagagaaggacctaatatagtcgaagcgctgatgtttcttgctacgcactacaaaacacagaagaaatttgaagaagcagaagtgtattgtacccgtcttctagattataccggcccggtgtgtttcaccttttattctttctgtttcaaaatcatttagccatttttaacaagttttacttattttgttcatctctattgtgattgtaggagagggaaaccgccaagagtttactccgaggtatgagaatagcacaatctggttttccttccatggatgtcgagcattttcatccctgatttttcttgttcataaccaaaaacaccaatgaaatctttgggatatgccagttc

SEQ ID NO: 3983 - DNA, 647 bp, Gossypium hirsutum
ccttttttcctttgatgaattcagtaatggttcttttgaggcaattaatgaaagacttaataataattgctttgcattctaggattcatcgaagaaaaaaatggacagggtaaactttgtttgattttccagaccagattctaacacccctatgtctttggggaggtgtcagatacctgttttgagcagcaaatcttcccctttttttgtttttttttctttgatgggtctttttgtcaaatatacaacagggtggaatttttttttagtttagatctaaccatgggcaatgaaaaaatattaaaaaaagttaaaaatgaactcaacgtaaaataatggttccattaatttaatcaatcagggtctaaaacaggagaatcaatggcggaaaacagacaaaacttgaggactttcactaaccatttcttgcctatacgtattgcattgcatcggattctaaaatattgtaagatccggcaaatacagcattacatgcaatattaaagtaattataaaacccaataatggaaacgaatctaccaagattttatcttgaagccaacaaaaagttatcacatttttctcaaatttttctaccttgaaactaaagaaagaaacttttgtgggcaggattacatctttgcttg

SEQ ID NO: 3984 - DNA, 424 bp, Gossypium hirsutum
gtgctctagataagactaaatttaataatgtttatgtgaaaaatctttccgagtctacgacagatgaagacttaaaaacaatctttggcgagtatggtgaaattactagtgctgtagttatgagggatgcagatgggacgtcaaagggttttggatttgtcaactttgaacatgctgatgctgctgctaaagctgttgaagctcttaatggaaagaagttggacgaaaaagagtggtatgttggaaaagcccttaaaaagtctgaaagagagcatgagcgaaaagcccaatatgagcagactttgaaggaagctgctgataagttacagggtttgaatttatacattaaaaacttagatgatagtattggtgatgaagcgttgaaggaacttttttctgagtttggtaccattacttcatgcaa

SEQ ID NO: 3985 - DNA, 635 bp, Gossypium hirsutum
ctcaactaacaacttgttgctattgcattgacataatcaacagcaaactagtgccaatttgggtttcaactcatatacgcaatatgtctcgtgcctgtgccatggcccttgaataacttatgtacaagcaccattggactgcctgtgttcaaactctcaagaaactttaagcttttgacgtgtaattcccaataggatgtttcatttcatgtctcacatacacacattaggtcctgcaattctgattaaacaatctcaatcttaatcttagcataacatgattgaaacaaagacctcaggacacaaatcatggcatcggagagcgcatagaatatgcattctgccctactgtaacattctctagactgttgttattcaaagcaaccacttcgattcagagaatattcaaccgatggttagtattcaaaatgtgaagaggaaaaagtgattataaagaaaaggataccaaatcctcaagttgcaacataaggctatgacaataattcgtcatgtaccatgtcatggcaaatactattactggtagtcctatcttcaatatgtttatgtgccagtgtgtgcatgtaattatacacacacattaattgaatacatactgtgtgaagtcagcaactcat

SEQ ID NO: 3986 - DNA, 641 bp, Gossypium hirsutum
  misc_feature (58)..(60): n is a, c, g, or t
tgatcttccttagtgggcatggacatgtttcggtgagttgttcattttatttgaactnnntttaataattatttaggtttatttgattttaattatttttcttgcatctttaaattatttttctaattttgatatgtaattttgatatgcaattatatcatccttatcaatacttgacaaaaagttatttatctattttaccttttttttccccttcaaattacagcttatttgcacagttacacctgcttctagtaatatggaagaaactcataataccctgaagtttgctagcagggcaaagcatgtcgaaatctacgcttctcgtaataaggtttctatagcctatgcgttatttctattggctagttacacacatatatatttaggatctaatctcatgctactttcaaaactaaatcatttccagattattgatgaaaaatcattgattaagaagtatcaaaaggaaatttcagtcctcaaacaggaacttgatcagctaaggcagggaatggttattggagttaatcatgaagaacttatgatcctaaggcaacaggtttggcattttcgttccattgtcatattgttctatttgattgcacaactatttactggattcttcattctatttattg

SEQ ID NO: 3987 - DNA, 630 bp, Gossypium hirsutum
actatattttgtagacttattatcgctgtggaagctgccaaaattggatcaatggcgagatggggaattgcagcatggcctcctttgccggtaattgtggctttaaagctcccacagccagctagaaattctttagctcgtgtggcaaccacaccagcgggatattgatgcaccagatgcaacccaaaaatggcctctaccttttcaagcactgactcttcgatcatgtgtttggctccttcaccgcgttcctcagctggttgaaatattagaattactgttccctgtaatttatagattgtaattcctttcctttcttaattttgaaatttcatttttaggtcaaactctgcaattactgtgttacagatttaaggttagtttactttacttaactactattgaaaaataatttaagaagataaaatatcaattctaattattatactataaaataaaagatttaatggaatgataaaaagataatttcattaaaaagaactttttcaaaagtcaaaatttaaaaattttgaatttttggtttggttaaatttcagtttaaaattaaagtttggtttaaaaagcttttgaaatcaagggtgctttttaacctcaatggtgaacaaagct

SEQ ID NO: 3988 - DNA, 637 bp, Gossypium hirsutum
atgctatcttggttaccgatggatgttgattctttctagtcttctatattctgctgtaagtttgatattaatttcaaaatcatttactgggctgttgctgcgtcactccagcaaacatacatatcccacgctcacagccaagtttgaataacatagatttatatcatgcagggacttttcctcttagcactctcagtgcctggtggtgaacgatgtccttcgaattgttttaaggaactaaagcatacgagtttctgggaaggattaactcttgtgattgtgggtggggctgctcaagttattcccctttacgccctttctttcgagcaaaccagggtctcaaaaatcccggaagactgtgaaccagaaagggttcaagttggatgctttaggtttagggtcaaaataggaggctggcggtactttctgcagaaagtaatcagatggcttctatttgtattcttgataatgggatccctaacatcagtcttttgttttttcttttattacgacgcatggaaacaacgttttgtccaatcagccgttgccatattcattggtttactttggtttctttgtggctttcctttctatggccctcgtcgactgcagccaagtccgctttcgattatgctgc

SEQ ID NO: 3989 - DNA, 643 bp, Gossypium hirsutum
tatttgcaaatggaaatattatgttgctgagtatttattccaatttcaaagcagaattttcatgaaactggttgtaaaattacatgttgaattgactgtcaattgttgctgtcttgtgtgttaatgcggaaattatctgtaagcatgtatgcacctgaaatatcagtctcttgaaacggaagttacgagatgataagtgtttcaaatcagaatctataaagtatgaaaactattatgtagggattactatcaattatcatttgtaagtgtcacttaagtgctcatcagattggtcatcatacgagttactttctaagtgatcgaatgaattcacgattgattaatagaaacaagcttgcgttgcttctatcccatgcctcagtggttgctattgatttatggctaatatataacatgttatatgagcggattgatattttaatttgaaatatgagcggattgatattttaatttgaaattctttaacatttatgctcaaaaggaatagtttagtcagcagagtttatgaggtttttcgtggcagcttaatctagttaattgttacgatctcattatatacttgtttctctttgagatcttagcttcttgttagtgatagactcttcaggatgtgggtgtgtaa

SEQ ID NO: 3990 - DNA, 609 bp, Gossypium hirsutum
tagatgaacagtcagtgataatggctcaccctttgttttcatgcttattatgcattctgtagacttgttcataggtcgggttatctgctcaagcctgaaggcttgcccgaaattttgaagggttttgacaaaaatattaggcccgaaaaacaagcttaggcaaaaaaattaggtcccgtttaaaatatggatcaagctcgagctcgaacactcatttcccaattctagcccggccggttttctatgtttataatatactttgttatgttatttttatatatatgggataatttatagcacataaaaactaaatctgtagtaatatatattattctagtgtaaacattaaataaatgttaaaatgcctatatatatatataaatttaataaatgaaaagaaaagaaaatattaaattaaaaataatataaataattttttttaaaattgaaaaaaaatatggatgggcttaaattgggcttgggttagttatttacaaataaaggtaggtttgagcaaaatattaacccatatatcaggttaggttgtgcttggacaaacataaagtgtgttaatatcaaacttaagggtggctcatgaacacactttat

SEQ ID NO: 3991 - DNA, 594 bp, Gossypium hirsutum
tttctcagtctttcttatatttaaagggtgggaaagccatgccaatgttaaagtatatgttagacacaaatgcacaggcttagcttcttagatggagcttaatggggtagatccacttatagatggattataaggcgtctaagctcgagtaggttaagggtgccacttgcattaatatttgatttccagtttcaattcagggttctgtattaatagcttttcattgtttgttctatttcggatcttgcaataaggataaaggtaagaatggtgtgttgatgttttccttttttctttcaaagacttatcattgattatgaaacatgcacaacctatttcagatatgtatctgctcaacgatgtgctgaggccttggatctgcttcattcaggggcatgccttcaattgaagcagggggaggttattattttctttcagttacatttatccggagcttattagtaaggttttttttttctcaatgttatatgcaaagcctaggatatattagctgtttacgggacaacagtattctatgattgaaaggcttaagagattgccatgagggtatctgctatgctggtattatttatg

SEQ ID NO: 3992 - DNA, 611 bp, Gossypium hirsutum
  misc_feature (417)..(417): n is a, c, g, or t
tggctacgcgtggacactagtcaaccccagggataacacgattggcgcaccagcatcagggccggctatatcaaaaactggggagatggcatacaaggatataaggaattatattcaaagttatggagccaattcagtgtataatgatacttttgtagtgaattactgcaccgtaggaaccacctggattggtttcgatgatgttgaggttgtcaaagtcaaagtttcctttgccaaagaaaggaagctgctgggctactttgtgtggcaagttcccaatgacgacaactggttgctttcgcaaactgcaggtatgcttaccatagttttcgtgatacttttatcaaaatacaatgaacaataagctcaccaagccagcttgagaaagaccaaaaaaaaaaaaatatcaaaatatgngaaaaaaaacaatcccgcttgagaaggacaaaaaaaaaaaaaaaaaaaagtaaataaaaaaaaaatttttccggaaactttaaaatttttttttttttaaaattctgaaatttaagaaaaaaggggcttttggggaaaaatttatttatttattttttttaaaaccggaaccgttgaaggccatggggaaaaag

SEQ ID NO: 3993 - DNA, 623 bp, Gossypium hirsutum
gtcgcatgatcctgcattttagacactaattcattgataagatccagtgagagaatataaaagcaatacatggaaaaggaaatgtcaccttaaagtgaacaattatatgcccatagtgtaaaccaaccaagcaggtcaccatcgccatcactgaactgcaaccagaacatacaaggtctgtccataagcatgcaactaaagcacactgaaaatcaaaagcggtccatatcttgttgacttaaagtttgcttatgtaatgtggtcatacagtagtacacataataaattgttactctatcgatgactacctatctgtacaaaaggatagagtattatcttcataaagacatttcagagggtgaggaaagaaactgtaagcaaacctcagaagtccttcaggttcaaagggggcttgacaccaagcaggggcatcagaaggtaaagggccataatcaggtgagttgatgctgcattgctttagaaatggatggggagatggtacagaacaatggaaattaaagggttaaggatggaacatgatgcaaataagaaaccgaaacaagcttttgaaggagagcatacctttgttctttcaaagaccggtttcctgtacagatgttgaa

SEQ ID NO: 3994 - DNA, 634 bp, Gossypium hirsutum
ctgatactcataattgaaatgaagtggaaataagaatcataagcatgaggcaaataaaacttatacctgggatttgatatcaataacatgaggagcctccaaacagtttccaaactgcacgccaagttcagatgagaaggagttcattggcgataatgtcctagattatagaaattaacaaaattacaagtggaaaacactatttggaaatacaagtgagcccaaagaaaccagtaaatggaaaagacaaaagaatatatttgagaaccttccctaaattgcatcgcattatcaggcatcataaatggcaagtttcttcagaaagaatagcacacctatgggatgatgtcatatattatgtgtcaattagatactacaaagatctttccaaagaaagatatctttccagataggtagaagcagttaatggctttgacttggctataaacttgcaaaaaaatttgggagacgatatttcaaggttgcacaaagctgaacatacttttttatgatgcatagaaggttcattgatgcaaggcaagcaactgaaacattcaaataaggaccattcttacccagaagttaagatgactgataatgaaagatcagatacatctctgaatacaacggacgg

SEQ ID NO: 3995 - DNA, 619 bp, Gossypium hirsutum
ttaattctacatttatatgtattttattacacattttatgcatgaatttgacactttgaatttggataacattttatcacacactaatactactagccaataaaacctttagtattgattctgattgaaactgttagatataatttattgtaatttcaaaaaattccaaatcaaatctaagttaccaaaagcaagctcagataattttgtgttttgtaggatgacagcttactttaacaagacaggttggccagataaagctccaaagagtgaagaagaaagaaaggaattcattgcttcacttcataaacgaaaaaccgagttgttcatggctcttatcgaaaatagattgctacctcttcgtcccggtgtagccgagttagtccctctcttacttctattaatccatgcagtcttgtttgacatttgtgttcaacgcatattcagaatgatatgatcttccaaaagtatgtccattgagggagatatacccgtatgccatatccaacacttagtcgagtccagttaacattggacttcatagcttgaatatttgtttggtatagcattcacttaattgtttaggggattcaagttaatcataaatgtgatatgtaca

SEQ ID NO: 3996 - DNA, 362 bp, Gossypium hirsutum
agcagcatcaatgcaggcttcaacagcctcaggcaaggatgactgaatcaatctcaaattttcatctgcctgataataaataggcaacaaaaatatctttaagaaattataccaagaaaaaaatcattccgtctcaacagcaaactcatttctttatcgtttcttccctgaactgtggttattttagaggagaatgagaaggggaaaaaatcatgattattaggatagtaaggataagaagcccgccaatagcacttaacatattctgtgcatatacaccaacatacatcagcaaaatttaaacatatatcaagtagcaatacagctagctttatcttgcagcaaagaaatcagcaaacttg

SEQ ID NO: 3997 - DNA, 605 bp, Gossypium hirsutum
aagacgtgagcctgaccaccataaaatatagtcatttgtcggctggcagatgttaatccctgtcgactgtaacaaagaaaagagcatcgaatttattctgtttttttttctttgcagagcacaacaatcaaaagcaagaaacaaagattatattatattcacctcggaggaactaaaggctcgggatgtgaattatgagccccagtcttaggcctgcccccacttggcactatcgcagatgaacccttttcagtgggaacaccgctagcattaatagaactcaaaattccagggcctttaattccagttctagatccttcatcggcagctgcttgagagataacagaaggaccaacagttgtatccttgaacctgtttgaagatacttgatgcacaaaaggcacaaaatgaccaccacgagaagcatactgtactgctgaggggacagaccgttcccatttggaagcattaccttcgagtctgctaccagcgggaggctgcaatataacagatgtagaagaaggcctcattgacttcataccaaggaatacttcgtcctccttggaccttctagggcgctctcctcccgccccattgcgaaacat

SEQ ID NO: 3998 - DNA, 602 bp, Gossypium hirsutum
aaaccattgaaccatgtgaggaaatcatctctacaatatgttttataggctattgcctttatctctaatggtcccattatactgcacgatactacaatctactacataatttactaaaatgcagggaatatggtcctccatgcaacatgattaacttcaccactgaataaatgagcatgcagatgataagcaatgcttgagatcaatagtttaaagcgttgaaaagcactaccacatacaactggtactgccattggtggcttgtgcgtttgcagttaccatgaactaaaactcttacgggatagcttatagaggaaagaacgaaaaaagaagaaactagttaaacaccatgaacagacacccaaaacagtgtcaaaaacttcctcaccatttccactaacagaaaggccgtggccaccggaaagtccagacgcaataaaaataccctgcattcaaacatgaaggtaattagacacaaagatagctttggtttatacactaattaaaatacattttgacctatggggttggatcaataaaaacataataaaatgaactactccgcatacctgctgtcgtgctttttgaagctcttgctctat

SEQ ID NO: 3999 - DNA, 610 bp, Gossypium hirsutum
caatcgcttcttctaaagcacgccccgttcgttccgctcgcaataatccaatcagttccccgggtaaaaaaacattagacattccatcttctgaaaccaatacttttgatgttatttgacgtacaataatttctatatgcctattatggatctgtaccccctgagatcgataaaccttttggatcttattaaccaaagagagacgactttgcactatagttagctcagcaccaatcacgaatccccaaggaattccaagaattcttgttatacattcgttccaaccctcaattctcttttctaggttcatcgatattgaatcaatcgaacgcacttctaacacttgttccacttttggaagaccctgcgttatatcaccagatctcgatttttcatatataaatgtaactaacgtatctccttcgtaaagggtttctccataatgcccatggacagttgctcccggagtcgccaaataaggcttagccgatcttattactatagaatcagcttgaacaataaaaacttgacccgattttaggcgtggtccgcttttggctatacatacattttcacaaataaactgcccaagactaatatattgtggacg

SEQ ID NO: 4000 - DNA, 604 bp, Gossypium hirsutum
tgcgcattttagcacatgatcccggtgcttcatataatcttcctcagatatctgccaagcagtgatgaagaccaaaaacacttgaaaaatcttcaagaaattaacaactaaattttaagcagtacaaacaaacattttcacataaaatttgcaacagaacaaagaccatgaaacaaggatcgagtccatccaaatactgagcaaataacagccatcaaaaggccattgcataagcacacccaactgtttttctctttattcagaaaaatgttcaaaagtacaaaaagttccaaaatacaaatattcaaaaatcaagatgcaacctatttttgctcctaatatgaaaattcctttcattcacatagaacatcatggtctcagtaaatttcaacaattcttcaacatcatggtcagcacttgtcagaaccaaataacttggaaagacctttaagctctccattagaaaaaccaagatatcagcccaaatatttccagaagttctattaagcaaaaaagctggccaacagtaagaattaaaaaaaaaagttgagtccaaaatccatagaaaaaatacttactatatctgcatttagacattaaacac

SEQ ID NO: 4001 - DNA, 651 bp, Gossypium hirsutum
atgtcaatcacatctatatctgaaagctcttgaccaaccaatttgagtattaacttcttgcatatctacaataagttgcaaacttcaaagaaattgccatcaaagtttgtgaagtggctgttatttacgcattgtatcttatcaagtcagccatgcacttaatttaatcaagatgtccatgtaagcatatcccataaggcctaaatcacctgataagtgataactaccagagaaaattatactacaaagagatacattactttttagttttctatagcttattacatttccagtcccaatgacctaaattggcggaactagccagtgccccttaaatgtaagctattcttcattcaactggtattttccaaatctaaggtgaaaagaaatacctctgggctgaaatcttccaggttctgttgaggaggatagaacgggatctgcaagatgatgatcaataaaacatcttcagtatatagtgcattttaaagtaacagagatactgaatatttcctaaatcctctaatacctgtaatacaaattccccttgagtaagatcatgagcaacaagaaccccaataacttcggtgttgaaaatgaagaatagcatcccaggcctctcattaagcaggtatcttccaaggtctttgc

SEQ ID NO: 4002 - DNA, 632 bp, Gossypium hirsutum
atctaacgagggagagtggagaatagtatgtaatgggggaagaggaaggaaaaagaatattagaaatcaagggatgaaaaagaaaagcacagtattggatgggtaacctctcttcatcgcattctctttcttcatgcatataatattttaatttcacttcccatcccttataaattggattaaattatacactacaaattttcattattttgggtcaaactatcattttcatatgctataattttatagattttaggggtctaaagaagaattatccggggtcgcccgccccctacttccttccttctctccttactcaattccttcatacttaataataaattatgccttcagtccctattctcttcatacttttgagttttagttctacttttaattccaataatttaactgctctatttatctaatttaaaattaaatttcaattttttgtagaaaaagttgaaatggtaacatcattaaaaattaaatttctaaaattaaaaatacgagaattagaaaaaaaattcagttcaatacgtataagatataacttaaaaaaattaaatttcaacagccaaatagtatagtatagagaatgaaagcagaaatataaaatacaatgtatggtg

SEQ ID NO: 4003 - DNA, 473 bp, Gossypium hirsutum
atgctgattagtagggttagttgaatatttggtgatgtattttgactataaatgtattgttttcatattgaatgagtaagcatatcagttgtgtaaggcagattgcttccttgctgcacgtttgtgagcaagtaaattgttctttgtttcttccttctttgttctctatcttgttctcttcttttgctgctgtcaaaaacccaacaaaatacctgggtgataactttcgaagtttgatttgttgtttcccaggaaacagaattttaacaaatatgttcaagtatcagagcatgaattcttccttaagtttgaagatagccccaaatggaggtggtgggagcagatttttggtttttgttatctgccttgtggctgatctcactcactgccgttacatttgtggtattgaatgtatttgtaagtaccaacttacagccgccgatggtggcaatgatggtggtggtggtgattat

SEQ ID NO: 4004 - DNA, 1046 bp, Gossypium hirsutum
  misc_feature (577)..(578): n is a, c, g, or t
  misc_feature (610)..(614): n is a, c, g, or t
  misc_feature (617)..(618): n is a, c, g, or t
  misc_feature (620)..(623): n is a, c, g, or t
  misc_feature (627)..(627): n is a, c, g, or t
  misc_feature (629)..(634): n is a, c, g, or t
  misc_feature (636)..(641): n is a, c, g, or t
  misc_feature (643)..(643): n is a, c, g, or t
  misc_feature (646)..(648): n is a, c, g, or t
  misc_feature (650)..(659): n is a, c, g, or t
  misc_feature (662)..(673): n is a, c, g, or t
  misc_feature (677)..(679): n is a, c, g, or t
  misc_feature (681)..(681): n is a, c, g, or t
  misc_feature (683)..(693): n is a, c, g, or t
  misc_feature (695)..(695): n is a, c, g, or t
  misc_feature (697)..(699): n is a, c, g, or t
  misc_feature (703)..(709): n is a, c, g, or t
  misc_feature (711)..(712): n is a, c, g, or t
  misc_feature (714)..(720): n is a, c, g, or t
  misc_feature (722)..(725): n is a, c, g, or t
  misc_feature (727)..(732): n is a, c, g, or t
  misc_feature (734)..(749): n is a, c, g, or t
  misc_feature (751)..(764): n is a, c, g, or t
  misc_feature (769)..(769): n is a, c, g, or t
  misc_feature (771)..(806): n is a, c, g, or t
  misc_feature (808)..(813): n is a, c, g, or t
  misc_feature (815)..(843): n is a, c, g, or t
  misc_feature (845)..(853): n is a, c, g, or t
  misc_feature (856)..(863): n is a, c, g, or t
  misc_feature (868)..(868): n is a, c, g, or t
  misc_feature (870)..(872): n is a, c, g, or t
  misc_feature (875)..(888): n is a, c, g, or t
  misc_feature (890)..(895): n is a, c, g, or t
  misc_feature (897)..(901): n is a, c, g, or t
  misc_feature (903)..(916): n is a, c, g, or t
  misc_feature (921)..(923): n is a, c, g, or t
  misc_feature (927)..(941): n is a, c, g, or t
  misc_feature (945)..(947): n is a, c, g, or t
  misc_feature (949)..(954): n is a, c, g, or t
  misc_feature (957)..(958): n is a, c, g, or t
  misc_feature (960)..(961): n is a, c, g, or t
  misc_feature (969)..(969): n is a, c, g, or t
  misc_feature (971)..(977): n is a, c, g, or t
  misc_feature (979)..(982): n is a, c, g, or t
  misc_feature (984)..(989): n is a, c, g, or t
  misc_feature (991)..(991): n is a, c, g, or t
  misc_feature (994)..(1018): n is a, c, g, or t
  misc_feature (1021)..(1029): n is a, c, g, or t
  misc_feature (1041)..(1041): n is a, c, g, or t
  misc_feature (1043)..(1043): n is a, c, g, or t
agtcaatgcacctaaacgtgggcacagaccgtcggctctatgtggttgccaaaaacattactcaaaacacgaaaatccccgtccattttattgacattacgactctttcggaatacagaaaagatgcacacactgcaattcacactattcgacaaggtaaaatactaacccctgaacaaaaggctgacccggctatatatgctgattgtatccattggtgccttcccgggttaccggacacatggaacgagtttctttatacacgtatatcatatctcgctcatgacacgtacacatagatcgcattgttttctctttaaaattggaagtttcttgaaattttctctccattatttgatcgatgtagcttcgtatagggtatggtttttaatttctttggttgatttaatgtcaaatttcatcactcctaagccaatgcacaaatttgtagattaatgcatatgttggaaactttgaatatggaaacaaggtttcctacctttcccttttgctaatttttatcaaatctttgcttttttctctttaaattactcaaaccacccatatcaaaaacccnncgggcttctccgtctcctatggagcgtcgatnnnnnagnntnnnnctantnnnnnnannnnnngntcnnngnnnnnnnnnntcnnnnnnnnnnnngtgnnncnannnnnnnnnnnantnnnttannnnnnnanncnnnnnnnannnntnnnnnntnnnnnnnnnnnnnnnnannnnnnnnnnnnnncccancnnnnnnnnnnnnnnnnnnnnnnnnnnnnnnnnnnnncnnnnnntnnnnnnnnnnnnnnnnnnnnnnnnnnnnntnnnnnnnnnttnnnnnnnnatacncnnnatnnnnnnnnnnnnnnannnnnntnnnnntnnnnnnnnnnnnnnaaaannnttannnnnnnnnnnnnnnatannnannnnnnaannanntaataatntnnnnnnnannnncnnnnnnanacnnnnnnnnnnnnnnnnnnnnnnnnnttnnnnnnnnnatattcaaccantnctt

SEQ ID NO: 4005 - DNA, 602 bp, Gossypium hirsutum
tcgagttgttttttgcctgaacggattttgtccttgatagaggcttcaacttcgaatcggaaagatcccatgttccagattccaaatcgcttgatgctgcatcgcttgtattcacggaactgttctcgtccagcatccttgaaactgcctggagaagcaacgagtgcaaatttcaaaagattagttgcttggttctgaaaatttgtactgctaattgttcgtaaaataatatcaacctcaattctgaacgttaatgttgccttctcggaagagagagattcaacctgcgggaaaagaaaaaacaacggagtgaatgaatgagactttattgctatttgatccgacaaggagcacgagaaatgatgtttaatatttgatattgatgttcttcaattaacttattgcagactgtgtttgattattccctggaggtgggggccggctactggtttgaactggtccttcttttacccctggtaaaaaaagaaacaagttaaactccccggggcatggaccccggaaaagggaaaacccaatcccaccaaaccttaaaaagaagttcacttaagcttggttaaaaccctcctaatccttccgttcag

SEQ ID NO: 4006 - DNA, 611 bp, Gossypium hirsutum
catgaccttcaccatggtgagatgacagttagggagacactggatttctcaggacggtgcttgggggttggaactcgatatgaactcttggcagagttgtcaaggagggagaaacaagcaggcatcaaaccagatcctgaaattgatgcattcatgaaagctactgcaatggttggccaaaagactagtcttggaactgattatgtgctcaaggtttggtcattgttgcctccatatctctttctggttttattctttagatttcctgttcagcagtagtctcatttctcacgcttggctttttaactgtgatgtggttatagattcttggactggatatctgttctgatatcatggtgggtgatgatatgagaaggggcatatctggtggacagaagaaacgtgtaactacaggtaaactagttatagaaaagaagtgaacagacttggaaccggggcttaaccctagttggttcatgtagccatccttaaagggaggcattcactatgtctgagattcaagtctcagcatttgcaacctcctccagtaaagcaattttaagtacaccatgacatcaaccatgttttgacttcgtgtttcctcatcattt

SEQ ID NO: 4007 - DNA, 1422 bp, Gossypium hirsutum
  misc_feature (364)..(364): n is a, c, g, or t
  misc_feature (370)..(370): n is a, c, g, or t
  misc_feature (379)..(380): n is a, c, g, or t
  misc_feature (400)..(402): n is a, c, g, or t
  misc_feature (405)..(406): n is a, c, g, or t
  misc_feature (418)..(418): n is a, c, g, or t
  misc_feature (420)..(423): n is a, c, g, or t
  misc_feature (461)..(462): n is a, c, g, or t
  misc_feature (469)..(470): n is a, c, g, or t
  misc_feature (472)..(474): n is a, c, g, or t
  misc_feature (478)..(479): n is a, c, g, or t
  misc_feature (500)..(504): n is a, c, g, or t
  misc_feature (508)..(521): n is a, c, g, or t
  misc_feature (523)..(523): n is a, c, g, or t
  misc_feature (526)..(531): n is a, c, g, or t
  misc_feature (533)..(536): n is a, c, g, or t
  misc_feature (540)..(544): n is a, c, g, or t
  misc_feature (558)..(560): n is a, c, g, or t
  misc_feature (574)..(575): n is a, c, g, or t
  misc_feature (580)..(598): n is a, c, g, or t
  misc_feature (602)..(604): n is a, c, g, or t
  misc_feature (606)..(614): n is a, c, g, or t
  misc_feature (617)..(619): n is a, c, g, or t
  misc_feature (624)..(627): n is a, c, g, or t
  misc_feature (631)..(643): n is a, c, g, or t
  misc_feature (647)..(647): n is a, c, g, or t
  misc_feature (649)..(649): n is a, c, g, or t
  misc_feature (651)..(661): n is a, c, g, or t
  misc_feature (664)..(664): n is a, c, g, or t
  misc_feature (667)..(688): n is a, c, g, or t
  misc_feature (690)..(690): n is a, c, g, or t
  misc_feature (693)..(693): n is a, c, g, or t
  misc_feature (697)..(700): n is a, c, g, or t
  misc_feature (704)..(705): n is a, c, g, or t
  misc_feature (707)..(709): n is a, c, g, or t
  misc_feature (713)..(718): n is a, c, g, or t
  misc_feature (720)..(732): n is a, c, g, or t
  misc_feature (734)..(747): n is a, c, g, or t
  misc_feature (749)..(757): n is a, c, g, or t
  misc_feature (761)..(768): n is a, c, g, or t
  misc_feature (771)..(777): n is a, c, g, or t
  misc_feature (780)..(782): n is a, c, g, or t
  misc_feature (787)..(791): n is a, c, g, or t
  misc_feature (798)..(817): n is a, c, g, or t
  misc_feature (819)..(823): n is a, c, g, or t
  misc_feature (827)..(835): n is a, c, g, or t
  misc_feature (837)..(842): n is a, c, g, or t
  misc_feature (844)..(844): n is a, c, g, or t
  misc_feature (846)..(848): n is a, c, g, or t
  misc_feature (853)..(876): n is a, c, g, or t
  misc_feature (878)..(893): n is a, c, g, or t
  misc_feature (899)..(902): n is a, c, g, or t
  misc_feature (906)..(914): n is a, c, g, or t
  misc_feature (916)..(925): n is a, c, g, or t
  misc_feature (931)..(948): n is a, c, g, or t
  misc_feature (950)..(957): n is a, c, g, or t
  misc_feature (961)..(976): n is a, c, g, or t
  misc_feature (978)..(989): n is a, c, g, or t
  misc_feature (1000)..(1010): n is a, c, g, or t
  misc_feature (1015)..(1023): n is a, c, g, or t
  misc_feature (1025)..(1026): n is a, c, g, or t
  misc_feature (1029)..(1065): n is a, c, g, or t
  misc_feature (1070)..(1098): n is a, c, g, or t
  misc_feature (1100)..(1101): n is a, c, g, or t
  misc_feature (1107)..(1135): n is a, c, g, or t
  misc_feature (1137)..(1155): n is a, c, g, or t
  misc_feature (1161)..(1164): n is a, c, g, or t
  misc_feature (1166)..(1167): n is a, c, g, or t
  misc_feature (1172)..(1179): n is a, c, g, or t
  misc_feature (1181)..(1192): n is a, c, g, or t
  misc_feature (1194)..(1195): n is a, c, g, or t
  misc_feature (1197)..(1201): n is a, c, g, or t
  misc_feature (1203)..(1205): n is a, c, g, or t
  misc_feature (1207)..(1207): n is a, c, g, or t
  misc_feature (1214)..(1225): n is a, c, g, or t
  misc_feature (1227)..(1237): n is a, c, g, or t
  misc_feature (1243)..(1245): n is a, c, g, or t
  misc_feature (1247)..(1251): n is a, c, g, or t
  misc_feature (1254)..(1267): n is a, c, g, or t
  misc_feature (1271)..(1273): n is a, c, g, or t
  misc_feature (1275)..(1288): n is a, c, g, or t
  misc_feature (1296)..(1322): n is a, c, g, or t
  misc_feature (1329)..(1343): n is a, c, g, or t
  misc_feature (1359)..(1370): n is a, c, g, or t
  misc_feature (1373)..(1391): n is a, c, g, or t
  misc_feature (1393)..(1414): n is a, c, g, or t
  misc_feature (1416)..(1417): n is a, c, g, or t
tgttattaacagacaagtctgcttgactggccatgaataccttcaattttcaacccgaccaaccaatgggtggaaacgaaacattaattacaaacaagaaaggggtgagcaggttttgatgaaggcagggggggttggggggaagaccaaagcttaaactcaaagaaagagtggctggttggtgttgaggtattattatttgaaatatagaatcaagagaagtatggaaagaactgtggaggtgaagatgaactggagctttcaggaattgggctaaccgtctcacttgtgagtgggacatcgtgcagattgtaaagcacacaatggcggtaagtggtttttttttttccctttgttttgacgnacttgnaatcggggnnttttccaagaaaacttcgtnnntcnnaaaaaaaaagangnnnnggggtgtattatgttttaggcggaccggagaagagagnngtccggnncnnntccnntaggaaaaaaagatgttgcannnnnagannnnnnnnnnnnnntnggnnnnnncnnnntaannnnngcgatagatgggtnnntcgcaaaaatctgnnagatnnnnnnnnnnnnnnnnnnntacnnnannnnnnnnnaannngggtnnnnaaannnnnnnnnnnnngggngnannnnnnnnnnnggnaannnnnnnnnnnnnnnnnnnnnnanagncagnnnngtcnntnnnaggnnnnnngnnnnnnnnnnnnnannnnnnnnnnnnnncnnnnnnnnntttnnnnnnnnttnnnnnnntcnnnttaannnnntctctcnnnnnnnnnnnnnnnnnnnntnnnnntatnnnnnnnnntnnnnnncntnnnacacnnnnnnnnnnnnnnnnnnnnnnnngnnnnnnnnnnnnnnnnactttnnnncatnnnnnnnnncnnnnnnnnnngtcatnnnnnnnnnnnnnnnnnncnnnnnnnnttannnnnnnnnnnnnnnncnnnnnnnnnnnntataggcgttnnnnnnnnnnncttcnnnnnnnnnannatnnnnnnnnnnnnnnnnnnnnnnnnnnnnnnnnnnnnntactnnnnnnnnnnnnnnnnnnnnnnnnnnnnnannatccannnnnnnnnnnnnnnnnnnnnnnnnnnnntnnnnnnnnnnnnnnnnnnntatatnnnnannttttnnnnnnnnannnnnnnnnnnncnntnnnnncnnncntctcacnnnnnnnnnnnntnnnnnnnnnnntttctnnntnnnnnatnnnnnnnnnnnnnnctcnnngnnnnnnnnnnnnnncttttttnnnnnnnnnnnnnnnnnnnnnnnnnnntttcttnnnnnnnnnnnnnnnttttttcttgctcatnnnnnnnnnnnnttnnnnnnnnnnnnnnnnnnngnnnnnnnnnnnnnnnnnnnnnncnncctct

SEQ ID NO: 4008 - DNA, 612 bp, Gossypium hirsutum
gaggcaggcaatgtaaaactctctggggtgaatgatttgctaaggcctttcttgaggatgtttgcaccatcaactagttgtaatctgaaattgagtaaaagtatctgtaaacaggtattggacggaagaaacgagtgggtgaaggactcacagccgacgatgctatcaagtatatcacttcgctgtgcggtgttcaaagaggacattcatgcaggaattcttgatggcagaaacttagacgtgtcatttgataacttcccatattatttaaggtatggtacaattttgtgcatactatctcttttttattaaaaaaatgtttcaaatataaaccagatttctcttaatctttttttcatcacattcctgcttatgtgagtacaattaagagcatacctaaactctggcttctgcgctatattacaacattcaatgatcaatttggattatttcttaaagtttttggcaatctcatattttactagaaaatattttggcagttgtttctcagtttgtgttaaattctttcattttttgaatccaagtagaagggtttgggaagataattggaagttagtttatcttgcaactgaacttttccaacatgcatag

SEQ ID NO: 4009 - DNA, 621 bp, Gossypium hirsutum
ctgtatgtgggtggaactctttttggaatcattttatgaattaggaaatatataagatcaccatttcttccatctcatgtgcaatataatcttgatctctcatcatattgttaatttgatttgttaatatacaagatttggatattggtctaaatggttacttttgtttttgactgcttttgctccatcctcctgctgtctacttttcctttccccgctacatttttataattttgtttgtttagtattttacttcaggtctgatttggatttcttgctgactatttgttggtactctgatgcagattttggcactagatggtggtacaccatccgctttttcaacaaacgaggttagcttttttcatttattggtttggttgtctttaatgatgctcttgctgaagtatgtgttatgttccatttccactgcttactgcttgttacattttggatggatactctggcatttgaattgttagaagtaacaagttttggttgtccagtaaaaaaagaaattgacaacaaatggaaaggatgtagagctattttaggacagcccttcaaactaacatccagtgtaccatttaaaggacagaatggttatattaacacttcctg

SEQ ID NO: 4010 - DNA, 617 bp, Gossypium hirsutum
caaccggtactcgcaccagtggtagattgcgaaaatcctcatgaatctgataactcttcagatggaacaaaagatttttggatgaatattgatttcgtgaaagtgcttatggatgaaagtcatacacctttcattcccccagatttacacgatgatggtgcgtgggaaaaacttcttttaggcaacacctttctagagaataatgacgatggaaatcaagataaacaaatccccatgaactctggtatggacatggaggtaacagattccgaaacccattctgaaaagtcttgtagttttgaacagttactaaaaaatatggggaaatcccagaacctagagattgaaccacttgtaaatggatcaccattagagaaatctccagacttggaacttctaacagaccaaatgggccatttgacttccaagagtactaaaccgcaccgaactccatagaaaggtactcttggaaaccttttggcagaatgcctatcctatatccaatttatatgcatttatattcttcttttcattacactatatctaaatacatgcagcacgatcttcacaaaatggctgcctagcaatatgtagaacaaccagtgagtaatggagga

SEQ ID NO: 4011 - DNA, 635 bp, Gossypium hirsutum
tctttccttcggcctttttatcttattgtagagaaaaccagcctggacgtttggccttgcctcctgaaatgcttcagttggtaatcttaaaaattttaatgtgaaattaatttgcacaagccgaattagaaaacaaaatgttgcattaatctaattaaaccttgaagttacaaataatgaaaataaataagagcaatatttaataataatctactccagaaaaggttcaatggtggagttgtgatgctcctccatcctcaaggcatgtagcagtagctgcggaagttgtatcagtagtctccttggctgcatcatatgaagcatgtagtgcaatgaaaacataatagagtagcaatagcaatgtccagattccaaatcgcacatatgatgccccatcaactgaagccatgataaaaacattagtggcaaaagaagctgatggtagccaaggcactaatggcactccccacaacttaggtttctttgcttccttcaccatcagatttagcccaagcgtagctatgaaccaaatggggactgtcactgcatacccgatccatccatttttcccaatcgcccaatatacagcagtagcaattgaggatcctatgatcaacatcaagaacaggatcagc

SEQ ID NO: 4012 - DNA, 585 bp, Gossypium hirsutum
tcaaaagtaagattgaaggctatacaaaagcagataaagcaaagactttctgaagctatcatctcttcagaattaatagagaagtatgaagacttgaaggaaaaaaattctgaagtcgaacagtcttctgctggggctgatgaaagtttgcaaaaggaaaccaagtatgaggaacctagactagagatcaatttgggtgcaaacagcagcttcgctcagtgtatgtagctccttgcattttacattatctggttcctttctttgcttttaatttctgatgaacaattgagattcctgacattatttatttggatgctaaaggatatataccatttagaacaaggtttggaataattatagctagttgacactcaaatgacgtttagtatttcttgtctataacaattagggaaagaaatgcgtatctctaaaatttgtctagatactttggcatttttgttgttcattacaactataatcataaatgagcctttttttttttttaaatgggggggcgaaaaaccttccaacctcccctttttttttgatttgtcctattgactttttttctttttaaaaaaatgt

SEQ ID NO: 4013 - DNA, 604 bp, Gossypium hirsutum
acactgtaattccatttttgtatgaaagcatgtttcgcctggaagttcaggttcttaaattctcaatggtcctctgagctatttttcattacaatcttttgcttgtttcaattgtttgaaataatttttttaaatgtgaggacatccacaacttgtttccaaacaattttgaatgaatgtatcgattaatgaatgtacaagtgatctcatttgtaattttgtctgatcttttctttttccataagaaaaaaataaaaatggcatattttattaaatattgttggtatcgggcaaattaaaactaaaaaaataaatttaatagctaaaaaaggctttgctgctctttataggggaaaagtctttgttactggtctatttgggcatgcaaaggcaaatggtaaaatttcaaaaggaaaggcattttgccttaacaatgctaacataccactcagggtataccttgtttccttgagtatttgtatttaaaagtccttgaaggaaatcccttaaaaccttttaaagtcccctaacaaaaatgcaaatttatgaataaaccctttttttttcccaatattgtttgtctcagtgcttttagaaaaggaaa

SEQ ID NO: 4014 - DNA, 629 bp, Gossypium hirsutum
tgcatatttacgtcaaagattattaacctatagattttccttttaggtgccaatgtttgaaaaaatggatgagagactgttagatgcaatgtgtgatcatctcaagccggcgctttacaccgacaagagctacatcgtccgagaaggggatccagtagaagagatgctgtttatcatccgaggaaatctaacaagtacgaccaccaacggtggaagaaccggcttcttcaatgcagttcatctcaaggctggtgatttttgtggagatcagcttcttacatgggccttggatctccagtcctcatccaacctacctatctcaactagaaccgtgcaggccttaactgaagttgaagcctttgctttaatggctgatgacttgaagttcgttgcctcccagttccgtcgtcttcacagcaagcagttccagcacactttcaagtaagtctagaagaaatacacttcgcttccataattaccaattcgaatacttgcctcaagtaaactttattttcaggttctactcggtgcaatggcagacttgggcagcatcttttatacaagcggcatggtgccggtacttcaagaggaagcttatgaaaccccttcgtgaagcagaggataagctg

SEQ ID NO: 4015 - DNA, 635 bp, Gossypium hirsutum
ctatctccgctataattatagaactttgcaaaccttttcaatagagaggatcaacacctttcaatattttgacctttctcttcaaatgtttgagttgcttatctgttgcagtacttgacataaaatatattctccaagaagtcgaacatcacttgtgtaacaatttttttctatcttctcattagtcatgtataatagctatcaatgggaccaaaaagaaaaggaatttggaatggtgttaagcaggctttattgattcaaataactgatttaagtataatttctgtacttgagaaatggtattgactgtggaaccctggctgtgcttaggtattttcatgcaagtccagaattactggctagaaagggcattgaggtggaattgggtttaaaggttagcaagaaaaaacctaaagggaagtatagcaagagggaaaggagcccgcctgttgtagctccatatgttcctaaactgaagagaacaaacaaatccttgcaagagagaactgttgagatatttgacggtatgacccttgttgagctcgcaaggcgaactggtgagggcataggtgttcttcaggatattctcataaatgttggggaaagtattgattctgaatttcaccctctaagca

SEQ ID NO: 4016 - DNA, 684 bp, Gossypium hirsutum
  misc_feature (657)..(663): n is a, c, g, or t
  misc_feature (665)..(669): n is a, c, g, or t
  misc_feature (671)..(673): n is a, c, g, or t
  misc_feature (675)..(680): n is a, c, g, or t
gagtgtccaccgggctgaacaactgtagcaatatatgaaacatggtgctcatatgcagttcagggatcacagacaaagccccaaagaccttccaccgacaccactactacgcccttgttttcgccgacgaccacatgcataccggttagtcaaaggcatcgagtgaatgcataaagcataaacaaaagatacaatatttcgattttacaacatggaacatccacagcttcaagctgtctggatatttcccatatttgaatggaccttttgtcagtgatgtcaacaaatgtgcctcaatggcatctgtacagaacttgttccttttacctgaaaaagcatatcccattttcctattgctattacagaacatgcacaatcaataattcaacataattcacatactacatcaagggttcaaataaaaatcaaaccttggatcgaagttcagaatcaaaattgtagttttcaagggcagcctggaaatacttgaagaatgaaagaaataccttccgtggaagcagtacaatggcctccataggcatccccgaacatctgcttgaattcaagcctgtttggtctggtctggggcattggagacagcaacagcagaagcagtgggagaagcaaatccaaggtccaaacaaagtgagctaccannnnnnngnnnnnannnannnnnnaaaa

SEQ ID NO: 4017 - DNA, 625 bp, Gossypium hirsutum
  misc_feature (620)..(620): n is a, c, g, or t
ccaatgcacccttctcttataatttaaatccttggctggcacatatgagtatgttctttccaggcaatcaagctaataataacctttgaattgccagtgttttttctcttttgcaacaagaaaaatcaacaagctgcattttactgtaacatagcatgcagccaaatgactaatttacatgcccattcagaataaaagccagatttatttcctcagatgaagcatattttagaagcatgtttcaaaactgagtagattcattctctttagaacaagcaggtatttggcctagcattttaaagagcctctctaatagaagaacctgaagtaaggagatttgaactagtgaacttagacagtaagctcctgacaaccttaacaattacaaattgaaccataacttgcagtaaactttaaatagcagatagatgctaaaagctaaatttcaacgaagcttccattttcccctttccaggattattaaacagattcctacatcctaatgattctaactcaagtttgccaaatactatttccactttcctctatagaacttctagaacagctgtactcatacagcacttctcttaaaccttcaactgggccaaacagactacaanactgc

SEQ ID NO: 4018 - DNA, 416 bp, Gossypium hirsutum
tcacatagagaataagaagaaaaatgctatccaaagatatcatgtctcaagactttgccttaatttcatggaactccttcaggaatatcctataaaatccaagtatctaacaacatttacaagggaaactctgtaaatatatatactatatgataagaaaatatcaattaacagtttataacacattaaattgattattagctaaaatactaaagatcccacactttaatttgtcaatatcatccttttggtacccaattaagccttggaagtatatttttgtttaatgaagcttttaccatgcacaacaacctctaaaatctggtagagaactttgagggtttaattaaaataaaagaattttagaaggtttaatttgatactctaaaagaatatgggcttctcaaggaaaaaaa

SEQ ID NO: 4019 - DNA, 520 bp, Gossypium hirsutum
  misc_feature (376)..(391): n is a, c, g, or t
  misc_feature (413)..(415): n is a, c, g, or t
  misc_feature (422)..(425): n is a, c, g, or t
  misc_feature (430)..(433): n is a, c, g, or t
  misc_feature (435)..(435): n is a, c, g, or t
  misc_feature (438)..(438): n is a, c, g, or t
  misc_feature (440)..(442): n is a, c, g, or t
  misc_feature (448)..(449): n is a, c, g, or t
  misc_feature (455)..(460): n is a, c, g, or t
  misc_feature (465)..(473): n is a, c, g, or t
  misc_feature (498)..(501): n is a, c, g, or t
ggaagtcttctactccacccccctttcctatgccatggtcaacctccgtcctgttgttcctggtaattacttcttctaattagctgccaaccaccacgctgtcctgcaatcatttgtcaatcttcgttgatttccccttttatttttcatttgcaggtcatatcctttttcactcgggcatttaaatccaatcattttgtgttatatgtatatgattttggcctaccaataggaagagtagttttctttccaatcattagaaattgtcttctgatatgcctgcttttatataaactactaatccgcaggacactcatttagtcttgatattaaacatgctgtacctcccatattgagcactcaaggagaagattcnnnnnnnnnnnnnnnnaataaaaataatcctatttacnnnatctacnnnngcaannnngnccnannntataanntatttnnnnnnctatnnnnnnnnncctgcaatgaactgacgaaagaaannnnaacgatctagaataattag

SEQ ID NO: 4020 - DNA, 579 bp, Gossypium hirsutum
  misc_feature (573)..(575): n is a, c, g, or t
tgcttcatttgaggttagaatctcagggaaggcaggtcttttatgagcgtcagcacaatttagttgcatcattgttggtgccaaaccatttttttctcaaccaacctattcttcctctctgttttaaggtactattcattctctttctctttttcgtaattgtcaatttcaaatcctattcttaggatttggataaaaaaaaaagacagaaacaggacgaatatgattctatttatttttatacaaccataactattaccattcccaaaaaagaaaaacagctacctatggagctaatctatcaccaagatttaggaacaaattttaagtaacacgaactagataaggctgaggatgttttaccgagtgccaagattagagtgtattgaatttataaaagatggaaatgaaaaagaagattaataaaagccattgaatttgaccgaaatttacgaagaagaaagagctgaaaaaaattccattccaccaaaaatgtagttgatgaaagcaaaagcatattggattacttattagtttgcaggtgatgatgccccaaaagcatgatgctagccnnntaaa

SEQ ID NO: 4021 - DNA, 661 bp, Gossypium hirsutum
ctgctacctgctgccaaaggtcgcactgtggcaaatcccttttgctggaatgcttatggaactgtcctcaaacaaactattccaccaatttattgcttgatggaggaaactaatgccacaattgataacacactattatgtggatagttgttgaatcacatggccatgtaaaatatataagattaatcagctgtataagtacctaaaggaatagatcaagaaagaagaaaatgatggattctcaagttgtatgaaattcaatccagtgctaggaaaaaagccttatcttattatggcatttcataccagaaattcctttctttcttgattagtaaaaaatctgaaccggagatgccatagagctaagtggatctcagctttcagttcatacggcaggacgttgacaccagaggtaattcaatgatgtaaatttgcagcaacaaactcaagtaactggacaaccaaagggcaactaacttactgattatgcgcaatggttcacccataccaaaacacaatattaacttgaagatatcccataacccatcccttaattacattatctgttagaagtataatattaacttgaatcagaaaataaccccaccaacatagcatatacaagataataagccctccagcctttgttatttacagcatg

SEQ ID NO: 4022 - DNA, 615 bp, Gossypium hirsutum
tgaaattgaaaaccataacatctggagccggagactgtaattcaggtcttcagcaagcaacatatgcaattctggttaaatggtaaatagcgtgaattcctctgataattgcttgggatagcacattagactatacaacttcgattagtttttgcaaaataatcaaacttcaatttactatacaaaaaattcttttgcaaatatatataatagtttgattatttttttatttacataaaaaaactaattgcttaaggaaagaattaaagtttattttttcaattcaaaattaatttgaaaaaataaaaaaaattaataaaagaagtctaatctcaattgaaaggaatggaactcagcccgactgttacatcagctgatttaccaatgaaattgtgaaatttatatataatagggtccaattggattgaacggattttattgtcgttggattcttgtatattcgtcgttctggacagatcagacctgtaaaaataacctcttttctttttgcccttttaacttattttggggttcatttttccctttaaaaataaaagataatctcttcctttttcctggttacttttttcgttggttgcaaagaagttattgcat

SEQ ID NO: 4023 - DNA, 624 bp, Gossypium hirsutum
  misc_feature (601)..(607): n is a, c, g, or t
  misc_feature (609)..(613): n is a, c, g, or t
  misc_feature (615)..(618): n is a, c, g, or t
actaaaagcaaagaaacagattaactgcttacatcatctgcacataaatctagatttccatgactgttagatccatttccagaaacctctttcccatcaattgcgatccacttggagttgctagtctgaggtccatccagaccatttccaggactccttgaaaacattaaatcagcaactgcttccccgggatccagggaatcatttgtcgcactgccaccttctgatatattatccagctcagcaagagcagtctggtgtttctcaatttccaatttcagaacaccttttacaggtttatgtacttttcgtttaggatcctatcatagcagaagaaatggcaaaaagaaacagaattagaacattatgtgcacagcagatacataataaactaaagagaagaccaaatggcagatacagaataacattatatctggataaaaactttgtcagaatacaaggattaatcaattaatgaacaggttattgatgataagaatatgattgtagaaacattcagtatacaattaatagctcatactccaaaaaggccctaaaattgaagcttgcacaactgcctcaggaaaattagagaaacagnnnnnnngnnnnnannnngggggg

SEQ ID NO: 4024 - DNA, 268 bp, Gossypium hirsutum
gatgcgccctttgctgcttcgatcttcacctcaagtgtgttttagcatcttgtgaggaagcatcaacgacacccacagctcaatctttgaaaacatcaactcaaccaccatcatcagccccgcctgcttttggtgcttggtatggttatggttatcgctatggggcatttccaccacctccaaattttacttatgcttacggagtccctcttgcaccgccctatttcagtccttaggctaatggccatggaatcccatctagctcgtt

SEQ ID NO: 4025 - DNA, 676 bp, Gossypium hirsutum
  misc_feature (643)..(643): n is a, c, g, or t
  misc_feature (645)..(647): n is a, c, g, or t
  misc_feature (654)..(654): n is a, c, g, or t
  misc_feature (656)..(661): n is a, c, g, or t
  misc_feature (664)..(670): n is a, c, g, or t
taaagggagcatgatttatggttgcaattgaagcttggaggtttctttggtgttgactttggttaaggtttgatagatttgagagactgatctagagctggctgtaaatctgaaaatgctagaaacaggtataggaggaagaagataaaatgacagttcacaactacagttaacaattgcttcatacaatcaaaaggtaatataagctgatcatggatcaataacatccttgaatgagttgggacactggaaatttttatctcttaataagaagggaaccctagaagaaaccctaagggaacgtaaagttgatgcttatttctcctaaatcaaatcctaaacttttcttgttctatcaggacttttcttgaaccattttttatctgaacccgcgtatgcactttctcagagtttgacagtttgttatttgttgtagatattcacaaattttctctcaagtgcaatgattcatgcgactcgaccttttgtcgtgaatgaatggattcaaacaaagatagagggatatgaagtttctggtactgttgaggtttgtatttgagccctgtctctgttttagagtaaaaggcgaagctgtgtttgtattagacttcaaatgggttctaatgatgtggttccctaagtnannnggaacancnnnnnnagnnnnnnncctttg

SEQ ID NO: 4026 - DNA, 597 bp, Gossypium hirsutum
ctcgtgcattctacgcggtcccccgtgcgtcgagggccaaattgccgacgttttcaagcaaattataaattaaagaaagttaaaagaagggaaaagaaaagattaaaaaaataatgattgccgtgtcgaaaaggtcgtaaagaggcaaaattttatagatctagaaaaatacaaaagaaaaataaataaccaacatataagaaaaaataaaaaagaaaaaggacatgatagagggagaaagagagacggctctctaatcacaatcttcgacggagaaaatgagcgaattttagagagagaaagtcaataatcttctcctttgctgcttaaaagttcacagctttcccttcttgaggtaaacatactcttttatttatttattttatggattagtgtgagattttagtaaagtttatagccttcaatctgtttatggttttcagttccgattcgaatttatatttcgatttggttataggcatggtgatgattctatttgtacagaagtatagtttttttttttagggcctgatcagggctggaaaaaatattttgagttctttgttttttttttaaaaataaaatggcctactcccc

SEQ ID NO: 4027 - DNA, 625 bp, Gossypium hirsutum
  misc_feature (617)..(618): n is a, c, g, or t
atgcagcagttgcactaatgcagcaccgaaatgcgcagttgcaacgaagggatcccagtcatcctgctcttggtggttctgtaaatacgattaactctgaaggaatgattggacagccatcagctagtgtgttggccatgaaaatgtatgaagaacgtgtgaaacaccctcattctgcggattcagagacatcatcagcactgattgatgccaatcgaatggctcttctgaaaacgcagaccaataatcaagtgtatgatcaattaatccttatgtgcactttgtttcctagttttcttaatgctctaaaggactgagtctctcattctttttcctccttattttgtttactcagccagcttttgcaaggtagtcctggaaatatgtcagctgctttgcaacaaatccagtcacgaacgccattgacaaccgtattgctcaaataatctctgctttgcaatttaatgttatctgtcttatcttttacttcccttgcttctttttttctgatttcttcctctatattgaattgcacaatttatgtatttctacttctaggatatcaaaactgaagttagtttgggtggaaacccgaaaagtttacctatggatccctnnatccatc

SEQ ID NO: 4028 - DNA, 586 bp, Gossypium hirsutum
acaacatccctctataatctggtagatatttcatctgtcattgttaaaacctgggaccttttgtgtctttgaaaaccacgatggtaccttccaaatgagctgagccttcctgctaagaataatctggaaaatgtgtgtgaaaggaaaagaagggtatagtgaagagaagaaaaacatgagagagagaaatgtaaaacccattctggtattgtatggtagaatattctcaagagtgtctgatatcgttctttctttctgatgtatttagacgtagtgcatgcttactaaaataaccaagactaaactaaatactgtaactactaaattattcaaacttcagctgactcgggctgcataagccacactcttaattgggcccgtaacaagtttgtgttcgttgctaccaaagcctacctacttatgccagctcataaggccattgggaatgagatgacaagctttgcgttgtttggaagtgaaaatagtatgtttctacatgatttagaacttaatagcatggttatttactgctaaattatccgaaacaatttctgtaagattttgagctgttcacacgtcaaaaaga

SEQ ID NO: 4029 - DNA, 612 bp, Gossypium hirsutum
tgcttcttgattgcatctttcatgcttgaaacatcttgaagggaaaagcaatgattaatgatccagtccaaagcagaagtcaattgttgggtaaatgtgttgaggtctgtctttcctttcaacaggtcataacaagcttgcacaaattgctgtaaaacagcactaagttcagaagttttccactggaaaacacgaaccatgtagtccgatggtgtttcagagtgcttgtatgacaaggaattcctctctttgaataaggactccaggatattattatctgttgatgatatgctgatcccttcaataagctcaattatcctgcaaattgatttactcaaatcaggatgaaagcttgaatcactcttcttgtctgagcaaatgttaacatcagcatccccattagatgatgaatccatctttgaagaaccatttgagggtttccatgcgatgtagcccctaatacaggagggattgaagccattgggatggtctgaaccctccctttcatcaaacatttcaccagtgtttggatagctcatgcaggccaaagattttctaatatcctccagtatttcatggggatttctttgagttgcacggttttgctccaag

SEQ ID NO: 4030 - DNA, 642 bp, Gossypium hirsutum
cgcttccgaggaggcaggaggacatccgcatccaagtgattgatgtcacaaatgttagcctccattaatatcccttctccgatttattaaaatctgaaacaccaaagcacaagtaatttgtctacatagatagtctagccgctcgaatcacatccacgttaaaacatcaataatcatagattcccgatgttaaattgtaaacaaaacccaaaacaaaatctgaattctcatcacagtaatagtaacagcaaaaacccatcaaatttggaaaaagaagatgagcagatttggaaagcagcataaattcaagcggttctaatagataaatcggaactgaaagacgtttcacgtgttgtaaatgacataaacaacgtaaatttgaaaaccctaccggcatattcggttacacaagagcttcccgtaaaaccaaaagaataataaagacagaaagtcaacaaaaagatcatcatgcaatggaaatgaatagccaagttaaagattatatcggaacaggtaacatgaaagaaagaaacaaaattaaaacgtaaaataggttgattgatagaagaaaaatggaaaattacaggaaagcaaacgcaacgtgaagcgaaaatgcgaatcaacaagctctgatcgaatgag

SEQ ID NO: 4031 - DNA, 634 bp, Gossypium hirsutum
ttttttattttctttggagtatttgaattttatatatttagttcagtatttaaaatattaatacaaaatgcaaacacaattcaaactacaatatacatatgacaagattcatagccaaatattcaagaaccggtaatgtcaagcaaagacgaagcaagttgataaatcaagatgataaatcattttgatgtcatggccttgttatattaaaattatatttctaaatatatatatatatagtcatgcgtccaggtcttaactttagtttaatggttggttatgccctgtgtaattaaatagatgcgaacaagaaaaaatccttccagtgggggcaaaagacgatctaaagatcaatatagccaaaacaagcaagttgaagaatgtaggatatttcaaaatttcccatccaatgtccaatccgattatattatccattaaataaagaaaatgagaaaacagggtttcatttttttgaatagtttatgttgaggagacacggtcagtacgttgaaagctacatggatagaagaagaagacatctggtgaatgaaagctctgggagagaagctaaagccactatcatagcaacaatccaacggctgacaaatgacgggagtgctgtgaaaggcttatc

SEQ ID NO: 4032 - DNA, 573 bp, Gossypium hirsutum
agcatttatatatacttttctttttcttcataattttctaattttctttttatattatatgaaattttttcccctatcgggataactttgtgattgcaaaaatgcctaacatcaggctaaccagactttattgttcctcgtatttgaaccaaatactagaagtcatatgtgtcagctcccccatccatagtatctaactgcattctagtttgctgattatgctctagtgcagttggcaccattgccattgtagcaattaggaggatgtggggtcaagtatgcttaaggtattatgggtagaagtaggcattgtatcaaaaacagcattctagtttgatgggtaacatgacttatggctggcctaaatgtctgaaaactttattggttagtctttgtaatcaattgactagtttgtacttcttaaatgtcaccagaatatatgagtccttttatcttacatattttcttctctcttaaatagagtcacgtttttattctttcttatgctcagggctcctattatgtcggaaaatgaggaatgttagatctgaaagagcttcatctgagatctgg

SEQ ID NO: 4033 - DNA, 604 bp, Gossypium hirsutum
ccccacaaagggagagttacaatttcttttgaagcaaaaactcacacattactctggcaaaaatacttctcaaacccttgctaatacacaaggacccgtcaagccacagcaatccatttagaacaaagatggtcaaaagcaggattctaggacttgtatcttagcttataaactaaatggaaattgggatctgaattaggcggtggatttggcaacacagtatctttcatttctgttttccaatagaaaagcatgtgggggagagagagaattaaagcaagcattgccagatgaaagatgtataaagagtggaaaaataaagcctaacaagaaagaagaatttaagtaaatgccagttgaaagagaagttcaaatacttgtgactcttagcaatttttaaaacaaaacaaacaataagaaattatccaagaaaaaacaaccaaacaatcgacacaataatcagcaaatagcagtgcctatgagctgaacaagtattaaattaaaagcaataagaagtttagaacttacaaatagacaagagaagcaaagaacacaaggacagccaacctctgtcttgatccatcttggtgaacaaaaatataca

SEQ ID NO: 4034 - DNA, 585 bp, Gossypium hirsutum
  misc_feature (521)..(521): n is a, c, g, or t
tgtgatttagtcctagcaactttaaagatataagctaatacaatggtgaaattgcatcttagctttcataaaaatatataacttaattttttccctctagaaatttttttttatctttgtcacccatgtaaaatgatcttatcaataataatgttaatggtttgtgaaaattaaatcaaatcaatatcttatgtgtaaaattacacaaaattaaattcgatcacaagattgtacattagaccaaagttaatgtgtagttttgaactttatcctgatttacaatctgtagaaaggcataatgagcaatttagttcttaatgtttacatctttttccaatttggtcattattcattttttagctaaatttgacccataaacttttaattgttgttttttttaatgcaaatactgattaaaacgttaaatttttaaacatggtagctcacatagcaatccatgtgtaattcaagcttcttctttttttttttaaattttaaaaattttttaaaaatttttttanggaatataaaaacaaaaaattttctttccaaaaaaaataaaattggaccacccccccttttttt

SEQ ID NO: 4035 - DNA, 621 bp, Gossypium hirsutum
acaatttgcagtaaaagagccctgttgttttcccactttttgtcactgttttgctgccattttactattatgtttgctattgttttgttgttaatgtttggatattatataacacttgttttgttgttatctctctactattttagtggcatttgcttgttaagttgtacttatcttagtgttattattcaagtataaagatttttttaatctattttcaatttgttgggaaacagttattttaatatttttagtgtatttggtgtattatatattttttaaatttttatatgaaaaaataaaattttaaaaaattaatatgggcggattgggtcgggcctgagttttagtatttttattcaagcttgggcaaaattttatgcccatttttttggcccgggcctatcaattgggcctaaaactttgttagggtccggcccagcccatagacaactctactccagacatatatgattatagtagatgtaaaccatgtgtaagataagaggaagatacataagataagaggaaaatacaaaggaaaataagatcggttttcttataaatgtgacttatatatttactgcaaactgatacattacacttcactcctttctctct

SEQ ID NO: 4036 - DNA, 669 bp, Gossypium hirsutum
atttctgtaattctggcgagggtctcgttaaaattttgctaaaaccgttttcattgaagttgcaatattttccatgggaaattagagtttgttttcttgagtaggaacagggaaatttgctgaatgcagactgatgctttattctcttacatgcatgcaccagatgaaaagttgtgaattttgttattttttttcttgatataatatgtcagttatggtttccatcaattctaggaataccaatgatgtctatcgagtgtgtgtgcgtgtaaatggaaaataccaatgtcacaacacaaaatcttaaaatagcattgagtcattgacaaccctgtaacctcattttcttatggttttatgaaaatctcatgcgacagccagagcttatatgcaaagagcttgagttcttcaagcacagccctcacatgctggccaacaacaatcttctgcgactaaagttgtcctttaatatcctcaacggttagtagcttataatattgttggtagcttataatattttattagattaaagtctaataatttataattattgattaaataattgtattgtaaagatgtaacatttctacctaaatttatcttataaggatatataactttatataaagttgtcttataaaacaacgcactcatgtgaaagggtgtctc

SEQ ID NO: 4037 - DNA, 655 bp, Gossypium hirsutum
ttagttcgtttttaagtatgaaaaaactgccccatgagatttttatgttctttttcctttcttttaggggtaaagctaaattttttttaagggatcgaaattaaattataatttttacgataataaaaataaaattttactattttaatagtttatatctttataattttgtaaggattaaatcaaatttttattatttttagggagttaaatgtataattttatttttattaatttaaaattttaaaatacttaaataaaaaattttctattttagtgagaaagctctcttgctttctttttctttaattttttttatttataagggaaaaaaaagcaggaaaaactagattgagcagaagaaactaaactatttagctacacaaaactaaaaagtgggacaaagttagtggtaataataccgttggaaaaagaaaaattgaagattaaggctgctttctgttattatttaatggagtaggcggatttttatgaggtaactattgagttgaaagtgcgcattatagcatttttttttaatcttaaatttaaaaatttttaaattcggatagttggattgacacatgaataaattttagatgaatatgatgattttagaaggttgtatttttcaattatttcgagaatcttgggc

SEQ ID NO: 4038 - DNA, 639 bp, Gossypium hirsutum
ttttcttaataaatccgtacatctatgtttttcataggtgactgtggaactgctacttgaacctccttataggcttagaataagtaaaaggtttcactcttagaaattgaagagcttgtaattttaagcatacagtggacggttttactttgtaatgggaaaggggcattctaatctttgtttggtgcttttagttaatgataaatgcttctctgtctgtgtctaggaagatttccataaagctggaagtttaagtaattaatgaaggttttattctatatgcatccttaatattttgatatacaagtattctgagctatactatgggaggtagccttctcccatccctcctatcctacccctcccaagatctgaatctaagacctccaagatgaattctcaaggttctaagttctaactgctaggatgtcctcttgggactgtctcattctttatgatttatatccatgatgttctcattttgtgcttttctttcatgaatttttctttgggtcatggaattgagggtaaaaagatgcctttctggacatttattaaataatttgtgtttattaccatgtaactttataaaaccatcataatgattattatttccccccttctccactgtaggtagag

SEQ ID NO: 4039 - DNA, 262 bp, Gossypium hirsutum
caggaacttctctacctgtatggtttcgttgttgataataatccagatgactatctcatggtatgtttatgccaaatttgcagtttgtcaaattcctatattttcttcaaaaggaatcatattattatttaggtacaacttagtcggaagaaattcatgaattggggctttcaactatatctcacttcttttatcatgctgttctgagcttattcgctaacatttgtcaactgtacagattcattatcccggagaggcaatc

SEQ ID NO: 4040 - DNA, 832 bp, Gossypium hirsutum
  misc_feature (608)..(612): n is a, c, g, or t
  misc_feature (620)..(633): n is a, c, g, or t
  misc_feature (635)..(664): n is a, c, g, or t
  misc_feature (666)..(685): n is a, c, g, or t
  misc_feature (687)..(692): n is a, c, g, or t
  misc_feature (694)..(697): n is a, c, g, or t
  misc_feature (701)..(715): n is a, c, g, or t
  misc_feature (718)..(729): n is a, c, g, or t
  misc_feature (731)..(736): n is a, c, g, or t
  misc_feature (738)..(748): n is a, c, g, or t
  misc_feature (750)..(759): n is a, c, g, or t
  misc_feature (763)..(785): n is a, c, g, or t
  misc_feature (787)..(813): n is a, c, g, or t
  misc_feature (816)..(829): n is a, c, g, or t
tcttgctgtgcttggtattcaatagacaagataatgtttgatatataataactatattttatagaattaggttagttctgggaaattgggaccctcatagtcatgatcaagcattcgataacgttgagctgtcagcaaaatttgtggctacggctctttctctttatccgatggtttctattgcttcactaggcgtaaatgcttgacctagaggctttaggtaagaaccctaaggttcatgtggatcgggtccatttgcttcaatatctattccacttaagaccgactttcgtacgatttctttcactttatttcatttcatttattttatttctactgactacttttcttttttttttttttttggtaaaaaattttaagggggaaaaaaaaaaaagggaaaacccccaaaaaaaggaaattttttttttttttctaaaaaaagggggggggtttggggggaaaaaaaaaaaaacgggaaatttttttcgaaaaaatttcaaaatttttccgtttttaaaaaatttcaaatccgaaacaaccccaactcaaaaccaaatttttaaaaaaaattttttttttggggggaaattggggggtttaaaaannnnnaaaaaaannnnnnnnnnnnnngnnnnnnnnnnnnnnnnnnnnnnnnnnnnnngnnnnnnnnnnnnnnnnnnnntnnnnnncnnnntttnnnnnnnnnnnnnnngtnnnnnnnnnnnncnnnnnntnnnnnnnnnnntnnnnnnnnnntcgnnnnnnnnnnnnnnnnnnnnnnntnnnnnnnnnnnnnnnnnnnnnnnnnnnctnnnnnnnnnnnnnnctc

SEQ ID NO: 4041 - DNA, 643 bp, Gossypium hirsutum
catccattcgtagagaataccccaagaaacagatgaggtcttcggggttttttcttttggccaatcaaaagtttttgctcaatatagatgacttgcatgcaactcaaagaaataaaatatatttatggtggaaacacagcaagcacaattatcaactggttgcagaaggaaaatacaaaagaaaacatgaaaggcaaaccactagatttaccaaaaaaagaaaaaaaagcagccaatgcacaaacaaaagacaggccatgaaaaacattaccttgtcctctaaatcactggagatactgtatggcaagccagccacatcttgggcatcatccccttccaagcacaacttaatgttaacctccaaattttgcaaaaattccaagtccttcataaaagcactgtaaagtagattttgaatatcattgaagccctttgtgacttcattcacacaggactgtagcatcattaattcagaatactgttttctttttccttcagagtgaactgtagataactcttcgagccgtgaaagaacttcaagttttgcagcctctgccacctccctatccttcgtgacttctgtaagctcaaccgaaattttggctagatcttcctgaagaccatcgtttctctcttgaacttc

SEQ ID NO: 4042 - DNA, 607 bp, Gossypium hirsutum
ctgtgttacagcagctgcctgaggattgagagctgacatatgtgaggcacttcctgcgcacaggatgccagaaggtactgccctgggcccgagaacagataacatgcatcctcctttgggcatcaagactactactgataatcaacctggatcaactgattctggtttgcgcaacaatctctggattggagatcctcctctttgggttgataagtttaaagtcagcaaattgtcaacattgaatttttttgttgacatgtattacaaagcaaattcagctaagagtttatcttcgatactacaatgcattattgctgaatccctacatcctttaaatgcaagatgtgatgcttggaatgaagctattcacagcttcagtgagcttctcatgaattatattaaactgaagatggtagtagatattgaggagatctatgtttgttttcgtcttctaagaaggtatgtacttgtactttgctaagtttgtccattatggaagatgatagaagttcttgcataattttgttgctctccttggtcctttacgtatatatatacctttattgttttatgtatttttgttgtagatttcataattatcgctcag

SEQ ID NO: 4043 - DNA, 607 bp, Gossypium hirsutum
aatagaaggcttaagtattatatttgctcaatctattttgtgctgctgatttaaggttttgactatctatggatgctagttgagtctgtttgaaattgaatgcaagcaaaatggaaatcgatttcgttttgtttcgtttggggtatgaaatgttaactttgttcattttctgattctttgtttttcacgtgttgtttgattgttttcgggttacagaattctcgcagtaaataattgcaaaagtcggtgtatgttgtgtatatatatatctatattatatggtttcttatttattaagaagccacgttcatggggctgctttgttcccatcgttttcagagctgtaaattccaccgcagcatctgttcatcccgatgaagttttcgcagcagacttcctcgccgatcgcttttttcttgtagtcgtcggttcggttgtgccttgattttggattccgatatttctaatagagtctgtaagtaagaagacttatctttctttgctgtaaatttagtttgaaaatgctaaataatttgagaaaaataaagtgagaaaagaagaaacaatcgaagattttaatgggtttgatgagcagtgactagcaaaa

SEQ ID NO: 4044 - DNA, 648 bp, Gossypium hirsutum
tcggccttgatggatatgcaaagtcaacatgcctaaattcaactgctcctgtaactttttccaaaatttctccttccaaattgtcagaatcaatattggggactcttttcattacttccataatccgttccccagctgcacatgcttcagagaaatacttgaggttggatagactggcccctaatgatctgatcatcaccaaaatccaaaaaatattacgtgtttgaattttttatttctttttatatatatatattatatatatatagcaaatatacatatagattcatgtacacattcaatgtggaaaagtttgaaggaaattacaggccccccatggcaatggcggcagcaacaatgaaaacagtccctcctggagcgtcatgatacataaccatcctactgccataatacgacatgaaagaccaagtggcaaaaacaatcccattgcttccaatcgcaagacctttagccaagccttgtcttaatcccaacttcacggacacttgtaaagctgctgagaattctgcaatggttttactctcaccaacaaaggaataaactgttcttatagaagatattgcctgttctgctatagttccagccttattgtactcctcacttatctttctagctattcctatcacc

SEQ ID NO: 4045 - DNA, 627 bp, Gossypium hirsutum
  misc_feature (459)..(459): n is a, c, g, or t
  misc_feature (473)..(476): n is a, c, g, or t
  misc_feature (488)..(493): n is a, c, g, or t
  misc_feature (495)..(500): n is a, c, g, or t
  misc_feature (503)..(509): n is a, c, g, or t
  misc_feature (511)..(512): n is a, c, g, or t
  misc_feature (515)..(516): n is a, c, g, or t
  misc_feature (518)..(524): n is a, c, g, or t
  misc_feature (526)..(527): n is a, c, g, or t
  misc_feature (529)..(532): n is a, c, g, or t
  misc_feature (538)..(563): n is a, c, g, or t
  misc_feature (565)..(573): n is a, c, g, or t
  misc_feature (579)..(583): n is a, c, g, or t
  misc_feature (590)..(592): n is a, c, g, or t
  misc_feature (609)..(611): n is a, c, g, or t
  misc_feature (613)..(613): n is a, c, g, or t
  misc_feature (615)..(615): n is a, c, g, or t
  misc_feature (617)..(622): n is a, c, g, or t
  misc_feature (624)..(624): n is a, c, g, or t
tgaaactgtacaatttgcacaaaagtgtgccgatatttaaacaaaattacatattcaagatactaaccaagatagcaattagttcttaacaaaattagactcatcttatctggatattaaaaggctaaaaagatctataaagtaagtgtttagggtgaaaaaagttatagatccatattcttttttcttttcgaaaaaattctacaacagtagctcaaacttttttcctataactctttagatcaaagtacatcccccagttccaaggaccatttttatgtgaaactgaaagttaaattccttattaccagctccagtgcaagatattgaagatgcagcatagatatcttagagaaaagcccttaaagcagtgcaagagccaattccccagtgagactgattgctattatacccaacgtctaaaatgcttcagtttatcaattgatccaaccccaaaantaatccaacaatgnnnngaatccccaaannnnnnannnnnntgnnnnnnncnnctnnannnnnnnanntnnnnctatgnnnnnnnnnnnnnnnnnnnnnnnnnntnnnnnnnnnttaaannnnntcatgannnctgtaaatattaatatnnnancnannnnnntnccg

SEQ ID NO: 4046 - DNA, 642 bp, Gossypium hirsutum
gtgaaataagatttgtaagggggaaaaagctactttgctagagagagagagagagagaaagaaccttattaacaaaaatagttcctgccaagcctcttcgtccagcaatgcctagaagcggaggtaatgcacaatcatctccaacaattaccgtctgcaaagagaaggaattgtatgcatatattgattttattctccctcataaaattttggacattcaaagaaatgaaagtgttctttcaagagattatgtctaggatgaaaacatacttctattttataaccttcggaccttgcttgctcagcagccaacccaaaattcaaacgatcaccagtataattctgtccaaatccaagttataccatgaattagagcaaagaaatattagccatagtatgctcgttgcttcatgattaaacatgcttctaacctttacattaacgagtttgttaagggtatttcattttacttacctctttcaatcaccactatctccaccccggttcacctccttatttaattgaggcagggttggtggggttggagataattaaacagagatatcttctaaagcattgaaaagtttaaagcacacatcatgatagcattaaatcccccaaatacaacaacggatgtcatat

SEQ ID NO: 4047 - DNA, 1352 bp, Gossypium hirsutum
  misc_feature (625)..(626): n is a, c, g, or t
  misc_feature (630)..(634): n is a, c, g, or t
  misc_feature (642)..(643): n is a, c, g, or t
  misc_feature (645)..(653): n is a, c, g, or t
  misc_feature (655)..(657): n is a, c, g, or t
  misc_feature (660)..(661): n is a, c, g, or t
  misc_feature (663)..(667): n is a, c, g, or t
  misc_feature (669)..(669): n is a, c, g, or t
  misc_feature (671)..(678): n is a, c, g, or t
  misc_feature (682)..(688): n is a, c, g, or t
  misc_feature (690)..(690): n is a, c, g, or t
  misc_feature (692)..(695): n is a, c, g, or t
  misc_feature (697)..(702): n is a, c, g, or t
  misc_feature (704)..(722): n is a, c, g, or t
  misc_feature (727)..(734): n is a, c, g, or t
  misc_feature (736)..(739): n is a, c, g, or t
  misc_feature (749)..(749): n is a, c, g, or t
  misc_feature (753)..(756): n is a, c, g, or t
  misc_feature (759)..(760): n is a, c, g, or t
  misc_feature (764)..(766): n is a, c, g, or t
  misc_feature (775)..(781): n is a, c, g, or t
  misc_feature (783)..(785): n is a, c, g, or t
  misc_feature (792)..(793): n is a, c, g, or t
  misc_feature (801)..(802): n is a, c, g, or t
  misc_feature (805)..(815): n is a, c, g, or t
  misc_feature (817)..(823): n is a, c, g, or t
  misc_feature (828)..(830): n is a, c, g, or t
  misc_feature (836)..(837): n is a, c, g, or t
  misc_feature (839)..(859): n is a, c, g, or t
  misc_feature (861)..(871): n is a, c, g, or t
  misc_feature (873)..(879): n is a, c, g, or t
  misc_feature (886)..(886): n is a, c, g, or t
  misc_feature (888)..(890): n is a, c, g, or t
  misc_feature (892)..(893): n is a, c, g, or t
  misc_feature (900)..(905): n is a, c, g, or t
  misc_feature (908)..(909): n is a, c, g, or t
  misc_feature (911)..(916): n is a, c, g, or t
  misc_feature (924)..(924): n is a, c, g, or t
  misc_feature (926)..(936): n is a, c, g, or t
  misc_feature (941)..(944): n is a, c, g, or t
  misc_feature (946)..(951): n is a, c, g, or t
  misc_feature (953)..(959): n is a, c, g, or t
  misc_feature (966)..(981): n is a, c, g, or t
  misc_feature (985)..(985): n is a, c, g, or t
  misc_feature (987)..(1004): n is a, c, g, or t
  misc_feature (1006)..(1009): n is a, c, g, or t
  misc_feature (1014)..(1015): n is a, c, g, or t
  misc_feature (1017)..(1017): n is a, c, g, or t
  misc_feature (1021)..(1022): n is a, c, g, or t
  misc_feature (1024)..(1029): n is a, c, g, or t
  misc_feature (1032)..(1036): n is a, c, g, or t
  misc_feature (1038)..(1038): n is a, c, g, or t
  misc_feature (1042)..(1048): n is a, c, g, or t
  misc_feature (1051)..(1053): n is a, c, g, or t
  misc_feature (1057)..(1072): n is a, c, g, or t
  misc_feature (1080)..(1086): n is a, c, g, or t
  misc_feature (1089)..(1096): n is a, c, g, or t
  misc_feature (1098)..(1108): n is a, c, g, or t
  misc_feature (1110)..(1112): n is a, c, g, or t
  misc_feature (1118)..(1127): n is a, c, g, or t
  misc_feature (1132)..(1133): n is a, c, g, or t
  misc_feature (1142)..(1146): n is a, c, g, or t
  misc_feature (1148)..(1148): n is a, c, g, or t
  misc_feature (1152)..(1155): n is a, c, g, or t
  misc_feature (1164)..(1167): n is a, c, g, or t
  misc_feature (1170)..(1175): n is a, c, g, or t
  misc_feature (1185)..(1192): n is a, c, g, or t
  misc_feature (1195)..(1198): n is a, c, g, or t
  misc_feature (1201)..(1206): n is a, c, g, or t
  misc_feature (1210)..(1212): n is a, c, g, or t
  misc_feature (1218)..(1227): n is a, c, g, or t
  misc_feature (1229)..(1231): n is a, c, g, or t
  misc_feature (1234)..(1244): n is a, c, g, or t
  misc_feature (1246)..(1249): n is a, c, g, or t
  misc_feature (1252)..(1254): n is a, c, g, or t
  misc_feature (1256)..(1261): n is a, c, g, or t
  misc_feature (1263)..(1271): n is a, c, g, or t
  misc_feature (1276)..(1283): n is a, c, g, or t
  misc_feature (1285)..(1286): n is a, c, g, or t
  misc_feature (1288)..(1290): n is a, c, g, or t
  misc_feature (1292)..(1300): n is a, c, g, or t
  misc_feature (1304)..(1319): n is a, c, g, or t
  misc_feature (1321)..(1326): n is a, c, g, or t
  misc_feature (1328)..(1331): n is a, c, g, or t
  misc_feature (1335)..(1346): n is a, c, g, or t
ggcatccctaacactaatgacaccttattctatacaaatttcttcatgaatttgctgaagaaacatgatatgtgtgtgtgtgtgtgtgtgtgtatgtgtattagatgcaaaatccatagaacattgacagcacacttgcaacttggcttgcattttttgctccaaaatgttctgtcaaacaggccagcgattagacaagtatcataaaaatagggaatggggggtagggggaggaaaagggattgggtattggctttcatgttattttcaaaaaatcaaatgctccattagggtgaaagtacttgaaaatggaatatagtcatagcactaaaccatggatcaaatcaatggtacaatgagaactatgatattatcagaaggagcaaatacaagcgtgaaaaatgctgcataaaatatcataccttcaataaatctaactcttttatctgtttgttcttttgttcagtgctagaattaagaagtgtacattcatttgcttaatctattcccttgcctcaaatttctctttaaatattgtatgcatttttcttgtatgcatatatgttcccatgttgcagaaattgcaacacttaggagggaaagaagaaaggatggagagtatccnntttnnnnnatccgccnncnnnnnnnnntnnnctnnannnnnanannnnnnnntatnnnnnnntntnnnncnnnnnntnnnnnnnnnnnnnnnnnnnttctnnnnnnnncnnnnttaacttttntgannnncannatannnttacattcnnnnnnntnnnctcacanncctttttnntcnnnnnnnnnnncnnnnnnnccccnnncattcnngnnnnnnnnnnnnnnnnnnnnntnnnnnnnnnnnannnnnnnctctccnannncnntttttcnnnnnnatnnannnnnnattcattnannnnnnnnnnntatcnnnntnnnnnnannnnnnntatccannnnnnnnnnnnnnnnctcncnnnnnnnnnnnnnnnnnncnnnntcctnncnactnntnnnnnnatnnnnncnccannnnnnntcnnncccnnnnnnnnnnnnnnnnactctctnnnnnnnatnnnnnnnnannnnnnnnnnntnnntctctnnnnnnnnnnttttnntttattaannnnntntttnnnncttactttnnnnttnnnnnncctttcttgnnnnnnnnctnnnntannnnnnctcnnnttcccnnnnnnnnnncnnnacnnnnnnnnnnntnnnnccnnnannnnnntnnnnnnnnnaaacnnnnnnnnanncnnntnnnnnnnnncctnnnnnnnnnnnnnnnncnnnnnncnnnntctnnnnnnnnnnnncataaa

SEQ ID NO: 4048 - DNA, 473 bp, Gossypium hirsutum
ccctgctctctatctcttatgcatgcactcatgcttcctgctatgatctaaggaatcattttctttctgttgtattttgttggtttagattttttgaatatcatttcttggataatggctttctttaagttataagagggtggatttgaaccttggttcctaatccttgcaaatcccaaaaaaaaaaaaaatcctgggcccaatggacccccaattcctggttaccccctccccaaaaaaaccggcccaaacccaaagggaattaatttttttcacatcatcttattttcagttgccattttgctttgcctaagattacttctttatcactattatgtttccttaccaatgtttttgcctcttgttttgacagcaaattctgaattttggagagccctttttcttggtgattcatgaaggtgagactttggctgaaataaaagtccgaatacaaaagaagctgcaagttcctg

SEQ ID NO: 4049 - DNA, 626 bp, Gossypium hirsutum
gacttcgcttcgtttgcatctctacttgattctgcttttcatggtgcttgaagtactatcacttatattatatgctacagctaaaagttgaaactatttaactcacttctcttgtttcaaccaaacacgatgttactgtgatgattgtttttgattattatgtcttgggatttgtggagaatcctcgattcatttcagctatgctaatttctaggagttaagaaactgataatttgcatactattagccttgaatgtgttaatgcgagattgattgaaggtcattactgtatgcatatcaatgaataaagttttacttgtaagaatagaaatatacaaactcatgaaaacagaattaaagcactgggttaatgatgtgtgtattgttatgtgcatcgattgtagatcaactgatcaatatgtatatatttctatattggagaactaatatttggttgcaatcatagaaaaggaagctagtggccagctggtgtggtattgggaatatcatacgttgcctgtaatttagaattatattgtttttcattcttgttctcttgaaatggcttctccattcaagctacttatgttcacaacttcatatttttcaggggtaatgccaattcc

SEQ ID NO: 4050 - DNA, 617 bp, Gossypium hirsutum
acttacccagcagtcgatcgctatacaatattaatatgctaattgctttacactttcaaaactgatgatacaagcaattttcaatgtaaatgtcatataggaaatagctccaaggcttatatcatggaatgaagaaaatatatatatttcatgcatgcagatggcatgcagttcaactgcccctcagattcattccatccatgtaaacatcattccttcaacaaagaattgaagaaagaaattgaagttagcaactgatgcttaattaaaaaatcaggataatgttgaagtatttcccagatagacgatctctgtatccttgtcatcattctaagctgtaaacatcaaaataaaaaagagaagtaagacaagtaatatctaatctgtgggaatccaataataaaatttcgaatcttgactaccaccctttgaagttatgtctttgtgccaataatacaaggatcttgatgtcatcttcgacgccactaagttttcccacaatccagaagagatgatggccataatactttcattgatctcatttacaataaagaaaccaattcagcatccaaaatgcttctaccatattctggtaccgcttctgatctagtttgcag

SEQ ID NO: 4051 - DNA, 611 bp, Gossypium hirsutum
aattttgaagctcttcatattccctcacttctggccaacttagtgctatttcagaaattatatgggatctaaagaggccagtccccatgaatcgacttttacaggttctgaattttgcaagaatgctcctattctttcatgaatcaactgtctaacatcttttctaatttaatcgacatacatatttctttttaacttatgtatatatctattgtgcttgagaataattttctttctcaccttcttcatgaaatatacgtcgctatataaaaatatatggggtctctgtgtgtgtacattgtctgcccccttacaccccaacttccttgaaaaaaaaaaatccaaaaaatttaaatcccaaatcaaaacccccgggccaaaaatcttctaagaataagaaaatctgccccaattactaacaaaattttgggaaataacaaaaaaattggaacatgggtttcattggcttcattttatcattggatgaaactatgactcttaaaactgaaagggttgaagggggggaaaattttaaaaaaaggtaaaggtttgactggttcctgataaatataaaaggatatagtttgaacttgcttgtatcttccttgatg

SEQ ID NO: 4052 - DNA, 654 bp, Gossypium hirsutum
gaccttgattactcctagtatacgacttatctacttaatgaagtttaacacccaattgatcaaacagttatggagcaagtgatggttatccttctcagcatggaattattaacgatgctcaggttgtgactctgtcagttcttctatactagattcataaagccactaccttaccaaactagcaatcttaactgtttctttcttttttttcgtttaggctgctctggatcatctctcccagcggactgatattgacacagatagaatagtggtctttggaagatcacttgggggtgctgttggatcagtactcaccaaaaacaatcctgataaggtatttctcttgtaattatttcatttagttttcttccttcctgagagtaaagagattagaatcagaaactacactattgtgatacagtagttcaaactcatgccggaaagatgatcaacatactggtttcatctgttttgcttgttggacaattgcctggttaaacttcagatttgtctgctttcacatgacatgactgtatcaatagaatggcaaaattttattacatttggcacatatacttgtaaaacttgtggtctgactggagatgttgaatcacttgcggcttacacatagatttgtatcaatgttcacgagcc

SEQ ID NO: 4053 - DNA, 649 bp, Gossypium hirsutum
tttccaaaatatttacagttcaagttcatttctttttactccatcaaagcctgtaactgaatcttttctttattctacttgtaacaaggatttcactgagtacacaaattttgaagaatgccttgcgtttattgaagataatatgatgaagagtggtccatttgatggttttctgggcttctcccaggtggggtttgtttgaatcatcttacgaaacatcttaaaatgttcaattcttgtgctcaaaattgatctgaataggttttttaatctcccttttacctgatgaatctcagggagcacttttatctgctgcattgcctggaatgcagagagatggattagcccttaccagggttccaagaatcaagtttctgataataatatcaggagccaagtttggagggccaaagttcgtacatcataagctcacttccaatgcatattcttcacctcttgaatgcccttctctccatatcataggtattttaaagctttaaatagcagtctatttaattatagctgaaacacagcaaatataaaccaatgttctggattaaatttcgttcatatttcggtagaagcaatcttcaggcaatgcaaaaagactggactaaaacatggattcaactttaatttgcaggagaaa

SEQ ID NO: 4054 - DNA, 609 bp, Gossypium hirsutum
  misc_feature (51)..(54): n is a, c, g, or t
  misc_feature (507)..(507): n is a, c, g, or t
  misc_feature (510)..(511): n is a, c, g, or t
  misc_feature (543)..(547): n is a, c, g, or t
  misc_feature (550)..(553): n is a, c, g, or t
cacttactcgggattttcgatgccaagaagttgtagtccatgtacaattcnnnnaatttagtgaggttgagaagttgttcaactggaacctccccagaaatcctacaattagacagctcaagcaacctcagcttggaaagagtcgataccgattttgcccacaggtttgatcgagatgctttggataaatccacaccactcagttttagttttctgagattattcaacctttgcaaccaactcaaattcggtgcatacaagttgcctcttttcatgtatgtgtatgtagaaccttcatgaattgtcggggtagatgacaaggtagtgtaaattgatgagtagtcgtcaatgcttgaagaacacgaaagatcaagttccatcaggaaagtaaggttggaaaactgggttgtaatggaaccattgaacataacattagatagattgagatacgtgagtccggtgagatttgagaatcctaaaggaacctttgagaaactgaagttgttnaanntgaggtcaaggtatctgagatgagtaagggannnnnaannnngggggatggttccagtaagagcagtagatgggacatcagacgtgaaacaagtggaa

SEQ ID NO: 4055 - DNA, 556 bp, Gossypium hirsutum
catcatccggaaacatttcatcaattggggcaaagacaagctccgaacaggctccaacagcattctcatcgattccactacatatctgcaaaaatgataatatagataaaacgtgcctgtatatatataaggtcgggatcatattcaatcaacttcattacatattgaacattacatacagctgtaaatatgaaggcaattacaataaattgaaagcaggatataatcattatgagtaaatgcctcaaaagatgtaaggagatgcacggatgataaatgttgctcttccagaagaaattaatagtatctgcctcataaatcgtgatgaaattaattgaagatgccaattttttacctaaaaagaggtcaaaaggtcaaaatttttaccagaaatgcagttcggaggttttaagcaataaaaacattggtttcaagtttcatgctaaagatgtagaaaaccagtaaaatggcagaaagtgggttttatattttcagttcaacgagtaaatagacactgacactcaacaaggcattatgagagaagcacctgcaatag

(The sequence listing continues in the following parts.)
